United States Patent Application Publication US 2019/0348154 A1 - sequence listing, part 2

SEQ ID NO: 2701 - DNA, 1053 bp, Escherichia coli
atgaaaaagacccgtacagccaatttgcaccatctttatcatgaacccttacccgaaaacctgaagctcacgccgaaggtcgaagtggataatgttcatcaacgacagacaacggacgtctatgaacatgctttgacaattaccgcctggcagcagatttacgatcaactgcatccgggcaagtttcatggtgaatttacggaaattctactcgatgatattcaggtttttcgtgaatacactggtctggcgctgcgtcagtcgtgcctggtctggccgaactcgttctggtttggcattccggcgacgcgcggtgagcagggatttatcggttcgcaatgtctgggaagcgcagaaattgcgacgcgccctggtggaaccgagtttgaattaagtacgccggacgattacacgatccttggcgtagtgctttctgaagatgtcatcactcgtcaggctaactttttgcataatccggatcgggtattacatatgctgcgtagccagtcggcgctggaagtgaaagagcagcataaagccgcgctgtggggctttgtccaacaggcgctggcgacgttttgcgagaacccggaaaatctccatcagcctgcagtgcgaaaagtgctgggggataatttgctaatggcgatgggggcgatgctggaagaagcgcagccgatgatgacggcggaaagcatcagtcatcagagttaccgtcgattgctttcccgcgcccgtgaatatgtgctggaaaatatgtccgaaccggtgacggtgctggacttgtgtaatcaactgcatgtcagccgccgcacgctacaaaacgcgtttcacgccattttgggcattggtccgaacgcgtggctgaaacgtattcgcctgaacgccgtgcgccgcgaactcataagtccgtggtcacaaagcacaacggtaaaagacgccgccatgcagtggggattctggcatcttgggcaatttgccacggattatcagcaactgtttgccgagaagccgtcactgacgctgcatcagcggatgcgagagtgggggtga

SEQ ID NO: 2702 - DNA, 903 bp, Escherichia coli
gtgatgaaacccgacgcacaccaggttaaacagttcctgctcaaccttcaggatacgatttgtcagcagttgagcgccgtcgatggcgcagaatttgtcgaagatagctggcagcgcgaagctggcggcggcgggcgtagtcgggttttgcgtaatggtggtgttttcgaacaggcaggcgtcaacttttcacatgtccacggtgaggcgatgcctgcttccgccaccgctcatcgtccggaacttgccgggcgcagtttcgaggcgatgggcgtttcgctggtggtacatccgcataacccgtatgtccccaccagccacgcgaatgtgcgcttttttattgccgaaaaaccgggtgcagagcccgtctggtggtttggcggcggcttcgatttaacccctttctatggttttgaagaagacgccattcactggcaccgcaccgcccgtgacctgtgcctgccatttggcgaagacgtttatccgcgttacaaaaagtggtgcgacgaatacttctacctcaaacatcgtaacgaacagcgcggcattggcgggctgttctttgatgatctgaacacgccagatttcgaccactgttttgcctttatgcaggcggtaggcaaaggctacaccgacgcttatttaccaattgtagagcgacgaaaagcgatggcctacggcgagcgcgagcgcaattttcagctctaccgtcgcggtcgttatgtcgagttcaatctggtctgggatcgcggcacgctgtttggcctgcaaactggcgggcgcaccgagtcgatcctgatgtcaatgccgccactggtacgctgggagtatgattatcagccaaaagatggcagcccggaagcggctttaagtgagtttattaaggtcagggattgggtgtaa

SEQ ID NO: 2703 - DNA, 870 bp, Escherichia coli
atgagcacttttaaaccactaaaaacactcacttcgcgccgccaggtgctgaaagccggtttggctgccctgacgttgtcaggaatgtcgcaagccatcgccaaagacgaacctttaaaaaccagcaacggacacagcaagccgaaagcaaaaaaaagcggcggcagacgtgtcgttgttctcgatcctggccacggcgggattgataccggagcgatcggacgcaacggttcgaaagaaaaacatgtggtgctggcaattgccaagaatgtccgttccatattgcgtaatcatggcattgatgcgcgtttaacgcgttctggcgatacgtttatcccactgtacgatcgcgttgaaatcgcccataaacatggcgcagatctgtttatgtcaattcatgccgacggctttaccaacccgaaagctgccggtgcttcggtatttgccctctctaaccgcggggcaagtagcgcaatggcaaaatacctgtctgaacgcgaaaaccgcgccgatgaagttgccggtaaaaaagcgactgacaaggatcacctattgcagcaagtgctgtttgatctggtgcaaaccgatactattaaaaacagcctgacgctcggctcgcatattctgaaaaagattaagccggtgcataaactgcacagccgcaacaccgaacaagccgcgtttgtggtgttgaaatcgccgtcggttccgtcggtgctggtggaaacctcgtttatcaccaacccggaagaagagcggctgttaggcactgcagcgtttcgccagaaaatcgccacagcgattgccgaaggcgtgatcagttatttccactggtttgacaaccagaaagcacactcgagaaagcggtaa

SEQ ID NO: 2704 - DNA, 426 bp, Escherichia coli
atggagatacgcgtatttcgccaggaagatttcgaagaggtcatcaccctttgggagcgttgcgacttgctgcgtccgtggaacgatccggaaatggacatcgagcgtaagatgaaccatgacgtcagtttgtttctggtcgctgaggtgaacggtgaagtggtcggaacggtgatgggcggttatgacgggcatcgcgggtctgcttattatcttggcgtgcatcccgagtttcgtgggcgtgggattgctaatgcgttgcttaatcggttggagaaaaagctgattgctcgcggctgtccgaaaattcagatcaatgtgccggaagataacgacatggtgctcggaatgtatgaacgcctgggatatgaacacgccgacgtgctgagtctgggtaagcgtttgattgaagatgaagagtactga

SEQ ID NO: 2705 - DNA, 450 bp, Escherichia coli
atgaagagtactgagtttcatcctgtccattatgatgcgcacggtcgcctgcgtttacccttgctcttctggcttgtgctattgcttcaggcgcgaacctgggtgctgtttgtcattgccggagcgtcgcgcgagcagggtactgcgctgctaaatctgttttatcccgatcacgataatttctggctggggttgattcccggtattccggcggtgctggcatttttgctgagtggtcggcgggcttcatttccccgtatctggcatgtgctctattttctgttgctgttggcgcaagtggttttactttgttggcaaccgtggctgtggctgaacggtgaatccgttagcggtatcggtctggcgctggtagtggcggatatcgtggcgttaatctggctgctgaccaatcgacgtttacgcgcttgttttaatgaagaaaaagaataa

SEQ ID NO: 2706 - DNA, 576 bp, Escherichia coli
atgaaatcgctgcgtttaatgttatgcgctatgccgttgatgctgaccggctgttccacgatgtcgtcagttaactggtcggccgctaacccgtggaactggtttggatcatccaccaaagtgagcgagcagggcgtgggtgaattaacggcgtccacaccactgcaagaacaagccattgctgatgcgcttgatggcgattatcgcctgcgcagcggaatgaaaaccgcgaacggcaacgtggtgcgcttttttgaagtgatgaaaggcgacaacgtggcgatggtgattaacggcgatcaaggcacgatcagccgcattgatgtgctggatagcgatattcctgctgacaccggtgttaaaatcggtacaccgtttagtgacctttacagcaaagcatttggcaattgccaaaaggccgacagtgatgataatcgtgccgtcgaatgtaaagctgaaggcagtcaacatattagctaccagttcagcggggaatggagtggtcctgaagggttaatgccttcggacgataccctgaaaaactggaaagtcagtaaaattatctggcggcgttaa

SEQ ID NO: 2707 - DNA, 900 bp, Escherichia coli
atgtctcaggttcagagtggcattttgccagaacattgccgcgcggcgatttggatcgaagccaacgtgaaaggggaagttgacgccctgcgtgcggccagtaaaacatttgccgacaaactggcaacttttgaagcgaaattcccggacgcgcatcttggtgcggtggttgcctttggtaacaatacctggcgtgctctgagcggcggcgttggggccgaagagctgaaagattttccgggctacggtaaaggtcttgcaccgacgacccagttcgatgtgttgatccacattctttctctgcgtcacgacgtgaacttctctgtcgctcaggcggcgatggaagcctttggtgactgcattgaagtgaaagaagagatccacggcttccgttgggttgaagagcgtgacctgagcggctttgttgacggtacagaaaacccggcgggtgaagagacgcgccgcgaagtggctgttatcaaagacggcgtggatgcgggcggcagctatgtgtttgtgcagcgttgggagcacaacctgaaacagctcaatcggatgagcgttcacgatcaagagatgatgatcgggcgcaccaaagaggccaacgaagagattgacggcgacgaacgtccggaaacctctcacctgacccgcgttgatctgaaagaagatggcaaagggctgaagattgttcgtcagagcctgccgtacggcaccgccagtggcactcacggtctgtacttctgcgcctactgcgcgcgtctgcataacattgagcagcaactgctgagcatgtttggcgataccgatggtaagcgtgatgcgatgttgcgttttaccaaaccggtcactggcggctattacttcgcgccgtcgctggacaagttgatggcgctgtaa

SEQ ID NO: 2708 - DNA, 1425 bp, Escherichia coli
atggctaaagagatcagcagtgaacttctgaacaccattcttacccgggtcggcggaccgggaaatatcgccagttgtggtaactgtatgacgcgcctgcgtctgggtgtacatgacagttcattggttgatcccgatatcaaaacgctggaaggcgtgaagggcgtcattttgaccagcgatcaggtgcaggtggtttttgggccaggcaaagcgcatcgtgccgcaaaagccatgagcgagctgctgggcgaggcaccggtacaggatgccgcagaaatcgccgcccagaataaacgccagttaaaagccagacaaacttccggcgtgcaacaatttctcgccaaattcgccaccatcttcacgccgctgatccccggttttattgccgccggtctgctgctggggatagcgacgttaattgccacggtgatgcacgttacggcagatgctcagggcacgctacccgatgcgctgaattttatgaaggtgttcagcaaaggcctgttcaccttcctggtaattctggtgggctataacgcggcccaggcatttggtggcacgggcgtaaatggcgcaattatcgctgcgctctttttgcttggttataacccaactgcaaccacgggttactacgccggatttcacgatttctttggtctgcccatcgatccgcgcggcaatattatcggcgtgttgatcgccgcgtgggcctgcgcccgcatcgaatgcatggtgcgccgctttatgccggacgacctcgacatgctgttgacctcattaatcaccctgctgatcaccgctacgcttgcgtacctgatcattatgccgctgggcggctggctgtttgaaggcatgtcgtggctgtttatgcacctgaacagtaatccgctcggttgtgcggttttagccgggctgttcctgatcgccgtggtatttggcgtgcatcagggctttattcctgtttatctggcgttaatggacagccagggattcaacagcttatttcccatcctttcaatggcaggcgcaggccaggtgggcgcggcgctggcgctctactggcgggcgcaaccgcatagtgcattacgcagtcaggtccgcggggcgattattcccggtctgcttggcgttggcgaaccgctgatttacggtgtcaccctgccccgcatgaaaccgtttgttaccgcctgtttaggcggcgcggcgggcggtttgtttatcgggctgatagcctggtggggtctgccgatgggcttaaacagcgcctttgggccgtctggtctggtggcgctgccgctgatgacttccgcgcaaggcatccttccggcaatggcggtttacgctggcggtattctggtggcatgggttagtgggtttattttcaccacactctttggctgccgtaacgtcaatctggactga

SEQ ID NO: 2709 - DNA, 897 bp, Escherichia coli
atgcaacttgaaaagatgattaccgaaggctcgaacgccgcctcggctgaaattgaccgcgtatcaacgctggaaatgtgccggattatcaacgatgaagataaaaccgtaccactcgccgttgagcgcgtactgccggatatcgccgcggcgatcgatgttatccacgcccaggtaagcggcggcggccgtctgatttatctcggtgcgggaacatccggtcgtctggggattctggatgccagcgaatgtccgccgacctacggcgtgaaaccgggcctggtggttggtttgattgctggcggcgaatatgccattcagcacgcggtggaaggcgcagaagatagccgggaaggtggtgttaatgatctgaaaaatatcggcttaaccgcgcaggatgtggtggttggtattgcggccagcggacgcacgccgtatgtgattgccgggctggaatacgcgcgccaactcggctgccgtacagtgggcatttcctgtaatccggggagtgccgtttcatccaccgcagagtttgctattacgccggtagttggtgccgaagttgttaccggttcttcgcgaatgaaagcaggcacggcgcagaaactggtgctcaacatgctctccaccgggctgatgattaaatccggcaaagtgttcggcaacctgatggtcgatgtggtcgccaccaacgaaaaactgcatgtgcgccaggtcaatatcgtcaaaaacgctaccggatgtaatgccgaacaagcggaagcggcgttaattgcttgcgagcgcaactgtaaaacggccattgtgatggtactgaaaaatctcgatgccgatgaagctaaaaaatgcctggatcaacacggcggttttattcgcaaggctctggaaaaggaataa

SEQ ID NO: 2710 - DNA, 792 bp, Escherichia coli
atgggtaaactcacgggcaagacagcactgattacgggcgcattgcagggaattggcgaaggaattgccagaacttttgcgcgtcatggcgcaaacctaatcttgctggatatctcccctgagatcgaaaagctggcggacgaactgtgtggccgtggtcatcgctgtacggcggttgtcgccgatgtgcgtgacccggcgtcggtagccgcagctattaagcgcgctaaggaaaaagaagggcgcattgatattctggtgaataacgcaggcgtttgtcgtctgggcagtttccttgatatgagcgatgaagatcgcgatttccatattgatatcaatataaaaggcgtatggaacgtcacgaaggcggtgctgccggagatgattgcccgcaaagatggccggattgtgatgatgtcttcagtcactggcgatatggtggcagacccgggcgaaacggcgtacgccttaacgaaagcggcgattgttggcctgactaaatcgctggcggtggagtacgcgcagtctggtattcgcgttaacgccatctgccctggatacgttcgcacgccaatggcggaaagcattgcccgccagtcgaacccggaagatccagaatcggtgctgactgaaatggcgaaagcaatcccgatgcgtcgcctcgccgatccgctggaagtcggtgaactggcggccttcctcgcatcggatgaatccagctatttaaccggtacacagaatgtgattgatggcggcagcacactgccggagacggttagcgtcggcatctga

SEQ ID NO: 2711 - DNA, 1017 bp, Escherichia coli
atggccgttaacttactgaaaaagaactcactcgtgctggttgcttctctgctactggcgggccatgtacaggcaacggaactgctgaacagttcttatgacgtctcccgcgagctgtttgccgccctgaacccgccgtttgagcaacaatgggcaaaagataacggtggcgacaaactgacgattaaacaatctcatgccggatcatcaaaacaggcgctggcaattttgcagggtttaaaagccgacgttgtcacttataaccaggtgaccgacgtacaaatcctgcacgataaaggcaagctgatcccagcggactggcagtcgcgcctgccgaataatagctcgccgttctactccaccatgggcttcctggtgcgtaagggcaacccgaagaatatccacgactggaacgacctggtacgctctgacgtgaagctgattttcccgaacccgaaaacgtcgggtaacgcgcgttatacctaccttgcggcatggggcgcagcggacaaagccgacggtggtgataaagccaaaaccgaacagtttatgacccagttcctgaaaaacgttgaagtgttcgatactggcggtcgtggcgcgaccaccacttttgccgagcgcggcctgggcgatgtgctgatcagcttcgagtcggaagtgaacaacatccgtaaacagtatgaagcgcagggctttgaagtggtgattccgaaaaccaacattctggcggaattcccggtggcgtgggtggataaaaacgtacaggccaacggcacggaaaaagcggcaaaagcctacctgaactggctctacagcccgcaggcgcaaaccatcatcaccgactattactaccgcgtaaataacccggaagtcatgggcaaactgaaagataaattcccgcagaccgagctgttccgcgtggaagataaatttggctcctggccggaagtgatgaaaacccacttcaccagcggcggcgagttagacaagctgttagcggcggggcgtaagtaa

SEQ ID NO: 2712 - DNA, 834 bp, Escherichia coli
atgtttgcagtttcttcaagacgcgtgctgccgggctttaccttaagcctcggcaccagtctgctgtttgtgtgcctgattttgctgctgccgctctccgcgctggtgatgcaactggcccagatgagctgggcgcagtactgggaggtgatcaccaacccgcaggtggtcgcagcctataaagtgacgctgctgtcggcgtttgtggcatcgatttttaacggcgttttcggtctgctgatggcgtggatcttaacccgctatcgctttccgggtcgcacgctgcttgatgcgctgatggatttaccctttgcgctgccaacggcagtcgccggtttaacgctggcctcgctcttttccgtgaacggtttttacggtgaatggctggcgaagtttgatatcaaagtcacctatacctggctggggattgcggtggcgatggcctttaccagcattccgtttgtggtgcgcaccgtgcagccggtgctggaagagttaggcccggaatatgaagaggcggcagaaacgctcggcgcaacatgctggcagagttttcgcaaagtggtgctgccggaactatctccggcgctggtggcgggtgtggcgctgtcgtttacccgcagcctcggtgagtttggcgcggtgatttttatcgccgggaatatcgcctggaaaacagaagtgacgtcgctgatgatctttgttcgcttacaggagtttgattacccggcggcgagcgcgattgcctcggtgatcctcgcggcatcgctgctgttgctgttctcaattaacactctgcaaagtcgctttggtcggcgtgtggtaggtcattaa

SEQ ID NO: 2713 - DNA, 876 bp, Escherichia coli
atggcggaagtgacacaattgaagcgttatgacgcgcgcccgattaactggggcaaatggtttctgattggcatcgggatgctggtatcggcgttcatcctgctggtaccgatgatttatatcttcgtacaggcgttcagcaaagggctgatgccagtgttacaaaatctggccgatccggacatgctgcacgccatctggctgacggtgatgatcgcgttgattgccgtaccggtaaacctggtgttcggtattctgctggcctggctggtgacgcgctttaacttccccggacgccagctattgctgacgctgctggacattccgtttgccgtgtcgccggtggttgctggtctggtgtatctgctgttctacggctctaacggcccgctgggcggctggctggatgaacataatctgcaaattatgttctcctggccgggtatggtgctggtcaccatcttcgtgacgtgtccgtttgtggtgcgcgagctggtgccggtaatgttaagtcagggcagccaggaagacgaagcggcgattttacttggcgcgtccggctggcagatgttccgtcgcgtcacgctgccgaacatccgctgggcgctgctttacggcgtggtgctgaccaacgcccgcgcgattggcgagtttggcgcggtatcggtggtttccggctcgattcgtggcgaaaccctgtcgctgccgttacagattgaattgctggagcaggactacaacaccgtcggctcctttaccgccgccgcgctgttgacgctgatggcgattatcaccctgtttttaaagagtatgttgcagtggcgcctggaaaatcaggaaaaacgcgcgcagcaggaggaacatcatgagcattga

SEQ ID NO: 2714 - DNA, 1098 bp, Escherichia coli
atgagcattgagattgccaatattaagaagtcttttggtcgcacccaggtgctgaacgatatctcactggatattccttctggtcagatggtcgcgttgcttgggccgtccggttccgggaaaactacgctgctgcgcattatcgccgggctggagcatcaaaccagtgggcatattcgctttcacggtaccgacgtgagccgtctgcacgcgcgggaccgtaaagtcggtttcgtgttccagcattacgcgctgtttcgccatatgacggtgtttgacaatatcgcttttggcctgacggtgttgccacggcgtgaacgcccgaatgcggcggcgatcaaagcgaaagtgacaaaattgctggagatggtgcagcttgctcatctggcggatcgttatccggcgcagctttccggcggccagaaacagcgtgtggcgcttgcacgcgcgctggctgtggaaccgcaaattttgctgcttgatgaaccgtttggcgcgctggatgcgcaggtgcgtaaagagctgcgtcgctggctgcgtcaactgcatgaagaactgaaattcaccagcgtgttcgtgacccacgaccaggaagaggcgaccgaagtagccgatcgtgtagtggtgatgagtcagggcaatattgaacaagctgacgcaccggatcaggtatggcgtgaaccggcgactcgttttgtgctggagtttatgggcgaggtaaaccgcctgcagggaaccattcgcggcgggcagttccacgttggcgcacatcgctggccgctgggatacacccccgcgtatcaggggccggtggatctcttcctgcgcccgtgggaagtggatatcagccgccgtaccagcctcgattcgccgctacccgtacaggtactggaagccagcccgaaaggtcactacacccaattagtggtgcagccgctggggtggtacaacgaaccgctgacggtcgtgatgcatggcgacgatgccccgcagcgtggcgatcgtttatacgttggtctgcaacatgcgcggctgtataacggcgatgagcgtattgaaacccgcgatgaggaacttgctctcgcacaaagcgcctga

SEQ ID NO: 2715 - DNA, 912 bp, Escherichia coli
gtgagtacattagaacaaacaataggcaatacgcctctggtgaagttgcagcgaatggagccggataacggcagtgaagtgtggttaaaactggaaggcaataacccggcgggatcggtaaaagaccgtgcggcgctttcgatgattgtcgaggcggaaaagcgtggcgagattaaaccgggtgatgtgctgatcgaagccaccagtggtaacaccggcattgcgctggcaatgattgcggcgcttaaaggctatcgcatgaaattgctgatgcccgacaacatgagccaggaacgccgtgcggcgatgcgtgcctacggtgcagaactgattctggtcaccaaagaacagggcatggaaggcgcacgcgatctggcgcttgaaatggcgaatcgcggcgaaggaaagttgctcgatcagttcaataatcccgataacccttacgcccattacaccactaccgggccggaaatctggcagcaaactggcgggcgtattacccattttgtctccagcatgggaacaaccggcactatcaccggcgtgtcacgctttatgcgcgaacaatccaaaccggtgaccattgttggcctgcagccggaagaaggcagcagtattcccggcattcgccgctggcctgcggaatatctgccggggattttcaatgcttctctggtggatgaggtgctggatattcatcagcgcgatgcggaaaacaccatgcgcgaactggcagtgcgggaagggattttctgcggcgtaagctccggcggcgcggttgccggagcactgcgggtggcaaaagctaaccctggcgcggtggtggtggcgatcatctgcgatcgtggcgatcgctacctttctaccggggtgtttggggaagagcattttagccagggggcggggatttaa

SEQ ID NO: 2716 - DNA, 369 bp, Escherichia coli
gtgaagaaaatcatttgtctggtcgttacgctgctaatgacactccccgcttatgcgaagttaacggcccatgaagaagcccgtatcaacgccatgctggagggattagcacagaaaaaggatttgatatttgtgcgtaacggcgatgaacatacctgcgatgaagcggtttcccacctgcgtctgaagctcggcaatacccgtaaccgcattgacactgccgagcagtttattgataaggtagcctcgtcgtcatcgattaccgggaagccgtatatcgtgaagatgcccggtaaaagcgatgagaacgcacagccttttttacatgcgttaattgcgcagacggataaaacggtgcctgcgcaataa

SEQ ID NO: 2717 - DNA, 852 bp, Escherichia coli
atgagtagtttgttgttgtttaacgataagagcagggcactgcaggcggatatcgttgccgtgcagtcgcaggtagtgtacggcagcgtaggcaacagcattgcggtgcctgctatcaaacagaacggcctgaatgtctttgccgtgccgacggtattgctgagcaatacgccgcattatgacactttctacggtggtgcgattccggatgaatggtttagcggttatttgcgtgcgcttcaggagcgtgatgcgctgcgccaacttcgtgctgtaaccacgggctatatgggaacggcatcgcaaatcaaaatccttgccgagtggctgactgcgctacgcaaagaccatcctgacctattgatcatggtcgatccggtgattggcgatattgatagcggaatttatgtcaaacctgaccttcccgaggcgtatcgacaatatttactgccgctggcacagggaattacccccaatatctttgagctggaaatcctgaccggtaaagattgccgcgatctcgacagtgccattgctgccgcaaaaagtctgctttcagacacattaaagtgggtggtgattaccagcgcctccggcaatgaagaaaatcaggagatgcaggtggtggtggtcagtgccgacagcgtgaatgtcatttcccattcccgggttaaaactgacctgaaagggactggcgacctgttttgtgctcagcttatcagtggtttgctgaaagggaaggcgttaaccgatgcggtacaccgcgcggggttgcgcgtactggaagtgatgcgctatacccagcagcatgagagcgatgaattgattttgccgcctctggctgaagcataa

SEQ ID NO: 2718 - DNA, 510 bp, Escherichia coli
atgggtttgttcgataaactgaaatctctggtttccgacgacaagaaggataccggaactattgagatcattgctccgctctctggcgagatcgtcaatatcgaagacgtgccggatgtcgtttttgcggaaaaaatcgttggtgatggcattgctatcaaaccaacgggtaacaaaatggtcgcgcctgtagacggcaccattggtaaaatctttgaaaccaaccacgcgttctctatcgaatctgatagcggcgttgagctgttcgtccacttcggtatcgacaccgttgaactgaaaggcgaaggcttcaagcgtattgctgaagaaggtcagcgcgtgaaagttggtgatactgtcattgaatttgatctgccgctgctggaagagaaagccaagtcaaccctgactccggttgttatctccaacatggacgaaatcaaagaactgatcaaactgtccggtagcgtaaccgtgggtgaaaccccggttatccgcatcaagaagtaa

SEQ ID NO: 2719 - DNA, 1728 bp, Escherichia coli
atgatttcaggcattttagcatccccgggtatcgctttcggtaaagctctgcttctgaaagaagacgaaattgtcattgaccggaaaaaaatttctgccgaccaggttgatcaggaagttgaacgttttctgagcggtcgtgccaaggcatcagcccagctggaaacgatcaaaacgaaagctggtgaaacgttcggtgaagaaaaagaagccatctttgaagggcatattatgctgctcgaagatgaggagctggagcaggaaatcatagccctgattaaagataagcacatgacagctgacgcagctgctcatgaagttatcgaaggtcaggcttctgccctggaagagctggatgatgaatacctgaaagaacgtgcggctgacgtacgtgatatcggtaagcgcctgctgcgcaacatcctgggcctgaagattatcgacctgagcgccattcaggatgaagtcattctggttgccgctgacctgacgccgtccgaaaccgcacagctgaacctgaagaaggtgctgggtttcatcaccgacgcgggtggccgtacttcccacacctctatcatggcgcgttctctggaactgcctgctatcgtgggtaccggtagcgtcacctctcaggtgaaaaatgacgactatctgattctggatgccgtaaataatcaggtttacgtcaatccaaccaacgaagttattgataaaatgcgcgctgttcaggagcaagtggcttctgaaaaagcagagcttgctaaactgaaagatctgccagctattacgctggacggtcaccaggtagaagtgtgcgctaacattggtacggttcgtgacgttgaaggtgcagagcgtaacggcgctgaaggcgttggtctgtatcgtactgagttcctgttcatggaccgcgacacgctgcccactgaagaagaacagtttgctgcttacaaagcagtggctgaagcgtgtggctctcaggcggttatcgttcgtaccatggacatcggcggcgacaaagagctgccatacatgaacttcccgaaagaagagaacccgttcctcggctggcgcgctatccgtatcgcgatggatcgtaaagagatcctgcgcgatcagctccgcgctatcctgcgtgcctctgctttcggtaaattgcgcatcatgttcccgatgatcatctctgttgaagaagtgcgtgcactgcgcaaagagatcgaaatctacaaacaggaactgcgcgacgaaggtaaagcgtttgacgagtcaattgaaatcggcgtaatggtggaaacaccggctgccgcaacaattgcacgtcatttagccaaagaagttgatttctttagtatcggcaccaatgatttaacgcagtacactctggcagttgaccgtggtaatgatatgatttcacacctttaccagccaatgtcaccgtccgtgctgaacttgatcaagcaagttattgatgcttctcatgctgaaggcaaatggactggcatgtgtggtgagcttgctggcgatgaacgtgctacacttctgttgctggggatgggtctggacgaattctctatgagcgccatttctatcccgcgcattaagaagattatccgtaacacgaacttcgaagatgcgaaggtgttagcagagcaggctcttgctcaaccgacaacggacgagttaatgacgctggttaacaagttcattgaagaaaaaacaatctgctaa

SEQ ID NO: 2720 - DNA, 258 bp, Escherichia coli
atgttccagcaagaagttaccattaccgctccgaacggtctgcacacccgccctgctgcccagtttgtaaaagaagctaagggcttcacttctgaaattactgtgacttccaacggcaaaagcgccagcgcgaaaagcctgtttaaactgcagactctgggcctgactcaaggtaccgttgtgactatctccgcagaaggcgaagacgagcagaaagcggttgaacatctggttaaactgatggcggaactcgagtaa

SEQ ID NO: 2721 - DNA, 972 bp, Escherichia coli
atgagtaagatttttgaagataactcgctgactatcggtcacacgccgctggttcgcctgaatcgcatcggtaacggacgcattctggcgaaggtggaatctcgtaaccccagcttcagcgttaagtgccgtatcggtgccaacatgatttgggatgccgaaaagcgcggcgtgctgaaaccaggcgttgaactggttgaaccaaccagcggtaataccgggattgcactggcctatgtagctgccgctcgcggttacaaacttaccctgaccatgccagaaaccatgagtattgaacgccgcaagctgctgaaagcgttaggtgcaaacctggtgctgaccgaaggtgctaaaggcatgaaaggcgcaatccaaaaagcagaagaaattgtcgccagcaatccagagaaatacctgctgctgcaacaattcagcaatccggcaaaccctgaaattcacgaaaaaaccaccggtccggagatctgggaagataccgacggtcaggttgatgtatttattgctggcgttgggactggcggtacgctgactggcgtcagccgctacattaaaggcaccaaaggcaagaccgatcttatctctgtcgccgttgagccaaccgattctccagttatcgcccaggcgctggcaggtgaagagattaaacctggtccgcataaaattcagggtattggcgctggttttatcccggctaaccttgatctcaagctagtcgacaaagtcattggcatcaccaatgaagaagccatttctaccgcacgtcgtctgatggaagaagaaggtattcttgctggtatctcttctggagcagctgttgctgcggcgttgaaactacaagaagatgaaagctttaccaataagaatattgtggttattctgccgtcatcgggtgagcgttatttaagcactgcattgtttgccgatcttttcactgagaaagaactgcaacagtaa

SEQ ID NO: 2722 - DNA, 762 bp, Escherichia coli
atggtttcatcattcacatctgccccacgcagcggtttttactattttgcgcaaggctggaagctcgtctcgcaacctgggattcgacgtttcgttattttaccgctgctggtcaatattttgttgatggggggcgcattctggtggctctttacgcaactcgatgtctggatcccgactctcatgagttatgttccggactggttacaatggctgagctatctgttgtggcccctggctgtcatctctgtgctgttagtgtttggctatttcttctcaacgattgctaactggattgctgctccgttcaacggtttattggctgaacaactggaagcaagactgactggcgctacaccgccagataccggaattttcggtatcatgaaagatgtgccgcgaatcatgaaacgcgaatggcaaaaatttgcctggtatctgccgcgcgcaattgtattgctaattctttacttcatccctggcattgggcaaaccgtcgcgccggtactgtggttcctgtttagcgcctggatgttagccatccagtattgtgattaccccttcgataaccacaaagtgccgtttaaagagatgcgcaccgccctgcgcacacgcaaaatcaccaatatgcagtttggtgctttaaccagcctgtttacgatgatcccgctgcttaatctgttcattatgcccattgccgtttgtggcgcgacggcgatgtgggtcgattgctatcgcgataaacacgccatgtggcggtaa

SEQ ID NO: 2723 - DNA, 999 bp, Escherichia coli
atgatgcaggatttgcgtctgatattaatcattgttggcgcgatcgccataatcgctttactggtacatggtttctggaccagccgtaaagaacgatcttctatgttccgcgatcggccattaaaacgaatgaagtcaaaacgtgacgacgattcttatgacgaggatgtcgaagatgatgagggcgttggtgaggttcgtgttcaccgcgtgaatcatgccccggctaacgcccaggagcatgaggctgctcgtccgtcgccgcaacaccagtaccaaccgccttatgcgtctgcgcagccgcgtcaaccggtccagcagccgcctgaagcgcaggtaccgccgcaacatgctccgcgtccaacgcagccggtgcagcaacccgtgcagcagcctgcctatcagccgcagcctgaacagccgttgcagcagccagtttcgccacaggtcgcgtcagcgccgcagccagtgcattcagcaccgcaaccggcacaacaggcttttcagcctgcagaacccgtagcggcaccacagcctgagcctgtagcggaaccggctccagttatggataaaccgaagcgcaaagaggcggtgattatcatgaacgtcgcggcgcatcacggtagcgagttaaacggtgaactgcttcttaacagcattcaacaagcgggcttcatttttggcgatatgaacatttaccatcgtcatcttagcccggatggcagcggcccggcgttattcagcctggcgaatatggtgaaaccgggaacctttgatcctgaaatgaaggatttcactactccgggtgtcactatctttatgcaggtaccgtcttacggtgacgagctgcagaactttaagctgatgctgcaatctgcgcagcatattgccgatgaagtgggcggtgtagtgcttgacgatcagcgccgtatgatgactccgcagaaattgcgcgagtaccaggacatcatccgcgaagtcaaagacgccaacgcctga

SEQ ID NO: 2724 - DNA, 2016 bp, Escherichia coli
atggaatcaatcgaacaacaactgacagaactgcgaacgacgcttcgccatcatgaatatctttatcatgtgatggatgcgccggaaattcccgacgctgaatacgacaggctgatgcgcgaactgcgcgagctggaaaccaaacatccagaactgattacgcctgattcgcctacccaacgtgtaggtgcagcgccgctggcggctttcagccagatccgccatgaagtgccaatgctgtcgctggataacgtttttgatgaagaaagctttcttgctttcaacaaacgtgtgcaggaccgtctgaaaagcaacgagaaagtcacctggtgctgtgagctgaagctggatggtcttgccgtcagtattctgtatgaaaatggcgttttagtcagtgccgcgacgcgtggcgatggcaccaccggggaagatatcacgtctaatgtgcgtactattcgcgccattccgctgaagctacacggtgagaatatcccggcgcgtctggaagtgcgtggtgaagtgttcctgccgcaggcggggttcgaaaagattaacgaagatgcgcgacgcacgggcgggaaagtgtttgctaacccacgtaatgcggcagctggttcactgcgtcagcttgatccgcgtattacagcgaagcgaccgctcactttcttctgctatggcgtcggtgttctggaaggtggcgagctgccggatactcatcttggccgtttactgcaatttaaaaagtggggtttgccggtcagcgatcgggtaacgctttgtgaatcggcggaagaagtgctggcgttctaccacaaagtagaagaagaccgtccgacgctgggctttgatatcgacggcgtggtgattaaggtcaactcactggcacagcaggagcagcttggctttgtcgcgcgtgccccgcgctgggcggtagcgtttaaattcccggcgcaggaacagatgacctttgtgcgtgacgtcgagtttcaggttgggcgtactggcgcgattacgcctgttgcgcgtctggaacctgtccatgttgctggcgtgttggtgagtaacgctacactgcataatgctgacgaaatcgaacgtcttggtttacgcattggcgataaagtggtgattcgccgcgcaggcgatgtgatcccgcaggtggttaacgtcgtgctttctgaacgcccggaagatacccgtgaggttgtattcccgacgcattgtccggtatgtggttctgacgttgagcgtgtggaaggtgaagcggttgcccgctgtaccggtggcctgatttgcggtgcgcagcgtaaagagtctctgaaacactttgtttcccgccgtgcgatggatgttgacggaatgggcgacaaaatcatcgatcaactggttgaaaaagaatatgtccacactccggcggatctgttcaaactcactgcaggcaaactgaccggactggagcgtatggggccgaaatcggcacaaaacgtggttaacgcgctggaaaaagcgaaagaaaccacctttgcccgcttcctctatgcacttggcgtccgtgaagtcggcgaggctaccgcagcaggtctggcggcatatttcggcacgctggaagcgctggaagccgcgtcgattgaagagctgcaaaaggtgcctgatgttggaattgtcgttgcctcccacgttcacaacttctttgccgaagaaagcaaccgcaatgtcatcagcgagctgttggcggaaggtgttcactggcctgagccgatcgttatcaatgcggaagagattgacagtccgtttgctggtaaaaccgtggtgcttacgggcagcttaagccagatgtcgcgtgatgacgctaaagctcgactggtcgaactgggggcgaaagtcgcgggcagcgtgtcgaagaaaaccgatctggtgatagcgggtgaagctgcaggatctaaactggcgaaggcgcaggaactgggcattgaagtcatcgacgaaacggaaatgctgcgtttgctgggtagctga

SEQ ID NO: 2725 - DNA, 219 bp, Escherichia coli
atggaaaaagagcagctgattgaaatagccaatacgataatgccgtttggcaagtacaaagggcgtcgcttaatcgacctgccggaggagtatctgctgtggtttgcccgcaaagatgagttcccggcagggaagctcggtgagctaatgcaaatcacgctgctgattaaaatcgaggggctgacgcaactggtccagcccctgaagcgtccgctttaa

SEQ ID NO: 2726 - DNA, 999 bp, Escherichia coli
atgaaactttttcgtatcctcgatcctttcaccttaaccctgatcacggtggtgttgctggcctctttctttccggccagaggcgatttcgtccccttctttgaaaatctgaccactgcagcgattgctctgctgttctttatgcacggcgcgaagttgtcgcgtgaggcgattattgctggcggtggtcactggcgactgcatttgtgggtaatgtgcagcaccttcgtgctgtttccgattctgggcgtgctgtttgcctggtggaaaccggtaaatgtcgacccgatgctctactccggttttctctacttgtgcattctccccgcgaccgtgcagtctgcaatcgccttcacgtcaatggcgggcggtaacgtcgcggcggcggtttgttctgcgtcagcatccagcctgctggggattttcctttcaccattgctggttggtctggtgatgaatgttcacggtgcagggggcagccttgagcaggtcggtaaaattatgctgcaactgttgctgccatttgtgttggggcatctttcccggccttggattggtgactgggtgtcgcgtaataaaaaatggattgcgaaaactgaccagacgtccattctgttggtggtttatacggcattcagcgaagccgtcgttaacggtatctggcacaaagttggctggggatcattgctgtttatcgtggtggtcagttgcgttcttctggctatcgtgattgtagttaacgtctttatggcacgccgactgggcttcaataaggcagatgaaattactatcgtcttttgtggttcgaaaaagagtctggcaaatggcatcccgatggcaaacattctgttccccacatcggtgattggtatgatggtgctgcccctgatgattttccatcagatccaattgatggtctgtgcggtgctggcgcgtcgatacaaacgccagaccgaacagttacaggcgcagcaggaaagcagcgccgataaagcttaa

SEQ ID NO: 2727 - DNA, 927 bp, Escherichia coli
atgaattattctttaaagcaattaaaggttttcgtcacagtagcgcaggagaaaagttttagtcgtgcaggagagcgtatcggcctgagccagtcggcagtgagtcacagtgtgaaggagctggaaaatcatactggtgttcgcctgctggacagaaccacgcgtgaagtggtgcttacagatgcagggcagcagttggctttgcgtcttgagcgactgctggatgaacttaacagcacgttgcgcgataccgggcgtatggggcaacaactgagcggaaaagttcgggtcgctgccagccagaccatttccgcgcatcttattccgcaatgcattgctgaaagccatcgctgctatccagatattcagtttgtcctgcacgatcgtccgcagcagtgggtgatggaaagtattcgccagggagatgtcgattttggcatcgtcatcgatccaggcccagtgggcgatctgcaatgtgaagcgattctttccgagcctttctttctgctttgccatcgcgatagcgctttggccgtggaagattatgtaccctggcaggcattacagggagcgaaattggtgttgcaggattacgcgtcaggcagccgaccgctgattgacgcagcgctggcgcgcaacggtattcaggcgaatattgtgcaggagattggtcatccggcgacgctgttcccgatggtagccgcaggcatcggcatcagtattcttcccgcactggcgctaccattgcctgaaggtagcccactggtggtaaagcgcattacgccagtggttgaacgccagttgatgctggtgcgcaggaagaaccgttcactttccaccgccgctgaagcgttatgggacgtagtacgagaccagggcaatgcgctaatggctgggcgggaaggggatccgttgtatcagatatag

SEQ ID NO: 2728 - DNA, 765 bp, Escherichia coli
atgaaaaaacatctttttactctgacactctcttctgtattggcgataccagcagtatcccatgcagaatttaaaggcggttttgctgatataggtattcattatcttgactggactagcagaaccactgagaaatcgtcgaccaaatcacacaaagatgattttggatatctggaactggaaggcggcgctaactttagttggggagaaatgtacgggttcttcgactgggaaaacttttataatgatcgtcatgataaaccgggtagcgagcagcgttatacatttaaaaataccaaccgtatttacctgggtgacaccggatttaatctctacttgcatgcgtatggcacctacggttctgcgaatcgtgtgaatttccatgacgatatgttcctttacgggatcggctacaatttcaccggcagcggttggtggttcaaaccgttctttgcaaaacgctatacagaccaaacctattataccggcgataacggttatgtcgccggttgggttgcaggttacagctttatgctgggcagtgagaaattcaccctcaccaactggaacgagtacgagtttgatcgtgatgccacctacgcggcaggtaatggcggcaaagaaggtctgaacggtgccgtcgcactttggtggaatgcaacttcacacatcaccacagggattcagtatcgttatgcggatgacaaactgggcgaagatttttaccaggatgcgataatctactccatcaaatttaatttctga

SEQ ID NO: 2729 - DNA, 834 bp, Escherichia coli
atgtatcaggctcagttttctcataacccactgtattgcgtagatattatcaagacttataaacctgatttcacgccacgagtggcctttattttaggttccgggctgggcgcgctggccgatcagattgagaacgcggtcgcaatttcctacgaaaagctgcctgggttcccggtaagtaccgtacacggtcatgcgggtgagctggtgctggggtatctccagggggtgccagtggcgtgcatgaaaggtcgcggacatttctacgaaggtcgtgggatgaccatcatgacggatgcaatccgtacctttaagttgctgggctgcgagttgctgttctgcaccaatgcggctggctcactgcgtcctgaagtgggggccggcagtctggtcgcattgaaagatcacatcaacaccatgccgggaacgccgatggtgggtcttaatgatgaacgttttggtgagcgcttcttctcgctggcgaatgcctacgatgcggaataccgcgcactgttacaaaaagtggcgaaagaagaggggttccctctgacggagggcgtgttcgtctcgtatccggggccgaatttcgagactgcggcggaaattcgcatgatgcaaattattggtggggatgttgttggtatgtctgtggtgcctgaggttatttcagctcgccattgcgaacttaaagtcgttgcggtctctgcgattaccaacatggcggaaggtctgagtgacgtgaagctttctcatgcccaaacgctggcagcagcggaactctcaaagcaaaactttattaatcttatttgcggctttctgcgcaaaattgcctga

SEQ ID NO: 2730 - DNA, 1257 bp, Escherichia coli
atgagcatcgctttgcgcttaaaggtaatgtcctttttgcaatattttatctgggggagctggctggttaccctcggttcttacatgattaatacccttcatttcaccggcgctaatgttggcatggtttacagttccaaagggatcgccgcgattattatgccgggtataatggggatcatcgcagacaaatggctgcgtgcagaacgtgcatacatgctgtgtcacctggtgtgtgcgggcgtacttttttatgcggcatccgtaactgatccggatatgatgttttgggtgatgttagtcaatgcgatggcgtttatgccgactattgcgttatcgaacagcgtctcttattcctgtcttgcccaggcagggcttgacccggtgaccgctttcccgcccattcgcgtttttggtacggtggggttcattgtcgccatgtgggcagtaagcctgctgcatctggaattgagtagtctgcaactgtatatcgcgtccggtgcgtcattgctgctgtcggcttatgcgctgactttgccgaagattccggttgcggagaaaaaagcgactacatcgcttgccagcaagctgggtctggatgccttcgtgctgtttaaaaatccacgcatggctatctttttcctcttcgccatgatgctgggtgcggtgctgcaaattaccaacgtttttggcaacccgttcctgcatgatttcgcccgtaatcctgagtttgctgatagcttcgtggtgaaatatccgtccattttactgtcagtttcacagatggctgaagtcggtttcattctgacgataccgttctttttgaagcgtttcggtattaaaaccgtcatgctgatgagtatggtggcgtggacgctgcgctttggcttctttgcctatggcgatccatcaccaaccgggtttattttgctgttgctgtcgatgattgtttacggttgtgcattcgatttcttcaatatttctggttcggtctttgtcgaacaggaagttgattccagcattcgtgccagcgcccagggcctttttatgacgatggtaaatggcgtcggcgcatgggttggctcgattctgagcggtatggcagtggattacttctcggtggatggcgtaaaagattggcataccatttggctgatgtttgcagggtatgctcttttcctcgcagtgatatttttctttgggtttaaatataaccatgaccctgaaaagataacgcatcgttcagttacacattaa

SEQ ID NO: 2731 - DNA, 885 bp, Escherichia coli
atggaacgcgtatacagaacagatcttaagttgctccgttattttcttgccgtagcggaagagttgcattttggtcgcgcagcagcgcgtttaaatatgtctcagcctccgctcagcattcatattaaagagctggaaaatcaactcggcacgcagctttttattcgccattcgcgcagcgtcgtactgacacacgcgggcaaaatcttgatggaagaatcgcgtcgattgctggtgaatgcaaataatgtattggctcgggttgaacaaataggtcggggagaagcagggcggattgaactcggggttgtgggaacggcaatgtggggacggatgcgcccggttatgcggcgattccttagagaaaatcctaacgttgaagttctgtttcgcgaaaagatgcccgcgatgcaaatggccctgctggaacgccgcgaacttgatgccgggatctggcgaatggcgacagaaccaccggcaggttttaccagcttacggttgcatgaatcggcgtttctggtggcgatgcctgaagagcatcatctctcatcattttccaccgtcccgctggaagcgctacgtgacgagtatttcgttacaatgccgcccgtgtacactgactgggattttttgcagcgggtttgccagcaggtgggattttcaccggttgttattcgcgaagttaatgaaccgcaaacggtactcgccatggtcagtatgggtattggtatcacattgatagcggacagctacgcgcagatgaactggcccggtgtcatattccgtccgctcaaagaacgcatcccggcagacttatatattgtttatgaaacgcagcaggtgacgcccgcgctggttaaactgctggcggcgttggcgcagtag

SEQ ID NO: 2732 - DNA, 399 bp, Escherichia coli
atgaaaaagctgcaaattgcggtaggtattattcgcaacgagaacaatgaaatttttataacgcgtcgcgcagcagatgcgcacatggcgaataaactggagtttcccggcggtaaagttgaaatgggcgaaacgccggaacaggcggtggtgcgtgaacttcaggaagaagtcgggattaccccacaacatttttcgctatttgaaaaactggaatatgaattcccggacaggcatataactctgtggttctggctggtcgaaagctgggaaggggagccgtggggtaaagaagggcaacccggtgagtggatgtcgctggtcggtcttaatgccgatgattttccgccagccaatgaaccggtaattgcgaaacttaagcgtgtgtatgccggataa

SEQ ID NO: 2733 - DNA, 2706 bp, Escherichia coli
atgctaatcaaattattaactaaagttttcggtagtcgtaacgatcgcaccctgcgccggatgcgcaaagtggtcaacatcatcaatgccatggaaccggagatggaaaaactctccgacgaagaactgaaagggaaaaccgcagagtttcgtgcgcgtctggaaaaaggcgaagtgctggaaaatctgatcccggaagctttcgccgtggtgcgtgaggcaagtaagcgcgtctttggcatgcgtcacttcgacgttcagttactcggcggtatggttcttaacgaacgctgcatcgccgaaatgcgtaccggtgaaggtaaaaccctgaccgcaacgctgcctgcttacctgaacgcactaaccggtaaaggcgtgcacgtagttaccgtcaacgactacctggcgcaacgtgacgccgaaaacaaccgtccgctgtttgaattccttggcctgactgtcggtatcaacctgccgggcatgccagcaccggcaaagcgtgaagcctacgctgctgacatcacttacggtacgaacaacgaatacggctttgactacctgcgtgacaacatggcgttcagtcctgaagaacgtgtacagcgtaaactgcactatgcgctggtggacgaagtggactccatcctgatcgatgaagcgcgtacaccgctgatcatttccggcccggcagaagacagctcggaaatgtataaacgcgtgaataaaattattccgcacctgatccgtcaggaaaaagaagactccgaaaccttccagggcgaaggccacttctcggtggatgaaaaatctcgccaggtgaacctgaccgaacgtggtctggtcctgattgaagaactgctggttaaagaaggcatcatggatgaaggagagtctctgtactctccggccaacatcatgctgatgcaccacgtaacggcggcgctgcgcgctcatgcgctgtttacccgtgacgtcgactacatcgttaaagatggtgaagttatcatcgttgacgaacacaccggtcgtaccatgcagggccgtcgctggtccgatggtctgcaccaggctgtggaagcgaaagaaggtgtgcagatccagaacgaaaaccaaacgctggcttcgatcaccttccagaactacttccgtctgtatgaaaaactggcggggatgactggtactgctgataccgaagctttcgaattcagctccatctataagctggatactgtcgttgttccgaccaaccgcccaatgattcgtaaagatctgccggacctggtctacatgactgaagcggaaaaaattcaggcgatcattgaagatatcaaagaacgtactgcgaaaggccagccggtgctggtgggtacaatctccatcgaaaaatcggagctggtgtcaaatgaactgaccaaagccggtattaagcacaacgtcctgaacgccaaattccatgccaacgaagcggcgattgttgctcaggcaggttacccggctgcggtgactatcgcgaccaacatggcgggtcgtggtaccgatattgtgctcggtggtagctggcaggcagaagttgccgcgctggaaaatccgactgcagagcaaattgaaaaaattaaagccgactggcaggtacgtcacgatgcggtactggcagcaggtggcctgcatatcatcggtactgaacgtcacgaatcccgtcgtatcgataaccagctgcgcggtcgttctggtcgtcagggggatgctggttcttcccgtttctacctgtcgatggaagatgcgctgatgcgtatttttgcttccgaccgagtatccggcatgatgcgtaaactgggtatgaagccaggcgaagccattgagcacccgtgggtgaccaaagcgattgccaacgcccagcgtaaagttgaaagccgtaacttcgacattcgtaagcaactgctggaatatgatgacgtggctaacgatcagcgtcgcgccatttactcccagcgtaacgaactgctggatgtcagcgatgtgagcgaaaccatcaacagcattcgtgaagatgtgttcaaagcgaccattgatgcctacattccgccacagtcgctggaagaaatgtgggatattccggggctgcaggaacgtctgaagaacgatttcgacctcgatttaccaattgccgagtggctggataaagaaccagaactgcatgaagagacgctgcgtgagcgcattctggcgcagtccatcgaagtgtatcagcgtaaagaagaagtggttggtgctgagatgatgcgtcacttcgagaaaggcgtcatgctgcaaacgcttgactctctgtggaaagagcacctggctgcgatggactatctgcgtcagggtatccacctgcgtggctatgcacagaaagatccgaagcaggaatacaaacgtgaatcgttctccatgtttgcagcgatgctggagtcgttaaaatatgaagttatcagcacgctgagcaaagttcaggtacgtatgcctgaagaggttgaggagctggaacaacagcgtcgtatggaagccgagcgtttagcgcaaatgcagcagcttagccatcaggatgacgactctgctgccgcagctgcactggcggcgcaaaccggtgaacgcaaagtaggacgtaacgatccttgcccgtgtggttctggtaaaaaatacaagcagtgccatggccgcctgcaataa

SEQ ID NO: 2734 - DNA, 588 bp, Escherichia coli
gtgctgtggacttcaggctttaatgataagatttgtgcgctaaatacgtttgaatacgatcgggatggcaataacgtgagtggaatactgacgcgctggcgacagtttggtaaacgctacttctggccgcatctcttattagggatggtcgcggcgagtttaggtttgcctgcactcagcaatgccgccgaaccaaacgcgcccgcaaaagcgacaacccgcaaccacgagccttcagccaaagttaactttggtcaattggccttgctggaagccaacacgcgccgcccgaattcgaactattccgttgattactggcatcaacatgccattcgcacggtaatccgccatctttccttcgcaatggcaccgcaaacgctgcccgttgctgaagaatctttgcctcttcaggcgcaacatcttgcattactggatacgctcagcgcgcttctgacccaggaaggcacgccgtctgaaaagggttatcgcattgattatgcgcattttaccccacaagcaaaattcagcacgcccgtctggataagccaggcgcaaggcatccgtgctggccctcaacgcctcagctaa

SEQ ID NO: 2735 - DNA, 918 bp, Escherichia coli
atgatcaaacaaaggacacttaaacgtatcgttcaggcgacgggtgtcggtttacataccggcaagaaagtcaccctgacgttacgccctgcgccggccaacaccggggtcatctatcgtcgcaccgacttgaatccaccggtagatttcccggccgatgccaaatctgtgcgtgataccatgctctgtacgtgtctggtcaacgagcatgatgtgcggatttcaaccgtagagcacctcaatgctgctctcgcgggcctgggcatcgataacattgttatcgaagttaacgcgccggaaatcccgatcatggacggcagcgccgctccgtttgtatacctgctgcttgacgccggtatcgacgagttgaactgcgccaagaaatttgttcgcattaaagagactgttcgtgtcgaagatggtgataagtgggctgaatttaagccgtacaatggtttttctctggatttcaccatcgattttaaccatccggctattgattccagcaaccagcgctatgcgatgaacttctccgctgatgcgtttatgcgccagatcagccgtgcgcgtacgttcggtttcatgcgtgatatcgaatatctgcagtcccgtggtttgtgcctgggcggcagcttcgattgtgccatcgttgttgacgattatcgcgtactgaacgaagatggcctgcgttttgaagacgaatttgtgcgtcacaaaatgctcgatgcgatcggtgacttgttcatgtgtggtcacaatattattggtgcatttaccgcttataaatctggtcatgcactgaataacaaactgctgcaggctgtccttgcaaaacaggaagcctgggaatatgtgaccttccaggacgacgcagaactgccgttggccttcaaagcgccttcagccgtactggcataa

SEQ ID NO: 2736 - DNA, 1152 bp, Escherichia coli
atgtttgaaccaatggaacttaccaatgacgcggtgattaaagtcatcggcgtcggcggcggcggcggtaatgctgttgaacacatggtgcgtgagcgcattgaaggtgttgaattcttcgcggtaaataccgatgcacaagcgctgcgtaaaacagcggttggacagacgattcaaatcggtagcggtatcaccaaaggactgggcgctggcgctaatccagaagttggccgcaatgcggctgatgaggatcgcgatgcactgcgtgcggcgctggaaggtgcagacatggtctttattgctgcgggtatgggtggtggtaccggtacaggtgcagcaccagtcgtcgctgaagtggcaaaagatttgggtatcctgaccgttgctgtcgtcactaagcctttcaactttgaaggcaagaagcgtatggcattcgcggagcaggggatcactgaactgtccaagcatgtggactctctgatcactatcccgaacgacaaactgctgaaagttctgggccgaggtatctccctgctggatgcgtttggcgcagcgaacgatgtactgaaaggcgctgtgcaaggtatcgccgaactgattactcgtccgggtttgatgaacgtggactttgcagacgtacgcaccgtaatgtctgaaatgggctacgcaatgatgggttctggtgtggcgagcggtgaagatcgtgcggaagaagctgctgaaatggctatctcttctccgctgctggaagatatcgacctgtctggcgcacgcggcgtgttggttaacatcacagcgggcttcgacctgcgtctggatgagttcgaaacggtaggtaacaccatccgtgcatttgcttccgacaacgcgaccgtggttatcggtacttctcttgacccggatatgaatgacgagctgcgcgtaactgttgttgcgacaggtatcggcatggacaaacgtcctgaaatcactctggtgaccaataagcaggttcagcagccagtgatggatcgctaccagcagcacggtatggctccgctgacccaggagcagaagccggttgctaaagtcgtgaatgacaatgcgccgcaaactgcgaaagagccggattatctggatatcccagcattcctgcgtaagcaagctgattaa

SEQ ID NO: 2737 - DNA, 1263 bp, Escherichia coli
atgatcaaggcgacggacagaaaactggtagtaggactggagattggtaccgcgaaggttgccgctttagtaggggaagttctgcccgacggtatggtcaatatcattggcgtgggtagttgcccgtcgcgtggtatggataaaggcggggtgaacgacctcgaatccgtggtcaagtgcgtacaacgcgccattgaccaggcagaattgatggcagattgtcagatctcttcggtatatctggcgctttctggtaagcacatcagctgccagaatgaaattggtatggtgcctatttctgaagaagaagtgacgcaagaagatgtggaaaacgtcgtccataccgcgaaatcggtgcgtgtgcgcgatgagcatcgtgtgctgcatgtgatcccgcaagagtatgcgattgactatcaggaagggatcaagaatccggtaggactttcgggcgtgcggatgcaggcaaaagtgcacctgatcacatgtcacaacgatatggcgaaaaacatcgtcaaagcggttgaacgttgtgggctgaaagttgaccaactgatatttgccggtctggcatcaagttattcggtattgacggaagatgaacgtgaattgggtgtctgcgtcgtcgatatcggtggtggtacaatggatatcgccgtttataccggtggggcattgcgccacacgaaggtaattccttatgctggcaatgtcgtgaccagtgatatcgcttacgcctttggcacaccgccaagcgacgccgaagcgattaaagttcgccacggttgtgcgctgggctccatcgttggaaaagatgagagcgtggaagtgccgagcgtaggcggtcgtccgccgcggagtctacaacgtcagaccctggcagaggtgatcgagccgcgctataccgagctgctcaatctggtcaacgaagagatattgcagttgcaggaaaagcttcgccaacaaggggttaaacatcacctggcggcaggcattgtattaaccggtggcgcagcgcagatcgaaggtcttgcagcctgtgctcagcgcgtgtttcatacgcaagtgcgtatcggcgcgccgctgaacattaccggtttaacggattatgctcaggagccgtattattcgacggcggtgggattgcttcactatgggaaagagtcacatcttaacggtgaagctgaagtagaaaaacgtgttacagcatcagttggctcgtggatcaagcgactcaatagttggctgcgaaaagagttttaa

SEQ ID NO: 2738 - DNA, 831 bp, Escherichia coli
atgtcgcaggctgctctgaacacgcgaaatagcgaagaagaggtttcttctcgccgcaataatggaacgcgtctggcggggatccttttcctgctgaccgttttaacgacagtgttggtgagcggctgggtcgtgttgggctggatggaagatgcgcaacgcctgccgctctcaaagctggtgttgaccggtgaacgccattacacgcgtaatgacgatatccggcagtcgatcctggcattgggtgagccaggtacctttatgacccaggatgtcaacatcatccagacgcaaatagaacaacgcctgccgtggattaagcaggtgagcgtcagaaagcagtggcctgatgaattgaagattcatctggttgaatatgtgccgattgcgcggtggaatgatcaacatatggtagacgcggaaggaaacaccttcagcgtgccgccagatcgcaccagcaagcaggtgcttccaatgctgtatggcccggaaggcagcgccaatgaagtgttgcagggctatcgcgaaatggggcagatgctggcaaaggacagatttactctgaaggaagcggcgatgaccgcgcgacgttcctggcagttgacgctgaataacgatattaagctcaatcttggccggggcgatacgatgaaacgtttggctcgctttgtagaactttatccggttttacagcagcaggcgcaaaccgatggcaaacggattagctacgttgatttgcgttatgactctggagcggcagtaggctgggcgcccttgccgccagaggaatctactcagcaacaaaatcaggcacaggcagaacaacaatga

SEQ ID NO: 2739 - DNA, 921 bp, Escherichia coli
atgactgataaaatcgcggtcctgttgggcgggacctccgctgagcgggaagtttctctgaattctggcgcagcggtgttagccgggctgcgtgaaggcggtattgacgcgtatcctgtcgacccgaaagaagtcgacgtgacgcaactgaagtcgatgggttttcagaaagtgtttatcgcgctacacggtcgcggcggtgaagatggtacgctgcagggcatgctcgagctgatgggcttgccttataccggcagcggagtgatggcatctgcgctttcaatggataaactacgcagcaaacttctgtggcagggtgccggtttaccggtcgcgccgtgggtagcgttaacccgcgcagagtttgaaaaaggccttaacgataagcagttagcagaaatttcttctctgggtttgccggttatcgttaagccgagccgcgaaggttccagtgtgggaatgtcaaaagtagtagcagaaaatgctctacaagatgcattaagattggcatttcagcacgatgaagaagtattgattgaaaaatggctaagtgggccggagttcacggttgcgatactcggtgaagaaattttaccgtcaatacgtattcaaccggccggaaccttctatgattatgaggcgaagtatctctctgatgagacacagtatttctgccccgcaggtctggaagcgtcacaagaggccaatttgcaggcattagtgctaaaagcatggacgacgttaggttgcaaaggatggggacgtattgacgttatgctggacagtgatggacagttttatctgctggaagccaatacctcaccgggtatgaccagccacagtctggtgccgatggcggcacgtcaggcaggtatgagcttctcgcagttggtagtacgaattctggaactggcggactaa

SEQ ID NO: 2740 - DNA, 1476 bp, Escherichia coli
atgaatacacaacaattggcaaaactgcgttccatcgtgcccgaaatgcgtcgcgttcggcacatacattttgtcggcatcggtggtgccggtatgggcggtattgccgaagttctggccaatgaaggttatcagatcagtggttccgatttagcgccaaatccggtcacgcagcagttaatgaatcttggggcgacgatttatttcaaccatcgcccggaaaacgtacgtgatgccagcgtggtcgttgtttccagcgcgatttctgccgataacccggaaattgtcgcagctcatgaagcgcgtattccggtgatccgtcgtgccgaaatgctggctgagttaatgcgttttcgtcatggcatcgccattgccggaacgcacggcaaaacgacaaccactgcgatggtttccagcatctacgcagaagcgggactcgacccaaccttcgttaacggtgggctggtaaaagcggcgggcgttcatgcgcgtttggggcatggtcggtacctaattgccgaagcagatgagagtgatgcatcgttcctgcatctgcaaccgatggtggcgattgtcaccaatatcgaagccgaccacatggatacctaccagggcgactttgagaatttaaaacagacctttattaattttctgcacaacctgccgttttacggtcgtgcggtgatgtgcgttgatgatccggtgatccgcgaattattaccgcgtgtgggacgtcagaccacgacttacggcttcagcgaagatgccgacgtgcgtgtagaagattatcagcagattggcccgcaggggcactttacgctgctgcgcctggacaaagagccgatgcgcgtcaccctgaatgcgccaggccgtcataacgcgctgaacgccgcagctgcggttgcggttgctacggaagagggaattgacgacgaggctattttgcgtgcgctggagagcttccaggggactggtcgccgttttgatttcctcggtgaattcccgctggagcctgtgaatggtaaaagcggtacggcaatgctggtcgatgactacggccaccacccgacggaagtggacgccaccattaaagcggcgcgtgcaggctggccggataaaaacctggtaatgctgtttcagccgcaccgttttacccgtacgcgcgacctgtatgatgatttcgccaatgtgctgacgcaggttgataccctgttgatgctggaagtgtatccggctggcgaagcgccaattccgggagcggacagccgttcgctgtgtcgcacaattcgtggacgtgggaaaattgatcccattctggtgccggacccggcgcaggtagccgagatgctggcaccggtattaaccggtaacgacctgattctcgttcagggggctggtaatatcggaaaaattgcccgttctttagctgaaatcaaactgaagccgcaaactccggaggaagaacaacatgactga

SEQ ID NO: 2741 - DNA, 1068 bp, Escherichia coli
atgaatggtcaaggaaagcgattaatggtgatggcaggcggaaccggtggacatgtattcccggggctggcggttgcgcaccatctaatggctcagggttggcaagttcgctggctggggactgccgaccgtatggaagcggacttagtgccaaaacatggcatcgaaattgatttcattcgtatctctggtctgcgtggaaaaggtataaaagcactgatagctgccccgctgcgtatcttcaacgcctggcgtcaggcgcgggcgattatgaaagcgtacaaacctgacgtggtgctcggtatgggcggctacgtatcaggtccaggtggtctggccgcgtggtcgttaggtattccggttgtgcttcatgaacaaaacggtattgcgggattaaccaataaatggctggcgaagattgccaccaaagtgatgcaggcgtttccaggcgctttccctaatgcggaagtggtgggtaacccggtacgtaccgatgtgctggcgctgccgttgccgcagcaacgtttggctggacgtgaaggtccggttcgtgtgttggtagtgggtggttcccagggcgcacgcattcttaaccagacaatgccgcaggttgctgcgaaactgggtgattcagtcactatctggcatcagagcggtaaaggttcgcaacaatccgttgaacaggcgtatgccgaagcggggcaaccgcagcataaagtgacggaatttattgatgatatggcggcggcgtatgcgtgggcggatgtcgtcgtttgccgctccggtgcgttaacggtgagtgaaatcgccgcggcaggactaccggcgttgtttgtgccgtttcaacataaagaccgccagcaatactggaatgcgctaccgctggaaaaagcgggcgcagccaaaattatcgagcagccacagcttagcgtggatgctgtcgccaacaccctggccgggtggtcgcgagaaaccttattaaccatggcagaacgcgcccgcgccgcatccattccggatgccaccgagcgagtggcaaatgaagtgagccgggctgcccgggcgtaa

SEQ ID NO: 2742 - DNA, 1245 bp, Escherichia coli
atgcgtttatctctccctcgcctgaaaatgccgcgcctgccaggattcagtattctggtctggatctccacggcgctaaagggctgggtgatgggctcgcgggaaaaagataccgacagcctgatcatgtacgatcgcaccttactgtggctgaccttcggcctcgcggcgattggctttatcatggtgacctcggcgtcaatgcccatagggcaacgcttaaccaacgatccgttcttcttcgcgaagcgtgatggcgtctatctgatcctggcattcattctggcgatcattacgctgcgtctgccgatggagttctggcaacgctacagtgccacgatgctgctcggatctatcatcctgctgatgatcgtgctggtagtgggtagctctgttaaaggggcatcgcgttggatcgatctcggtttgctgcgtatccagcctgcggagctgacaaaactgtcgttgttttgctatatcgccaactatctggtgcgtaaaggcgacgaagtacgtaataacctgcgcggcttcctgaaaccgatgggcgtgattctggtgttggcagtgttactgctggcacagccagaccttggtacggtggtggtgttatttgtgactacgctggcgatgttgttcctggcgggagcgaaattgtggcagttcattgccattatcggtatgggcatttcagcggttgtgttgctgatcctcgccgaaccgtaccgtatccgccgtgttaccgcattctggaacccgtgggaagatccctttggcagcggctatcagttaacgcaatcgctgatggcgtttggtcgcggcgaactgtggggacaaggtttaggtaactcggtacaaaaactggagtatctgccagaagcgcacactgactttattttcgccattatcggcgaagaactggggtatgtcggtgtggtgctggcacttttaatggtattcttcgtcgcttttcgtgcgatgtcgattggccgcaaagcgttagaaattgaccaccgtttttccggttttctcgcctgttccattggcatctggtttagcttccaggcgctggttaacgtaggcgcggcggcggggatgttaccgaccaaaggtctgacattgccgctgatcagttacggtggttcgagcttattgattatgtcgacagccatcatgatgctgttgcgtattgattatgaaacgcgtctggagaaagcgcaggcgtttgtacgaggttcacgatga

SEQ ID NO: 2743 - DNA, 1317 bp, Escherichia coli
atggctgattaccagggtaaaaatgtcgtcattatcggcctgggcctcaccgggctttcttgcgtggactttttcctcgctcgcggtgtgacgccgcgcgttatggatacgcgtatgacaccgcctggcctggataaattacccgaagccgtagaacgccacacgggcggtctgaatgatgaatggctgatggcggcagatctgattgtcgccagtcccggtattgcactggcgcatccatccttaagcgctgccgctgatgccggaatcgaaatcgttggcgatatcgagctgttctgtcgtgaagcacaagcaccgattgtggcgattaccggttctaacggcaaaagcacggtcaccacgctagtgggtgaaatggcgaaagcggcgggggttaacgttggtgtgggtggcaatattggcctgcctgcgttgatgctgttggatgatgagtgcgaactgtacgtgctggaactgtcgagcttccagctggaaaccacctccagcttacaggcggtagcagcgaccattctgaacgtgactgaagatcatatggatcgctatccgtttggtttacaacagtatcgtgcagcaaaactgcgcatttacgaaaacgcaaaagtttgcgtggttaatgctgatgatgccttaacaatgccgattcgcggtgcggatgaacgctgcgtcagctttggcgtcaacatgggcgactatcacctgaatcatcagcagggtgaaacctggctgcgggtgaaaggcgagaaagtgctgaacgtgaaagaaatgaaactttccgggcagcataactacaccaatgcgctggcggcgctggcgctggcagatgccgcagggttaccgcgtgccagcagcctgaaagcgttaaccacattcactggtctgccgcatcgctttgaagttgtgctggagcataacggtgtgcgctgggttaacgattcaaaagcgaccaacgtcggcagtacggaagcggcgctgaatggcctgcatgtagacggcacgctgcatttgttgctgggtggcgatggtaaatcggcggactttagcccactggcgcgttacctgaatggcgataatgtacgtctgtattgtttcggtcgggacggcgcgcagctggcggcgctacgcccggaagtggcagaacaaaccgaaaccatggaacaggcgatgcgcttgctggctccgcgtgttcagccgggcgatatggttctgctctccccggcctgtgccagccttgatcaattcaagaactttgaacaacgaggcaatgagtttgcccgtctggcgaaggagttaggttga

SEQ ID NO: 2744 - DNA, 1083 bp, Escherichia coli
atgttagtttggctggccgaacatttggtcaaatattattccggctttaacgtcttttcctatctgacgtttcgcgccatcgtcagcctgctgaccgcgctgttcatctcattgtggatgggcccgcgtatgattgctcatttgcaaaaactttcctttggtcaggtggtgcgtaacgacggtcctgaatcacacttcagcaagcgcggtacaccgaccatgggcgggataatgatcctgacggcgattgtgatctccgtgctgctgtgggcttacccgtccaatccgtacgtctggtgcgtactggtggtgctggtaggttatggtgttattggctttgttgatgattatcgcaaagtggtgcgtaaagacaccaagggcctgattgcccgttggaagtatttctggatgtcggtcattgcactgggtgttgccttcgcgctgtaccttgccggcaaagacacgcccgcaacgcagctggtggttccgttctttaaagatgtgatgccgcaactggggctgttctacattctgctggcttactttgtcattgtgggtactggcaacgcggtaaacctgaccgatggtctcgacggtttggcaattatgccgaccgtatttgtcgccggtggttttgcgctggtggcgtgggcgaccggcaacatgaactttgccagctatttacacataccgtatctacgacacgccggggaactggtcattgtatgtaccgcgatagtcggggcagggctgggcttcctgtggtttaacacctatccggcgcaggtctttatgggcgatgtaggttcgctggcgttaggtggtgcgttaggtattatcgccgtactgctgcgtcaggaattcctgctggtgattatggggggcgtgttcgtggtagaaacgctttccgtcatcctgcaggtcggctcctttaaactgcgcggacaacgtattttccgcatggcaccgattcatcaccactatgaactgaaaggctggccggaaccgcgcgtcattgtgcgtttctggattatttcgctgatgctggtcctgattggtctggcaacgctgaaggtacgttaa

SEQ ID NO: 2745 - DNA, 1359 bp, Escherichia coli
atgattagcgtaacccttagccaacttaccgatattctcaacggtgaactgcaaggtgcagatattacccttgatgctgtaaccactgacacgcgaaaactgacgccgggctgcctgtttgttgccctgaaaggcgaacgtttcgatgctcatgattttgccgaccaggcgaaagctggcggcgcaggcgcactactggttagccgtccgctggatattgatctgccgcagttaatcgtcaaggatacgcgtctggcgtttggtgaactggctgcatgggttcgccagcaagttccggcgcgcgtggttgctctgacaggttcctccggcaaaacctccgttaaagagatgacggcggcaattttaagccagtgcggcaacacactttatacggcaggcaatctcaataacgacatcggtgtaccgatgacgctgttgcgcttaacgccggaatacgattacgcagttattgaacttggcgcgaaccatcagggtgaaattgcctggactgtgagtctgactcgcccggaagcggcgctggtcaacaacctggcagcggcgcatttggaaggttttggctcgcttgcgggtgtcgcgaaagcgaaaggtgaaatctttagcggcctgccggaaaacggtatcgccattatgaacgccgacaacaacgactggctgaactggcagagcgtaattggctcacgcaaagtgtggcgtttctcacctaatgccgccaacagcgatttcaccgccaccaatatccatgtaacctcgcacggtacggaatttaccctgcaaacccctacaggtagcgtcgatgttctgctgccgttgccggggcgtcacaatattgcgaatgcgctggcagccgctgcgctctccatgtccgtgggcgcaacgcttgatgctatcaaagcggggctggcaaatctgaaagctgttccaggccgtctgttccccataaaactggcagaaaaccagttgctgctcgacgactcctacaacgccaatgtcggttcaatgaccgccgctgttcaggttctggctgaaatgccgggctaccgcgtgctggtggtgggcgatatggcggaactgggcgctgaaagcgaagcctgccatgtacaggtgggcgaagcggcaaaagctgctggtattgactgcgtgttaagtgtgggtaaacaaagccatgctatcagcaccgccagcggcgttggcgaacatttttccgataaaactgcgcttatcgcgcgtcttaaatcactgattgctgagcaacaggtaattacgattttagttaagggttcacgtagtgctgccatggaagaggtagtacgcgctttacaggagaatgggacatgttag

SEQ ID NO: 2746 - DNA, 1488 bp, Escherichia coli
gtggcagatcgtaatttgcgcgaccttcttgctccgtgggtgccagacgcaccttcgcgagcactgcgagagatgacactcgacagccgtgtggctgcggcgggcgatctctttgtagctgtagtaggtcatcaggcggacgggcgtcgatatatcccgcaggcgatagcgcaaggtgtggctgccattattgcagaggcgaaagatgaggcgaccgacggtgaaatccgtgaaatgcacggcgtaccggtcatctatctcagccagctcaacgagcgtttatctgcactggcgggccgcttttaccatgaaccctctgacaatttacgtctcgtgggcgtaacgggcaccaacggcaaaaccacgactacccagctgttggcgcagtggagccaactgcttggcgaaaccagcgcggtaatgggcaccgttggtaacggcctgctggggaaagtgatcccgacagaaaatacaaccggttcggcagtcgatgttcagcatgagctggcggggctggtggatcagggcgcgactttttgcgcaatggaagtttcatcccacgggctggtacaacaccgtgtggcggcattgaaatttgcggcgtcggtctttaccaacttaagccgagatcaccttgattatcatggtgatatggaacactacgaagccgcgaaatggctgctttattctgcacatcattgcggtcaggcgattattaacgccgacgatgaagtgggccgccgctggctggcaaaactgccggacgcggttgcggtatcaatggaagatcatatcaatccgaactgtcacggacgctggttgaaagcgaccgacgtgaactatcacgacagcggtgcgaccattcgctttagctcgagttggggcgatggggaaattgaaagtcgcctgatgggcgcattcaacgtcagcaacctgctgctggcgctggcgacactgctggcactcggctatccgctggctgatttgctgaaaaccgccgcgcgtctgcaaccggtttgcggacgtatggaagtgttcactgcaccaggcaaaccgacggtggtggtggattacgcgcatacgccggatgcactggaaaaagccttacaggcggcgcgcctgcactgtgcgggcaagctgtggtgcgtctttggctgcggtggcgatcgtgataaaggcaaacgtccactgatgggcgcaattgctgaagagtttgctgacgtggcggtggtgacggacgataacccgcgtaccgaagagcctcgtgccatcatcaacgatattctggcgggaatgttagatgccggatatgccaaagtgatggaaggccgtgctgaagcggtgacttgcgccgttatgcaggctaaagagaatgatgtggtactggtcgcgggcaaaggccatgaggattaccagattgttggcaatcagcgtctggactactccgatcgcgtcacggtggcgcgtctgctgggggtgattgcatga

SEQ ID NO: 2747 - DNA, 1767 bp, Escherichia coli
atgaaagcagcggcgaaaacgcagaaaccaaaacgtcaggaagaacatgccaactttatcagttggcgttttgcgttgttatgcggctgtattctcctggcgctggcttttctgctcggacgcgtagcgtggttacaagttatctccccggatatgctggtgaaagagggcgacatgcgttctcttcgcgttcagcaagtttccacctcccgcggcatgattactgaccgttctggtcgcccgttagcggtgagcgtgccggttaaagcgatttgggctgacccgaaagaagtgcatgacgctggcggtatcagcgtcggtgatcgctggaaggcgctggctaacgcgctcaatattccgctggatcagctctcagcccgcattaacgccaacccgaaagggcgctttatttatctggcgcgtcaggtaaaccctgacatggcggactacatcaaaaaactgaaactgccggggattcatctgcgtgaagaatctcgccgttattatccatccggcgaagtgactgctcacctcatcggttttactaacgtcgatagccaagggattgagggtgtcgagaagagtttcgataaatggcttaccgggcagccgggtgagcgcattgtgcgtaaagaccgctatggtcgcgtaattgaagatatttcttctactgacagccaggcagcgcacaacctgacgctgagtattgatgaacgcctgcaggcgctggtttatcgcgaactgaacaacgcagtggcctttaacaaggctgaatctggtagcgccgtgctggtggatgtcaacaccggtgaagtgctggcgatggctaacagcccgtcatacaacccaaataatctgagcggcacgccgaaagaagcgatgcgtaaccgtaccatcaccgacgtgtttgaaccgggctcaacggttaaaccgatggtggtgatgaccgcgttgcaacgtggcgtggtgcgggaaaactcggtactcaataccgttccttatcgaattaacggccacgaaatcaaagacgtggcgcgctacagcgaattaaccctgaccggggtattacagaagtcgagtaacgtcggtgtttccaaactggcgttagcgatgccgtcctcagcgttagtagatacttactcacgttttggactgggaaaagcgaccaatttggggttggtcggagaacgcagtggcttatatcctcaaaaacaacggtggtctgacatagagagggccaccttctctttcggctacgggctaatggtaacaccgttacagttagcgcgagtctacgcaactatcggcagctacggcatttatcgcccactgtcgattaccaaagttgaccccccggttcccggtgaacgtgtcttcccggaatccattgttcgcaccgtggtgcatatgatggaaagcgtggcgctaccgggcggcggcggcgtgaaggcggcgattaaaggctatcgtatcgccattaaaaccggtaccgcgaaaaaggtcgggccggacggtcgctacatcaataaatatattgcttataccgcaggcgttgcgcctgcgagtcagccgcgcttcgcgctggttgttgttatcaacgatccgcaggcgggtaaatactacggcggcgccgtttccgcgccggtctttggtgccatcatgggcggcgtattgcgtaccatgaacatcgagccggatgcgctgacaacgggcgataaaaatgaatttgtgattaatcaaggcgagggtacaggtggcagatcgtaa

SEQ ID NO: 2748 - DNA, 366 bp, Escherichia coli
atgatcagcagagtgacagaagctctaagcaaagttaaaggatcgatgggaagccacgagcgccatgcattgcctggtgttatcggtgacgatcttttgcgatttgggaagctgccactctgcctgttcatttgcattattttgacggcggtgaccgtggtaaccacggcgcaccatacccgtttactgaccgctcagcgcgaacaactggtgctggagcgagatgctttagacattgaatggcgcaacctgatccttgaagagaatgcgctcggcgaccatagccgggtggaaaggatagccacggaaaagctgcaaatgcagcatgttgatccgtcacaagaaaatatcgtagtgcaaaaataa

SEQ ID NO: 2749 - DNA, 942 bp, Escherichia coli
atgatggaaaactataaacatactacggtgctgctggatgaagccgttaatggcctcaatatccgtcctgatggcatctacattgatgggacttttggtcgcggtggtcactcacgtctgatcctctcgcagcttggcgaagaggggcgtttgctggcgatcgatcgcgacccgcaggctatcgccgttgcgaagactattgatgatccgcgcttctccatcatccacggacctttctccgcgctgggcgaatacgttgccgagcgcgatcttatcggcaagatcgacggcattctcctcgatcttggcgtctcttcaccgcaacttgatgatgctgagcgcggcttttcctttatgcgcgatggtccgctggacatgcgtatggacccaacccgtgggcagtcagccgctgaatggctacaaaccgcagaagaagccgatatcgcctgggtattgaaaacctatggtgaagagcgttttgccaaacgcattgcccgcgccattgtcgagcgtaaccgcgaacagccgatgacccgcaccaaagaactggcggaagtcgtggctgccgcaacgccggtgaaagataagtttaaacatcccgcgacccgtacattccaggcggtgcgcatttgggtaaacagtgaactggaggagatagagcaggcgctaaaaagctcgctcaatgtgctggccccgggtgggcggctttcgatcatcagcttccactcacttgaagaccgcattgtgaaacgttttatgcgtgaaaacagccgcggtccgcaagttccggcagggttaccgatgacagaagagcagctcaaaaaactggggggccgtcagttgcgagcactaggtaagttgatgccgggcgaagaagaggtggctgagaaccctcgtgcccgtagttcagttctgcgtattgcagagaggacgaacgcatga

SEQ ID NO: 2750 - DNA, 459 bp, Escherichia coli
atgttccggggagcaacgttagtcaatctcgacagcaaagggcgcttatcagtgcctacccgttatcgggaacagctgcttgagaacgctgccggtcaaatggtttgcaccattgacattcatcacccgtgcctgctgctttaccccctgcctgaatgggaaattatcgagcaaaaattatcgcgtctgtcgagcatgaacccggttgagcgccgtgtgcagcgcctactgttaggtcatgccagcgaatgtcagatggatggcgcaggtcgattgttaatcgcgccagtactgcggcaacatgccgggctgacaaaagaagtgatgctggttggacagttcaacaagtttgagctgtgggatgaaacaacctggcatcaacaggtcaaggaagatatcgacgcagagcagttggctaccggagacttatcggagcgactgcaggacttgtctctataa

SEQ ID NO: 2751 - DNA, 1005 bp, Escherichia coli
gtgaaactggatgaaatcgctcggctggcgggagtgtcgcggaccactgcaagctatgttattaacggcaaagcgaagcaataccgtgtgagcgacaaaaccgttgaaaaagtcatggctgtggtgcgtgagcacaattaccacccgaacgccgtggcagctgggcttcgtgctggacgcacacgttctattggtcttgtgatccccgatctggagaacaccagctatacccgcatcgctaactatcttgaacgccaggcgcggcaacggggttatcaactgctgattgcctgctcggaagatcagcccgacaacgaaatgcgctgcattgagcaccttttacagcgtcaggttgatgccattattgtttcgacgtcgttgccacctgagcatcctttttatcaacgctgggctaacgacccgttcccgattgtcgcgctggaccgcgccctcgatcgtgaacacttcaccagcgtggttggtgccgatcaggatgatgccgaaatgctggcggaagagttacgtaagtttcccgccgagacggtgctttatcttggcgcgctgccggagctttctgtcagcttcctgcgtgaacaaggcttccgtactgcctggaaagatgatccgcgcgaagtgcatttcctttatgccaacagctatgagcgggaggcagctgcccagttattcgaaaaatggctggaaacgcatccgatgccgcaggcgctgttcacaacgtcgtttgcgctgttgcaaggggtgatggatgtcacgctacgtcgcgacggcaaactgccttctgacctggcaattgccacctttggcgataacgaactgctcgacttcttacagtgcccggtgctggcagtggctcaacgtcaccgcgatgtcgcagaacgtgtgctggagattgtcctggcgagcctcgatgaaccgcgtaagccaaaacctggtttaacgcgcattaaacgtaatctctatcgccgcggcgtgctcagccgtagctaa

SEQ ID NO: 2752 - DNA, 492 bp, Escherichia coli
atgcgccggatattatcagtcttactcgaaaatgaatcaggcgcgttatcccgcgtgattggccttttttcccagcgtggctacaacattgaaagcctgaccgttgcgccaaccgacgatccgacattatcgcgtatgaccatccagaccgtgggcgatgaaaaagtgcttgagcaaatcgaaaagcaattacacaagctggtcgatgtcttgcgcgtgagcgagttggggcagggcgcgcacgttgagcgggaaatcatgctggtgaaaattcaggccagcggttacgggcgtgacgaagtgaaacgtaatacggaaatattccgtgggcaaattatcgatgtcacaccctcgctttataccgttcaattagcaggcaccagcgataagcttgatgcatttttagcatcgattcgcgatgtggcgaaaattgtggaagttgctcgctctggtgtggtcggactttcgcgcggcgataaaataatgcgttga

SEQ ID NO: 2753 - DNA, 1725 bp, Escherichia coli
atggagatgttgtctggagccgagatggtcgtccgatcgcttatcgatcagggcgttaaacaagtattcggttatcctggaggcgcggtccttgatatttacgatgcattgcataccgtgggtggtatcgatcatgttttagttcgccatgagcaggcggcggtgcatatggccgatggtctggcgcgcgcgaccggggaagtcggcgtcgtgctggtaacgtcgggtccaggggcgaccaatgcaattactggcattgccaccgcttatatggattccattccattagttgtcctttccgggcaggtagcgacctcgttgataggttatgatgcctttcaggagtgcgacatggtggggatttctcgcccggtggttaaacacagttttctggttaagcaaacggaagacattccgcaggtgctgaaaaaggctttctggctagcggcaagtggtcgtcctggacccgtggtcgttgatttaccgaaagatatcctaaatccggcgaacaaattaccctatgtctggccggagtcggtcagtatgcgttcttacaatcccacgacctccgggcataaagggcaaattaagcgcgctctgcaaacgctggtggcggcaaaaaaaccggttgtctacgtaggcggtggggcaatcacggcgggctgccatctgcagttgaaagaagcggtggaggtgttgaatctgcccgttgtttcctctttgatggggctgggggcgtttccggcaacgcatcgccaggcactgggcatgttgggaatgcacggtacctacgaagccaatatgacgatgcataacgcggatgtgattttcgccgtcggggtacgttttgatgaccgaacgacgaacaatctggcaaagtactgcccaaatgccactgttctgcatatcgatattgatccaacctcaatttctaaaaccgtgactgctgatatcccgattgtgggggatgctcgccaggtcctcgaacaaatgcttgaactcctgtcgcaagaatccgcccatcaaccgctggatgagatccgcgactggtggcagcagattgaacagtggcgcgctcgtcagtgcctgaaatatgacactcacagtgaaaagattaaaccgcaggcggtgatcgagactctttggcggttgactaatggggacgcttacgtgacgtccgatgtcgggcagcaccagatgtttgctgcgctttattatccattcgacaaaccgcgtcgctggatcaactctggcggcctcggcacgatgggttttggtttacctgcggcactgggcgtcaaaatggcgttgccagaagaaaccgtggtttgcgtcactggtgacggcagtattcagatgaacatccaggaactgtctaccgcgttgcaatatgagttgcccgtactggtggtgaatctcaataaccgctatctggggatggtgaagcagtggcaggacatgatctattccggccgtcattcacaatcttatatgcagtccttaccagacttcgtccgtctggcggaagcctatggtcacgtcgggatccagatctctcatccgcaagaactggaaagcaaacttagcgaggcgctggaacaggtgcgcaataatcgcctggtgtttgttgatgttaccgtcgatggcagtgagcacgtctacccgatgcagattcgcgggggcggaatggatgaaatgtggttaagcaaaacggagagaacctga

SEQ ID NO: 2754 - DNA, 945 bp, Escherichia coli
atgccagaggtacaaacagatcatccagagacggcggagttaagcaagccacagctacgcatggtcgatctcaacttattaaccgttttcgatgccgtgatgcaggagcaaaacatcacccgtgccgctcatgctctgggaatgtcgcaacctgcggtcagtaacgctgttgcacgcctgaaggtgatgtttaatgacgagctttttgttcgttatggccgtggtattcaaccgactgctcgcgcatttcaactttttggctcagttcgtcaggcattgcaactagtacaaaatgaattgcctggttcaggttttgaacccgcgagcagtgaacgtgtatttcatctttgtgtttgcagcccgttagacagcattctgacctcgcagatttataatcacattgagcagattgcgccaaatatacatgttatgttcaagtcttcattaaatcagaacactgaacatcagctgcgttatcaggaaacggagtttgtgattagttatgaagacttccatcgccctgaatttaccagtgtgccattatttaaagatgaaatggtgttggtagccagcaaaaatcatccaacaattaaaggcccgttactgaagcatgatgtttataacggacaacacgctgcggtttcgctcgatcgtttcgcatcatttagtcaaacctggtatgacacggtagataagcaagccagtatcgcgtatcagggcatggcaatgatgagcgtacttagcgtggtgtcgcaaacgcatctggtcgctattgcgccgcgttggttggctgaagagttcgctgaatccttagagttacaggtattaccgctgccgttaaaacaaaacagcagaacctgttatctctcctggcatgaagctgccgggcgcgataaaggccatcagtggatggaagagcaattagtctcaatttgcaaacgctaa

SEQ ID NO: 2755 - DNA, 1572 bp, Escherichia coli
atgagccagcaagtcattattttcgataccacattgcgcgacggtgaacaggcgttacaggcaagcttgagtgtgaaagaaaaactgcaaattgcgctggcccttgagcgtatgggtgttgacgttatggaagtcggtttccccgtctcttcgccgggtgattttgaatcagtgcagaccatcgctcgccaggttaaaaacagccgtgtatgcgcgttagctcgctgcgtggaaaaagatattgacgtggcagccgaatccctgaaagtcgccgaagccttccgtattcatacctttattgccacttcgccaatgcacatcgccaccaagctgcgcagcacgctggacgaagtgatcgaacgcgctatctatatggtgaaacgcgcccgtaattacaccgatgatgttgaattttcttgcgaagatgccggacgcaccccaattgccgatctggcgcgagtggtcgaagcggcgattaatgccggtgccaccaccatcaacattccagacaccgtgggctacaccatgccatttgagttcgccggaatcatcagcggcctgtatgaacgcgtacccaacatcgacaaagccattatttccgtacatacccacgacgatttgggcctggcggtcggcaactcactggcggcggtacatgccggagcacggcagatagaaggcgcaatgaacgggatcggcgagcgtgccggtaactgttcccttgaagaagtcatcatggcgatcaaagttcgtaaggatattctcaacgtccacaccgccatcaatcaccaggagatatggcgcaccagccagttagttagccagatttgtaatatgccgatcccggcaaacaaagccattgttggcagcggcgcattcgcacactcctccggtatccaccaggatggtgtactgaaaaaccgcgaaaactacgaaatcatgacaccagaatctattggtctgaaccaaatccagctgaatctgacctctcgttcggggcgtgcggcggtgaaacatcgcatggatgagatgggatataaagaaagtgaatataatttagacaacctgtacgacgctttcctgaagctggcggacaaaaaaggccaggtgtttgattacgatctggaggcgctggccttcatcggtaagcagcaagaagagccggagcatttccgtctggattacttcagcgtgcagtcaggttctaacgatattgccactgccgccgtcaaactggcctgtggcgaagaagtcaaagcagaagctgccaacggtaacggtccggtcgatgccgtctaccaggcgataaaccgcatcactgactataacgtcgaactggtgaaatacagcctgaccgccaaaggccacggtaaagatgcgctgggtcaggtggatattgtcgccaactacaacggtcgccgcttccacggcgtcggcctggccaccgatattgtcgagtcctccgccaaagccatggtgcacgtactgaacaatatctggcgtgccgcagaagtcgaaaaagagttgcaacgcaaagctcaacacaacgaaaacaacaaggaaaccgtgtga

SEQ ID NO: 2756 - DNA, 1092 bp, Escherichia coli
atgtcgaagaattaccatattgccgtattgccgggggacggtattggtccggaagtgatgacccaggcgctgaaagtgctggatgccgtgcgcaaccgatttgcgatgcgtatcaccaccagccattacgatgtaggcggcgccgccattgataaccacgggcagccactgccgcctgcgacagttgaaggttgcgagcaagccgatgccgtgttgtttggctcggtaggtggccccaaatgggagcatttaccaccagaccaacaaccggaacgtggcgcactgctgcctttgcgtaaacacttcaaattattcagcaatctgcgtccggcaaaactgtatcaggggctggaagcgttctgcccactgcgtgctgacattgccgcaaacggctttgacatcctgtgtgtgcgcgaactgaccggcggcatctatttcggtcagccaaaaggccgcgaaggtagcggacaatatgaaaaagcgtttgataccgaggtgtaccaccgttttgagatcgagcgtattgcccgcatcgcatttgaatctgcccgcaagcgtcgccacaaagtcacctcaatcgacaaagccaacgtgctgcaatcctctattttatggcgggagatcgttaacgagatcgccacggaatacccggacgtcgaactgacgcatatgtacatcgacaacgccaccatgcagctgattaaagatccatcacagtttgacgtcttgctgtgctccaacctgtttggcgacattctgtctgatgagtgcgcaatgatcactggctcaatggggatgttgccttccgccagcctgaacgagcaaggttttggtctgtatgaaccggcgggcggctcggcacccgatatcgcaggtaaaaatatcgccaacccgattgcacaaattctgtcgctggcgctgctgctgcgttacagcctggatgccgatgatgcggcttccgccattgaacgcgccattaaccgcgcattagaagaaggcattcgcaccggggatttagcccgtggcgctgccgccgttagtaccgatgaaatgggcgatatcattgcccgctatgtggcagaaggggtgtaa

SEQ ID NO: 2757 - DNA, 1401 bp, Escherichia coli
atggctaagacgttatacgaaaaattattcgacgctcacgtagtgtacgaagccgaaaacgaaaccccgctgttatatatcgaccgccacctggtgcatgaagtgacctcaccgcaggcgttcgatggtctgcgcgcccacggtcgcccggtacgtcagccgggcaaaaccttcgccactatggatcacaacgtctctacccagacgaaagacattaatgcctgcggtgaaatggcgcgcatccagatgcaggagctgatcaaaaactgcaaagaatttggcgtcgagctgtatgacctgaatcacccgtatcaggggatcgtccacgtaatggggccggaacagggcgtgaccttgccggggatgaccattgtctgcggcgactcgcataccgccacccacggcgcgtttggcgcactggcctttggtatcggcacttccgaagttgaacacgtactggctacgcaaaccctgaaacagggccgggcgaagaccatgaaaattgaagtccagggcaaagccgcgccgggcattaccgcaaaagatatcgtgctggcaattattggtaaaaccggcagcgcaggcggtaccgggcatgtggtggaattttgcggcgaagcaatccgtgatttaagcatggaaggtcgtatgaccctgtgcaatatggcaatcgaaatgggcgcaaaagccggtctggttgcaccggacgaaaccacctttaactatgtcaaaggccgtctgcatgcgccgaaaggcaaagatttcgacgacgccgttgcctactggaaaactctgcaaaccgacgaaggagcaactttcgataccgttgtcactctgcaagcagaagagatttcgccgcaggtcacctggggcaccaatccaggccaggtgatttctgtgaacgacaatattcccgatccggcttcgtttgccgatccggttgaacgcgcgtcggcagaaaaagcgctggcctatatggggctgaaaccgggtattccgctgacagaagtggctatcgacaaagtgtttattggttcctgtactaactcgcgtattgaagatttacgcgcggcagcggaaatcgccaaaggccggaaagtcgcgccaggcgtacaagcgctggtggttcccggctccggtccggttaaagcccaggcggaagcggaaggtctggacaaaatttttatcgaagctggttttgaatggcgcttgccaggttgttcaatgtgtctggcgatgaacaacgaccgcctgaatccgggcgaacgttgcgcctccaccagcaaccgtaactttgaaggccgccaggggcgcggcgggcgcacgcatctggtcagcccggcaatggctgccgccgcggcagtgaccggtcattttgccgacattcgcaacattaaataa

SEQ ID NO: 2758 - DNA, 606 bp, Escherichia coli
atggcagagaaatttatcaaacacacaggcctggtggttccgttggatgccgccaatgtcgataccgatgcaatcatcccgaaacagtttttgcagaaagtgacccgtacgggttttggcgcgcatctgtttaacgactggcgttttctggatgaaaaaggccaacagccaaacccggacttcgtgctgaacttcccgcagtatcagggggcttccattttgctggcacgagaaaacttcggctgcggttcctcgcgtgagcacgcgccgtgggcattgaccgattacggttttaaggtggtgattgcgccgagttttgctgacatcttctacggcaatagctttaacaaccagctgctgccggtgaaattaagcgatgcagaagtggatgagctgtttgcgctggtgaaagccaatccggggattcattttgatgtagacctggaagcgcaagaggtgaaagcgggagagaaaacttatcgctttaccatcgatgccttccgccgccactgcatgatgaacggtctggacagcatcggcctgactctgcagcacgacgatgctattgcgtcttatgaagagaagcaaccggcgtttatgcgttag

SEQ ID NO: 2759 - DNA, 132 bp, Escherichia coli
atgcgtcagttttatcagcactattttaccgcgacagcgaagttgtgctggttgcgttggttaagcgtcccacaacgattaactatgcttgaagaactgatgcagtgggaggggagtcattctgactactga

SEQ ID NO: 2760 - DNA, 1656 bp, Escherichia coli
atgccatctgctcgtctgcaacaacagttcatccgcctgtggcaatgctgcgagggtaaatctcaggagaccacgctcaacgaactggcagcgttactgagttgctcgcgtcgtcatatgcgcaccctgctcaacaccatgcaggatcgcggctggctgacgtgggaagcggaagtcgggcgcggtaaacgttcacgcctgacattcctctataccgggctggcgcttcagcaacagcgggcggaagacctgctggagcaggatcgtatcgaccaactagtgcagttggttggcgacaaagcgactgtgcggcaaatgctggtttctcatctgggccgcagcttccgccaggggcggcacatcctgcgcgtgctctactatcgtccgttgcgtaatctgctacctggcagcgcattgcgccgttctgaaacccatatcgcccggcaaatcttcagttcgctaacgcgcataaatgaggaaaatggggaactggaagcagacatcgcccaccactggcagcaaatatcaccgcttcactggcgtttctttttgcgtccaggtgtccattttcaccatggtcgtgaactggaaatggacgatgtgatctcctctttaaaacgaatcaatacgcttccgctctattcgcatattgctgacattgtgtcgccgacgccctggacgctggatatccatctcacgcaaccggaccgctggttgccgttactgctggggcaagttccggcaatgatcctgccgcgcgaatgggaaaccctcagtaactttgccagccatcccatcggcaccggtccgtatgcggtgatccgcaacagcaccaatcaactgaaaattcaggcattcgatgacttcttcggttaccgggcattaatcgacgaagttaacgtctgggttctgccggaaattgccgacgagccagccggagggctgatgctaaaaggtccacagggcgaggaaaaagagattgaaagccgcctggaggaaggttgctactatttactgttcgacagccgcacccatcgaggggcgaatcagcaagtcagagactgggtaagctatgtgctttctccgacgaatctggtctatttcgctgaggaacagtaccagcaactgtggttcccggcttatggactgctcccccgttggcaccatgcccgcccgacacattgcgaaaaacccgcggggctggaaaaccttaccctgaccttttatcaggatcatattgaacatcgggtgattgccgggatcatgcagcagattctggcaagtcaccaggtcacgctgaaaatcaaagagatcagctacgatcagtggcatgaaggagagatcgagagcgatatctggcttaacagcgccaactttacgctgccgctggatttttcgctgttcgcgcacttgtgcgaggtgccgctgctccaacactgtattccgatcgactggcaagccgacgccgcccgctggcgcaatggcgaaatgaacctggcgaactggtgccagcaactggtcgccagcaaagcaatggtgccacttatccaccactggctgatcattcaggggcaacgtagtatgcgcggcctgcgcatgaacaccctcggctggttcgattttaaatcagcgtggtttgcaccaccggatccatga

SEQ ID NO: 2761 - DNA, 984 bp, Escherichia coli
gtgttaaaaaaatgtcttcccctgctgttgctgtgcacagcgcctgttttcgctaaacctgttctgactgtttatacctacgattcctttgccgctgactggggacctggtccggtagtcaaaaaagcctttgaagcagactgtaattgcgaactgaaactggtggcgctggaagatggcgtttcgctgctcaaccgtctacggatggaaggcaaaaacagcaaagccgatgtggtgctggggctggataacaatctgttagacgccgccagcaaaacagggctgtttgctaaaagcggtgtggcagcggaagccgttaacgttcctggcggctggaataatgacactttcgtaccgtttgattacggctatttcgccttcgtctatgacaagaacaaactgaaaaatccgccgcaaagcctgaaagaattggttgagagcgatcaaaactggcgggtgatttatgaagatccgcgtaccagtacaccaggtctgggtctgttgctatggatgcaaaaagtctatggcgataacgccccgcaagcctggcagaaactggcgaagaaaactgtcacggtcaccaaaggctggagcgaagcctacggcctgtttttaaaaggcgaaagcgatctggtactgagttacaccacctctccggcttatcacattctcgaagagaagaaagataactacgccgccacaaactttagcgaaggtcactatctgcaggtggaagttgccgcccgcaccgctgccagcaagcagccagagctggcgcaaaaattcctccagtttatggtttctccggcttttcagaatgcgatcccaaccggcaactggatgtatccggtagcaaacgtcactctgcctgcagaatttgaacaattgaccaaaccagccaccacgctagagttcacacccgccgaagtggcggcacaacgtcaggcatggattagcgaatggcaacgcgccgtcagccgttaa

SEQ ID NO: 2762 - DNA, 1611 bp, Escherichia coli
atggcaacgcgccgtcagccgttaattcccggctggttaattccaggcgtaagcgccgccacgctggtggtagcggttgcactggcggcgtttctcgccctgtggtggaacgcgccgcagggtgactgggtggcagtctggcaggacagctacctgtggcatgtggtgcgcttctccttctggcaggcgtttctctcggcgcagctctctgtcgtacccgcaatattcctcgcccgcgccctctatcgcaggcgctttcctgggcgacagatgctgttgcgtctgtgcgcaatgaccttgatcctcccggtgctggttgccgttttcggcattcttagcgtctatggtcgccagggctggctggcctcgctctggcaatcacttggtctggagtggaccttttcgccctacggcctgcaaggcattttgctggcccatgtgttttttaatctgccgatggctagccgtttattactccaggcactggaaaacattcccggcgaacaacgtcagcttgccgcccagcttgggatgcgcggctgtcacttcttccgcttcgtcgaatggccgtggttacggcgacaaatcccgccggttgccgcactaatctttatgctctgtttcgccagcttcgccaccgtgctatcgctgggcggcggtccgcaggcgaccactatcgagctggcaatttatcaggcgctgagttacgactacgatcctgcccgcgcggcaatgctggcgctgatccagatggtgtgctgcctcgggctggtgctgttgagtcagcgattgagtaaggccattgcgcctggtaccacactgctgcaaggctggcgcgacccggacgatcgtctgcatagtcgcatttgcgacacggcgttaattgtgctggcgctgctgctgttgctgccaccgttactggcggtgatcgtcgatggggtaaatcgccagttgccggaagtgctggcacaaccggtgctgtggcaggcgctgtggacctcgttgcgtattgcgctggcggcaggcgtattgtgcgtagtgctgaccatgatgctgctatggagcagtcgcgaacttcgggcgcggcagaaaatgctggcgggtcaggcgctggagatgagcgggatgttgatcctcgccatgccggggattgtgctggctacgggcttctttttactgctcaacaacactatcggcctgccacaatctgctgacggcattgtgattttcaccaatgcgttaatggcaatcccttatgcgctgaaagtactggaaaacccgatgcgcgatatcaccgcccgctacagcatgttgtgtcagtcgctgggcattgaaggctggtcacgcttaaaagtggtggagctgcgcgccctgaaacgtccactggcgcaggcgctggcctttgcttgtgtgctgtcgattggtgattttggcgtggtggcattgttcggtaacgatgatttccgtaccctgccgttttatctctaccagcaaattggctcctatcgcagccaggacggcgcggtcaccgcgttaattctgctgctgctctgttttctgctgtttaccgtgattgaaaaaataccggggcgaaatgttaaaactgactga

SEQ ID NO: 2763 - DNA, 699 bp, Escherichia coli
atgttaaaactgactgatatcacctggctttaccaccatttgccgatgcgttttagcttaacggtggaacgcggcgagcaattggcgatcctcgggccaagcggcgcgggtaaaagcaccctgctaaatttgatcgccggttttctgacgccagccagcggtttgctgactatcgacggcgtagatcacaccacaacgccgccgtcacgccgtccggtgtcgatgctgtttcaggagaacaacctattcagccatctgacggtcgcgcaaaacatcgggctggggctaaatccggggttgaaactaaatgcggcgcagcagaagaaaatgcacgcgattgcccaccagatggggattgataatttaatggcgcggttacctggcgagctttccggcggtcagcgacagcgcgtggcgttagcgcgttgtctggtacgcgaacagcccattttattgctcgatgaaccgttttccgcactcgatccggcgctacgtcaggagatgctgacgctggtgagcacgagctgccaacagcaaaaaatgacgctcttgatggtgtcgcacagtgtggaagatgcggcgcggatcgccacgcgctcggtggtggtcgccgacgggcgtatcgcctggcagggtaagaccgatgagttgttgagcggtaaggcgagtgcttcggcgctgttgggaattaaaggttaa

SEQ ID NO: 2764 - DNA, 765 bp, Escherichia coli
atgcaagcattgctggaacactttattacccaatctaccgtgtattcattgatggcggtgttattggtggcctttctggagtcgctggcgctggtcggtttgattctacccggtacggtgctgatggcggggctgggagcgctgattggtagcggtgagttaagtttctggtatgcctggctggcggggattattggctgcctgctgggcgactggatctccttctggctgggctggcgttttaaaaagccgttgcatcgctggtcatttctgaagaagaacaaagcattactcgataaaaccgaacatgcgctgcatcagcacagcatgttcaccattctggtcggtcgttttgtcggcccgacgcgtccgctggtgccaatggtggcgggaatgctggatctcccggtggcaaaatttattacgccgaatattatcggctgcttgctgtggccaccgttttacttcctgccggggattctggcgggtgcggcgatcgatattcctgccgggatgcagagcggtgagtttaaatggttgctgctggcaacagcggtgtttttgtgggttggaggctggctgtgctggcggttatggcgcagcggtaaagcgactgaccgtttgagtcattatttgtcccgcggtcgtttgttgtggctgacgccgttgatttctgccatcggcgtggtggcgctggtggtgttaattcgccacccgttgatgccggtgtatatcgatattttgcgtaaagtggttggggtttag

SEQ ID NO: 2765 - DNA, 423 bp, Escherichia coli
atgtcaaaatatatttatattttattatcatttttagttttattctttatatttttctatgcttatatctcattgatgtcaaaggaacatcactatacacagcatgaactttccccatttttcctttatacgccagagagtttgcgaaatttgccaaacatatcaaacgtagccgagtatagctattactataatgttgatgatatgcaaacaagagtgattgttacatggcgaaatatagataacatttttcttcagaaagcaaagctaatagattttttgaaaagaatgggaccgagtctacaaaacgattgtatatggttttttcatgataaaagtgattatgcaaataatttccagcgttattgcatcattgagcaccgtgattctctgcaggtggaatattttgagactatcgaatga

SEQ ID NO: 2766 - DNA, 849 bp, Escherichia coli
atgagcaaacgtaacgatattactgatggaatatttgcaacaacgaaaaagtatggattagtttataccgaagagttaggttggatcgatttggggcatgctcagggacaagatgccagaatattaaaaagaaaattagagcaagaacatttttcaacatattacgatgaatttcatgattggtattttcctgttgattatcatcaggaaatgggaattcggaaaaaaatattaggagtagatcttacatttcataccggtgtttatacgaaggttatggttcgttcatgtctttcacccactcttaaagcaagagttgccttaacgttaatgtatggaactgcgaagaggtttgaagcatggcaaaactcatttatttttaactggtatactgatagcggatttagtgcagaagatttagtctcagacttgattggtttttatcgtgtatttggaacaggccccgatccacttttattggcaaaacctttatcttacacaaaagccttacaaatatgggatacatatggagcgccagggaattttaaaaatactgagtttacgccattcttatttacaacccatcctccttttaaaaaaaatcaactaataaaaaagaagcttccagaatggttaaattatataaagccattagatgagtctttttcaacattgttatataatcaatataataatagacctgttactaattattataaagataaaaacagaataaatcatgagttgtatagttcattatcaagttcgggagctataaagttttcagaatctccctttgaaagaccgctttttcttttcttaaaccctcattatccgcacaggtcgtga

SEQ ID NO: 2767 - DNA, 846 bp, Escherichia coli
atggctgaagcgcaaaatgatcccctgctgccgggatactcgtttaacgcccatctggtggcgggtttaacgccgattgaggccaacggttatctcgatttttttatcgaccgaccgctgggaatgaaaggttatattctcaatctcaccattcgcggtcagggggtggtgaaaaatcagggacgagaatttgtctgccgaccgggtgatattttgctgttcccgcctggagagattcatcactacggtcgtcatccggaggctcacgaatggtatcaccagtgggtttactttcgtccgcgcgcctactggcatgaatggcttaactggccgtcgatatttgccaataccggtttctttcgcccggatgaagcgcaccagccgcatttcagcgacctgtttgggcaaatcattaatgccggacaaggggaagggcgctattcggaattgctggcgataaatctgcttgagcaattgttactgcggcgcatggaagcgattaacgagtcgctccatccaccgatggataatcgggtacgcgaggcttgtcagtacatcagcgatcacctggcagacagtaattttgatatcgccagcgtcgcacagcatgtctgcctgtcgccgtcgcgtctgtcgcatttgttccgccagcagttagggattagcgtattaagctggcgcgaggaccagcgcatcagtcaggcgaagctgcttttgagcaccacccggatgcctatcgccaccgtcggtcgcaatgtcggttttgatgatcaactctatttctcgcgagtatttaaaaaatgcaccggggcgagtccgagcgagtttagggcaggttgtgaataa

SEQ ID NO: 2768 - DNA, 1701 bp, Escherichia coli
atggcgattgcaattggcctcgattttggcagtgattctgtgcgagctttggcggtggactgcgccaccggtgaagagatcgccaccagcgtagagtggtatccccgttggcagaacgggcaattttgtgatgccccgaataaccagttccgtcatcatccgcgtgactacattgagtcaatggaagcggcgctgaaaaccgtgcttgcagagcttagcgtcgaacagcgcgaagctgtggtcgggattggcgttgacacaaccggctcgacgcccgcaccgattgacgccgacggtaacgtgctggcgctgcgcccggagtttgccgaaaacccgaacgcgatgttcgtattgtggaaagaccacaccgcggttgaagaagcggaagagattacccgcttatgtcacacgccgggcaacgttgactactcccgctatattggcggtatttattccagcgaatggttctgggcaaaaatcctgcatataactcgccaggacaacgccgtggcacaatctgccgcatcgtggattgagctgtgcgactgggtgccagctctgctttccggtaccacccgcccgcaggatattcgtcgcggacgttgcagcgccgggcataaatctctatggcacgaaagctggggtggcctgccgccagccagtttctttgatgagctggacccaatcctcaatcgccatttgccttccccgctgttcactgatacctggactgccgatattccggtgggcaccttatgcccggaatgggcgcagcgtctcggcctgcctgaaagcatagttatttccggcggcgcgtttgactgccatatgggcgcagttggcgcaggcgcacagcctaacgcactggtaaaagttatcggtacttccacctgtgacattctgattgccgacaaacagaacgttggcgagcgggcagtgaaaggtatttgcggtcaggttgatggcagcgtggtgcctggatttatcggtctggaagcaggccaatcggcgtttggggatatctacgcctggtttggacgcgtactcagctggccgctggaacagcttgccgcccagcatccggaactgaaagagcaaatcaacgccagccagaaacaactgcttccggcgctgaccgaagcatgggccaaaaatccgtctctggatcacctgccggtggtgctcgactggtttaacggccgccgcacaccgaacgctaaccaacgcctgaaaggggtgattaccgatctgaacctcgctaccgacgctccgctgctgttcggcggtttgattgccgccaccgcctttggcgcacgcgcaattatggagtgcttcaccgctcaggggatcgccgtcaataacgtgatggcactgggcggcatcgcgcgcaaaaaccaggtcattatgcaggcctgctgcgacgtgctgaatcgcccgctgcaaattgttgcttctgaccaatgttgcgcgctcggtgcggcgattttcgctgccgtcgccgcaaaagtgcacgccgatatcccctcagcccagcaaaaaatggccagtgcggtagagaaaaccctgcaaccgtgcagcgaacaggcacaacgctttgaacagctttatcgccgctatcagcaatgggcgatgagcgccgaacaacactatcttccaacttccgccccggcacaggctgcccaggccgttccgactctataa

SEQ ID NO: 2769 - DNA, 1503 bp, Escherichia coli
atgacgatttttgataattatgaagtgtggtttgtaattggcagccagcatctttacggcccggagactctgcgccaggtgacgcaacatgcggaacacgttgttaatgcactgaatacagaagcgaagttgccctgcaaactggtgctgaaaccgctgggcaccacgccggatgaaatcaccgctatttgccgcgacgcgaattacgacgatcgttgcgccgggctggtagtgtggctgcacactttctccccggccaaaatgtggatcaacggcctgaccatgctcaacaaaccgttgctgcaattccacacccagttcaacgcggcgctgccgtgggacagcatcgacatggactttatgaacctgaaccagaccgcgcatggcggtcgcgagttcggcttcatcggcgcgcgtatgcgtcaacaacatgccgtcgttaccggtcactggcaggataaacaagcacatgagcgtatcggctcctggatgcgtcaggcggtctctaaacaggatacccgtcatctgaaagtctgccgttttggcgataacatgcgtgaagtagcggtcaccgatggcgataaagttgccgcacagatcaagttcggtttctccgtcaatacctgggcggttggcgatctggtgcaggtggtgaactccatcagcgacggcgatgttaacgcgctggtcgatgagtacgaaagctgctacaccatgacacctgccacacaaatccacggcgaaaaacgacagaacgtgctggaagcggcgcgtattgagctggggatgaagcgtttcctggaacaaggtggcttccacgctttcactactacctttgaagatttgcacggcctgaaacagcttccgggtctggccgtacagcgtctgatgcagcagggctacggctttgcgggcgaaggcgactggaaaactgccgccctgcttcgcatcatgaaggtgatgtcaaccggtctgcagggcggcacctcctttatggaggactacacctatcacttcgagaaaggtaatgacctggtactcggctcccatatgctggaagtctgtccgtcgatcgctgtggaagagaaaccgatcctcgacgttcagcatctcggtattggcggtaaagacgatcctgcccgcctgatcttcaacactcaaaccggtccagccattgtcgccagcctgattgatctcggcgatcgttaccgtctgctggttaactgcatcgacacggtgaaaacaccgcactccctgccgaaactgccggtggcgaatgcgctgtggaaagcgcaaccggatctaccaaccgcttccgaagcgtggatccttgctggtggcgcgcaccataccgtcttcagccatgcgctgaacctcaacgatatgcgccagtttgccgagatgcacgacattgaaatcacggtgattgataacgacacccgcctgccagcgtttaaagacgcgctgcgctggaacgaagtgtattacgggtttcgtcgctaa

SEQ ID NO: 2770 - DNA, 696 bp, Escherichia coli
atgttagaagatctcaaacgccaggtcttagaagccaacctggcgctgccaaaacacaacctggtcacgctcacctggggcaatgtcagcgccgttgatcgcgggcgcggcgtcctggtgatcaaaccttccggcgtcgactacagcatcatgaccgctgacgatatggtcgtggtcagcatcgaaaccggtgaagtggttgaaggtacgaaaaagccctcctccgacacgccaactcaccgactgctctatcaggcattcccgtctattggcggcattgtgcacacacactcgcgccacgccaccatctgggcgcaggcgggccagtcaattccggcaaccggtaccacccacgccgactatttctacggtcccattccctgcacccgcaaaatgaccgacgcagaaatcaacggtgaatatgagtgggaaaccggtaacgtcatcgtagaaaccttcgaaaaacagggtatcgatgcagcgcaaatgcccggcgtgctggtccattctcacggcccatttgcatggggaaaaaacgccgaagatgcggtgcataacgccatcgtgctggaagaagtcgcttatatggggatattctgccgtcagttagcgccgcagttaccggatatgcagcaaacgctgctggataaacactatctgcgtaagcatggcgcgaaggcatattacgggcagtaa

SEQ ID NO: 2771 - DNA, 2352 bp, Escherichia coli
gtggcgcaggcaggttttatcttaacccgacactggcgggacaccccgcaaggaaccgaagtttccttttggttagcgacggacaacgggccgttgcaggttacgcttgcgccgcaagagtccgtggcgtttattcccgccgatcaggttccccgcgcccagcatattttgcagggtgagcaaggctttcgcctgacgccgctggcgttaaaggattttcatcgccagccggtgtatggcctttactgtcgcgcccatcgccagttgatgaattacgaaaagcgcctgcgtgaagctggcgttaccgtctacgaggccgatgtgcgcccgccagaacgctatctgatggagcggtttatcacctcgccagtgtgggtcgagggtgatatgcgcaacggcgctatcgttaatgcccgtctgaaacagcatcccgactatcgtccgccgctcaagtgggtttctattgatattgaaaccacccgccacggtgagctgtactgcatcggcctggaaggttgcgggcagcgtatcgtttatatgctggggccagagaatggcgacgcctccgcgctcgattttgaactggaatacgtcgccagccgcccgctgctactggaaaaacttaacgcctggtttgcgactcatgatcctgatgtgatcatcggttggaacgtggtgcagttcgatctgcgaatgctgcaaaaacatgccgagcgttaccgtattccgctgcgtctggggcgtgataacagcgagttggagtggcgcgagcacggctttaaaaacggcgtcttttttgctcaggccaaagggcgactgattatcgacggtatcgaggcgctgaaatccgcgttctggaatttctcttcattctcgctggaaaccgtcgctcaggagttattaggcgaaggaaaatctatcgataacccgtgggatcgaatggacgaaattgaccgccgtttcgccgaagataagcctgcgctggcaacttataacctgaaagattgcgagctggtgacgcagatcttccacaaaactgaaatcatgccgtttttgctcgaacgggcgacggtgaacggcctgccggtagatcgacacggcggttcggtggcagcgtttggtcatctctattttccccgtatgcatcgcgctggttatgtcgcgcctaatctcggcgaagtgccgccgcacgccagccctggcggctacgtgatggattcgcgacctgggctttatgattcggtgctggtgctggactacaaaagcctgtacccgtcgatcatccgcacctttctgattgatcccgtcggactggtggaaggcatggcgcagcctgatccagagcacagtaccgaaggttttctcgatgcctggttctcacgggagaaacattgcctgccggagattgtgactaacatctggcacgggcgcgatgaagccaaacgtcagagtaataagccgctttcgcaggcgctgaagatcattatgaatgccttttatggtgtgctcggcaccaccgcctgccgtttcttcgatccacgcctggcatcgtcgatcaccatgcgtggtcatcagatcatgcggcaaaccaaaacgttgattgaagcgcaaggctatgacgttatctacggcgataccgactcaacgtttgtctggctgaaaggtgcacattcagaagaagaagcagcgaaaatcggtcgtgcactggtgcagcacgttaacgcctggtgggcggaaacgctgcaaaaacaacggctgaccagcgcactggaactggagtatgaaacccatttctgccgttttctgatgccaaccattcgcggggccgataccggcagcaaaaagcgctacgccggactgattcaggagggcgacaaacagcggatggtgtttaaagggctggaaaccgtgcgtacggactggacgccgctggcccagcagtttcagcaggagctttacctgcgcatcttccgcaacgagccatatcaggaatacgtgcgcgaaaccatcgacaagctgatggcgggcgaactggacacgcagctggtttaccgtaaacgccttcgccgtccgctgagcgaatatcagcgtaatgttccgcctcatgtacgcgccgctcgccttgccgatgaagaaaaccataagcgcggtcgccccttgcaatatcagaatcgcggcaccattaagtacgtatggaccaccaacggcccggagccgctggactaccaacgttcaccactggattacgaacactatctgacccgccagctacaacccgtagcggagggaatactcccttttattgaggataattttgctacacttatgaccgggcaacttgggctattttga

SEQ ID NO: 2772 - DNA, 2907 bp, Escherichia coli
atgccttttacacttggtcaacgctggatcagcgatacagaaagcgaattgggacttggaaccgttgtcgcggtggatgcgcgaactgtcactttacttttcccatctactggtgaaaaccgtctgtacgcacgcagtgattcccccgtgacccgcgtgatgttcaaccctggtgataccattaccagccatgacggctggcagatgcaagtcgaagaagtaaaagaagaaaatggcttgctgacctatatcggtactcgccttgatactgaagagtccggcgtggccctgcgtgaagttttccttgatagcaaactggtgttcagcaaaccgcaggaccgtctgtttgccgggcagattgaccgtatggaccgctttgcgctgcgttatcgcgcgcgtaagtattccagcgaacagttccgtatgccgtacagcggcctgcgcggtcagcgtaccagcctgatcccgcaccagctcaacatcgctcatgatgttggtcgccgccacgcgccgcgcgtcctgctggctgacgaagtgggtttagggaaaaccattgaagccgggatgatcctgcatcagcaactgctctctggcgctgctgaacgtgtgctgattatcgtcccggaaaccttacagcatcagtggctggtagaaatgctgcgccgtttcaacctgcgctttgctctgtttgatgatgagcgttatgccgaagctcagcacgatgcttacaacccgttcgataccgaacagctggtgatttgctcgctggattttgcccgtcgtagcaaacagcgtctggaacatctctgtgaagccgaatgggatctactggtggtcgatgaagcgcatcacctggtgtggagcgaagatgcgccgagccgtgaatatcaggccattgaacaactggcagagcacgtgccgggcgttctgctgctgaccgcaaccccggaacagctggggatggaaagccacttcgcccgtctgcgtctgctggacccgaaccgtttccacgattttgcgcaattcgttgaagagcagaaaaattatcgtccggttgcggacgccgttgccatgctgctggctggtaacaaactcagcaatgacgaactgaacatgctcggtgagatgatcggcgagcaggatatcgagccgctgttgcaagcagcaaacagcgacagcgaagatgcccagagcgcccgtcaggaactggtttcgatgctgatggatcgccacggtaccagccgcgtgctgttccgtaacacccgtaacggtgtgaaaggcttcccgaaacgcgagctgcatactattaagctaccactgccgacgcagtatcagaccgctattaaagtctccggcattatgggcgcacgtaaaagtgcggaagatcgcgctcgcgatatgctctacccggagcgtatttatcaggaatttgaaggcgataacgccacctggtggaacttcgatccgcgcgttgaatggctgatgggctacctgaccagccatcgctctcagaaagtgctggtgatctgcgccaaagcggccactgcgctgcaactggagcaggtactgcgcgaacgtgaaggtattcgcgccgcagtgttccacgaaggcatgtcgattatcgaacgtgaccgcgctgccgcctggtttgccgaagaagacaccggcgcacaggtactgctgtgctcggaaatcggttctgaaggacgtaacttccagttcgccagccacatggtgatgtttgacctgccattcaacccggatctgctggagcagcgtattggtcgtctggatcgtatcggtcaggcgcacgatattcagatccatgtgccttatctggaaaaaacggctcagtcggtgctggtgcgctggtatcacgaaggtctggatgcattcgagcacacctgcccgaccggacgcactatctacgatagcgtgtacaacgatttgattaactatctggcctcgccggatgagaccgaaggctttgacgatctgatcaaaaactgccgcgagcagcatgaagcgctgaaagcacaactggaacaggggcgtgaccgtctgttggagatccactccaacggtggcgaaaaagcccaggcactggcagaaagcattgaagagcaggatgacgataccaacctgatcgccttcgccatgaacctgttcgatattatcggtatcaatcaggacgatcgcggcgacaacatgatcgtgctgacgccgtccgatcatatgctggtgccggacttccctggcctgtcggaagatggcatcaccatcaccttcgaccgtgaagtggcgctggcgcgtgaagatgcacagtttattacctgggagcatccgctgatccgcaacggtctggatctgatcctttctggcgataccggtagcagcacgatttcactgttgaaaaacaaagcgttgccggtaggtacgctgttggtggaactgatttatgtggttgaagcccaggctccgaagcagttgcagctcaaccgcttcctgccaccgacgccggtacgtatgctgctggataaaaacggcaacaacctgtcggcgcaggtagagtttgaaacctttaaccgccagcttaacgcggttaaccgtcacaccggcagcaagctggttaacgcggtgcagcaggatgttcacgctatccttcagctgggggaagcgcagatcgagaaatctgcccgtgcattgattgatgcagcgcgtaacgaagccgacgaaaaactgtctgccgagctgtctcgtctggaagcgctgcgtgcagttaacccgaacattcgtgacgacgaactgaccgccattgagagcaaccgtcagcaggtaatggaaagcctggatcaggcaggctggcgtctggatgccctgcgtttgatcgttgtgacgcatcagtaa

SEQ ID NO: 2773 - DNA, 660 bp, Escherichia coli
atggggatggaaaactacaatccgccgcaggacccctggctgattgtcctgtatcaggatgaccatattatggtggtcaacaagccgagcggtttgttgtctgtgccggggcgtctggaagagcacaaagacagcgtgatgacgcgcattcagcgtgattatccgcaggcagaatcggtgcatcgtctggatatggctaccagcggcgtgattgtagtggcgctgaccaaagccgcggagcgggagttaaaacgccagttccgcgagcgcgagccgaaaaaacagtatgtggcccgcgtctgggggcatccatcccctgcggaaggtctggtggatctgccgctgatttgcgactggccaaaccgcccgaaacagaaagtctgttacgaaacaggtaaacctgcgcagacggagtatgaagtggtggaatatgcggcggataacacggcaagagtggtgttaaaaccgattaccgggcgttcgcatcagctgcgtgtgcatatgctggcgctgggtcatccgattctcggcgatcgtttttatgcatcaccagaagcgagagcaatggcaccgcgtttgttgctacatgcagagatgctgacgattacccatccggcgtatggcaatagtatgacgtttaaagcaccagcggatttttaa

SEQ ID NO: 2774 - DNA, 882 bp, Escherichia coli
atggataaaagcgcctttatattgtgggagatagccctgatatccgtgtgtcgatttggggaatatatgcagtattggggaaaaatcattggcgtggccgtggccttaataatgggcggcggcttttggggcgtagtattgggcctgttaattggccatatgtttgataaagcccgtagccgtaaaatggcgtggttcgccaaccagcgtgagcgtcaggcgctgttttttgccaccacttttgaagtgatggggcatttaaccaaatccaaaggtcgcgtcacggaagctgatattcatatcgccagccagttgatggaccgaatgaaccttcatggcgcttcccgtactgcggcgcaaaatgcgttccgggtgggaaaatcagacaattacccgctgcgcgaaaagatgcgccagtttcgcagtgtctgctttggtcgttttgacttaattcgtatgtttctggagatccagattcaggcggcgtttgctgatggttcactgcacccgaatgaacgggcggtgctgtatgtcattgctgaagaattagggatctcccgcgctcagtttgaccagtttttgcgcatgatgcagggcggtgcacagtttggtggcggttatcagcagcaatctggcggtggtaactggcagcaagcgcagcgtggcccgacgctggaagatgcctgtaatgtgctgggcgtgaagccgacggatgatgcgaccaccatcaaacgtgcctaccgtaagctgatgagtgaacaccatcccgataagttggtggcgaaaggtttgccgccagagatgatggagatggcgaagcagaaagcgcaggaaattcagcaggcctatgagctgataaagcagcagaaagggtttaaataa

SEQ ID NO: 2775 - DNA, 2355 bp, Escherichia coli
atgaaaaaacgtatccccactctcctggccaccatgattgccaccgccctttatagtcaacagggactggcagccgacctcgcctcacagtgcatgttgggcgtgccaagctatgaccgtcctctggtacagggcgataccaatgacttacccgtgactatcaatgctgaccacgcgaaaggggactacccggatgacgccgtgtttactggcagcgtggatatcatgcagggtaacagccgtctgcaggccgacgaagtgcagctccatcaaaaagaggcaccaggacaaccggagccggtgcgtaccgttgatgcgctcggtaatgtccattacgacgataaccaggtgatcctcaaagggccgaaaggctgggcgaatctgaacaccaaagataccaacgtctgggaaggtgattaccagatggtaggtcgccagggtcgcggtaaagcggacctgatgaaacaacgtggcgaaaaccgctataccattctggataacggtagctttacctcctgtctgccgggttctgacacctggagcgtggtaggtagcgaaattattcatgaccgcgaagaacaagttgcggagatctggaacgcccgctttaaggtgggtccggtaccgatcttttatagcccgtatttgcagttgccggtgggtgacaaacgtcgctctggtttcttgatcccgaacgccaagtacaccaccaccaactactttgagttctacctgccatattactggaacatcgcgccaaatatggatgccaccatcacgccgcattatatgcatcgtcgtggcaacatcatgtgggagaacgaattccgctacctctcccaggcgggcgctggcttgatggaactggactatctgccttcagataaagtctataaagatgaacacccgaacgatgacagttcacgtcgttggttgttctactggaaccactccggggtcatggatcaggtgtggcgtttcaacgtcgactacaccaaggtcagcgatcctagctacttcaatgacttcgataacaaatacggttccagtaccgacggctacgcaacgcaaaaattcagcgttggctatgcggtgcaaaacttcaatgccaccgtttcaaccaagcagttccaggtcttcagcgagcagaacaccagtagctactcggcagagccgcagttagacgttaactactatcaaaacgatgtcggtcctttcgatacgcgaatttacggccaggcggtgcactttgttaacaccagagatgacatgccagaggcgactcgtgttcacctggaaccgaccatcaatctgccgctctctaataactggggcagcatcaatactgaagcgaagttgctggcaacccattatcagcaaaccaatcttgactggtataactccagaaacacgaccaagctggcagagtccgctaaccgtgtaatgccgcagttcaaggtagacggtagaatggtcttcgagcgtgatatggaaatgctggcgccgggctatacccagacactggaaccacgcgcgcagtatctgtatgtgccatatcgcgatcagagcaaaatctataactacgactcgtctctgctgcaatctgactactccggcctgttccgggaccggacttacggcggtcttgaccgtattgcctccgctaaccaggtgacgaccggtgtcacatctcgcatatatgatgatgctgccgttgaacgttttaatatttccgttggtcaaatctactatttcacggagtctcgcactggcgatgacaacataacatgggagaatgacgacaaaacgggctcactggtatgggcaggcgatacttactggcgcatctctgatcgttggggattgcgtggcgggattcagtacgatacacgtctggataacgtagcgaccagtaactccagcattgaataccgtcgggatgaagaccgtctggtacagctgaattaccgttacgccagcccggaatatattcaggcaacgctgcctaagtactattccactgctgagcaatataagaatggtatttcgcaggtaggtgccgtcgccagctggccaattgccgatcgttggtccattgttggggcctactactacgacaccaatgcgaacaagcaagccgactctatgttaggtgtgcaatacagctcctgctgctatgcgattcgcgtcggttacgagcggaagctgaacggttgggataacgataaacaacatgcggtatatgacaacgcaatcggctttaacatcgaacttcgcggcctgagctccaactacggtctgggtacgcaagagatgctgcgttcgaacattctgccgtatcaaaacactttgtga

SEQ ID NO: 2776 - DNA, 1287 bp, Escherichia coli
atgaagaactggaaaacgctgcttctcggtatcgccatgatcgcgaataccagtttcgctgccccccaggtagtcgataaagtcgcagccgtcgtcaataacggcgtcgtgctggaaagcgacgttgatggattaatgcagtcggtaaaactgaacgctgctcaggcaaggcaacaacttcctgatgacgcgacgctgcgccaccaaatcatggagcgtttgatcatggatcaaatcatcctgcagatggggcagaaaatgggagtgaaaatctccgatgagcagctggatcaggcgattgctaacatcgcgaaacagaacaacatgacgctggatcagatgcgcagccgtctggcttacgatggtctgaactacaacacctatcgtaaccagatccgcaaagagatgattatctctgaagtgcgtaacaacgaggtgcgtcgtcgcatcaccatcctgccgcaggaagtcgaatccctggcgcagcaagtgggtaaccaaaacgacgccagcactgagctgaacctgagccacatcctgatcccactgccggaaaacccgacctctgatcaggtgaacgaagcggaaagccaggcgcgcgcgattgtcgatcaggcgcgtaacggcgctgatttcggtaagctggcgattgctcattctgccgaccagcaggcgctgaacggcggacagatgggctggggccgtattcaggagttgccggggatcttcgcccaggcattaagcaccgcgaagaaaggcgacattgttggcccgattcgttccggcgttggcttccatattctgaaagttaacgacctgcgcggcgaaagcaaaaatatctcggtgaccgaagttcatgctcgccatattctgctgaaaccgtcgccgatcatgactgacgaacaggcccgcgtgaaactggaacagattgctgccgatatcaagagtggtaaaacgacttttgctgccgcagcgaaagagttctctcaggatccaggctctgctaaccagggcggtgatctcggctgggctacaccagatattttcgatccggccttccgtgacgccctgacccgcctgaacaaaggtcaaatgagtgcaccggttcactcttcattcggctggcatttaatcgaactgctggatacccgtaatgtcgataaaaccgacgcggcacagaaagatcgtgcataccgcatgctgatgaaccgtaagttctcggaagaagcagcaagctggatgcaggaacaacgtgccagcgcctacgttaaaatcctgagcaactaa

SEQ ID NO: 2777 - DNA, 990 bp, Escherichia coli
atggttaaaacccaacgtgttgtgatcactcccggcgagcccgccgggattggcccggacttaattgtccagcttgcacagcgtgagtggccagtcgaactggttgtttgtgccgatgccactctccttaccgaccgggcagcgatgctcggtttgccgctcaccctccgcccttattcccccaactcccctgcacaaccgcaaactgcgggcacattaacgctacttcctgtcgcgctacgtgaatctgtcactgtggggcagttagcagttgaaaatgggcactatgtggtggaaacgctggcgcgagcgtgtgatggctgtctgaacggtgaatttgctgcgctgatcacaggccccgtgcataaaggcgtcattaacgacgcaggcattccgtttaccggtcataccgagtttttcgaagagcgttcgcaggcgaaaaaagtggtgatgatgctggcgaccgaagaacttcgcgtggcgctggcaacgacgcatttaccgctgcgcgatatcgcagatgctatcacccctgcccttttgcacgaagtgattgctattttgcatcacgatttgcgcaccaaatttggtattgccgaaccgcgcattctggtctgcgggctgaatccgcacgcgggcgaaggcggtcatatgggtacggaagagatagacaccattattccggtactcaacgagctgcgggaacaggggatgaaactcaacgggccgctgcctgccgataccctgtttcagccgaaatatctcgataacgccgacgccgtgctggcgatgtaccacgatcagggtcttcccgtgctaaaataccagggcttcgggcgcggtgtgaacattacgctgggcctgccctttattcgcacatcagtggaccacggcaccgcgcttgaactggcgggacgtggtaaagccgatgtcggcagttttattacggcgcttaatctcgccatcaaaatgattgttaacacccaatga

SEQ ID NO: 2778 - DNA, 822 bp, Escherichia coli
atgaataatcgagtccaccagggccacttagcccgtaaacgcttcgggcaaaactttctcaacgatcagttcgtgatcgacagcattgtttctgccattaacccgcagaagggccaggcgatggtcgaaatcggccccggtctggcggcattgaccgaaccggtcggcgaacgtctggaccagctgacggtcatcgaacttgaccgcgatctggcggcacgtctgcaaacgcatccattcttaggcccgaaactgacgatttatcagcaggatgcgatgacctttaactttggcgaactggccgcgaaaatgggccagccgctgcgtgttttcggcaacctgccttataacatctccacgccgttgatgttccatctgtttagctatactgatgccattgccgacatgcactttatgttgcaaaaagaagtggtgaatcgtctggttgcaggaccgaacagcaaggcgtatggtcgattaagcgtcatggcgcaatactattgcaacgtgatcccggtgctggaagtaccgccgtcagcctttacaccaccacccaaagtggattccgccgtcgtgcgcctggttcctcatgcaacgatgcctcacccggttaaagatgttcgcgtgttgagccgcatcaccaccgaagcctttaaccagcgtcgtaaaaccattcgtaacagcctcggcaacctgtttagcgtcgaggtgttaacgggaatggggatcgacccggcgatgcgagcggaaaatatctctgtcgcgcaatattgccagatggcgaactatctggcggagaacgcgcctttgcaggagagttaa

SEQ ID NO: 2779 - DNA, 378 bp, Escherichia coli
atgatcaattcgccccgagtgtgtattcaggttcaaagcgtctacattgaggcccaatcttcacctgataatgaacgttacgtttttgcttataccgtaaccatacgcaatctggggcgagcgccagtgcagttgttggggcgttactggctgatcaccaatggcaatggccgtgaaaccgaagtccagggcgaaggagtggttggcgtccagccacttatcgcgcctggcgaagagtaccagtacaccagcggtgcaatcattgaaaccccgctgggcaccatgcagggtcactacgaaatgatcgatgaaaatggcgtccctttcagcatcgacattcccgtattccgactcgccgttcccacactcattcattaa

SEQ ID NO: 2780 - DNA, 849 bp, Escherichia coli
atggcgacataccttattggcgacgttcatggttgttacgatgaactgatcgcattgctgcataaagtagaatttacccctgggaaagataccctctggctgacgggcgatctggtcgcgcgcggcccgggttcgctggatgttctgcgctatgtgaaatccttaggcgacagcgtacgtctggtgctgggtaatcacgatctgcatctgctggcggtatttgctgggatcagccgcaataaaccgaaagatcgcctgacaccgctgctggaagcgccggatgccgacgagctgcttaactggctgcgtcgccagcctttgctgcaaatcgacgaagagaaaaagttagtgatggcccacgccgggatcacgccgcagtgggatctgcagacagccaaagagtgcgcgcgcgatgtagaagcggtgctgtcgagtgactcctatcccttcttccttgatgccatgtacggcgatatgccaaataactggtcgccggaattgcgggggctgggaagactgcgttttatcaccaacgcctttacccgtatgcgtttttgcttcccgaacggtcaactggatatgtacagcaaagaatcgccggaagaggcccctgccccactgaaaccgtggtttgcgattcctggccccgttgctgaagagtacaacatcgcctttggtcactgggcatcgctggaaggcaaaggtacgccggaaggtatttacgcgctggataccggctgctgctggggtggtacattaacctgcctgcgctgggaagataaacagtattttgtccagccgtcgaaccggcataaggatttgagtgagggagaggcggtagcgtcttaa

SEQ ID NO: 2781 - DNA, 123 bp, Escherichia coli
atgcaatttacggtataccgcagtcgcggcaggaacgccgcgtttccctttgttattgatgttaccagcgacattgttggtgagattaatcgccgtatcgttattccattaacacctatttga

SEQ ID NO: 2782 - DNA, 234 bp, Escherichia coli
atgactgcaaaacgtaccacacaaagtgtgaccgtcaccgtcgaccgtgagttagtcaatcgcgctcgtgatgcaggcttaaatatgagcgccacccttacggttgcgctcaatgctgaacttaaaaaacatgcagcaacacgttggcgtgaagagaacgcagaagctatcgctgcgttaaatcaattggctgatgaaaccggatgtttctctgatgagtaccggagcttctag

SEQ ID NO: 2783 - DNA, 591 bp, Escherichia coli
gtggactcgccagcagaatataaaattttcctcaacatcatcctcgcaccagtcgacgacggtttacgctttacgtatagtggcgacaattttttttatcgggaaatctcaatgatcagtctgattgcggcgttagcggtagatcgcgttatcggcatggaaaacgccatgccgtggaacctgcctgccgatctcgcctggtttaaacgcaacactttaaataaacccgtgattatgggccgccatacctgggaatccatcggtcgtccgttgccaggacgcaaaaatattatcctcagcagtcaaccgggtacggacgatcgcgtaacgtgggtgaagtcggtggatgaagccattgcggcgtgtggtgacgtaccagaaatcatggtgattggcggcggtcgcgtttatgagcagttcctgccgaaagcgcaaaaactgtatctgacgcatatcgacgcggaagtggaaggcgacacccatttcccggattacgagccggatgactgggaatcggtattcagcgaattccacgacgctgatgcgcagaactctcatagctattgctttgagattctggagcggcggtaa

SEQ ID NO: 2784 - DNA, 1863 bp, Escherichia coli
atggatagccatacgcttattcaggcgctgatttatctcggttcggcggcgctgattgttcccattgcggtacgtctcggtctgggatcggttcttggctacctgatcgccggctgcattattggcccgtgggggctgcgactggtgaccgatgccgaatctattctgcactttgcagagattggcgtggtgctgatgctgtttattatcggcctcgaactcgatccacaaaggctgtggaagctgcgtgcggcagtgttcggcggtggcgcattgcagatggtgatttgcggcggcctgctggggctgttttgtatgttacttgggctgcgctggcaggtcgcagaattgatcggcatgacgctggcgctctcatcaacggcgattgccatgcaggcgatgaatgaacgcaatctgatggtgacgcaaatgggccgcagtgcctttgcggtgctgctgttccaggatatcgcggcgatcccgctggtggcgatgatcccgctactggcagcgagcagtgcctcgacgacgatgggcgcatttgttctctcggcgttaaaagtggcgggcgcgctggtgctggtggtattgctggggcgctatgtcacgcgtccggcactgcgttttgttgcccgctctggcttgcgggaagtgtttagtgccgtggcgttattcctcgtgtttggctttggtttgctgctggaagaggtcggcttgtcgatggcgatgggcgcgtttctggcgggcgtactgctggcaagctcggaataccgtcatgcgctggaaagcgatatcgaaccatttaaaggtttgctgctggggctgtttttcatcggcgttggcatgtcgatagactttggcacgctgcttgaaaatccgttgcgcattgtcattttgctgctcggtttcctcatcatcaaaatcgccatgctgtggctgattgcccggccgttgcaggtgccaaataaacagcgtcgctggtttgcggtgctattagggcagggtagtgagtttgcctttgtagtatttggtgcggcgcagatggcgaatgtgctggagccagagtgggcgaaatcgctgaccctggcggtggcactgtcgatggcggcaacgccgattctgctggtgatcctcaatcgccttgagcaatcttctactgaagaggcgcgtgaagccgatgagatcgacgaagaacagccgcgggtaatcattgccggattcggtcgttttgggcagataaccggacgtttactgctctccagcggggtgaaaatggtggtgctcgatcacgacccggaccatatcgaaacgctgcgtaaattcggtatgaaagtgttttatggcgatgccacgcggatggatttactggaatctgccggagcggcgaaagcggaagtgctgattaacgccatcgacgatccgcaaaccaacctgcaactgacggagatggtgaaagaacatttcccacatttgcagattattgcccgcgcccgcgatgtcgaccactacattcgtttgcgtcaggcaggcgttgaaaagccggagcgtgaaaccttcgaaggtgcgctgaaaaccgggcgtctggcactggaaagtttaggtctggggccgtatgaagcgcgagaacgcgccgatgtgttccgccgctttaatattcagatggtggaagagatggcaatggttgagaacgacaccaaagcccgtgcggcggtctataaacgcaccagcgcgatgttaagtgagatcattaccgaagaccgtgaacatctgtcattaattcaacgacatggctggcagggaaccgaagaagggaaacatactggcaatatggcggatgaaccggaaacgaagccctcatcttaa

SEQ ID NO: 2785 - DNA, 531 bp, Escherichia coli
atgattcttataatttatgcgcatccatatccgcatcattcccatgcgaataaacggatgcttgaacaggcaaggacgctggaaggcgtcgaaattcgctctctttatcaactctatcctgacttcaatatcgacattgccgccgaacaggaggcgctgtctcgtgccgatctgatcgtctggcagcacccaatgcagtggtacagcattccaccgcttcttaaactttggatcgataaagttttctcgcacggctgggcttacggtcacggcggcacggcgctgcacggcaaacatttgctgtgggcggtgacgaccggcggcggggaaagccattttgagattggtgcgcatccggggtttgatgtgctgtcgcagccgctacaggcgacggcaatctactgcgggctgaactggctgccaccgtttgccatgcactgcacctttatttgtgacgacgaaaccctcgaagggcaggcgcggcactataagcaacgtctgctggaatggcaggaggcacatcatggatag

SEQ ID NO: 2786 - DNA, 1332 bp, Escherichia coli
atgcaaccgtccagaaactttgatgatcttaaattctcctctattcaccgccgcattttgctgtggggaagcggtggtccgtttctggatggttatgtactggtaatgattggcgtggcgctggagcaactgactccggcgctgaaactggacgctgactggattggcttgctgggcgcgggaacgctcgccgggctgttcgttggcacatcgctgtttggctatatctccgataaagtcggacggcgcaaaatgttcctcattgatatcatcgccatcggcgtgatatcggtggcgacgatgtttgtctcatcccccgtcgaactgttggtgatgcgggtacttatcggcattgttatcggtgcggattatcccatcgccacctcaatgatcaccgagttctccagtacccgtcagcgggcgttttccatcagctttatcgccgcgatgtggtatgtcggcgcgacctgcgccgatttggtcggctattggctttatgatgtggaaggcggctggcgctggatgctgggtagcgcagcgattccctgtttattgattttgattggtcgattcgaactgcctgaatctccccgctggttgttacgcaaagggcgagtaaaagagtgcgaagagatgatgataaaactgtttggcgaaccggtggctttcgaggaagagcagccgcagcaaacccgttttcgcgatctgtttaatcgccgccattttccttttgttctgtttgttgccgccatctggacctgccaggtgatccccatgtttgccatttacacctttggcccgcaaatcgttggtttgttgggattgggggttggcaaaaacgcggcactggggaacgtggtgattagcctgttctttatgctcggctgtattccgccgatgctgtggctaaacactgccggacggcgtccattgttgattggcagctttgccatgatgacgctggcgctggcggttttggggctgatcccggatatggggatctggctggtagtgatggcctttgcggtgtatgcctttttctctggcgggccgggtaatttgcagtggctctatcctaatgaactcttcccgacggatatccgcgcctctgccgtgggcgtgattatgtccttaagccgtattggcactattgtatcgacctgggcactgccgatctttatcaataattacggtatcagtaacacgatgctaatgggggcgggtatctcgctgtttggcttgttgatttccgtagcgtttgccccggagactcgagggatgtcactggcgcagaccagcaatatgacgatccgcgggcagagaatggggtaa

SEQ ID NO: 2787 - DNA, 288 bp, Escherichia coli
atgacttctcccgtcaatgtggacgtcaaactgggcgtcaataaattcaatgtcgatgaagagcatccgcacattgttgtgaaggccgatgcagataaacaggccctggagctgctggtgaaagcgtgccccgcaggtctgtacaagaagcaggatgacggcagtgtgcgcttcgattacgccggatgtctggagtgcggcacctgtcgcattctggggctggggtcggcgctggaacagtgggaatacccgcgcggcacctttggtgtggagttccgttacggctga

SEQ ID NO: 2788 - DNA, 1287 bp, Escherichia coli
atgtccgaagatatctttgacgccatcatcgtcggtgcagggcttgccggttcggttgccgcactggtgctcgcccgcgaaggtgcgcaagtgttagttatcgagcgaggcaattccgcaggtgccaagaacgtcaccggcgggcgtctctatgcccacagtctggaacacattattcctggtttcgctgactccgcccccgtagaacgcctgatcacccatgaaaaacttgcgtttatgacggaaaagtcagcgatgactatggactactgcaatggcgacgaaacctcgccatcccagcgttcttactccgttttacgcagtaaatttgatgcctggctgatggagcaggccgaagaagcgggcgcgcagttaattaccgggatccgcgtcgataacctcgtacagcgcgatggcaaagtcgtcggtgtagaagccgatggcgatgtgattgaagcgaaaacggtgatccttgctgatggggtgaattccatccttgccgaaaagctggggatggcaaaacgcgttaaaccgacggatgtggcagttggcgtgaaggaactgatcgagttaccgaagtcggttattgaagaccgttttcatttgcagggtaatcagggcgcggcttgcctgtttgcgggatcacccaccgatggcctgatgggcggtggcttcctttataccaatgaaaataccctgtcgctggggctggtttgtggtttgcatcatctgcatgacgcaaaaaaatcggtgccgcaaatgctggaagatttcaaacaacatccggccgttgcaccgctgatcgcgggcggcaagctggtggaatattccgctcatgtagtgccggaagcaggtatcaacatgctgccggagctggttggtgacggcgtattgattgccggtgatgctgccggaatgtgtatgaacctcggttttaccattcgcggtatggatctggcgattgccgccggggaagcagcagcaaaaactgtgctttcagcgatgaaaagcgacgatttcagtaagcaaaaactcgcggaatatcgtcaacatcttgagagtggcccgctgcgcgatatgcgcatgtaccagaaactaccggcgttccttgataacccacgcatgtttagcggctacccggaactggcggtgggcgtggcgcgtgacctgttcaccattgacggcagtgcgccggaactgatgcgcaagaaaatcctccgccacggcaagaaagtgggcttcatcaatctgatcaaggatggcatgaaaggagtgaccgttttatga

SEQ ID NO: 2789 - DNA, 942 bp, Escherichia coli
atgaacacgttttctcaagtctgggtattcagcgataccccttctcgtctgccggaactgatgaacggtgcgcaggctttagctaatcaaatcaacacgttcgtcctcaatgatgccgacggcacacaggcaatccagctcggcgctaatcatgtctggaaattaagcggcaaaccggacgagcggatgatcgaagattacgccggtgtcatggctgacactattcgccagcacggcgcagacggtctggtgctgttgccaaacacccgtcgcggcaaattactggcggcgaaactgggttaccgccttaacgcggcggtgtctaacgatgccagcgctgttagcgtgcaggacggtaaagcgacagtgaaacacatggtttacggcggtctggcgattggcgaagaacgcattgccacgccgtatgcggtactgaccatcagcagcggcacgttcgatgcggctcagccagacgcgtcacgcactggcgaaacgcacaccgtggagtggcaggctccggctgtggcgattacccgcacggcaacccaggcgcgtcagagcaacagcgtcgatctcgacaaagcccgcctggtggtcagcgttggtcgcggtattggcagcaaagagaacattgcgctggcagaacagctttgcaaggcgataggtgcggagttggcctgttctcgtccggtggcggaaaacgaaaaatggatggagcacgaacgctatgtcggtatctccaacctgatgctgaaacctgaactgtacctggcggtggggatctccgggcagatccagcacatggttggcgctaatgcgtcgcaaaccattttcgccatcaacaaagataaaaatgcgccgatcttccagtacgcggattacggcattgttggcgacgccgtgaagatccttccggcactgaccgtagctttagcgcgttga

SEQ ID NO: 2790 - DNA, 771 bp, Escherichia coli
atgaagattattacttgctataagtgcgtgcctgatgaacaggatattgcggtcaataatgctgatggttcgttagacttcagcaaagccgatgccaaaataagccaatacgatctcaacgctattgaagcggcttgccagctaaagcaacaggcagcagaggcgcaggtgacggccttaagtgtgggcggtaaagccctgaccaacgccaaagggcgtaaagatgtgctatcgcgcggtccggatgaactgattgtggtgattgatgaccagttcgagcaggcactgccgcaacaaacggcgagcgcactggctgcagccgcccagaaagcaggctttgatttgatcctctgtggcgatggttcttccgacctttatgcccagcaggttggtttgctggtaggcgaaatcctcaatattccggcagttaacggcgtcagcaaaattatctccctgacggcagataccctcaccgttgagcgcgaactggaagatgaaacagaaacgttaagcattccgctgcctgcggttgttgctgtttccactgatatcaactccccacaaattccttcgatgaaagccattctcggcgcggcgaaaaagccagtccaggtatggtcggcggcggatatcggttttaacgcagaggcagcctggtcagaacaacaggttgccgcgccgaaacagcgcgagcgtcagcgcatcgtgattgaaggcgacggcgaagaacagatcgccgcatttgctgaaaatcttcgcaaagtcatttaa

SEQ ID NO: 2791 - DNA, 1515 bp, Escherichia coli
atgaagaatgaaaagagaaaaacgggaatagaaccgaaggttttctttccgccgttaataatcgtcggcatactttgttggcttacagtcagagatctggatgcggcgaatgtcgttattaatgctgtattcagttacgtcaccaatgtatggggatgggcatttgaatggtatatggtggtgatgcttttcggctggttctggctggtgtttggcccgtatgccaaaaagcgtttaggtaacgaaccaccagaatttagtaccgccagttggatctttatgatgttcgcctcctgtacgtctgctgccgtactgttctggggatcgattgagatctactactacatctccaccccgccgtttggcttagaaccgaactcaacaggcgcgaaagagttggggctggcttacagcttgttccactggggacctctgccgtgggccacttacagcttcctttcagtcgccttcgcttacttcttctttgtccgcaaaatggaagtgattcgccccagctcgaccctggtgccgctggtaggtgaaaaacacgccaaagggttgttcggcactatcgtcgacaacttctacctcgtcgccttgatcttcgcgatgggtaccagtctgggccttgccacgccgctggtgaccgagtgtatgcaatggttgtttggcattccgcataccctgcaactggacgctatcatcattacctgctggattatcctcaacgccatttgcgtcgcttgcggtctgcaaaaaggggtacgtatcgccagtgacgtgcgtagttacctgagcttcctgatgctgggttgggtgttcatcgtcagcggtgccagcttcatcatgaactacttcaccgattcggtggggatgttactgatgtatctgccgcgcatgttgttctataccgatcccatagctaaaggcggcttcccgcagggctggaccgtgttctactgggcatggtgggtgatttacgctatccagatgagcatcttcctcgcccgcatctcccgtggtcgtaccgtgcgtgaactgtgcttcggcatggtgctggggctgacagcgtcaacctggatcctgtggactgtactcggtagtaacactctgctgttgatagataaaaacatcatcaacattccaaatctgatcgaacagtacggtgtggcgcgcgccatcatcgaaacctgggccgctctgccactcagcaccgccaccatgtggggcttcttcatcctctgctttattgccaccgttacgctggttaacgcctgctcttataccctggcgatgtccacttgccgcgaagtacgcgatggtgaagaaccaccgctgctggtgcgtatcggctggtcaattctggttggcattatcggtattgttctgctggcgctcggcggcctgaaaccgattcaaaccgccattatcgccggaggatgcccgctgttcttcgtcaacatcatggtgacgctctcctttattaaagacgcgaaacagaactggaaagattaa

SEQ ID NO: 2792 - DNA, 1143 bp, Escherichia coli
atggattttaatttaaatgatgagcaggaactgtttgtcgccggtatccgcgaactgatggccagcgaaaactgggaagcctattttgccgagtgcgaccgtgacagcgtctacccggaacgttttgtcaaagccctggcggatatgggtatcgacagtctgctgatccctgaagagcacggtggtctggacgcggggtttgttactctcgccgccgtgtggatggaactgggtcgtctgggagcgccaacttacgtgctgtatcagttaccgggcgggtttaacaccttcctgcgtgaaggtacgcaagagcagatcgacaagatcatggctttccgcggcaccggtaagcagatgtggaactcagcgattaccgaaccgggcgcaggctccgacgtgggtagcctgaaaacgacttatacccgtagaaatggtaagatttatcttaatggtagtaagtgttttattaccagtagcgcctacaccccgtacatcgtggtgatggcgcgcgacggggcttctccggacaaacctgtctacaccgaatggtttgttgatatgagcaaaccgggcatcaaagtgaccaaacttgaaaagctcggtctgcgtatggatagctgctgtgaaatcacttttgacgacgtggaactggacgagaaagacatgttcggtcgggaaggtaacggctttaaccgcgtcaaagaagagttcgaccatgaacgtttcctggtagccctgaccaactacggtacggcgatgtgcgcctttgaagatgcggcgcgctacgccaaccagcgcgtgcagtttggcgaggctattggtcgtttccagttgattcaggaaaaattcgcccacatggcgatcaaattaaactccatgaaaaacatgctgtatgaagcagcgtggaaagcagacaacggcaccatcacctctggcgatgcagcgatgtgcaaatacttctgcgccaatgcggcatttgaagtggtggatagcgcaatgcaggtgctgggcggtgtcgggattgcgggcaaccaccgcatcagccgcttctggcgtgacctgcgtgtagaccgcgtttccggaggatctgacgaaatgcagatcctgacgctgggtcgcgcggtgctgaagcaataccgctaa

SEQ ID NO: 2793 - DNA, 1218 bp, Escherichia coli
atggatcatctacccatgccgaaattcgggccgctggccggattgcgcgttgtcttctccggtatcgaaatcgccggaccgtttgccgggcaaatgttcgcagaatggggggcggaagttatctggatcgagaacgtcgcctgggccgacaccattcgcgttcaaccgaactacccgcagctctcccgccgcaatttgcatgcgctgtcgttaaatattttcaaagatgaagggcgcgaagcgtttctgaaattaatggaaaccaccgatatcttcatcgaagccagtaaaggtccggcctttgcccgtcgtggcattaccgatgaagtcctgtggcagcacaacccaaaactggttatcgctcacctttccggttttggtcagtatggcaccgaggagtacaccaatcttccggcctataacactatcgcccaggccttcagtggttacctgattcagaacggtgatgttgaccagccaatgcctgccttcccgtataccgccgattacttttctggcctgactgccaccacggcggcgctggcagcactgcataaagtgcgtgaaaccggtaaaggcgaaagtatcgatatcgctatgtatgaagtgatgctgcgtatgggccagtacttcatgatggattacttcaacggcggcgaaatgtgcccgcgcatgaccaaaggtaaagatccctactacgccggttgcggtctgtataaatgcgccgacggctacatcgtgatggaactggtgggcattactcaaattgcagagtgctttaaagatattggcctcgcacatctgctcggtacgccggaaatcccggaaggcacccagcttatccaccgtatcgaatgcccttacggcccactggtagaagagaaactcgatgcctggctggcggcacataccatcgcagaagttaaagaacgctttgccgaactgaatatcgcctgtgccaaagtactgaccgtgccggaactggaaagcaatccacagtatgtggctcgcgaatcaatcactcagtggcaaacgatggatggtcgcacctgcaaagggccgaatatcatgccgaaattcaaaaataaccccggacaaatctggcgcggaatgccctcacatggcatggacacggctgccattttgaaaaatatcggctacagcgaaaacgacattcaggagttggtcagcaaaggtctggccaaagttgaggactaa

SEQ ID NO: 2794 - DNA, 1554 bp, Escherichia coli
atggatatcattggcggacaacatctacgtcaaatgtgggacgatctggcggacgtttacggtcataaaacggcgctgatttgtgaatccagcagcggagtcgttaaccggtatagttatcttgagttaaatcaggagattaaccgcacggcaaacctgttttatgtgctggggattcgcaaaggcgacaaggttgctctacatctcgacaactgcccggaatttatcttttgctggttcgggttggcaaaaattggcgcgattatggtgccgattaacgcccgcctgttgcgcgaagaaagcacgtggatcctgcaaaatagccaggcgtgcctgctggtgaccagtgcgcaattttatcctatgtatcaacagattcagcagaaagatgccacgcagttgcggcacatttgcctgacagatatggcacttcccgctgatgatggcgtgagttcgtttactcaactgaaaaatcaacaacctgccaccttgtgctatgcaccgccgctatcgactgacgatacggcggaaattctcttcacctccggcaccacctcccgaccgaaaggggtggtgataactcattacaacctgcgcttcgctggatattactccgcctggcagtgtgcactgcgtgacgatgacgtctacctgacggtaatgcctgcgtttcatatcgattgccagtgtactgcggcgatggcggcgttttctgccggggccacctttgtgctggtcgagaaatacagcgcccgcgccttctggggacaggtgcagaagtaccgcgccaccattaccgaatgtattccgatgatgattcgtacgttgatggtgcagccgccttcagccaacgatcggcaacactgcctgcgggaagtgatgttttatctcaacctgtcggagcaggaaaaagacgcgttttgtgaacgcttcagcgttcgcttgctgacgtcttatgggatgacggaaaccattgtgggcattatcggcgatcgccctggcgataaacggcgctggccgtcgattggtcgggcgggcttttgctacgaagcggagatccgcgacgatcacaatcgtcccctcccggctggtgagctcggtgaaatctgtattaaaggcgtaccagggaaaaccatcttcaaagagtattttctcaacccgaaagccactgcgaaagtgctggaagccgatggctggctacataccggcgataccggataccgcgacgaagagggctttttttatttcgtcgatcgccgctgcaatatgatcaaacgcggtggcgagaatgtctcctgcgtggagctcgaaaatatcatcgccacccatccaaaaattcaggatatcgtggttgtgggtattaaagattcgattcgcgatgaagccatcaaagcatttgtggtgctgaatgaaggtgaaacattgagcgaagaggaattcttctgcttctgtgaacagaatatggcgaaatttaaagtgccctcttatctggagatcagaaaagatctgccacgtaattgctcggggaaaataattagaaagaatctgaaataa

SEQ ID NO: 2795 - DNA, 786 bp, Escherichia coli
atgagtgaatcattacatctgacccgcaatggatcaattctggaaattacccttgatcgtccaaaagcgaatgctattgatgcaaaaaccagctttgaaatgggcgaagtatttctaaatttccgtgacgatccgcaattacgtgtcgccattattaccggtgccggagagaaattcttttccgcgggctgggatttaaaagcggcagcagaaggcgaagcaccggatgctgactttggcccgggaggttttgcgggattaaccgaaattttcaatctcgacaaaccggtcatcgccgctgtgaacggctatgcctttggcggcggctttgaactggcgctggcggcagattttattgtttgtgccgataacgccagcttcgccctaccggaagccaaactgggcatcgttcctgacagcggcggcgtgctgcgtctgccgaagatcctgccgcctgccatcgtcaatgaaatggtgatgaccggcagacgaatgggcgcagaagaggcgctgcgttggggggtagtcaaccgcgtggttagccaggcggaactgatggataacgcccgcgaactggcgcagcagctggttaacagcgctccgctggcgattgcggcgctgaaagagatctaccgcaccaccagtgaaatgccggtagaagaagcgtatcgctatattcgcagcggcgtgttgaaacactatccatcggttctgcattcggaggatgccattgaagggccgctggcgtttgccgagaagcgcgatccagtgtggaaaggacgttaa

SEQ ID NO: 2796 - DNA, 591 bp, Escherichia coli
gtgagctattacgcctttgaggggttaattccggttgttcacccgacggcgtttgtccatcccagtgcagtattgattggcgatgtgattgtgggagccggtgtctacatcggcccactcgcctcactgcgtggtgactacgggcggttgatcgtgcaagcgggagccaatattcaggatggctgcattatgcatggctactgcgacactgacaccatcgttggggaaaacggtcatatcgggcacggagcgatcctgcatggttgtgtgattggtcgcgatgcactggtcgggatgaacagcgtgattatggatggcgcggtcattggcgaagagagcattgttgccgctatgagctttgtcaaagcgggctttcgcggcgagaaacgccagttgttgatgggtacgccagcccgcgctgtacgcagcgtgagtgacgacgagttacactggaaacggttgaataccaaagagtatcaggatcttgtcgggcgctgtcatgcagcgttacatgaaacgcagccactgaggcaaatggaggaaaatcgcccccgtttgcaggggacgacggatgtgacgccgaaacggtga

SEQ ID NO: 2797 - DNA, 396 bp, Escherichia coli
atgtgtgaaggatgtgttgaaaaaccactctatttgttaatcgccgaatggatgatggctgaaaaccggtgggtgatagcaagagagatctctattcatttcgatattgaacacagcaaggcggttaataccctgacttatattctgtcggaagtcacagaaataagctgcgaagttaagatgatccctaataagctggaagggcggggatgccagtgccagcgactggtaaaagtggttgatatcgatgagcaaatttacgcgcgcctgcgcaataacagccgggataaattagtcggcgtaagaaagacgccgcgtattcctgccgttccgctcacggaacttaaccgcgagcagaagtggcagatgatgttgtcaaagagtatgcgtcgttaa

SEQ ID NO: 2798 - DNA, 3222 bp, Escherichia coli
atgccaaaacgtacagatataaaaagtatcctgattctgggtgcgggcccgattgttatcggtcaggcgtgtgagtttgactactctggcgcgcaagcgtgtaaagccctgcgtgaagagggttaccgcgtcattctggtgaactccaacccggcgaccatcatgaccgacccggaaatggctgatgccacctacatcgagccgattcactgggaagtggtacgcaagattattgaaaaagagcgtccggacgcggtgctgccaaccatgggggggcagacggcgctgaactgtgcgctggagcttgagcgtcagggcgtgctggaagagttcggcgtcaccatgattggtgccactgccgatgcgattgataaagccgaagaccgccgccgtttcgacgtagcgatgaagaaaatcggtctggaaactgcgcgttccggtatcgctcattcaatggaagaagcgctggcggttgccgctgaagttggcttcccgtgcattattcgcccatcctttaccatgggcggtagcggtggtggtatcgcttataaccgtgaagaatttgaagaaatttgcgcccgcggtttggatctctccccgaccaaagagctgctgattgatgagtcgctgatcggctggaaagagtacgagatggaagtggtgcgtgataaaaacgacaactgcatcatcgtctgctctatcgaaaactttgatgcgatgggcatccacaccggtgactccatcactgtcgcgccagcccaaacgctgaccgataaagaatatcaaatcatgcgtaacgcctcgatggcggtgctgcgtgaaatcggcgttgaaaccggtggttccaacgtccagtttgcagtgaacccgaaaaacggtcgcctgattgttatcgaaatgaacccgcgcgtgtctcgctcctctgcgctggcgtcgaaagccactggtttcccgattgccaaagtggcggcgaaactggcggtgggttacaccctcgacgagctgatgaacgacatcaccggcgggcgtactccggcctccttcgagccgtccatcgactatgtggttactaaaattcctcgcttcaacttcgagaaattcgccggtgctaacgaccgtctgaccactcagatgaaatcggtgggcgaagtgatggcgattggtcgcacgcagcaggaatccctacaaaaagcgctgcgcggcctggaagtgggcgcaactggcttcgatccgaaagtgagtctcgacgacccggaagcgctgactaaaatccgccgcgaactgaaagatgctggcgcagagcgtatctggtatatcgctgatgccttccgcgcgggcctgtctgtagacggtgtatttaatttgaccaacattgaccgctggttcctggtacagattgaagagctggtgcgtctggaagagaaagtcgcagaagtgggcatcactggcctgcacgctgaattcctgcgccagttgaaacgcaaaggctttgccgatgcgcgtctggctaaactggcgggcgtgcgcgaagcggaaatccgcaagttgcgcgaccagtatgatctgcacccggtttacaagcgcgtggatacttgtgcggcagagttcgccaccgacaccgcttacatgtactccacttatgaagaagagtgcgaagcgaatccgtccaccgatcgtgaaaaaatcatggtgctcggcggcggcccgaaccgtatcggtcagggtatcgaattcgactactgctgtgtacacgcctcgctggcgctgcgcgaagatggttatgaaaccattatggttaactgtaacccggaaaccgtctccaccgactacgacacctccgaccgcctctacttcgagccggtaactctggaagacgtgctggaaattgtgcgtattgagaagccgaaaggcgttatcgtccagtacggcggtcagaccccgctgaaactggcgcgcgcgctggaagctgctggcgtaccggttatcggtaccagcccggatgccatcgaccgtgcggaagaccgtgaacgcttccagcatgcggttgagcgtctgaaactgaaacaaccggcgaacgccaccgttaccaccatcgaaatggcggttgagaaagcgaaagagattggctacccgctggtggtgcgtccgtcttacgttctcggcggtcgggcgatggaaatcgtctatgacgaagctgacctgcgtcgctacttccagacagcggtcagcgtatctaacgatgcgccagtgttgctggaccacttccttgatgacgcagtagaagttgacgtggatgccatctgcgacggcgaaatggtgctgattggcggcatcatggagcatattgagcaggcgggtgtgcactccggtgactccgcatgttcactgccagcttacaccttaagtcaggaaattcaggatgtgatgcgccagcaggtgcagaaactggccttcgaactgcaggtgcgcggcctgatgaacgtgcagtttgcggtgaaaaacaacgaagtctacctgattgaagttaacccgcgtgcggcgcgtaccgttccgttcgtctccaaagccaccggcgtaccgctggcaaaagtggcggcgcgtgtgatggctggcaaatcgctggctgagcagggcgtaaccaaagaagttatcccgccgtactactcggtgaaagaagtggtgctgccgttcaataaattcccgggcgttgacccgctgttagggccagaaatgcgctctaccggggaagtcatgggcgtgggccgcaccttcgctgaagcgtttgccaaagcgcagctgggcagcaactccaccatgaagaaacacggtcgtgcgctgctttccgtgcgcgaaggcgataaagaacgcgtggtggacctggcggcaaaactgctgaaacagggcttcgagctggatgcgactcacggcacggcgattgtgctgggcgaagcgggtatcaatccgcgtctggtgaacaaggtgcatgaaggccgtccgcacattcaggaccgtattaagaatggcgaatatacctacatcatcaacaccacctcaggtcgtcgtgcgattgaagactcccgcgtgatccgtcgcagtgcgctgcaatataaagtgcattacgacaccaccctgaacggcggctttgccaccgcgatggcgctgaatgccgatgcgaccgaaaaagtaatttcggtgcaggaaatgcacgcgcagatcaaataa

SEQ ID NO: 2799 - DNA, 1149 bp, Escherichia coli
ttgattaagtcagcgctattggttctggaagacggaacccagtttcacggtcgggccataggggcaacaggttcggcggttggggaagtcgttttcaatacttcaatgaccggttatcaagaaatcctcactgatccttcctattctcgtcaaatcgttactcttacttatccccatattggcaatgtcggcactaatgacgccgatgaagaatcttctcaggttcatgcccaaggtctggtgattcgcgacctgccgctgattgccagcaacttccgtaataccgaagacctctcttcttacctgaagcgccataacatcgtggcgattgccgatatcgatacccgtaagctgacgcgtttactgcgtgagaaaggtgctcagaatggctgcattatcgcaggcgataacccggatgcggcgctggcattagaaaaagcccgcgcgttcccaggtctgaacggcatggatctggcaaaagaagtaaccaccgcagaaccctatagctggacacaagggagctggacactgaccggcggcctgccagaagcgaaaaaagaagacgagctgccgtaccacgtcgtggcctacgatttcggtgccaagcgcaacatcctgcgtatgctggtggatagaggctgtcgcctgaccatcgttccggcgcaaacttctgcggaagatgtgctgaaaatgaatccggacggcatcttcctctccaacggtcctggcgacccggccccgtgcgattacgccattaccgctatccagaaattcctcgaaactgatattccggtattcggcatctgcctcggtcatcagctgctggcgctggcgagcggtgcgaagactgtcaaaatgaaatttggtcaccacggcggcaaccatccggttaaagatgttgagaaaaatgtggtgatgatcaccgcccagaaccacggttttgcggtggatgaagcaacattacctgcaaacctgcgtgtcacacataaatccctgttcgacggtacgttacagggcattcatcgtaccgataaaccggcgttcagcttccagggacacccggaagccagccctggtccacacgacgccgcgccgttgtttgaccactttatcgcgttaattgagcagtaccgtaaaaccgctaagtaa

SEQ ID NO: 2800 - DNA, 822 bp, Escherichia coli
atgcatgatgcaaacatccgcgttgccatcgcgggagccgggggccgtatgggccgccagttgattcaggcggcgctggcattagaaggcgtgcagctgggcgcggcgctggagcgcgaaggatcttctttactgggcagcgatgcgggcgaactggccggagccgggaaaacaggcgttactgtgcaaagtagtcttgatgcgataaaagatgattttgatgtgtttatcgattttacccgtccggaaggtacgctgaaccatctcgctttttgtcgccagcatggcaaagggatggtgatcggcactacggggtttgacgaagccggtaaacaggcgattcgtgacgccgccgccgatattgcgattgtctttgccgccaattttagcgttggcgttaacgtcatgcttaaactgctggagaaagcagccaaagtgatgggggactacaccgatatcgaaattattgaagcacatcatagacataaagttgatgcgccgtcaggcaccgcactggcaatgggagaggcgatcgcccacgctcttgataaagatctgaaagattgcgcggtctacagtcgtgaaggccataccggtgaacgtgtgcctggcaccattggttttgccaccgtgcgtgcaggtgacatcgttggcgaacataccgcgatgtttgccgatattggcgagcgtctggagatcacccataaggcatccagccgcatgacatttgctaacggtgcggtaagatcggctttgtggttgagtggtaaggaaagtggtctttttgatatgcgagatgtacttgatctcaataatctgtaa

SEQ ID NO: 2801 - DNA, 366 bp, Escherichia coli
atgacgtatggagaagcgtatctggaagggtggaaaaacatctttaattatgaaggtgtttccaatcgcttcgagttctggtcgtttatgattggtagtggcgttatctgtctgcttccgcttttatgttggtggttagcggtaacaattaacaatgactatggtgttttcattttttttgcgctgcccgcgtcatttattttaacgttgatttttgccgtaccggcgatagcgttagccgtcagaaggatgcacgatatcggatattcagggtggtgggttaccattgtcgtgttgatccctgttacgggcgtaattctgcttatactgtgctgcctgccgtcaaagtcacaagaccaggcataa

SEQ ID NO: 2802 - DNA, 915 bp, Escherichia coli
atgcgtttacctatcttcctcgatacagaccccggcattgacgatgccgtcgccattgcagccgcgatttttgctcccgaactcgacctgcaactgatgactaccgtcgcgggtaatgtctcggtagagaaaaccacccgcaacgccctgcaactgctgcatttctggaatgcggagattccgcttgcccagggcgcagctgtgccgctggtacgcgcaccgcgtgatgcggcatctgtgcacggcgaatcgggaatggcaggctacgactttgttgagcacaaccgaaagccactggagataccggcgtttctggcgattcgggatgccctgatgcgtgcgcctgagcctgttaccctggtggccatcggcccgttaaccaatattgcgctgttactttcacaatgcccggaatgtaagccgtatattcgccgtctggtgatcatgggcggttctgccggtcgcggcaactgcacaccaaacgccgagtttaatatcgctgccgatccagaagcggcagcctgtgtcttccgtagcggcatcgaaatcgtcatgtgtggtctggatgtcaccaatcaggcaatattaacccctgactatctcgctactttgccggagttgaatcgcaccggaaaaatgctccacgccctgtttagccactaccgtagcggcagtatgcaaagtggactgcgtatgcacgatctttgcgctatcgcctggctggtgcgcccggaattgttcactctcaaaccgtgttttgtggcagtggaaactcagggcgaatttacctcaggcacgacggtggttgatatcgacggttgcctgggcaaaccagccaatgtacaggtggcgctggatctggatgtgaaaggcttccagcaatgggtggctgaggtgctggccctggcgctctaa

SEQ ID NO: 2803 - DNA, 951 bp, Escherichia coli
atgcagatcctgttggccaacccgcgtggtttttgtgccggggtagaccgcgctatcagcattgttgaaaacgcgctggccatttacggcgcaccgatatatgtccgtcacgaagtggtgcataaccgctacgtggtcgatagcctgcgcgagcgtggggctatctttattgagcagattagcgaagtaccggacggcgcgatcctgattttctccgcacacggtgtttctcaggcggtacgtaatgaagcgaaaagccgtgatttgacggtattcgacgcgacctgtccgctggtgaccaaagtgcatatggaagtcgcgcgcgccagccgtcgtggcgaagagtcaattctcatcggccacgccgggcatccggaagtggaaggtacgatgggccagtacagtaacccggaagggggaatgtatctggtcgaatcgccggacgatgtgtggaaactgacggtcaaaaacgaagagaaactctcctttatgacccagaccacgctatcggtggatgacacgtctgatgtgatcgacgcgctgcgtaaacgcttcccgaaaattgtcggtccgcgcaaagatgacatctgctacgccacgactaaccgtcaggaagcggtacgcgccctggcagagcaggcggaagtagtactggtggttggttcgaaaaactcttccaactccaaccgtctggcggaactggcccagcgtatgggcaaacgcgcatttttgattgacgatgcgaaagatatccaggaagagtgggtaaaaggcgtgaactgcgttggcgtgactgcgggcgcatcggctccggatattctggtgcagaatgtggtggcacgtttgcagcagctgggcggtggtgaagccattccgctggaaggccgtgaagaaaacattgttttcgaagtgccgaaagagctgcgtgtcgatattcgtgaagtcgattaa

SEQ ID NO: 2804 - DNA, 450 bp, Escherichia coli
atgtctgaatctgtacagagcaatagcgccgtcctggtgcacttcacgctaaaactcgacgatggcaccaccgctgagtctacccgcaacaacggtaaaccggcgctgttccgcctgggtgatgcttctctttctgaagggctggagcaacacctgctggggctgaaagtgggcgataaaaccaccttctcgctggagccagatgcggcgtttggcgtgccgtcaccggacctgattcagtacttctcccgccgtgaatttatggatgcaggcgagccagaaattggcgcaatcatgctttttaccgcaatggatggcagtgagatgcctggtgtgatccgcgaaattaacggcgactccattaccgttgatttcaaccatccgctggccgggcagaccgttcattttgatattgaagtgctggaaatcgatccggcactggaggcgtaa

SEQ ID NO: 2805 - DNA, 495 bp, Escherichia coli
atgagtcaatcgatctgttcaacagggctacgctggctgtggctggtggtagtcgtgctgattatcgatctgggcagcaaatacctgatcctccagaactttgctctgggggatacggtcccgctgttcccgtcgcttaatctgcattatgcgcgtaactatggcgcagcgtttagtttccttgccgatagcggcggctggcagcgttggttctttgccggtattgcgattggtattagcgtgatcctggcagtgatgatgtatcgctcgaaggccacgcagaagctaaacaatatcgcttacgcgctgattattggcggcgcactgggcaacctgttcgaccgcctgtggcacggcttcgttgtcgatatgatcgacttctatgtcggcgactggcacttcgccaccttcaaccttgccgatactgccatttgtgtcggtgcggcactgattgtgctggaaggttttttaccttctaaagcgaaaaaacaataa

SEQ ID NO: 2806 - DNA, 2817 bp, Escherichia coli
atgagtgactataaatcaaccctgaatttgccggaaacagggttcccgatgcgtggcgatctcgccaagcgcgaaccgggaatgctggcgcgttggactgatgatgatctgtacggcatcatccgtgcggctaaaaaaggcaaaaaaaccttcattctgcatgatggccctccttatgcgaatggcagcattcatattggtcactcggttaacaagattctgaaagacattatcgtgaagtccaaagggctttccggttatgactcgccgtatgtgcctggctgggactgccacggtctgccgatcgagctgaaagtagagcaagaatacggtaagccgggtgagaaattcaccgccgccgagttccgcgccaagtgccgcgaatacgcggcgacccaggttgacggtcaacgcaaagactttatccgtctgggcgtgctgggcgactggtcgcacccgtacctgaccatggacttcaaaactgaagccaatatcatccgcgcgctgggcaaaatcatcggcaacggtcacctgcacaaaggcgcgaagccggtacactggtgcgttgactgccgttctgcactggcagaagcggaagttgagtattacgacaaaacttctccgtccatcgacgttgctttccaggcggtcgatcaggatgcactgaaagcaaaatttgccgtaagcaacgttaacggcccaatctcgctggtgatctggaccactacgccgtggactctgcctgccaaccgcgcaatctccattgcacctgatttcgactatgcgctggtgcagatcgactgtcaggccgtgattctggcgaaagatctggttgaaagcgtaatgcagcgtatcggcgtgaccgattacaccattctcggcacggtaaaaggtgcggagcttgagctgctgcgctttagccatccgtttatgggcttcgacgttcctgcaatcctcggcgatcacgttaccctggatgccggtaccggtgccgttcacaccgcgcctggccacggcccggacgactatgtgattggtcagaaatacggcctggaaaccgctaacccggttggcccggacggcacttatctgccgggcacttaccagacgctggatggcgtgaacgtcttcaaagcgaacgacatcgttgttgcgctgctgcaggaaaaaggcgcgctgttgcacgttgagaaaatgcagcacagctatccgtgctgctggcgtcacaaaacgccgatcatcttccgcgcgacgccgcagtggttcgtcagcatggatcagaaaggtctgcgtgcgcagtcactgaaagagatcaaaggcgtgcagtggatcccggactggggccaggcgcgtatcgagtcgatggttgctaaccgtcctgactggtgtatctcccgtcagcgcacctggggcgtaccgatgtcactgttcgtgcataaagacacggaagagctgcatccgcgtaccctcgaactgatggaagaagtggctaaacgcgtggaagttgacggcatccaggcgtggtgggatctcgatgcgaaagagctcctcggcgatgaagctgatcagtacgtgaaagtgccggatacgctggatgtatggtttgactccggatctacccactcttccgttgttgacgtgcgtccggaatttgccggtcacgcagcggacatgtatctggaaggttctgaccaacaccgtggctggttcatgtcttccctgatgatctctaccgcgatgaagggcaaagcgccatatcgtcaggtactgactcacggctttaccgtggatggtcagggtcgcaagatgtctaaatccatcggtaacaccgtttcgccgcaggatgtgatgaataaactgggtgcggatattctgcgtctgtgggtggcatcaaccgactacactggcgaaatggccgtttctgacgagatcctgaaacgtgctgccgacagctatcgtcgtatccgtaacaccgcgcgcttcctgctggcaaacctgaacggttttgatccggcaaaagatatggtgaaaccggaagagatggtggtactggatcgctgggccgtaggttgtgcgaaagcggcacaggaagacatcctcaaggcgtacgaagcatacgatttccacgaagtggtacagcgtctgatgcgcttctgctccgttgagatgggttccttctacctcgacatcatcaaagaccgtcagtataccgccaaagcggacagcgtggcgcgtcgtagctgccagactgcgctgtatcacatcgcagaagcgctggttcgctggatggcaccaatcctctccttcaccgctgatgaagtgtggggttacctgccgggcgaacgtgaaaaatacgtcttcaccggcgattggtacgaaggcctgtttggtctggcagacagtgaagcaatgaacgatgcgttctgggacgagctgttgaaagtgcgtggcgaagtgaacaaagtcattgagcaagcgcgtgccgataagaaagtgggcggctcgctggaagcggcagtaaccttgtatgcagaaccggaactggcggcgaaactgaccgcgctgggcgatgaattacgatttgtcctgttgacctccggcgctaccgttgcagactataacgacgcacctgctgatgcccagcagagcgaagtcctcaaagggctgaaagtcgcgttgagtaaagccgaaggtgagaagtgccctcgctgctggcactacacccaggatgtcggcaaggtggcggaacacgcagaaatctgtggccgctgtgtcagcaacgtcgccggtgacggtgaaaaacgtaagtttgcctga

SEQ ID NO: 2807 - DNA, 942 bp, Escherichia coli
atgaagctgatacgcggcatacataatctcagccaggccccgcaagaagggtgtgtgctgactattggtaatttcgacggcgtgcatcgcggtcatcgcgcgctgttacagggcttgcaggaagaagggcgcaagcgcaacttaccggtgatggtgatgctttttgaacctcaaccactggaactgtttgctactgataaagccccggcacggctcacccggctgcgggaaaaactgcgttatcttgcagagtgtggtgttgattacgtgctgtgcgtgcgttttgacaggcgttttgcggcgttaaccgcgcaaaacttcatcagtgatcttctggtgaagcacttgcgggtaaaatttcttgccgtaggtgacgatttccgctttggcgctggtcgtgaaggcgatttcttgttattacagaaagcgggcatggaatacggcttcgatatcaccagcacgcaaactttttgcgaaggtggcgtgcgtatcagcagcaccgccgtgcgtcaggcgcttgcggatgacaatctggctctggcagaaagtttactggggcacccgtttgctatctccgggcgtgtagtccacggtgatgaattagggcgcactataggtttcccgacggcgaatgtaccgctacgccgtcaggtttccccggtgaaaggggtttatgcggtagaagtgttgggccttggcgaaaagccgttacccggcgttgcaaacatcggaacacgcccaacggttgccggtattcgccagcaactggaagtgcatttgttagatgttgcaatggacctttatggtcgccatatacaagtagtgctgcgtaaaaaaatacgcaatgagcagcgatttgcatcgctggacgaactgaaagcgcagattgcgcgtgatgaattaaccgcccgcgaattttttgggctaacaaaaccggcttaa

SEQ ID NO: 2808 - DNA, 264 bp, Escherichia coli
ttggctaatatcaaatcagctaagaagcgcgccattcagtctgaaaaggctcgtaagcacaacgcaagccgtcgctctatgatgcgtactttcatcaagaaagtatacgcagctatcgaagctggcgacaaagctgctgcacagaaagcatttaacgaaatgcaaccaatcgtggaccgtcaggctgctaaaggtctgatccacaaaaacaaagctgcacgtcataaggctaacctgactgcacagatcaacaaactggcttaa

SEQ ID NO: 2809 - DNA, 900 bp, Escherichia coli
atgtctcatatcaattacaaccacttgtattacttctggcatgtctacaaagaaggttctgtggttggcgcagcggaggcgctttatttaacaccacaaaccattaccgggcagatccgggcgctggaagagcgcctgcaagggaaactatttaagcgtaaaggacgtggtctggaacccagcgaactgggggaactggtctatcgctatgccgataaaatgttcaccttaagccaggaaatgctggatatcgtcaactatcgcaaagagtccaacttattgtttgatgttggtgtggcagatgcactttccaaacgtctggtcagcagtgttctggatgccgcagttgtggaagacgagcagatccatctacgctgtttcgaatcgacgcacgagatgcttttagagcagttgagtcagcataaactggatatgatcatctctgactgtccgatcgattccactcagcaggaagggctgttttccatgaaaattggcgaatgtggtgtcagtttctggtgcactaacccactaccagaaaagccgtttcctgcctgtcttgaagagcgtcgtttacttattccggggcgtcgctcaatgttggggcgtaaactattaaactggtttaactcccagggcttgaacgtcgaaattttgggtgagtttgatgatgctgcgttgatgaaagcctttggggcgacgcataacgctattttcgttgcaccttcgctttacgctaatgatttctataacgatgactcggttgtggagataggccgtgttgagaacgtgatggaagagtaccacgcgatttttgccgaaaggatgattcagcaccctgcagtacagcgtatctgcaatacagactattctgcgctgtttactccagcttcaaaataa

SEQ ID NO: 2810 - DNA, 1167 bp, Escherichia coli
gtgaaacatctgcatcgattctttagcagtgatgcctcgggaggcattattctcattattgccgctgtattagcgatgattatggccaacagcggtgcaaccagtggatggtatcacgactttcttgagacgccggttcagctccgggttgggacacttgagatcaacaagaacatgctgctatggatcaatgacgctctgatggcggtatttttcctgttggttggtctggaagttaaacgcgagctgatgcaaggttcgctggccagtctgcgccaggcggcatttcctgttattgccgcaatcggcgggatgattgtcccggcattgctctatctggcttttaactatgccgatccgattacccgcgaaggctgggcaatcccggcggcgactgacattgcctttgcacttggtgtgttggcgctgttgggaagtcgtgttccgttagcgctgaagatctttttgatggctctggctattatcgacgatcttggggccatcattatcatcgcattgttctacactaatgacttatcgatggcctctcttggcgtcgcggctgtagcaattgcggtactcgcggtattgaatctgtgtggtgtacgccgcacgggcgtttatattctggttggcgtggtgctgtggacagcggtgttgaaatcgggggttcacgcaaccctggctggcgtcattgtcggcttctttattcctttgaaagagaagcatgggcgctctccggctaaacgtctggagcatgttttgcatccatgggtggcgtatctgattttgccgctgtttgcatttgctaatgctggcgtttcactgcaaggtgtcacgctggaaggtttgacctccatcctgccattagggatcatcgctggtttgctgattggcaagccactgggtattagtctgttctgctggttggcgctgcgtttgaaattggcacatctgccagagggaacgacttaccagcaaattatggcggttggtatcctgtgcggtatcggttttactatgtctatctttattgccagcctggcatttggtagcgtagatccagaactgattaactgggcaaaattaggtatccttgtcggttcaatttcttcggcggtaattggatatagctggttacgcgttcgtttacgtccatcagtttga

SEQ ID NO: 2811 - DNA, 1260 bp, Escherichia coli
atgtttaccaacgtaaacgttgattgttgcaaaacaccaggatgtaaaaacctggggttgctgaatagccaggattatgtcgcacagggtaaaaatattttatgccgtgaatgtggttacttgtttccagtgatatctgaacagtcgcttaatatttatcgtaatattgtgaatcactcctggagaggtttgatttgccaatgttcaacttgcggaggcacgtccctcaaaaaatatggatattctgcacaaggccagagaagaatgtattgccatcattgtgagaaaacatttatcactctggaacatgtaattaccacaccacgaggagccctgttagcattgatgattgagcaaggggaggcacttgcggatatcagaaagtcattacttcttaacagcactggacttagccgtgaactgttaaaattagcgcgtgaagcaaactataaagaaagtcgacagtgtttcccagcttctgatattaccctgagtacccgcgcttttcgcgtcaagtataatggtagcaataactctctttatgctcttgttaccgcagaagaacaaagcggcagggtggttgccatctcaaccaattactccccatctgccgtagagcaacattatcaatacacatcgaactatgaagagcgtatgtctccagggacgctggcacatcatgtccagcgcaaagagttacttactatgcggcgggataccttgtttgatattgattacggcccggcagttttacatcaaaacgatccgggaatgttggtaaaaccggttcttccggcatatcgtcattttgaactggtcagaatactgaccgatgagcattccaacaacgttcagcattaccttgatcacgaatgctttatattgggcggctgcctgatggctaatttgcagcatattcatcaaggtcgctgccatatttcctttgtcaaagagcgcggtgtggcacccgccaccattgattttccaccgcgattattccttagtggtggggtacgaaataatgtctggcgtgcattttctaaccgcaattattcaatggctgtatgcaatctcactggcagtaagaaagtccgcgagatgcggcatgcaacattgaacagtgcgacgcgttttatccactttgtggagaaccatcctttccttatatcattgaaccgaatgtctcctgcgaatgtcgtttctacattagatatcctcaaacatctgtggaataaaaaactagagcatggaacaatttaa

SEQ ID NO: 2812 - DNA, 1494 bp, Escherichia coli
atgcagaaaacgttaatggccagtttgatcggccttgcagtttgcacagggaatgcttttagtcctgccttagccgcagaggctaaacaacctaatttagtcattattatggcggatgatttaggttatggcgatttagcaacatatggtcatcagatcgttaaaacacctaatatcgacaggcttgcccaggaaggggtcaaatttactgactactatgcccccgctcctttaagttcaccttcacgcgcagggctattaaccggccggatgccatttcgtactggaattcgctcatggattccttcaggcaaagatgttgccttagggcgtaacgaactcacgattgctaatctactcaaagcgcaagggtacgacacggcaatgatgggtaagctgcatctgaatgcaggcggcgatcgcaccgatcagccacaagcacaagatatgggctttgattactcactggttaatacggcgggctttgttaccgacgccacgctggataacgctaaagaacgcccgcgttatggcatggtttacccgacaggctggctacgtaacgggcaacccactccacgagccgataaaatgagcggtgagtatgtcagttcggaagtcgtcaactggctggataacaaaaaggacagcaagcctttcttcctctatgttgcttttaccgaagtgcatagccccctggcttcgcccaaaaaatacctcgatatgtactcacaatatatgagcgcgtatcagaagcagcatcgtgatttattttatggcgactgggcagacaaaccctggcgtggtgtgggggaatattatgccaatatcagctatctggatgcacaggttggaaaagtgctggataaaatcaaagcgatgggtgaagaagataacacaatcgttatttttaccagtgataacggtccggtaacgcgtgaagcgcgcaaagtgtatgagctgaatttggcaggggaaacggatggattacgcggtcgcaaggataacctttgggaaggcggaattcgtgttccagccattattaaatatggtaaacatctaccacagggaatggtttcagatacacccgtttatggtctggactggatgcctactttagcgaaaatgatgaacttcaaattacctacagaccgtactttcgatggtgaatcgctggttcctgttcttgagcaaaaagcattgaaacgcgaaaagccattaattttcgggattgatatgccattccaggatgatccaaccgatgaatgggcgatccgtgatggtgactggaagatgattatcgatcgcaataataaaccgaaatatctctacaatctgaaatctgatcgttatgaaacacttaatctgatcggtaaaaaaccagatattgaaaaacagatgtatggtaagtttttaaaatataaaactgatattgataatgattctctaatgaaagccagaggtgataaaccagaagcggtgacctggggctaa

SEQ ID NO: 2813 - DNA, 762 bp, Escherichia coli
atgtctgccaaaagacgacttcttattgcgtgtaccttgataacagctatctatcattttcctgcatattcttcattagaatataaaggaacctttggttcaataaatgcgggttatgcagactggaatagtggatttgtaaacactcaccgtggtgaagtatggaaagtgactgcggattttggggtaaattttaaagaagcagaattttactcattttatgaaagtaatgtactcaatcatgctgtagcagggagaaatcatacggtttcagcaatgacgcatgtcagactctttgactctgatatgacattctttggcaaaatttatggccaatgggataactcatggggtgacgatctggacatgttttatggattcggttacctcggctggaacggcgagtggggcttttttaaaccgtatattggattgcataatcaatctggtgactacgtatcagctaaatatggtcaaacgaatggttggaatggttatgttgttggctggacagcagtattaccatttacgttatttgacgaaaaatttgttttatctaactggaatgaaatagaactggacaggaacgatgcttacacggagcagcaatttggccggaacgggttaaatggcggtttaactattgcctggaagttctatcctcgctggaaagcaagtgtgacgtggcgttatttcgataataagctgggctacgatggctttggcgatcaaatgatttatatgcttggttatgatttctaa

SEQ ID NO: 2814 - DNA, 291 bp, Escherichia coli
atgtgttctgcatatagggggcctcgggttgatggtaaaatatcactcggggcttttctctatctgccgttcagccaatgcctgagacagacagcctcaagcacccgccgctattatactgcgcttttaattcacttctgttttatcaattctttttctgaagacgcctcgcatttttgcggaataatatttcaatacatcaatttatttaacttaaatatatccagggattcacaaaaaaaggtgttttcctctatcaaaagtgaatggctaaaggaaattaattattaa

SEQ ID NO: 2815 - DNA, 153 bp, Escherichia coli
atgaagcagcataagccgatgattgtcgccctgatcgtcatctgtatcaccgccgtagtggcggcgctggtaacgagaaaagacctctgtgaggttcacatccgaactggccagacggaggttgctgttttcacggcttacgaatccgagtaa

SEQ ID NO: 2816 - DNA, 1131 bp, Escherichia coli
atggctaagcaagattattacgagattttaggcgtttccaaaacagcggaagagcgtgaaatcaaaaaggcctacaaacgcctggccatgaaataccacccggaccgtaaccagggtgacaaagaggccgaggcgaaatttaaagagatcaaggaagcttatgaagttctgaccaactcgcaaaaacgtgcggcatacgatcagtatggtcatgctgcgtttgagcaaggcggcatgggcggcggcggttttggcggcggcgcagacttcagcgatatttttggtgacgttttcggcgatatttttggcggcggacgtggtcgtcaacgtgcggcgcgcggtgctgatttacgctataacatggagctcaccctcgaagaagctgtacgtggcgtgaccaaagagatccgcattccgactctggaagagtgtgacgtttgccacggtagcggtgcaaaaccaggtacacagccgcagacctgtccgacctgtcatggttctggccaggtgcagatgcgccagggtttctttgccgtgcagcagacctgtccacactgtcagggccgcggtacgctgatcaaagatccgtgcaacaaatgtcatggtcatggtcgtgttgagcgcagcaaaacgctgtccgttaaaatcccggcaggggtggacactggagaccgcatccgtcttgcgggcgaaggtgaagcgggtgaacacggcgcaccggcaggcgatctgtacgttcaggttcaggttaaacagcacccgattttcgagcgtgaaggcaacaacctgtattgcgaagtcccgatcaacttcgctatggcggcgctgggtggtgaaatcgaagtaccgacccttgatggtcgcgtcaaactgaaagtgcctggcgaaacccagaccggtaagctgttccgtatgcgcggtaaaggcgtcaagtctgtccgcggtggcgcacagggtgatttgctatgccgcgttgttgtcgaaacaccggtaggtttgaacgagaagcagaaacagctgctgcaagagctgcaagaaagctttggtggcccaaccggcgagcacaacagcccgcgttcaaagagcttctttgatggcgtgaagaagttttttgacgacctgactcgctaa

SEQ ID NO: 2817 - DNA, 1917 bp, Escherichia coli
atgggtaaaataattggtatcgacctgggtactaccaactcttgtgtagcgattatggatggcaccactcctcgtgtactggagaacgccgaaggcgatcgcaccacgccttctatcattgcctatacccaggatggtgaaactctggttggtcagccggctaaacgtcaggcagtgacgaacccgcaaaacaccctgtttgcgattaaacgcctgattggccgccgcttccaggacgaagaagtacagcgtgatgtttccatcatgccgttcaaaattattgctgctgataacggcgacgcatgggtcgaagttaaaggccagaaaatggcaccgccgcagatctctgctgaagtgctgaaaaaaatgaagaaaaccgctgaagattacctgggtgaaccggtaactgaagctgttattaccgtaccggcatactttaacgatgctcagcgtcaggcaaccaaagacgcaggccgtatcgctggtctggaagtaaaacgtatcatcaacgaaccgaccgcagctgcgctggcttacggtctggacaaaggtactggcaaccgtactatcgcggtttatgacctgggtggtggtactttcgatatttccattatcgaaatcgacgaagttgacggcgaaaaaaccttcgaagttctggcaaccaacggtgatacccacctgggtggtgaagacttcgacagtcgtctgatcaactatctggttgaagaattcaagaaagatcagggcattgacctgcgcaacgatccgctggcaatgcagcgcctgaaagaagcggcagaaaaagcgaaaatcgaactgtcttccgctcagcagaccgacgttaacctgccgtacatcactgcagacgcgaccggtccgaaacacatgaacatcaaagtgactcgtgcgaaactggaaagcctggttgaagatctggtaaaccgttccattgagccgctgaaagttgcactgcaggacgctggcctgtccgtatctgatatcgacgacgttatcctcgttggtggtcagactcgtatgccaatggttcagaaaaaagttgctgaattctttggtaaagagccgcgtaaagatgttaacccggacgaagctgtagccatcggtgctgctgttcagggtggtgttctgactggtgacgtaaaagacgtactgctgctggacgttaccccgctgtctctgggtatcgaaaccatgggcggtgtgatgaccacgctgatcgcgaaaaacaccactatcccgaccaagcacagccaggtgttctctaccgctgaagacaaccagtctgcggtaaccatccatgtgctgcagggtgaacgtaaacgtgcggctgataacaaatctctgggtcagttcaacctggatggtatcaacccggcaccgcgcggcatgccgcagatcgaagttaccttcgatatcgatgctgacggtatcctgcacgtttccgcgaaagacaaaaacagcggtaaagagcagaagatcactatcaaggcttcttctggtctgaacgaagatgaaatccagaaaatggtacgcgacgcagaagctaacgccgaagctgaccgtaagtttgaagagctggtacagactcgcaaccagggcgaccatctgctgcacagcacccgtaagcaggttgaagaagcaggcgacaaactgccggctgacgacaaaactgctatcgagtctgcgctgactgcactggaaactgctctgaaaggtgaagacaaagccgctatcgaagcgaaaatgcaggaactggcacaggtttcccagaaactgatggaaatcgcccagcagcaacatgcccagcagcagactgtcggtgctgatgcttctgcaaacaacgcgaaagatgacgatgttgtcgacgctgaatttgaagaagtcaaagacaaaaaataa

SEQ ID NO: 2818 - DNA, 405 bp, Escherichia coli
atgaaatccgttattacgatttccgccagcctggcgattagcctgatgctgtgctgcacggcgcaggcaaacgaccataaaatcctcggcgtcattgcaatgccgcgaaacgaaaccaacgatctggcgctgaaacttcctgtttgtcgcattgttaaacgcatacaactctcagccgaccatggcgatttgcagttaagcggtgcatcgatttatttcaaagccacccgaagcgccagtcagaccctgaatattccttcagaaataaaagaagggcaaaccactgactggatcaacattaacagcgataacgacaacaaacgctgcgtctcaaaaatcaccttttccggtcatacagtgaactcatcggatatggccacgctgaaaattatcggcgacgactaa

SEQ ID NO: 2819 - DNA, 714 bp, Escherichia coli
atgaatgttaattacctgaatgattcagatctggattttctccagcattgtagtgaggaacagttggcaaatttcgcccggctgctcacccataatgaaaaaggcaaaactcgcctctccagcgtactgatgcgcaacgaactgtttaaatcgatggaaggacatcccgagcgacaccgccgcaactggcagctgattgccggagaattacagcattttggtggcgatagtatcgccaacaaactgcgcggacacggtaaattgtatcgcgccattttgctcgatgtttcaaagcgattgaagctgaaagccgacaaagagatgtctacgtttgaaattgagcaacagttactggaacaatttctgcgtaatacctggaagaaaatggacgaggaacataagcaggagtttctgcacgcggtcgatgccagggtgaatgagctggaagagctgctgccgctgctgatgaaagacaaattattggcaaaaggtgtgtcgcatttgctttccagccaattgacccgcattttacgcacccacgcagcaatgagcgtgcttgggcatggtttgctgcgcggcgcgggtctgggaggccctgtgggcgcagcattaaatggggttaaagcggtcagcggcagtgcctatcgcgtgacaattccagccgtactgcaaatcgcctgcctgcgccggatggttagcgccactcaggtctga

SEQ ID NO: 2820 - DNA, 567 bp, Escherichia coli
atgggcaacactaagttggctaatccggcaccgctgggcctgatgggcttcggcatgaccaccattctgcttaacctgcacaacgtgggttattttgctctggacggtattattcttgccatgggcattttctacggcggcatcgcgcaaatttttgccggtctgctggagtacaaaaaaggcaacactttcggtttaaccgcattcacctcttacggttctttctggctgacgctggttgcaattctgctgatgccgaaactggggctgaccgatgcgccaaatgcccagttccttggtgtctacctgggtctgtggggcatatttacgctgtttatgttcttcggcacgctgaaaggcgcacgcgttctgcaattcgttttctttagcctgaccgtgctgtttgccctgctggcgatcggtaacattgccggtaacgccgcgatcatccactttgccggctggattggtcttatctgcggtgccagtgcaatctatctggcgatgggtgaagtgctgaacgagcagtttggtcgcaccgttctgccgattggtgagtctcactaa

SEQ ID NO: 2821 - DNA, 588 bp, Escherichia coli
atgaatactttacgtattggcttagtttccatctctgatcgcgcatccagcggcgtttatcaggataaaggcatccctgcgctggaagaatggctgacatcggcgctaaccacgccgtttgaactggaaacccgcttaatccccgatgagcaggcgatcatcgagcaaacgttgtgtgagctggtggatgaaatgagttgccatctggtgctcaccacgggcggaactggccctgcgcgtcgtgacgtaacgcccgatgcgacgctggcagtagcggaccgcgagatgccaggctttggtgaacagatgcgccagatcagcctgcattttgtaccaactgcgatcctttcgcgtcaggtgggggtgattcgcaaacaggcgctgatccttaacttacccggtcaaccgaagtctattaaagagacgctggaaggtgtgaaggacgctgagggtaacgttgtggtgcacggtatttttgccagcgtaccgtactgcattcagttgctggaagggccatacgttgaaacggcaccggaagtggttgcagcattcagaccgaagagtgcaagacgcgaagttagcgaataa

SEQ ID NO: 2822 - DNA, 954 bp, Escherichia coli
atgacggacaaattgacctcccttcgtcagtacaccaccgtagtggccgacactggggacatcgcggcaatgaagctgtatcaaccgcaggatgccacaaccaacccttctctcattcttaacgcagcgcagattccggaataccgtaagttgattgatgatgctgtcgcctgggcgaaacagcagagcaacgatcgcgcgcagcagatcgtggacgcgaccgacaaactggcagtaaatattggtctggaaatcctgaaactggttccgggccgtatctcaactgaagttgatgcgcgtctttcctatgacaccgaagcgtcaattgcgaaagcaaaacgcctgatcaaactctacaacgatgcaggtattagcaacgatcgtattctgatcaaactggcttctacctggcagggtatccgtgctgcggaacagctggaaaaagaaggcatcaactgtaacctgaccctgctgttctccttcgctcaggctcgtgcttgtgcggaagcgggcgtgttcctgatctcgccgtttgttggccgtattcttgactggtacaaagcgaataccgataagaaagagtacgctccggcagaagatccgggcgtggtttctgtatctgaaatctaccagtactacaaagagcatggttatgaaaccgtggttatgggcgcaagcttccgtaacatcggcgaaattctggaactggcaggctgcgaccgtctgaccatcgcaccggcactgctgaaagagctggcggagagcgaaggggctatcgaacgtaaactgtcttacactggtgaagtgaaagcgcgtccggcgcgtatcactgagtccgagttcctgtggcagcacaaccaggatccaatggcagtagataaactggcggaaggtatccgtaagtttgctgttgaccaggaaaaactggaaaaaatgatcggcgatctgctgtaa

SEQ ID NO: 2823 - DNA, 1431 bp, Escherichia coli
atgccagattttttctcctttattaacagcgtcctttggggatcggtaatgatttacctgctcttcggcgcaggttgttggttcacttttcgcaccggatttgtgcagtttcgctacatccgccagtttggcaaaagtcttaaaaatagcattcatccacagccaggcggtttaacctcatttcagtcattgtgtaccagtcttgcagcgcgcgtgggtagcggcaacctggccggcgttgcgctggcaattaccgccggtggacctggagccgtcttctggatgtgggttgccgcatttatcggcatggcgacctcgtttgccgaatgttccctcgcacagctttataaagaacgtgatgccaatgggcagtttcgtggcggaccggcatggtatatggcgcgcgggctggggatgcgctggatgggcgttctgttcgccgtctttttgctcatcgcctacgccataattttcagcggagttcaggcgaacgccgttgcgcgagccctgagtttttcttttgattttcccccgctggtgacaggtattattctcgctatctttgctatgctggcgatcactcgcggtcttcatggcgtcgcccggctcatgcaggggtttgtcccgttgatggcgataatctgggtactgacctgcctggtgatttgcgtaatgaatatcgggcaacttccccacgtcatttggtctatttttgagagtgcttttggctggcaggaagctgcaggcggcgcggcgggatataccttaagccaggcgattactaacggttttcagcgcagtatgttttccaatgaggcgggaatggggtcgacgccaaacgcggcagcggcagctgcgtcctggcctccgcatccggcagcgcaaggaattgtccagatgattggcatttttatcgacaccctggtcatctgtacggcaagcgccatgctgatattactggcgggtaacggcacaacctacatgccgctggaaggtattcagcttatccagaaggcgatgcgggtgctaatgggttcctggggtgcggagtttgttaccgtcgtggttattctgtttgccttcagctccatcgttgccaactacatttatgccgaaaacaatctcttctttttacgcctgaacaaccctaaagcgatctggtgtctgcggatctgcaccttcgcaacggtcatcggcggcaccttgctaagtcttccgctgatgtggcaactggcagatatcattatggcctgcatggctattaccaatttgaccgccatattactgctctcgcctgtggttcataccattgccagtgattatctacgccagcgtaaactcggcgtgcgcccggtgtttgatccgttgcgttatccggagatcggtcgccagctttctccagacgcgtgggatgatgtttcgcaggagtaa

SEQ ID NO: 2824 - DNA, 777 bp, Escherichia coli
atgctgattcttatttcacctgcgaaaacgcttgattaccaaagcccgttgaccaccacgcgctatacgctgccggagctgttagacaactcccagcagctgatccatgaagcgcggaaactgacgcccccgcagattagctccctgatgcgcatcagcgacaaactggcgggtatcaacgccgctcgctttcatgactggcagccagatttcacaccggagaatgcccgccaggcaattctggcgtttaaaggtgatgtctacactggcttgcaggccgaaaccttcagcgaagacgatttcgattttgcccaacagcatttgcgaatgctttccggcttgtatggcgtactgcgcccgctcgatttaatgcagccttatcgtctggaaatggggatacgtcttgagaatgcccgagggaaagatctgtatcaattctggggagatatcatcaccaacaagctgaacgaggcgctcgcagcacaaggcgataatgtggtgataaatctggcgtcagatgagtattttaaatcggtgaagccgaagaaattgaatgccgagattatcaagccagtgttcctcgatgagaagaacggcaaatttaagataatcagcttctacgctaagaaagcacgcggtctgatgagtcgtttcattattgaaaatcggctgaccaaaccagagcaactgactggttttaatagcgaaggttacttctttgatgaagcttcctccagcaacggcgaactggtgtttaaacgctacgaacaacgttaa

SEQ ID NO: 2825 - DNA, 297 bp, Escherichia coli
gtgaaaaagatgcaatctatcgtactcgcactttccctggttctggtcgctcccatggcagcgcaggctgcggaaattacgctagtcccgtcagtaaaattacagataggcgatcgtgataatcgtggctattactgggatggcggtcactggcgcgaccacggctggtggaaacaacattatgaatggcgaggcaatcgctggcacccatatggaccgccgccaccgccgcgccataacaagcacaatgatcatcgtggcgatcatcgtccggggcctgacaaacatcatcgctaa

SEQ ID NO: 2826 - DNA, 1287 bp, Escherichia coli
atgaaactctacaatctgaaagatcacaatgagcaggtcagctttgcgcaagccgtaacccaggggttgggcaaaaatcaggggctgtttttcccgcacgacctgccggaattcagcctgactgaaattgatgagatgctgaagctggattttgtcacccgcagtgcgaagatcctctcggcgtttattggtgatgaaatcccgcaggaaatcctggaagagcgcgtacgcgcggcgtttgccttcccggctccggtcgccaatgttgaaagcgatgtcggttgtctggaattgttccacgggccaacgctggcatttaaagatttcggcggtcgctttatggcacaaatactgacccatattgcgggcgataagccagtgaccattctgaccgcgacatccggtgatactggagcggcagtggctcatgctttctacggtttaccgaatgtgaaagtggttatcctctatccacgaggcaaaatcagtccactgcaagaaaaactgttctgtacattgggcggcaatatcgaaactgttgccatcgacggcgatttcgatgcctgtcaggcgctggtgaagcaggcgtttgatgatgaagaactgaaagtggcgctggggctgaattctgctaactccatcaacatcagtcgcttgctggcgcagatttgttattactttgaggctgtcgcacagttgccgcaagaagcacgtaaccagttggttgtctcggtaccgagtggaaacttcggtgatttaacggcaggcctgctggcgaagtcactcggtctgccggtgaagcgttttatcgctgccactaacattaacgatacggtgccacgtttcctgcacgacggtcagtggtcacccaaagcgactcaggcgacgttatccaatgcgatggatgttagccagccaaacaactggccgcgtgtggaagagttgttccgccgcaaaatctggcaactgaaagagctggggtatgcagccgtggatgatgaaaccacgcaacagacaatgcgtgagttaaaagaactgggctatacctcggagccgcacgctgccgtagcttatcgtgcgctgcgtgaccagttgaatccaggcgaatatggcttgttcctcggcaccgcgcatccggcgaaatttaaagagagcgtggaagcgattctcggtgaaacgttggatctgccaaaagagctggcagaacgtgctgatttacccttgctttcgcataacctgcccgccgattttgctgcgttgcgtaaattgatgatgaatcatcagtaa

SEQ ID NO: 2827 - DNA, 933 bp, Escherichia coli
atggttaaagtttatgccccggcttccagtgccaatatgagcgtcgggtttgatgtgctcggggcggcggtgacacctgttgatggtgcattgctcggagatgtagtcacggttgaggcggcagagacattcagtctcaacaacctcggacgctttgccgataagctgccgtcagagccacgggaaaatatcgtttatcagtgctgggagcgtttttgccaggagcttggcaagcaaattccagtggcgatgactctggaaaagaatatgccgatcggttcgggcttaggctccagcgcctgttcagtggtcgcggcgctgatggcgatgaatgaacactgcggcaagccgcttaatgacacccgtttgctggctttgatgggcgagttggaagggcgtatctccggcagcattcattacgacaacgtggcaccgtgttttcttggtggtatgcagttgatgatcgaagaaaacgacatcatcagccagcaagtgccagggtttgatgagtggctgtgggtgctggcgtatccggggattaaagtctcgacggcagaagccagggctattttaccggcgcagtatcgccgccaggattgcattgcgcacgggcgacatctggcaggctttattcacgcctgctattcccgtcagcctgagcttgccgcgaatctgatgaaagatgttatcgctgaaccctaccgtgaacggttactgcctggtttccggcaggcgcggcaggcggtcgcggaaatcggcgcggtagcgagcggtatctccggctccggcccgactttgttcgctctgtgtgacaagccggataccgcccagcgcgttgccgactggttgggtaagaactacctgcaaaatcaggaaggttttgttcatatttgccggctggatacggcgggcgcacgagtactggaaaactaa

SEQ ID NO: 2828 - DNA, 2463 bp, Escherichia coli
atgcgagtgttgaagttcggcggtacatcagtggcaaatgcagaacgttttctgcgggttgccgatattctggaaagcaatgccaggcaggggcaggtggccaccgtcctctctgcccccgccaaaatcaccaaccatctggtagcgatgattgaaaaaaccattagcggccaggatgctttacccaatatcagcgatgccgaacgtatttttgccgaacttctgacgggactcgccgccgcccagccgggatttccgctggcacaattgaaaactttcgtcgaccaggaatttgcccaaataaaacatgtcctgcatggcatcagtttgttggggcagtgcccggatagcatcaacgctgcgctgatttgccgtggcgagaaaatgtcgatcgccattatggccggcgtgttagaagcgcgtggtcacaacgttaccgttatcgatccggttgaaaaactgcttgcagtggggcattacctcgaatctaccgttgatattgctgaatccacccgccgtattgcggcaagccgcattccggctgaccacatggtgctgatggctggtttcactgccggtaatgaaaaaggcgagctggtggttctgggacgcaacggttccgactactccgctgcggtgctggcggcctgtttacgcgccgattgttgcgagatctggacggatgttgacggtgtttatacctgcgatccgcgtcaggtgcccgatgcgaggttgttgaagtcgatgtcctatcaggaagcgatggagctttcttacttcggcgctaaagttcttcacccccgcaccattacccccatcgcccagttccagatcccttgcctgattaaaaataccggaaatcctcaagcaccaggtacgctcattggtgccagccgtgatgaagacgaattaccggtcaagggcatttccaatctgaataacatggcaatgttcagcgtttccggcccggggatgaaagggatggttggcatggcggcgcgtgtctttgcagcgatgtcacgcgcccgtatttccgtggtgctgattacgcaatcatcttccgaatacagtatcagtttctgcgttccgcaaagcgactgtgtgcgagctgaacgggcaatgcaggaagagttctacctggaactgaaagaaggcttactggagccgttggcggtgacggaacggctggccattatctcggtggtaggtgatggtatgcgcaccttacgtgggatctcggcgaaattctttgccgcgctggcccgcgccaatatcaacattgtcgccattgctcagggatcttctgaacgctcaatctctgtcgtggtcaataacgatgatgcgaccactggcgtgcgcgttactcatcagatgctgttcaataccgatcaggttatcgaagtgtttgtgattggcgtcggtggcgttggcggtgcgctgctggagcaactgaagcgtcagcaaagctggttgaagaataaacatatcgacttacgtgtctgcggtgttgctaactcgaaggcactgctcaccaatgtacatggccttaatctggaaaactggcaggaagaactggcgcaagccaaagagccgtttaatctcgggcgcttaattcgcctcgtgaaagaatatcatctgctgaacccggtcattgttgactgtacttccagccagactgtggcagatcaatatgccgacttcctgcgcgaaggtttccacgttgttacgccgaacaaaaaggccaacacctcgtcgatggattactaccatcagttgcgttatgcggcggaaaaatcgcggcgtaaattcctctatgacaccaacgttggggctggattaccggttattgagaacctgcaaaatctgctcaatgctggtgatgaattgatgaagttctccggcattctttcaggttcgctttcttatatcttcggcaagttagacgaaggcatgagtttctccgaggcgaccacactggcgcgggaaatgggttataccgaaccggacccgcgagatgatctttctggtatggatgtggcgcgtaagctattgattctcgctcgtgaaacgggacgtgaactggagctggcggatattgaaattgaacctgtgctgcccgcagagtttaacgccgagggtgatgtcgccgcttttatggcgaatctgtcacagctcgacgatctctttgccgcgcgtgtggcgaaggcccgtgatgaaggaaaagttttgcgctatgttggcaatattgatgaagatggcgtctgccgcgtgaagattgccgaagtggatggtaatgatccgctgttcaaagtgaaaaatggcgaaaacgccctggccttctatagccactattatcagccgctgccgttggtactgcgcggatatggtgcgggcaatgacgttacagctgccggtgtctttgctgatctgctacgtaccctctcatggaagttaggagtctga

SEQ ID NO: 2829 - DNA, 687 bp, Escherichia coli
atgcgtataacgattattctggttgcacccgccagagcagaaaatattggggcagcggcgcgggcaatgaaaacgatgggttttagcgaactgcggattgttgatagtcaggcacacctggagccagccgcccgttgggtcgcacatggatctggtgatattattgataatattaaagttttcaagacactagctgaatcgttacacgatgtcgatttcactgttgccaccactgcgcgcagtcgggcgaaatatcattactacgctacgccagtagaactggtgccgctgttagaggaaaaatcttcatggatgagccatgccgctctggtgtttggtcgcgaagattccgggctgactaacgaagagttagcgttggctgacgttcttactggtgtgccgatggtggcggattatccttcgctcaatctggggcaggcagtgatggtctattgctatcaattagcaacattaatacaacaaccggcgaaaagtgacacaacggcagaccaacatcaactgcaagctttacgcgaacgagccatgacattgctgacgactctggcagtggcagatgacataaaactggtcgactggttacaacaacgcctggggcttttagagcaacgagacacggcaatgttgcaccgtttgctgcatgatattgaaaaaaatatcaccaaataa

SEQ ID NO: 2830 - DNA, 717 bp, Escherichia coli
atgcagaccccgcacattcttatcgttgaagacgagttggtaacacgcaacacgttgaaaagtattttcgaagcggaaggctatgatgttttcgaagcgacagatggcgcggaaatgcatcagatcctctctgaatatgacatcaacctggtgatcatggatatcaatctgccgggtaaaaacggtcttctgttagcgcgtgaactgcgcgagcaggcgaatgttgcgttgatgttcctgactggccgtgacaacgaagtcgataaaattctcggcctcgaaatcggtgcagatgactacatcaccaaaccgttcaacccgcgtgaactgactattcgtgcacgcaacctgctgtcccgtaccatgaatctgggtactgtcagcgaagaacgtcgtagcgttgaaagctacaagttcaatggttgggaactggacatcaacagccgttcgttgatcggccctgatggcgagcagtacaagctgccgcgcagcgagttccgcgccatgcttcacttctgtgaaaaccctggcaaaattcagtcccgtgctgaactgctgaagaaaatgactggccgtgagctgaaaccgcacgaccgtactgtagacgtgacgatccgccgtattcgtaaacatttcgaatctacgccggatacgccggaaatcatcgccaccattcacggtgaaggttatcgcttctgcggtgatctggaagattaa

SEQ ID NO: 2831 - DNA, 1353 bp, Escherichia coli
atgttgaaatcccccctgttctggaaaatgaccaccttgtttggtgcagtattgctgttgttgattccgataatgctgattcggcaggtgattgtcgaacgtgccgattaccgtagcgatgtggaagatgtgattcgccaaagtaccagcgggccgcaaaaactcgttgggccgctcatcgctattcctgtgaccgagctttatacggtgcaggaagacgataaaaccgtggagcggaaaagaagttttattcatttttggttacctgagtcattgatggttgatggcaatcagaacgtggaagaacgcaagataggcatctataccggtcaggtctggcacagtgatttaacgctaaaagccgatttcgatgtttcgcgtcttagcgaactcgacgcgccaaatatcaccttaggcaagccatttattgtgattagcgtcggggatgcgcgtggtattggtgtggtgaaagcgcctgaagttaacggtacggcgctgaccattgaacccggcaccgggttagagcaaggcgggcagggcgtgcatatccctttacccgaaggggactggcgcaagcagaacctgaagctgaatgtggcgctgaatttaagcggtaccggcgatctttctgtggtgcctggcgggcgttatagcgaaatgaccttaaccagcaactggccgcatcccagttttttaggtgattttctaccagccaaacgggaagttagcgagtcaggttttcaggcgcaatggcaaagtagttggtttgctaataatctcggtgagcgttttgcttcaggcaatgataccggctgggaaaacttccccgcgtttagcgtcgcagtgacgacgccagccgatcaataccaattaacggaccgggcgactaagtacgccattctgctgattgcgctgacttttatggcattctttgtttttgaaacgctcaccgcgcaacgtttacacccaatgcaatatttgctggtggggctgtcattggtgatgttttatttgctcttgctggcgctttctgaacataccggttttactgtggcatggataatcgccagtctgattggggcgttaatgaacggtatttatttgcaggcggtattgaaaggctggcgtaatagcatgttgtttaccctcgcgctgttgttgctggatggtgtgatgtggggactgctcaactctgccgatagcgcgctgttgttgggaaccagtgtactggtggtggcgctggccggcatgatgtttgtgacccgtaatatcgactggtatgcgttttcactgccgaaaatgaaagccagtaaagaagttacaacggacgatgaattacgtatctggaaataa

SEQ ID NO: 2832 - DNA, 1425 bp, Escherichia coli
atgcgtatcggcatgcggttgttgctgggctattttttactggtggcggtggcggcctggttcgttctggctatttttgtcaaagaagttaaaccgggcgtgcgaagagcaaccgaggggacgttaatcgacaccgcaacgttgctggcggagctggcgcgtcccgatttgctctctggggacccaacgcatgggcaactggcgcaggcgtttaatcagctacaacatcgcccgtttcgcgccaatatcggtggcattaacaaagtgcgcaacgaatatcatgtctatatgaccgatgcgcagggcaaagtattgtttgattcagcaaataaagccgttggacaggattattcgcgctggaatgacgtctggctaacgttgcgtggtcagtatggtgcgcgcagcacgttgcaaaatcctgccgatcccgaaagttctgtgatgtatgttgccgcgccgattatggacggctcgcggcttattggcgttttgagcgtaggcaaaccgaacgcggcgatggctccggtcattaagcgtagcgagcggcgaattttatgggccagcgccattttgttggggattgcactggtgattggcgcaggcatggtttggtggatcaaccgctctattgcccggctcactcgctatgctgattccgtcactgacaataagcccgttcctctccccgatctcggtagtagcgagttgcgtaaactcgcgcaggcgctggaaagtatgcgcgtgaagctggaagggaaaaactatattgagcagtatgtttatgcgttaactcatgagctaaaaagcccactggcggcgattcgtggcgcggcggaaattttacgcgaaggtccgccgccggaagtggtggctcgttttaccgacaacattctgacgcaaaatgcgcgaatgcaggcactggtggaaacgttactacgccaggcaagactggagaatcgtcaggaagtcgttctgactgctgttgatgtggcggcattatttcgccgcgtcagcgaagcgcgcaccgtgcagttggcagaaaaaaacatcactttgcatgttatgcctactgaggttaacgttgcttctgaaccggcgttactggagcaggcgctggggaatttactggataacgccatcgattttactcccgagagcggttgcataacgctaagcgccgaagtggatcaggaatacgtcacccttaaggtgctggataccggtagtgggattcctgactacgcgctgtcacgtatttttgaacgcttttactctttgccgcgtgcaaatgggcaaaaaagcagcggtctggggttggcgtttgtcagtgaggtcgcccgtttgtttaacggcgaagtcacgctgcgcaacgtgcaggaaggtggcgtgctggcctcgcttcgacttcaccgtcacttcacatag

SEQ ID NO: 2833 - DNA, 690 bp, Escherichia coli
atgcaacgggaaacggtctggttagtcgaagacgagcaagggatagccgatacgctggtctacatgttgcaacaggaaggttttgacgtcgaggtctttgagcgaggcttgccagtgctggataaagctcgccagcaggttcccgatgtcatgattctcgatgttggtttgcctgatatcagcggctttgaattgtgccgccagttactggcgctccatccggcgttacctgtactgttcctgacggcccgaagtgaagaggtcgatcgcctgcttgggctggaaattggcgctgacgactacgtggctaaaccgttttcacctcgcgaagtgtgcgccagagtgcgcaccttactgcgtcgggtgaagaagttctcgacgccgtctcccgttatccgtattggtcattttgaattgaatgaacctgcggcgcagatcagctggtttgacacgccattaacgctgacgcggtatgagtttttattgctgaagacgttactcaagtcgccgggccgcgtctggtcccgccagcaactgatggatagcgtgtgggaagatgcgcaggacacctacgatcgcaccgtcgatacccacattaaaacgctgcgtgccaagctgcgcgccatcaaccccgatctttcaccgattaatactcatcgcggcatgggatatagcctgaggggcctgtaa

SEQ ID NO: 2834 - DNA, 474 bp, Escherichia coli
atgaaatacaagcatttaatcctgtctttaagcctgataatgctggggccattggctcatgcagaagagattggttcggtcgacaccgtatttaaaatgatcggcccggatcacaaaattgttgttgaagcctttgacgatcccgatgtgaaaaatgtcacctgttatgtgagccgggcgaaaaccggtggtattaaagggggattgggcctggcagaagatacctccgatgcggccatttcttgtcaacaagtcgggccgattgaactgtcggatcgtattaaaaacggcaaagctcagggcgaggtagtattcaaaaaacgcacgtccctggtctttaagtcgttacaggtcgtgcgcttttatgacgctaaacgcaacgcgctcgcttatctggcttactccgacaaagttgtagaaggttcgccgaaaaacgcgattagcgcggttcctgtcatgccgtggcggcaataa

SEQ ID NO: 2835 - DNA, 870 bp, Escherichia coli
atggatcaggccggcattattcgcgaccttttaatctggctggaaggtcatctggatcatcccctgtcgctcgacaatgtagcggcgaaagcaggttattccaagtggcacttacagagaatgtttaaagatgtcactggccatgctattggcgcgtatattcgtgctcgtcgtttgtcgaaatcggcggtcgcactacgcctgactgcgcgtccgattctggacatcgcgctgcaataccgcttcgactctcaacagacatttacccgcgctttcaagaagcagtttgcccagactcctgcactttaccgccgttctcctgaatggagcgcctttggtattcgcccgccgctacgtctgggtgaattcactatgccagagcacaaatttgtcactctggaagatacgccgctgattggtgttacccagagctactcctgttcgctggagcaaatctctgatttccgccatgaaatgcgctaccagttctggcacgattttctcggcaacgcgccgaccattccgccggtgctctacggcctgaatgaaacgcgtccgagtcaggataaagacgacgagcaagaggtgttctataccaccgcattagcacaggatcaggcagatggctatgtattgaccgggcatccggtgatgctgcaaggcggcgaatatgtgatgtttacctatgaaggtctgggaaccggcgtgcaggagtttatcctgacggtatacggaacgtgcatgccaatgcttaacctgacgcgccgtaaaggtcaggatattgagcgatactacccggcagaagatgccaaagcgggagatcgcccaattaatctgcgctgtgaactgctgattccgatccgtcgttaa

SEQ ID NO: 2836 - DNA, 648 bp, Escherichia coli
atgttacaggtatacctagtccgccacggtgaaacgcagtggaacgccgagcgacgtattcagggccagtctgacagcccgctgaccgccaaaggtgagcaacaggcgatgcaggtggcaacccgtgccaaagagcttggcattacgcatatcatcagtagcgatttaggacggacccggcgcacggcggaaatcatcgcccaggcctgcggctgtgacatcatctttgattctcgcctgcgtgaattaaatatgggtgtactggaaacaagaaatatcgattcactcaccgaagaagaagagaactggcgtcggcaactggtcaatggcaccgttgacgggcgtattcctgaaggcgagtcaatgcaggagctcagcgatcgcgttaatgcggcactggaatcttgccgggacttaccgcagggaagccgaccgctactggtgagccatggtattgcactgggatgcctggtgagtacgattctcggattaccagcatgggcagagcgccgcttacgtctgcgtaactgttctatttcgcgcgtggattatcaggaaagcttgtggctggcgtctggctgggtggttgaaaccgcaggggacatctcgcatctggatgcccctgcattagatgagctgcagcgttaa

SEQ ID NO: 2837 - DNA, 528 bp, Escherichia coli
atgcaccaagttgtctgtgcgaccaccaatcccgctaaaattcaggccattctgcaggcatttcacgagatcttcggcgaaggatcctgccatattgcatccgttgccgtcgagagcggtgtaccggaacagccctttggcagtgaggaaacgcgcgctggcgcacgaaatagggtagccaatgcccgccgtttacttcctgaggctgatttttgggtggcgattgaagctggcatcgatggtgacagcactttcagttgggtggtgatagaaaacgccagccagcgcggcgaggcgcgttcggctactttgccgttgcctgcggtgattctggaaaaagtgcgtgaaggtgaggcgcttggtcccgtgatgtcgcgttataccggtattgatgagattggtcgtaaggaaggggcgatcggcgtgtttaccgccgggaaactcactcgcaccagcgtctatcaccaggcggtgatcctggcgctgagtccgtttcataatgccgtgtatcagccattgcaggcctga

SEQ ID NO: 2838 - DNA, 297 bp, Escherichia coli
atggcagaacagcgtcaccaggagtggttacgttttgtcgacctgcttaagaatgcctaccaaaacgatctccatttaccgttgttaaacctgatgctgacgccagatgagcgcgaagcgttggggactcgcgtgcgtattgtcgaagagctgttgcgcggcgaaatgagccagcgtgagttaaaaaatgaacttggcgcgggcatcgcgacgattacgcgtggatctaatagtctgaaagccgcgcccgtcgagctgcgccagtggctggaagacgtgttgctgaaaagcgattga

SEQ ID NO: 2839 - DNA, 1938 bp, Escherichia coli
gtggaaaaagccaaacacgttacctggcggctgttggctgtcggtgtctgtctgctgacggtcagcagcgtggcgcgagccgactcactggatgagcagcgtagccgttacgcgcaaattaagcaggcctgggataatcgacaaatggatgtggtcgaacaaatgatgcctggactgaaagattacccactttatccctacctggaataccgccagatcactgatgacctgatgaatcaaccggcggtgacggtcactaactttgttcgcgctaaccccacgcttcctcccgctcgcacgctgcaatctcgtttcgtcaatgaactggcgcggcgtgaagactggcgtggcttgttagcctttagcccggaaaagcccggaactaccgaagcgcaatgtaattactactatgcgaaatggaacaccgggcagagtgaagaagcctggcaaggggcgaaagagctgtggctaaccggcaagagccagcctaacgcctgtgacaagttatttagcgtctggcgtgcgtcaggtaaacaagatccgctggcgtatttagagcgtatccgtctggcgatgaaagcgggtaacaccggcctggtaacagtgctggcagggcagatgcctgccgattaccagactatcgcttcggcaatcatttcactggcgaacaaccctaatacggtactgaccttcgcgcgtacaaccggcgcgaccgattttacccgtcaaatggcggcggtggcgtttgccagtgtggcgcggcaggatgctgaaaatgcacggctgatgatcccgtcgcttgctcaggcacagcagcttaatgaagatcagattcaggagctgcgcgatattgtcgcctggcgtttgatgggcaacgatgtcaccgacgagcaggcgaaatggcgcgatgacgcgattatgcgctcgcaatctacttcgcttattgaacgccgtgtgcgaatggcgcttggcaccggcgatcgtcgcggcctgaatacctggctggcgcgtctgcctatggaagcgaaagagaaagatgaatggcgttactggcaggcggatttattgctggaacgcggacgtgaagctgaagcaaaagagattttgcatcaactcatgcaacagcgtggtttctacccgatggttgctgcacaacgcatcggcgaagagtatgagctgaagattgataaagcgccgcagaatgttgacagcgccctgactcaggggccggagatggcgcgcgtgcgcgagttgatgtactggaatctcgataacaccgcgcgtagcgagtgggccaatctggtgaagagcaagtcaaaaacagagcaggctcaactggctcggtatgctttcaataaccaatggtgggatcttagcgttcaggcaacgatcgccgggaagctgtgggatcatctggaagagcgattcccgctggcttacaacgatcttttcaaacgctacaccagtggtaaggagatcccgcaaagctatgcgatggcgattgcccgtcaggagagtgcctggaatccaaaagtgaaatcaccggtaggggccagcggcctgatgcagattatgcctggtaccgcgacccatacggtgaagatgttctctattcccggttatagcagccctgggcaattgctggatccggaaacgaacatcaacattggcaccagttacctgcaatatgtttatcagcagtttggcaataaccgtattttctcctcagcagcttataacgccggaccagggcgggtgcggacctggcttggcaacagcgcagggcgtatcgacgcagtggcatttgtcgagagtattccattctccgagacgcgcggttatgtgaaaaacgtgctggcttatgacgcttactaccgctatttcatgggggataaaccgacgttgatgagcgccacggaatggggacgtcgttactga

SEQ ID NO: 2840 - DNA, 1668 bp, Escherichia coli
gtggctcaattcgtttataccatgcatcgtgtcggcaaagttgttccgccgaaacgtcatattttgaaaaacatctctctgagtttcttccctggggcaaaaattggtgtcctgggtctgaacggcgcgggtaagtccaccctgctgcgcattatggcgggcattgataaagacatcgaaggtgaagcgcgtccgcagccagacatcaagattggttatctgccgcaggaaccgcagctgaacccggaacacaccgttcgtgagtccattgaagaagcggtttctgaagtggttaacgccctgaaacgcctggatgaagtgtatgcgctgtatgccgatccggatgccgattttgacaagctggccgctgaacaaggccgtctggaagagatcattcaggctcacgacggtcacaacctgaacgttcagctggagcgtgcggcggatgcgctgcgtctgccggactgggacgcgaaaatcgctaacctttccggtggtgagcgtcgtcgcgtggcgttgtgccgcctgctgctggaaaaaccagacatgctgctgctcgacgaaccgaccaaccacctggatgcggaatccgtagcgtggctggaacgcttcctgcacgacttcgaaggcaccgtggtggcgattacccacgaccgttacttcctcgataacgttgcgggctggatcctcgaacttgaccgcggtgaaggtattccgtgggaaggtaactactcctcctggctggaacagaaagatcagcgtctggcgcaggaagcttcacaagaagcggcgcgtcgtaagtcgatcgagaaagagctggagtgggtacgtcagggaactaaaggccgtcagtcaaaaggtaaagcacgtctggcgcgctttgaagaactcaacagcaccgaatatcagaaacgtaacgaaaccaacgaactgtttattccacctggaccgcgtctgggcgataaagtgctggaagtcagcaacctgcgtaaatcctatggtgatcgtctgctgattgactccctgagcttctcgatcccgaaaggagcgatcgtcgggatcatcggtccgaacggtgcgggtaaatcgacgctgttccgtatgatctctggtcaggaacagccggacagcggcaccatcactttgggtgaaacggtgaaactggcgtcggttgatcagttccgtgactcaatggataacagcaaaaccgtttgggaagaagtttccggcgggctggatatcatgaagatcggcaacaccgagatgccgagccgcgcctacgttggccgctttaactttaaaggggttgatcagggtaaacgcgttggcgaactctccggcggtgagcgcggtcgtctgcatctggcgaagctgctgcaggttggcggcaacatgctgctgctcgacgaaccgaccaacgacctggatatcgaaaccctgcgcgcgctggaaaatgccctgctggagttcccgggctgtgcgatggttatctcgcacgaccgttggttcctcgaccgtatcgccacgcacattctggattaccaggatgaaggtaaagttgagttctttgaaggtaactttaccgagtacgaagagtacaagaaacgcacgctgggcgcagacgcgctggagccgaagcgtatcaagtacaagcgtattgcgaagtaa

SEQ ID NO: 2841 - DNA, 285 bp, Escherichia coli
atgagtttttttgatgagttgaaaacctctctggaagaggctgtcgagattaaacaaggtttaaaagaacctgcacgggtgacccgctacgaaattgcggatgttaaagctattcgtgagcaactcaacgtttctcaaagtgagatggcaaaagctctgggaaccagtgtggataccattaaaagctgggaatcgaagcgaagaaatcctacgggattggctgcaaaagtacttgccacaattaaagaaaatcctgcctttttccgggaacttgcctcccattaa

SEQ ID NO: 2842 - DNA, 333 bp, Escherichia coli
atgggtaaggcgataatatttatagagacgccaatgtttacgcgtcagatcaagcagattgcaaccgatgatgaattaaaggaattacaaaaagaactcatcggaactcccgataaaggtgatctcattcagcagactggtggattgcgtaaagtccgaatggctgcgggttcacagggaaaaagtggcagtgtcagaataatttactttctggcgacggaagagattatttatttgattatggcctatccgaaaaatgccaaagatagtctgacagatacggaaaaagctcaactaaagaagttgacgaaactgctcaaaggcgagatataa

SEQ ID NO: 2843 - DNA, 1233 bp, Escherichia coli
atgtcgtcatttgattacctgaaaactgccatcaagcaacagggctgcacgctacagcaggtagctgatgccagcggtatgaccaaagggtatttaagccagttactgaatgccaaaattaaaagccccagcgcgcaaaagctggaggcgttgcaccgttttttggggcttgagtttccccggcagaagaaaaccattggtgtcgtattcggtaagttctacccactgcataccggacatatctaccttatccagcgcgcctgtagccaggttgacgagttgcatatcattatgggctttgacgatacccgtgaccgcgcattgttcgaagacagcgccatgtcgcagcagccaaccgtgccggatcgtctgcgctggttattgcagacctttaagtatcaaaaaaatatccgcattcatgcttttaacgaagagggcatggaaccgtatccacatggctgggatgtgtggagcaacggcatcaaaaagtttatggccgaaaaaggcattcagccggacctgatctacacctcggaagaagccgatgcgccgcagtatatggaacatctggggatcgagacggtgctggtcgatccgaagcgtacctttatgagtatcagcggtgcgcagatccgcgaaaacccgttccgctactgggaatatattcctacggaagtgaagccattctttgtgcgtaccgtggcgatcctcggtggtgaatcgagcggtaaatccaccctggtaaacaaacttgccaatatcttcaacactaccagtgcgtgggaatatggtcgtgattatgtcttttcgcacctcggtggcgatgagatcgcgttgcagtattccgactacgataaaatcgctctgggacatgcgcaatatattgattttgcagtgaaatatgccaataaagtggcgtttatcgacaccgattttgtcactacccaggcgttctgcaaaaagtacgaagggcgtgagcatccgttcgtgcaggcgttgattgatgaataccgtttcgatctggtgatcctgctggagaacaacacgccgtgggtggcggatggtttacgcagcctcggcagttcggtggatcgcaaagagttccagaacttgctggtggagatgctggaagagaacaatatcgaattcgtgcgggttgaagaggacgattacgacagccgtttcctgcgctgcgtggagctggtgcgggagatgatgggggagcaaagataa

SEQ ID NO: 2844 - DNA, 1383 bp, Escherichia coli
gtggcaaaagctccaaaacgcgcctttgtttgtaatgaatgcggggccgattatccgcgctggcaggggcagtgcagtgcctgtcatgcctggaacaccatcaccgaggtgcgtcttgcagcgtcgccaacggtggcgcgtaacgagcgtctcagtggctatgccggtagcgccggagtggcaaaagtccagaaactttccgacatcagccttgaagagctgccgcgtttttccaccggatttaaagagttcgaccgcgtattaggcggcggcgtggtgccgggaagcgccattctgattggcggtaacccaggtgcggggaaatccacgctgctgttgcaaacgctgtgcaaactggcgcagcagatgaaaacgctgtatgtcaccggcgaagagtcgctgcaacaggtggcaatgcgcgctcatcgccttggcctgccgactgacaatctcaatatgttgtcggaaaccagcatcgaacaaatctgcctgattgccgaagaagagcaaccgaagctgatggtaattgactcgatccaggtgatgcatatggcggatgtacaatcatcgcctggcagcgtggcgcaggtgcgtgaaacggcggcttatctgacgcgcttcgccaaaacgcgcggcgtggcgattgtcatggtggggcacgtaaccaaagatggctcgctggctggccctaaagtgctggaacactgtatcgactgttcagtgcttctggatggcgatgccgactcccgttttcgcaccttacgcagccataaaaaccgcttcggcgcggtgaatgagctgggcgtcttcgcgatgaccgaacaggggctgcgtgaagttagcaacccttctgccatctttttaagccgcggtgatgaagtgacctccggtagctcagtgatggtggtatgggaaggaacgcgtccactgctggtggagattcaggcattggtcgatcactcgatgatggcgaacccacgccgcgtggcagtggggctggagcaaaaccgtctggcaatcctgctggcggtgctgcaccgtcacggtgggttgcaaatggccgatcaggatgtatttgttaacgtggtcggcggcgtgaaggtgacggaaaccagcgccgacttagcgttactgctggcgatggtttccagcctgcgcgacagaccgctgccgcaggatctggtggtgtttggtgaagtcgggctggcaggggagatccgcccggtgcccagcggccaggaacgaatctctgaagcggcgaaacacggttttcggcgggtgattgttccggcggctaacgtgccgaaaaaagcgccggaagggatgcagatttttggcgttaaaaaactctccgacgcgcttagcgtgttcgacgacttataa

SEQ ID NO: 2845 - DNA, 969 bp, Escherichia coli
atgcctaacattacctggtgcgacctgcctgaagatgtctctttatggcctggtctgcctctttcattaagtggtgatgaagtgatgccactggattaccacgcaggtcgtagcggctggctgctgtatggtcgtgggctggataaacaacgtctgacccaataccagagcaaactgggcgcggcgatggtgattgttgccgcctggtgcgtggaagattatcaggtgattcgtctggcaggttcactcactgcgcgggctacgcgcctggcccatgaagcgcaactggatgtcgcgccgctggggaaaatcccacacctgcgcacgccggggttgctggtgatggacatggattccaccgccatccagattgaatgtattgatgaaattgccaaactggccggaacgggcgagagggtggcggaggtaaccgaacgggcgatgcgcggcgaactcgattttaccgccagcctgcgcagccgcgtggcgacgctgaaaggcgctgacgccaatattctgcaacaggtgcgtgaaaatctgccgctgatgccaggcttaacgcagctggtactcaagctggaaacgctgggctggaaggtggcgattgcctccggcggctttactttctttgctgaatacctgcgcgacaagctgcgcctgacagccgtggtagccaatgaactggagatcatggacggtaaatttaccggcaatgtgatcggcgacatcgttgacgcgcaatataaagcgaaaaccctgacccgcctcgcgcaggagtatgaaatcccgctggcgcagaccgtggcgattggcgatggagccaatgacctgccgatgatcaaagcggcagggctggggattgcctaccatgccaagccaaaagtgaatgaaaagacggaagtcaccatccgtcacgctgacctgatgggggtattctgcatcctctctggcagcctgaatcagaagtaa

SEQ ID NO: 2846 - DNA, 645 bp, Escherichia coli
atggctcgcacaaaactgaaattccggctgcatcgggcagtgattgtcctgttctgtcttgccttgttagtggcgctgatgcagggggcgtcatggtttagtcaaaaccaccagcgacagcgtaatccgcaactggaagaactggcccgcaccctggcgcggcaggtgacgctaaacgttgcaccgctgatgcgtaccgactcaccggatgaaaaacgcattcaggcgatcctcgatcagttaacggatgaaagccgcattctcgacgcaggcgtatatgatgagcaaggcgatcttatcgcccgttctggcgaaagcgtcgacgtgcgcgaccgactggcgctcgacggcaaaaaagcgggcggctattttaaccagcagattgtcgaacccattgcgggtaaaaacggaccgctcggctatctgcgcctgacgctcgacacccatacgctcgccaccgaagcccaacaggtggataacaccactaacattttacgcctgatgttgctgctctcgctggcaatcggcgtagtgctgacccgcacgctgctacagggtaaacgcacccgctggcagcaatcgcccttcctgttaaccgccagtaaaccggtgccggaagaggaagaaagcgagaaaaaagagtga

SEQ ID NO: 2847 - DNA, 1017 bp, Escherichia coli
atgtccacattacgcctgctcatctctgactcttacgacccgtggtttaacctggcggtagaggagtgtatttttcgccagatgtcggctacgcagcgcgttctgtttctctggcgcaatgccgacacggtagtgattggtcgcgcgcagaacccgtggaaagagtgtaatacccggcggatggaagaagataacgtccgcctggcgcggcgcagtagcggtggcggcgcagtgttccacgatctcggcaatacctgttttacctttatggctggcaagccggagtacgataaaaccatctccacgtcgattgtgctcaatgcgctgaacgcgctcggcgtcagcgccgaagcttccgggcgtaacgatctggtggtgaaaaccgccgaaggcgatcgcaaagtctcaggctcggcctatcgcgaaaccaaagatcgtggcttccaccacggcactttgctgctcaattccgaccttagccgcctggcaaactatctcaatccggataaaaagaaactggcggcgaaaggtattacctcagtgcgttcccgcgtgaccaatctgaccgaattgctaccggggatcacccatgagcaggtttgcgaggccataaccgaggcctttttcgcccattatggcgagcgcgtggaagcggaaatcatctccctggacaaaacgccagacttgccaaacttcgccgaaacctttgcccgccagagtagctgggaatggaacttcggtcaggctccggcattctcgcatctgctggatgaacgctttacctggggcggcgtggaactgcatttcgacgttgaaaaaggccatatcacccgcgcccaggtgtttaccgacagtctcaaccccgcgccgctggaagccctcgccgggcgactgcaaggctgtctgtaccgcgcggatatgctgcaacaggagtgcgaagcgctgctggttgacttcccggaacaggaaaaagagctacgggagttgtcagcgtggatggcaggggcggtaaggtaa

SEQ ID NO: 2848 - DNA, 264 bp, Escherichia coli
atgatcgatctggaaaaccaggaacgggagattatcaatttaatgttcagccagggtatatcctggctaaccgccgtgcgtatcaggcataaactatcacttgctgaagtaagtaaaatgttaggtatctccattaattctctaaaacagatcgaaaagacggaacggcttagttcaaacatcaaaagcaaaatggcaggaatttatggttgtccaccagagttgctgatatgcccttcctggatgacggctgaacataaatga

SEQ ID NO: 2849 - DNA, 720 bp, Escherichia coli
atggctactccacacattaatgcagaaatgggcgattttgctgacgtagttttgatgccaggcgacccgctgcgtgcgaagtatattgctgaaactttccttgaagatgcccgtgaagtgaacaacgttcgcggtatgctgggcttcactggtacttacaaaggccgcaaaatttccgtaatgggccacggtatgggtatcccgtcctgctccatctacaccaaagaactgatcactgatttcggcgtgaagaaaattatccgcgttggttcctgtggcgctgttctgccgcacgtaaaactgcgcgacgtcgttatcggtatgggtgcctgcaccgattccaaagttaaccgtatccgttttaaagaccatgactttgccgctatcgctgacttcgacatggtgcgtaacgcggtagacgcggcaaaagcactgggcgttgatgctcgcgttggtaacctgttctccgctgacctgttctactctccggacggcgaaatgttcgacgtgatggaaaaatacggcatcctcggcgtggaaatggaagcggctggtatctacggcgtcgctgcagaatttggcgcgaaagcccttaccatctgcaccgtgtctgaccacatccgcactcacgagcagaccactgccgctgagcgtcagaccaccttcaacgacatgatcaaaatcgcgctggaatccgttctgctgggcgataaagagtaa

SEQ ID NO: 2850 - DNA, 1224 bp, Escherichia coli
atgaaacgtgcatttattatggtgctggactcattcggcatcggcgctacagaagatgcagaacgctttggtgacgtcggggctgacaccctgggtcatatcgcagaagcttgtgccaaaggcgaagccgaccacggtcgtaaaggcccgctcaatctgccaaatctgacccgtcttgggctggcgaaagcacacgaaggttctaccggtttcattccggcgggaatggatggcaacgctgaagttatcggcgcgtacgcatgggcgcacgaaatgtcatccggtaaagacaccccgtctggtcactgggaaatcgccggtgtcccggttctgtttgagtggggatatttctccgatcacgaaaacagcttcccgcaagagctgctggataaactggttgaacgcgctaatctgccgggttacctcggtaactgccactcttccggtacggtcattctggatcaactgggcgaagagcacatgaaaaccggcaagccgattttctatacctccgctgactccgtgttccagattgcctgccatgaagaaacctttggcctggataaactctacgagctgtgcgaaatcgcccgtgaagagctgaccaacggcggctacaacatcggtcgtgttatcgctcgtccgtttatcggcgacaaagctggtaacttccagcgtactggtaaccgtcacgacctggctgttgagccgccagcaccgaccgtgctgcagaaactggttgatgaaaaacacggccaggtggtttcggtcggtaaaattgcagacatctatgccaactgcggtatcaccaaaaaagtgaaagcgaccgggctggacgcgctgtttgacgccaccatcaaagagatgaaagaagcgggtgataacaccatcgtcttcaccaacttcgttgacttcgactcttcctggggccaccgccgcgacgtcgccggttatgctgcgggtctggaactgttcgaccgccgtctgccggagctgatgtctttgctgcgcgatgacgatattctgattctcactgctgaccacggttgtgacccgacctggaccggtactgaccacacgcgtgaacacattccggtactggtttacggcccgaaagtgaaaccaggttcgctgggtcatcgtgaaaccttcgcggatatcggccagactctggcaaaatattttggtacttctgatatggaatatggcaaagccatgttctga

SEQ ID NO: 2851 - DNA, 1323 bp, Escherichia coli
ttgtttctcgcacaagaaattattcgtaaaaaacgtgatggtcatgcgctgagtgatgaagaaattcgtttctttatcaacggcattcgcgacaacactatctccgaagggcagattgccgccctcgcgatgaccattttcttccacgatatgacaatgcctgagcgtgtctcgctgaccatggcgatgcgagattcaggaaccgttctcgactggaaaagcctgcatctgaatggcccgattgttgataaacactcgaccggcggtgtcggcgatgtgacttcgctgatgttggggccgatggtcgctgcctgtggcggctatattccgatgatctccggtcgcggcctcggtcatactggcggtacgctcgacaaactggaatccatccctggcttcgacattttcccggatgacaaccgtttccgcgaaattattaaagacgtcggcgtggcgattatcggccagaccagctcattggctccggcggataaacgtttctacgcgacccgcgatattaccgcaaccgtggattcaatcccgctgatcaccgcctctattctggcgaagaaactggcggaaggtctggacgcgctggtgatggacgtgaaagtgggtagcggcgcgtttatgccgacctacgaactctctgaagcccttgccgaagcgattgttggcgtggctaacggcgctggcgtgcgcaccaccgcgctgctcaccgatatgaatcaggtactggcctccagtgcaggtaacgcggttgaagttcgtgaagcggtgcagttcctgacgggtgaatatcgtaacccgcgtctgtttgatgtcacgatggcactgtgcgtggagatgctgatctccggcaaactggcgaaagatgacgccgaagcgcgcgcgaaattacaggcggtgctggacaacggtaaagcggcagaagtctttggtcgtatggtagcggcacaaaaaggcccgaccgacttcgttgagaactacgcgaagtatctgccgacagcgatgctgacgaaagcagtctatgctgataccgaagggtttgtcagtgaaatggatacccgcgcgctggggatggcagtggttgcaatgggcggcggacgccgtcaggcatctgacaccatcgattacagcgtcggctttactgatatggcgcgtctgggcgaccaggtagacggtcagcgtccgctggcagttatccacgcgaaagacgaaaacagctggcaggaagcggcgaaagcggtgaaagcggcaattaaacttgccgataaagcaccggaaagcacaccaactgtctatcgccgtatcagcgaataa

SEQ ID NO: 2852 - DNA, 780 bp, Escherichia coli
atgactgatctgaaagcaagcagcctgcgtgcactgaaattgatggacctgaccaccctgaatgacgacgacaccgatgagaaagtgatcgccctgtgtcatcaggccaaaactccggtcggcaataccgccgctatctgtatctatcctcgctttatcccgattgctcgcaaaactctgaaagagcagggcaccccggaaatccgtatcgctacggtaactaacttcccacacggtaacgacgacatcgacattgcgctggcagaaacccgtgcggcaatcgcctacggtgccgatgaagttgacgtggtgttcccgtaccgcgcgctgatggcgggtaacgagcaggttggttttgacctggtgaaagcctgtaaaaaggcttgcgctgcggcgaacgtactgctgaaagtgattattgaaaccggcgaactgaaagacgaagcgctgatccgtaaagcgtctgaaatctccatcaaagcgggtgctgacttcatcaaaacctctaccggtaaagtggctgtgaatgcgacgccggaaagcgcgcgcatcatgatggaagtgatccgcgatatgggcgtagaaaaaaccgttggtttcaaaccggcgggcggcgtgcgtactgcggaagatgcgcagaaatatctcgccattgcggatgaactgttcggtgctgactgggctgatgcgcgtcactaccgctttggtgcttccagcttgctggcaagcctgctgaaagctctgggccacggcgacggtaagagcgccagcagctactaa

SEQ ID NO: 2853 - DNA, 1551 bp, Escherichia coli
atgcccacttctcatgaaaatgcactgcaacaacgttgccagcaaattgtcaccagcccggtacttagcccggagcagaagcgccattttctggcactggaagcagaaaacaatctgccttaccccgcgttgcctgccgaagcccgccgcgcgctggatgagggggtaatctgcgatatgtttgaaggtcatgcgccgtacaaaccgcgctatgtcttacccgattacgcccgttttctggcgcacggttccgaatggctggagctggaaggcgcgaaagaccttgatgacgcactctctctgctgaccattctttaccaccatgtaccgtcggtcacatcgatgccggtctacctggggcaactggatgcgttgttgcaaccgtatgttagaattctaacacaagacgagatcgatattcgaataaaacgtttctggcgttacctcgacagaaccctgccagacgcctttatgcatgctaatatcggcccgtctgattcgcccattacccgtgcgatattacgtgcagacgcagagctgaagcaggtttcaccgaacctgacctttatctacgatcctgatatcacccctgatgacctgctgctggaagtggcgaaaaacatctgtgaatgtagcaaaccgcacatcgccaacggtccggtgcatgataaaattttcacaaaagggggctacgggattgtgagctgttacaactcactgccgctggcgggtggtggcagcacgctggtacgccttaacctgaaagccattgccgagcgcagcgaatcgctggaggacttctttacgcgcactctaccgcactactgccaacagcagatcgccatcatcgatgcgcggtgtgaattcctctatcaacaatcacacttctttgagaatagcttcctggtgaaagaagggctgattaaccctgaacgttttgtgccaatgtttggcatgtatgggctggcggaagcggttaacttgctgtgtgaaaaagaaggaattgccgcacgctacggtaaagaggccgccgcaaatgaagtgggttatcgcattagcgcgcaactggcggagtttgtcgccaatacccccgtgaaatatggctggcaaaaacgcgccatgttacatgcacagtcggggataagttccgatatcggcaccacgccgggcgcgcgtttgccgtatggtgatgagccagatccgattacccatctgcaaactgtcgccccgcatcatgcttattattattccggcatcagcgacattctgacgctcgacgaaaccatcaaacgtaatccgcaggcgctggtacagctttgcctcggtgcctttaaagccggaatgcgtgaatttaccgccaatgtcagcggtaacgatctggttcgcgttaccggttatatggtgcgtttgtcggatttagaaaaatatcgcgccgaaggttcacgcaccaacactacctggctgggagaagaagccgcacgcaacactcgtattctggaacgccagccgcgcgtgataagccatgaacagcagatgcgctttagtcagtaa

SEQ ID NO: 2854 - DNA, 705 bp, Escherichia coli
gtgccgcagtgtccgcatcaggcgttgcagattgtcgacggcaaagtggcgtggagcgcggctgtctgcgagcaatgtgatacctgcctgaagatgtgtccgcaacatgctacgccaatggcgcaatccatgagcgtggacgaggtgcttaaccatgtccgcaaagcggttctgtttattgaagggataacggtaagcggcggcgaagccacgacccagttgccgtttgtggtggcgctgtttactgccatcaaaaacgatccgcaactgtgccacctcacctgcctcgtggacagtaacggcatgttgagcgaaaccggctgggaaaaattgctcccggtgtgtgacggcgcaatgctcgatctcaaagcgtgggggagcgaatgtcatcagcaattaaccggacgcgataatcagcagatcaagcgcagcatctgtttgctggcagagcgcggtaagctggcggaactgcgtttgctggtaatccctggccaggtggattatttgcaacacatcgaagaactggcggcgttaatcaagggacttggcgatgttccggtacgcctgaacgcgtttcatgcccacggcgtgtatggcgaggcgcaaagctggccgagcgccacgccggaggatgtggaacaactggctgatgcgttatgggagcgcggggtgagccggttaatatttccggcgctatatttgtga

SEQ ID NO: 2855 - DNA, 780 bp, Escherichia coli
ttgatttgccgttttatcgacacccactgccattttgatttcccgccgtttagtggcgatgaagaggccagcctgcaacgtgcggcacaagcgggcgtaggcaagatcattgttccggcgacagaggcggaaaattttgcccgcgtgcaggcgttagcggaaaaatatcaaccgctgtatgccgcattgggcttgcatcctggtatgttggaaaaacatagcgatgtgtctcttgatcagctacagcaggcgctggaaaggcatccggcgaaggtggtggcggtgggggagatcggtctggatctctttggcgacgatccgcaatttgagaggcagcagtggttactcgacgaacaactgaaactggcgaaacgctacgatctgccggtgatcctgcattcacgacgcacgcacgacaaactggcgatgcatcttaaacgccacgatttaccgtgcactggcgtggttcatggtttttccggcagcctgcaacaggccgaacggtttgtgcaactgggctacaaaattggcgtaggcgggactatcacctatccacgcgccagtaaaacccgcgatgtcatcgcaaaattaccgctggcatcgttgttgctggaaaccgacgcaccagatatgccgctcaatggttttcaggggcagcctaatcgccctgaacaggccgcccgtgtgtttgccgtgctttgcgagttacgaccggaaccggcggatgagattgcgcaagcgttgcttaataacacctatacgttgtttaacgtgccgtag

SEQ ID NO: 2856 - DNA, 1074 bp, Escherichia coli
gtggggcagcgaatacctgtaacgcttggtaatattgcgccgttgtcgctaaggccgttccagcctggacggattgctctggtgtgcgaaggcggcggacaacgtggaattttcacggctggcgtgctggatgagtttatgcgcgcgcagtttaatcctttcgatctttatctcggcacatctgccggggcgcagaacctctcggcgtatatctgcaatcagcccggttacgcgcgcaaagtcatcatgcgttacaccacaaaacgcgaatttttcgatccattgcgctttgtccgtggaggaaatcttatcgatctcgactggctggtggaggccaccgcaagccagatgccgttgcaaatggataccgcagcgcggttatttgacagcggcaaatcgttttatatgtgcgcctgtcgtcaggatgactatgcgccgaattactttttgccaactaaacaaaactggctggatgtgattcgcgcctccagtgcgatacctggcttttatcgtagcggagtgtcgctggaaggtattaactacctggatggtgggatcagtgatgcgatcccggttaaagaggcggcaaggcagggagcaaaaacgttggtcgtcatccgcactgtgccgtcacaaatgtactacacgccacagtggttcaaacgcatggaacgctggctgggtgacagtagcctgcagccgctggtcaatctggtgcagcatcatgaaaccagctatcgtgagattcagcaatttattgagaaaccaccgggccagctgcggatattcgaaatttatccgccgaagccattgcatagtattgcgctcggcagtcggattccggcgctgcgtgaagactataaacttgggcgtttatgtgggcgttattttctggcaacggtcggtaaattattgactgaaaaagcgccgctgagccgccatctggtgccggtggtgacgccggagtcgatcgttattccgcctgcgccagtcgccaacgatacgctggttgccgaagtgagcgacgctccgcaggcgaacgacccgacatttaacaatgaggatctggcttga

SEQ ID NO: 2857 - DNA, 162 bp, Escherichia coli
atgtttcgttggggcatcatatttctggttatcgcgttaatcgccgccgcacttgggtttggtggtctggccggtactgctgcaggcgcagctaaaattgtctttgtcgtcgggattattctgttcctggtgagtttgttcatgggccgaaaacgaccctag

SEQ ID NO: 2858 - DNA, 606 bp, Escherichia coli
atgactatgacaagactgaagatttcgaaaactctgctggctgtaatgttgacctctgccgtcgcgaccggctctgcctacgcagaaaacaacgcgcagactaccaatgaaagcgcagggcaaaaagtcgatagctctatgaataaagtcggtaatttcatggatgacagcgccatcaccgcgaaagtgaaggcggccctggtggatcatgacaacatcaagagcaccgatatctctgtcaaaaccgatcaaaaagtcgtgaccctgagcggtttcgttgaaagccaggctcaggccgaagaggcggtgaaagtggcgaaaggtgttgagggcgtgacctctgtcagcgacaaactgcacgttcgcgacgctaaagaaggctctgtgaagggctacgcgggtgacaccgccaccaccagtgaaatcaaagccaaactgttggcagatgacattgtcccttcccgtcatgtgaaagttgaaaccaccgatggcgtggtccagctctccggtaccgtagattctcaggcacagagcgaccgtgctgaaagtatcgccaaagcggtagatggtgtgaaaagcgttaaaaatgatctgaaaactaagtaa

SEQ ID NO: 2859 - DNA, 1587 bp, Escherichia coli
atgacaagccttttggccgcagaggtagcgaaaagaagaacctttgcaattatttctcacccggacgccggtaagactaccatcaccgagaaggtgctgctgttcggacaggccattcagaccgccggtacagtaaaaggccgtggctctaaccagcacgctaagtcggactggatggagatggaaaagcagcgtgggatctccatcactacgtctgtgatgcagtttccgtatcacgactgcctggttaacttgctcgataccccggggcacgaagacttctcggaagatacctatcgtaccctgacggcggtggactgctgcctgatggttatcgacgccgcaaaaggtgtagaagatcgtacccgtaagctgatggaagttacccgtctgcgcgatacgccgatcctcacctttatgaacaaacttgaccgtgatatccgcgacccgatggaactgctcgatgaagttgagaacgagctgaaaatcggctgcgcaccgatcacctggccgattggctgcggcaagctgtttaaaggcgtttaccacctttataaagatgaaacctatctctatcagagcggtaaaggccacaccattcaggaagtccgcattgttaaagggctgaataacccggatctcgacgctgcggttggtgaagatctggcacagcagctgcgtgacgaactggagctggtgaaaggcgcgtctaatgagttcgacaaagagctgttccttgcgggcgaaatcaccccggtattctttggtactgcgctgggtaacttcggcgtcgatcatatgctggatggcctggtggagtgggcgcctgcgccgatgccgcgtcagaccgatacccgtaccgtagaagcgagcgaagataaatttaccggcttcgtatttaaaattcaggccaacatggacccgaaacatcgcgaccgcgtggcgtttatgcgcgtggtatccggtaaatatgaaaaaggcatgaagctgcgccaggtgcgcaccgcgaaagatgtagtgatctccgacgcgctgacctttatggcaggcgaccgttcgcacgttgaagaagcgtatccgggcgatatcctcggcctgcacaatcacggcaccattcagatcggcgatacctttacccagggtgagatgatgaagttcaccggtattccgaacttcgcgccagaactgttccgtcgtatccgcctgaaagatccgctgaagcaaaaacagctgctcaaagggctggtacagctttccgaagagggggcagtgcaggtgttccgtccgatctccaacaacgatctgatcgttggcgcggttggtgtgctgcagtttgatgtggtggtagcgcgcctgaagagcgaatacaacgttgaagcagtgtatgagtcagtcaacgttgccaccgcccgctgggtagaatgtgcggacgcgaagaaattcgaagagttcaagcgtaagaacgaaagccaactggcgcttgatggcggcgataacctcgcttacatcgctaccagcatggtcaatctgcgcctggcgcaggaacgttatccggacgttcagttccaccagacccgcgagcattaa

SEQ ID NO: 2860 - DNA, 249 bp, Escherichia coli
atgcgtattgagatctgcatagccaaagagaaaatgactaaaatgccaaacggtgctgtggatgcgttaaaggaagaattaactcgacgcatcagtaagcgttatgacgatgtagaggtgatcgtaaaaaccaccagcaacgatggcctttctgttacgcgcactgccgataaagattcagctaaaacttttgttcaggaaactctgaaagatacctgggagtctgctgacgagtggtttgttcactaa

SEQ ID NO: 2861 - DNA, 1233 bp, Escherichia coli
atgactaaaaaaccatgggaaagaagacttaaagatttatcgcacttgctcaaatgctgcattgatacatattttgaccctgaattattccgcttgaatttgaatcaattcctccaaaccgcaagaacagtaacatttattattcaaaaaaacaaaaaccagattataggatatgacatttggtataacaataatgttattgaaaaatggaaaaatgatccattaatggcttgggctaaaaattctcgcaatacgatagaaaaacaaggcgatttagaaatgtatagcgaggcaaaggctactcttatttcatcttacattgaagaaaatgacattgagtttattacaaatgaaagtatgttaaacattggtataaaaaagttagtcagacttgcacaaaagaaattaccttcatatttaactgaatcatctattattaaatcagaaagacgatgggtcgctaatacgctaaaagattacgaattattacatgccttagctataatctatggcagaatgtataactgctgtaactctcttggcatacaaataaacaatccaatgggtgacgatgtgatttcgccaacatcattcgactctttatttgatgaagccaggagaataacttatttaaaattaaaagattactccataagcaaattatcatttagcatgatacaatatgataataaaataattcctgaagatattaaagagcgtctaaaactggtagataagcctaaaaatatcacttcgacagaagagttagttgactatacagccaagcttgcagaaacgacttttttaaaggacggttatcacattcaaacattaattttttatgataaacaattccatccaattgatttaatcaatacaacatttgaagatcaagcagataaatatattttttggcgttatgcagctgacagagccaaaataacaaatgcctatggcttcatttggatatcagagctatggctcagaaaagcaagcatcaactccaataaaccaatacatacaatgccaattatagatgaaagacttcaggtaattggaattgattcaaataataatcaaaaatgtatttcatggaaaatagttagagaaaacgaagaaaaaaaaccgactttagaaatatcaacagcagactcaaaacatgacggaaaaccatatttcatgcgttcagtcttaaaagcaattggcggtgatgtaaacactatgaataattga

SEQ ID NO: 2862 - DNA, 294 bp, Escherichia coli
atggatataacaccttttcttcatgcgctttgtgctgtggctgcgcaggtactgattggcctttttaccggaaactgggcttacggtgcgatagccggttgtacgttcttcattgcgcgtgaacacacccaggcagaatatcgctggattgaaatgttcggacatggcaagcgaatgaatatgccgtggtggggcggttttgatccgcgcgcgtgggatgtggcaagcctgatggattttgctgtgccggtggtggcgtgtctgctgatctggctgttggttaatcgtgggtga

SEQ ID NO: 2863 - DNA, 705 bp, Escherichia coli
atggttacaaaaacagtaattccgggagacatcaccacgctgaagggagatgtcagtaaagcgaaggaagatatttcctcaattaacggtaaagtatcaacgcttcagactgatatgaccagtgcaaagcaggatatcagctccagatacacaaaaactgaagttgataataagctgaaaaacaaagtggaagtgaacgatctggaaagtggtcgttatggcggagatttttacccgctgactggccgtgaagcgttttatttatggggattgggcacaactacagcggcggcaaatctttatcttaatcctgaccctgcaatttcgtctgtactgcggtcaacatcgtctatccgctataagcattcagtagagacgatagattcagagcacgccgatctcattttcaggatgcgccctgtatggtacaggtcacaatgcgaaaatgacaggcgtgactggggattctacggattgattgccgaggaagtaggagaaattgcccctcagtttgtacactggcgatcagctaacgaagatgatgcaccggaagctatttccagcaatggccttgttgccgaaggtgtaatgtacgaacgtctggttgttccactgattcaccatatccagaagctgactgaaagagttgatgaacttgagtcagaattgaagttgttatcaacttcccgaagcgatatcggataa

SEQ ID NO: 2864 - DNA, 270 bp, Escherichia coli
atgcgggatataacattacggttcgataacagagaacagtttaacgcaattgtatatgacagtggcctgttcagtcttgaagaagaaaacggggttcttgttgatgttattggctgcattatcgattacgaggagccagaaaacgaaagatgtacaggcattgatcgcggtggttttttcgtaaacatgaggattgttgatagcagtaaaaacatatcttctttaatgcctttcattacgacagatcagcatgtaaggacatgggcttaa

SEQ ID NO: 2865 - DNA, 2358 bp, Escherichia coli
atggcagcagtaaaaatctcaggtgtgctgaaagatggtgcgggaaaaccaatacagaactgcactattcaactgaaggcaaaacgtaacagcaccacggtactggtgaacacggtggcctctgaaaatccggatgaagccgggcgttacagcatggatgttgagtatggtcagtacagcgtcaccctgctggttgaaggttttccgccttcacatgccgggaccattaccgtctatgaaggctccagaccaggtacgctgaatgattttctcggtgccatgacggaagatgatgtcatgccggaggcattgcgtcgttttgaggcaatggtggaagaagcggcacgcaacgccgaagccgcctctcagagcgcagcggcggcaaagaaatccgaaactgcagcggcatcatcgaagaacgcggcgaaaacctcagaaacgaatgcagctaatagtgcacaggcggcagcgacctcacagactgcatcagcaaactccgcgacagcagccaaaaaatcagaaaccaacgcgaaaaatagcgagacagccgcaaagacgagcgaaaccaacgcaaagtccagccagacggcagcgaaaaccagcgaaacgaatgccaaagccagtgaaactgcggcgaaaaatagccagaatgcagcagccgaaagcgagagcgcggcagccggttctgcgactgcagcagctggatcagcaactgctgcggctaacagccagaaagcagcgaagacgagcgaaactaacgcaaagtccagccagacggcagcgaagaccagcgaaacaaatgccaaagccagcgaaactgcggcgaaaaacagccaggatgcagcagccgaaagcgaaagtgccgcagccggttctgcaagtgcggcagctaatagccaaaaagctgcaaaaaccagtgaaactaacgcaaaggcgagcgaaacaaaagcagcaattagcgagacagaagcaacgtcagccgcaacgagagcagagaatgcagcccggattgcagaagatgccgctgatcctgcttctgtccctccgcttcctgatatctggctacccttgaatgattctctggaagcgataacagggtatgcgccggggtataaaacaataaccatcggcagtgatgaaatcactgtgccagttaatggaatatgtcagtttagccgggcttcatcagcaacgtatattgataagtccgggcatattaccgtagcaggtaataacgttcctcgttttgaaaaatatggtttgctgatagagaatcagcgaacaaacatgttcgtaaatagttttaatcctgatgcctggaataaaagcggtggtatatctgtaacatcatcaacagatgaatttgagtttaaatatggacgtttcacagtaggaagcgacatagcaggaacgacaacagggagaaatatatgcacagttgctggtaataaaggcatagatgtgactggcgatgatcagtacagtaaaggtccgtatgttaccgcgtcgttcagggtaagaagtgatctcaatgttcgcgcacgtatccgttttgaacggtataactcggaaggatacacttttctttgtgacgcctatttgtcattacagacccgtgaactacaaattactggtggcaatgcccagctattaacagcaaactttgaaatcgaccctggaagtggatggatatattttcaggcaacactgaaatgtctgccagaatggggaatggttggtacgcagctgcaaattgcagccgacagagctgtggggtcttttgcaacaggtgactggatagaagtaaccaccccgcaattcgagtatggtgcctgtgcaacttccttcatcataactacaacagagccagcgactcgtgcatcagatttatgtaaatttccgctgatgaaaaatatgtataccatgccttttacgttcatggtggaagtccataaaaactggtttatttctcataatgctgcaccgcgcgtaattgatacagaaaaccatcagtcaggtgctccatttatcatgggatttggctcttctggaactatcagtcaggacggttatccctattgtgatataggcggggctaaccggcgtgtatatgagtcatgcggagtaagagatctcgttatgggattcagggttaaggctgacggcatgacatgctcatttgcaaataagcatataagcacagaaacaaaaacagtatggaaatatattcgtgaagctgccgtgattcgtattggggggcaaacgacgacaggattgcgacaccttaatggtcatataaaaaatctccgtttctggaacagagcattgtcagatacgcagcttaaggaatacgtataa

SEQ ID NO: 2866 - DNA, 600 bp, Escherichia coli
atgcgtaaattatgtgctgttattctgtccgcagtagtctggctggttgccgctggtacgccagcgagcgcagcagagcatcagtccacactaagcgccgggtatcttcagacccatactgatatgccaggcagcgatgacctgaagggcattaacgtgaaataccgttatgaatttacggacacgctggggctggtgacgtcattcagctatgcaggagacaagaatcgccagcttacccgttacagcgatacccgctggcatgaagattccgtgcgtaaccgctggttcagcgtgatggcggggccgtctgtgcgcgtgaatgaatggttcagcgcgtatgcgatggcgggtatggcttacagccgtgtgtcgactttttccggggattacctccgcgtaactgacaacaaggggaaaacgcacgatgtgctgaccggaagtgatgacggtcgccacagcaacacgtctctggcgtggggggctggcgtgcagtttaacccgaccgaatccgtggccattgatattgcttatgaaggatccggcagtggtgactggcgcactgacggtttcatcgtgggtgtcggttataaattctga

SEQ ID NO: 2867 - DNA, 1986 bp, Escherichia coli
atgaaaaccgttagggagtccgcaacgttgtacaactttctcggatcgcacaatccatactggcggttgacggaaagcagcgatgttttgcgcttttctaccaccgaaatcacagaacccgatcgtattttgcaactatctgccgaacaggctgctcgcatcagggaaatgacggtcatcacctccagcctgatgatgagtctgaccgtcgatgaaagcgatctttctgtgcatctggtaggacgaaaaatcaataaacgagaatggggaggcaacgcgtctgcatggcatgacacaccggcggttgctcgtgatttatcacatgggctttcctttgctgagcaggtagtttctgaagcacattccgcaatagtgattctcgacagccgggggaatatccagcgctttaatcggttatgtgaagattacacaggcttgaaagaacacgacgtcattgggcaaagcgtgtttaaactgtttatgagtcgtcgtgaagctgcggcatccaggcgcaataaccgtgtattttttcgaagcggcaatgcatatgaagtcgaactgtggataccaacacgtaaaggccagcggctgtttctgtttcgcaataaatttgtccacagcggcagtggcaaaaacgagatttttttaatctgttccggcaccgacattaccgaagagcgccgcgctcaggagcgactgcgtattctggcaaataccgacagtatcaccggactgccgaatcgtaacgcaatgcaggagttaatcgatcacgctattaatcaggcagataacaataaagttggggttgtgtatcttgatttggataattttaaaaaggtcaacgacgcctatgggcatttgtttggtgaccagttattacgcgacgtgtcattggctattttaagctgtctcgaacatgaccaggtgttggcgcgtccaggtggcgatgagtttctggtactggcatccaatacctcacaaagcgcgctggaagcattggcatcacgaattttgacccgcttacgactcccctttcgcattggtttaattgaagtttataccagctgttcagtaggtatttcactctctcccgaacatggttcggacagcgcggctattattcgtcacgccgacacagcaatgtacacagcgaaggaaggcggacgaggacaattttgcgtttttaccccagaaatgaatcagcgggtatttgaatatctctggctggataccaacttgcgtaaagcactggaaaacgatcagttggttattcactatcaaccgaaaatcacctggcgtggcgaagtgcgcagtctggaagcactagtacgttggcagtcacctgaacgtgggttgattccaccgttggacttcatttcctacgccgaagaatcagggctaattgtgcctttaggccgttgggtgattctcgatgtcgtacgccaggtagcgaagtggcgggataaaggcattaacctgcgagtggcggtaaatatttctgcacgtcagctcgccgatcaaaccattttcaccgccctgaaacaggttctccaggaactcaattttgaatactgccctatagatgttgaactgacggagagctgcctgattgagaatgatgaactggcactgtctgttattcaacaatttagccgattaggtgcgcaagttcatctggacgattttggtaccggctactcttcactttcgcaactggcgcgctttccgatcgatgccatcaaacttgaccaggtttttgttcgggatattcacaaacagcctgtctcgcaatcactggtccgggcgatcgtcgctgtggcccaggcattgaatcttcaggtgatcgccgaaggtgtagaaagtgcaaaggaagatgcttttttaaccaagaacgggatcaatgagcgacaaggatttttgtttgccaaaccgatgcccgccgttgccttcgaacgctggtataaacgctatctgaagcacacataa

SEQ ID NO: 2868 - DNA, 174 bp, Escherichia coli
atgtctgaatttgatgcccagcgcgttgccgaacgtattgatattgtgttagatatccttgtggcaggcgattaccactctgcgatccataatctcgagatacttaaagcagaactcttgcgccaggttgctgaatctacgccagacatcccgaaggcaccgtgggagatctaa

SEQ ID NO: 2869 - DNA, 750 bp, Escherichia coli
atgaattcccgacaacaaactattctacagatggtcattgaccagggtcaggttagcgtaaccgatctggcaaaagccactggagtttctgaagttaccattcgccaggatctcaacaccctcgaaaaactgagttacctccgacgtgcacatggttttgcagtttcgcttgatagtgatgacgtcgaaacccgtatgatgagcaactatacgctgaagcgtgaactcgccgagtttgccgcgtcactggttcaaccgggcgaaaccatctttatcgaaaatggtagcagcaatgccctgctcgccaggactctgggcgagcagaagaaaaatgtcactatcatcacggtcagcagctacatcgcgcatttgctgaaagacgcgccttgtgaagtcattttgctcggtggcgtgtaccagaaaaaaagcgaaagtatggttggccctttgacacgccagtgcatccaacaagtgcatttcagcaaagcatttattggtattgatggctggcaacctgaaactgggtttaccggtcgcgatatgatgcgtaccgatgtggtcaatgccgtgctggaaaaagagtgcgaggcgatagtcctgactgacagctcgaaatttggtgctgtacattcatactccatcggccccgttgagcgattcaatcgcgtgattaccgattcgaaaatacgcgccagcgatctgatgcatcttgaacaaagtaaactcaccgttcacgtcgttgacatttaa

SEQ ID NO: 2870 - DNA, 219 bp, Escherichia coli
atgtttgtaacgagcaaaaaaatgaccgcggctgttctggcaattaccctggcaatgtctctgagtgcctgttctaactggtctaaacgggaccgcaacaccgcaatcggtgcaggtgcaggggcattaggcggtgcagtactgaccgatggcagtacgttgggtacattaggtggtgcagccgtcggtggtgttattggtcaccaggtcggtaaataa

SEQ ID NO: 2871 - DNA, 327 bp, Escherichia coli
atgagtgattccaacagccgtctggtctactcaacggaaaccggacgtattgatgagccaaaagcggcccctgtacgccctaaaggcgacggtgtggtgcgtattcagcgtcagaccagtggacgtaaaggtaagggcgtttgcctgattaccggtgtcgctctcgatgatgccgaactgacgaaactggcagcggaactgaagaaaaaatgcggctgcggcggagcagttaaagatggaattattgaaatccagggcgataagcgtgatttattaaaatcactgcttgaagcgaaagggatgaaggtaaaactcgcaggcggctaa

SEQ ID NO: 2872 - DNA, 798 bp, Escherichia coli
atgctcgccgtttacctgtttcgcgccacttccggtgcccatcatcaagaaggtctggtcatgacgttaactgcttcatcttcttcccgcgctgttacgaattctcctgtagttgttgcccttgattatcataatcgcgatgccgcgatggcctttgtcgacaagatcgacccacgcgattgtcgtctgaaggtcggcaaagagatgtttacattgtttgggccacagtttgtgagcgaacttcaacagcgtggttttgatatctttcttgacctgaaattccacgatattcccaacactgcagcgcacgctgtcgctgctgcggctgacttaggcgtgtggatggtgaatgttcatgcctccggtggggcgcgtatgatggccgcagcgcgtgaggcactggttccgtttggcaaagatgcaccgcttttgattgctgtgacagtgttgaccagcatggaagccagcgacctggccgatcttggcgtgacactgtcacctgcagattatgcagaacgtctggcggcactgacgcaaaaatgtggccttgatggtgtggtgtgttctgctcaggaagctgtgcgctttaaacaggtattcggtcaggagttcaaactggttacgccgggcattcgtccgcaggggagtgatgctggtgaccagcgccgcattatgacgccagaacaggcgttggcggctggtgttgattatatggtgattggtcgcccggtaacgcaatcggtagatccagcgcagacgctgaaagcgatcaacgcctctttacagcggagtgcatga

SEQ ID NO: 2873 - DNA, 1170 bp, Escherichia coli
atgctggagttgttgtttctgcttttgcctgtagccgctgcctatggctggtatatgggccgcagaagtgcgcaacaaaacaagcaagatgaagccaaccgcttgtcgcgtgattacgtagcgggggttaacttcctgcttagtaatcaacaggataaagcggtagacctgtttctcgatatgcttaaagaggatacaggtaccgttgaagcccaccttacgctcggaaacctgttccgttcgcgtggcgaagttgatcgcgctattcgcatccatcagaccctaatggaaagcgcctcgctgacctatgaacagcggcttttggcgattcaacaactggggcgtgattacatggctgccgggttatacgaccgcgcggaagacatgttcaatcagctgaccgatgaaactgacttccgcattggcgcgctgcaacaactgctacaaatttaccaggctaccagcgagtggcagaaagcaattgatgttgccgaacgcctggtgaagctgggtaaagataaacagcgcgtcgaaattgcccatttctactgtgagttagctctgcagcatatggccagcgacgatctcgatcgtgccatgactttgctaaaaaaaggtgcggcggcagataaaaacagcgcccgcgtatccatcatgatgggacgcgtgtttatggcgaaaggagaatacgccaaagccgtcgaaagtttgcaacgtgtcatatcccaggacagagaactggtcagcgaaacgctggaaatgctgcaaacatgctatcagcagttgggtaaaactgccgaatgggcagaattcctgcagcgcgcggtggaagagaacaccggtgccgatgctgaattgatgcttgcggatatcatcgaagcgcgcgacggtagtgaggccgcacaggtctatattacgcgccagcttcagcgtcatccgaccatgcgtgtgttccataagttaatggattaccacttaaatgaagcagaagaagggcgtgccaaagagagtctgatggtgctgcgtgacatggttggcgagaaggtgcgtagtaagcctcgttatcgctgccagaaatgtggttttaccgcatacactctctactggcattgtccgtcttgtcgggcctggtcaaccattaaaccgattcgcggtcttgatggcctgtaa

SEQ ID NO: 2874 - DNA, 309 bp, Escherichia coli
gtgaaatatttactcattttcttactggtgttagcgatcttcgtgatttcggtcacgttgggtgcgcagaacgatcaacaggtgacgtttaattatctgttagcgcaaggggagtaccgtatttccacattgctggcggtattgtttgctgcggggtttgctatcggttggttgatttgtggcctgttctggctgcgagttcgtgtttccctggcgcgcgctgaacgtaaaataaagcgactggaaaaccagctttcacctgcgactgacgtggctgtagcgccgcactcgtctgcgtcgaaggaataa

SEQ ID NO: 2875 - DNA, 765 bp, Escherichia coli
atgcgttcgattgccagacgtaccgcagtgggagctgcactattgcttgtcatgccagtagccgtatggctttctggctggcgttggcaacctggagaacaaagttggttactaaaagcggctttttgggttactgaaactgtcacccagccctggggcgtcattacacatttgattttattcggctggtttctctggtgtctgcgttttcgcattaaggctgccattatgttatttgccattctggcggcggcaatccttatgggacaaggcgttaaatcctggatcaaagacaaagtccaggaaccacgaccttttgttatctggctggaaaaaacacatcatattccggttgatgagttctacactttaaagcgagcagaacgcggaaatctggtgaaagaacagttggctgaagagaaaaatatcccacaatatttgcgttcacactggcagaaagagacggggtttgcctttccttccggtcacacgatgtttgctgccagttgggcactgctggccgttggtttgctgtggccgcgtcggcgaacgttaaccattgctatcttgttggtctgggcaacgggagtcatgggaagccgcctgctgctcgggatgcattggccacgcgatctggttgtagctacgttgatttcgtgggcgctggtggcggtggcaacgtggcttgcgcaacgaatttgtgggccattaacaccacctgcggaagaaaatcgcgaaattgcacaacgagaacaagaaagttaa

SEQ ID NO: 2876 - DNA, 591 bp, Escherichia coli
atgcagcttaaacgtgtggcagaagccaaactgccaaccccatggggcgatttcctgatggtgggatttgaagaactggcaaccggacacgatcatgtcgcgctagtctatggcgatatttccgggcataccccggtacttgcgcgcgtccattccgaatgtctgaccggtgacgccctgttcagcttgcgctgcgattgtggcttccagctcgaagcggcattgacgcaaattgccgaggaaggccgtggtattttgctgtatcaccgtcaggaaggtcgtaacattggtctgctgaataaaatccgcgcttacgcactgcaggatcaaggttacgatactgtagaggctaaccaccagttaggcttcgccgctgatgagcgcgacttcactctttgcgctgatatgttcaaactccttggcgtcaatgaagtccgcttgttaaccaataacccgaaaaaagtcgaaattctgaccgaagcagggattaatattattgaacgcgtaccgttgattgtaggtcgtaaccccaataacgaacattatctcgataccaaagccgagaaaatgggtcatttgctgaacaaataa

SEQ ID NO: 2877 - DNA, 2676 bp, Escherichia coli
atgtcgtcaaccctacgagaagccagtaaggacacgttgcaggccaaagataaaacttaccactactacagcttgccgcttgctgccaaatcactgggcgatatcacccgtctacccaagtcactcaaagttttgctcgaaaacctgctgcgttggcaggatggtaaatcggttaccgaagaggatatccacgcgctggcgggatggctgaaaaatgcccatgctgaccgtgaaattgcctaccgcccggcaagagtgctgatgcaggactttaccggcgtacctgccgttgttgatctggcggcaatgcgcgaagcggttaaacgcctcggcggcgatactgcaaaggttaacccactctcaccggtcgacctggtcattgaccactcggtgaccgtcgatcgttttggtgatgatgaggcatttgaagaaaacgtacgcctggaaatggagcgcaaccacgaacgttatgtgttcctgaaatggggaaagcaggcgttcagtcggtttagcgtcgtgccgccaggcacaggcatttgccatcaggttaacctcgaatatctcggcaaagcagtgtggagcgaattgcaggacggtgaatggattgcttatccggatacactcgttggtactgactcgcacaccaccatgatcaacggccttggcgtgctggggtggggcgttggtggcatcgaagcagaagccgcaatgttaggccagccggtttccatgcttatcccggacgtagtgggctttaaacttaccggaaaattacgtgaaggtattaccgccacagacctggttctcactgttacccaaatgttgcgcaaacatggcgtggtggggaaattcgtcgaattttatggtgatgggctggattcactaccgctggcggatcgcgccaccattgccaatatgtcgccagaatatggtgccacctgtggcttcttcccaatcgatgctgtcaccctcgattacatgcgtttaagcgggcgcagtgaagatcaggtcgagttggtcgaaaaatatgccaaagcgcagggcatgtggcgtaatccgggcgatgaaccaatttttaccagtgtgttagaactggatatgaatgacgttgaagcgagccttgcagggccaaaacgcccgcaggatcgcgttgcactgcccgatgtaccaaaagcatttgctgccagtagcgaactggaagtgaatgccacgcataaagatcgcctgccggtcgattatgttatgaacggacatcagtatcagttacctgatggcgctgtggtcattgctgcgataacgtcgtgcaccaacacctctaacccaagtgtgctgatggccgcaggcttgctggcgaaaaaagccgtaactctgggcctcaagcggcaaccgtgggtcaaagcgtcgctggcaccgggttcgaaagtcgtttctgattatctggcaaaagcgaaactgacaccgtatctcgatgaactgggatttaaccttgtgggatacggttgtaccacctgtattggtaactctggaccgttgcccgatcctatcgaaacggcaatcaaaaaaggcgatttaaccgtcggtgcagtgctgtccggcaaccgtaactttgaaggccgtatccatccgctggttaaaaccaactggctggcctcgccgccgctggtggttgcctatgcgctggcgggaaatatgaatatcaacctggcttctgagcctatcggccatgatcgcaaaggcgagccggtatatctgaaagatatctggccatcggcacaagaaattgcccgtgcggtagaccaagtctccacagaaatgttccgcaaagagtacgcagaagtttttgaaggcacagctgagtggaaggaaattaacgtcacacgatccgatacctacggttggcaggaggattcaacctatattcgcttatcgcctttctttgatgaaatgcaggcaacaccagcacctgtggaagatattcacggtgcgcggatcctcgcaatgctgggggattcagtcaccactgaccatatctctccggcgggcagtattaagcccgacagcccggcgggtcgatatctacaaggtcggggtgttgagcggaaagactttaactcctatggttcgcggcgtggtaaccatgaagtgatgatgcgcggcaccttcgccaatattcgcatccgtaatgaaatggtgcctggcgttgaaggggggatgacgtgccatttacctgacagcgatgtcgtctctatttatgatgccgcaatgcgctataagcaggagcaaacgccgctggcggtgattgccgggaaagagtatggatcaggctccagccgtgactgggcggcaaaaggtccgcgtctgcttggtattcgtgttgtgattgccgaatcgtttgaacgaattcaccgttcgaatttaattggcatgggcatcctgccgctggaatttccacaaggtgtgacgcgtaaaacgttagagcttaccggggaagagaagattgatattggtgatctgcaaaatctacaacccggcgcgacggttccggtgacgcttacgcgcgcggatggtagccaggaagtcgtaccctgccgttgtcgtatcgacaccgcgacggagttgacctactaccagaacgacggcattttgcattatgtcattcgtaatatgttgaagtaa

SEQ ID NO: 2878 - DNA, 168 bp, Escherichia coli
atggtcggtcaggagcaactggagtcgtcaccattatgtcagcatagtgacaatgaaccagaagcaaaacgggaatgttccgtcgttattccagacgactggcaactaacatcgcagcaacaagcctttatagaactgtttgctgaagatgatcagccgaaacaataa

SEQ ID NO: 2879 - DNA, 129 bp, Escherichia coli
atgccttctggaaatcaggaaccccgccgcaatcctgaattaaaacgtaaagcctggctggcggtttttcttggttctgcacttttctgggtggttgtcgcactgtttatttggaaattgtggggataa

SEQ ID NO: 2880 - DNA, 975 bp, Escherichia coli
atgaaattacaacaacttcgctatattgttgaggtggtcaatcataacctgaatgtctcatcaacggcggaaggactttacacatcacaacccgggatcagtaaacaagtcagaatgctggaagacgagctgggcattcaaattttttcccgaagcggcaagcacctgacgcaggtaacgccagcaggacaagaaataattcgtatcgctcgtgaagttctgtcgaaagtcgatgccataaaatcggtcgccggagagcacacctggccggataaaggctcgctgtatatcgccaccacgcatactcaggcacgctatgcgttaccaaacgttatcaaaggctttattgagcgttatcctcgcgtttctttgcatatgcaccagggctcgccgacacaaattgctgatgccgtctctaaaggcaatgccgatttcgctatcgccacggaagcgctgcatctgtatgaagatttagtgatgctaccgtgctaccactggaatcgggctatagtagtcactccggatcacccgctggcaggtaaaaaagccattaccattgaagaactggcgcaatatccgttggtgacatataccttcggctttaccggacgttcagaactggatactgcctttaaccgcgcagggttaacgccgcgtatcgtcttcacggcaacggatgctgacgtcattaaaacttacgtccggttagggctgggggtaggggtcattgccagcatggcggtggatccggtcgccgatcccgaccttgtgcgtgttgatgctcacgacatcttcagccacagtacaaccaaaattggttttcgccgtagtacttttttgcgtagttatatgtatgatttcattcagcgttttgcaccgcatttaacgcgtgatgtcgttgatgcggctgtcgcattgcgctctaatgaagaaattgaggtcatgtttaaagatataaaactgccggaaaaataa

SEQ ID NO: 2881 - DNA, 2598 bp, Escherichia coli
atgggtaaagctcttgtcatcgttgagtccccggcaaaagccaaaacgatcaacaagtatctgggtagtgactacgtggtgaaatccagcgtcggtcacatccgcgatttgccgaccagtggctcagctgccaaaaagagtgccgactctacctccaccaagacggctaaaaagcctaaaaaggatgaacgtggcgctctcgtcaaccgtatgggggttgacccgtggcacaattgggaggcgcactatgaagtgttgcctggtaaagagaaggtcgtctctgaactgaaacaactggctgaaaaagccgaccacatctatctcgcaaccgaccttgaccgcgaaggggaagccattgcatggcacctgcgggaagtgattggtggtgatgatgcgcgctatagccgagtggtgtttaacgaaattactaaaaacgcgatccgccaggcatttaacaaaccgggtgaactgaatattgatcgtgttaatgcccagcaggcgcgtcgctttatggaccgcgtggtggggtatatggtttcgccgcttctatggaaaaagatcgctcgtggtctgtctgccggtcgtgtgcagtcggtggcggtccgcctggtggtcgagcgtgagcgtgaaattaaagcgttcgtaccggaagagttctgggaagtcgatgccagcacgaccacgccatctggtgaagcgttggcgttgcaggtgactcatcagaacgacaaaccgttccgtccggtcaacaaagaacaaactcaggctgcggtaagtctgctggaaaaagcgcgctacagcgtgctggaacgtgaagacaaaccgacaaccagtaaacctggcgctccttttattacctctacgctgcaacaagctgccagcacccgtcttggttttggcgtgaaaaaaaccatgatgatggcgcagcgtttgtatgaagcaggctatatcacttacatgcgtaccgactctaccaacctgagtcaggacgcggtaaatatggttcgcggttatatcagcgataattttggtaagaaatatctgccggaaagtccgaatcagtacgccagcaaagaaaactcacaggaagcgcacgaagcgattcgtccttctgacgtcaatgtgatggcggaatcgttgaaggatatggaagcagatgcgcagaaactgtaccagttaatctggcgtcagttcgtagcctgccagatgaccccagcgaaatatgactccacgacgctgaccgttggtgcgggcgatttccgcctgaaagcacgcggtcgtattttgcgctttgatggctggacgaaagtgatgcctgcactgcgtaaaggcgatgaagatcgtatcttaccggcagtcgataaaggcgatgctctgacgctcgttgaactgacaccagcccagcactttaccaagcctccagcccgtttcagtgaagcatcgctggtcaaagagctggaaaaacgcggtatcggtcgtccttctacctatgcgtcgatcatttcgactattcaggatcgtggctatgtgcgagtagaaaatcgtcgtttctatgcggaaaaaatgggcgaaatcgtcaccgatcgcctggaagagaatttccgcgagttaatgaactacgacttcaccgcgcagatggaaaacagcctcgaccaggtggcaaatcacgaagcagagtggaaagctgtactggatcacttcttctcggatttcacccagcagttagataaagctgaaaaagatccggaagagggtggtatgcgcccgaaccagatggttctgaccagcattgactgcccgacttgtggtcgcaaaatggggattcgcacagcgagcaccggggtattccttggctgttctggctatgcgctgccgccgaaagagcgttgcaaaaccaccattaacctggtgccggaaaacgaagtgctgaacatgctggaaggcgaagacgctgaaaccaatgcgttgcgcgcaaaacgtcgttgcccgaaatgcggtacggcgatggacagctatctcatcgatccgaaacgtaagttgcatgtctgtggtaataacccaacctgcgacggttacgagatcgaagagggtgaattccgcattaaaggttatgacggcccgatcgttgagtgtgaaaaatgtggctctgaaatgcacctgaaaatggggcgtttcggtaaatacatggcctgcaccaacgaagagtgtaaaaacacacgtaagattttacgtaacggcgaagtggcaccaccgaaagaagatccggtgccattaccggagctgccgtgcgaaaaatcagatgcctatttcgtgttgcgtgacggtgctgccggtgtgttcctggcggccaataccttcccgaaatcgcgtgaaacgcgtgcgcctctggtggaggagctttatcgcttccgcgaccgtctgccggaaaaactgcgttatctggccgatgcgccacagcaggatccggaaggtaataagaccatggttcgctttagccgtaaaaccaaacagcaatatgtctcttcggaaaaagacggaaaggcgactggttggtcagcattttatgttgatggcaaatgggttgaagggaaaaaataa

SEQ ID NO: 2882 - DNA, 252 bp, Escherichia coli
atgaacaaagagactcaacccatcgaccgcgaaacgctgttgaaagaggccaacaaaatcattcgtgagcatgaggatacgctcgcagggattgaagccaccggcgtcacgcagcgtaatggcgtgctggtatttaccggcgactactttttagatgaacaaggattaccaactgccaaaagcaccgcggtgtttaatatgttcaaacacctggcccatgtgctttcagaaaaatatcacctggttgattaa

SEQ ID NO: 2883 - DNA, 1050 bp, Escherichia coli
gtggaattgttgtctgaatatggtttgtttttggcgaaaatcgttaccgttgtgctagcgattgcggcgattgccgccattattgtcaatgttgctcaacgtaataaacgccagcgtggcgagttacgagtcaacaatctcagcgaacagtataaggagatgaaagaagaactggccgcggcgctgatggacactcatcagcaaaaacagtggcacaaagcgcagaagaaaaagcacaaacaagaagcgaaagccgcaaaagcgaaagctaaactgggcgaggtggtaactgacagtaaaccccgcgtctgggtgctggattttaaaggcagcatggacgcccatgaagtgaactcgctacgtgaagagataacggcggtactcgcagcattcaaaccgcaggatcaggttgtgctccgtctggaaagcccaggtggcatggtgcatggttacgggttggcggcttcgcagttgcagcgtctgcgtgataaaaacattcctttaactgttacggtagacaaagtcgctgccagcggcggttacatgatggcctgtgtggcggacaaaattgtttccgcaccgtttgctattgtgggttccattggggtggtggcgcaaatgcccaactttaaccgcttcctgaaaagcaaagatattgatatcgaactgcacaccgccgggcagtataagcgcacgctgacgttgctgggtgaaaataccgaagaagggcgggagaaattccgcgaagagttgaacgaaacgcatcagttatttaaagattttgtgaagcgtatgcgtccgtctctggatattgaacaggtggcaacgggtgaacactggtacggacaacaggcagtagagaaaggcctggttgatgaaatcaacaccagtgatgaagttattcttagcctgatggaaggccgggaagtggtcaatgtacgctatatgcagcgtaaacgactcattgaccgattcaccggcagcgcggcagagagcgccgatcgattgttgttacgctggtggcagcgtgggcaaaagccgttgatgtaa

SEQ ID NO: 2884 - DNA, 759 bp, Escherichia coli
atgcattaccagccaaaacaagatttactcaatgaccgcattatcctggtgacgggagccagcgatggaattggtcgtgaagcagcgatgacgtatgcacgctatggtgcgacagtgattcttttgggccgtaatgaagaaaaattacgtcaggtagccagccacataaacgaagaaactggacgtcagccacagtggtttattctcgatttgctaacctgcacgtccgaagattgccaacaactggcacagcgcattgccgttaattatccgcgtctggatggtgttttgcataatgccggattgctcggcgatgtttgcccaatgagcgaacaagatccgcaggtctggcaggacgtcatgcaggtcaacgttaatgccacctttatgctcacacaggcactgcttcctttattactcaaatcggatgccggttcactggtctttacctcatcaagcgttggacgtcaggggcgtgcaaactggggcgcatatgcagcgtcgaaatttgccaccgaagggatgatgcaggtactggccgatgaatatcagcagcgcctgcgcgtcaactgcattaacccaggcggtacgcgcaccgcaatgcgggccagcgccttcccgaccgaagatccacagaaacttaaaacccccgctgatatcatgccgctctacctctggctgatgggcgatgacagccgccgtaaaaccggcatgacctttgacgcccaaccgggccgtaaaccaggaatttcccaatga

SEQ ID NO: 2885 - DNA, 591 bp, Escherichia coli
atgagtgatgaacgctaccaacagcgtcagcagcgagtgaaagaaaaagtagatgctcgtgtggcccaggcccaggatgaacgcggtattatcatcgtctttaccggcaatggaaaaggcaaaaccaccgcggcatttggtacggcaacacgcgcagttggtcacggaaaaaaagtgggcgtcgtgcagtttattaaaggcacctggcctaatggtgaacgaaatctgctggagccacacggcgttgagtttcaggtaatggcaacgggctttacctgggatacacaaaaccgagagtctgataccgccgcctgccgcgaagtctggcaacatgcaaagcggatgctggctgattcctcactggatatggttttgctcgatgaactgacgtatatggtggcgtatgactatttgccactggaagaagtgatgcaggcgttaaatgaacgtccacatcaacagacggtgattatcacaggtcgtggttgtcatcgggatattcttgaactggcggatacggtaagtgaattacgccccgtcaaacatgcgtttgatgccggtgtaaaagcgcagatagggattgattactaa

SEQ ID NO: 2886 - DNA, 876 bp, Escherichia coli
atgagcgaaaagctacagaaagtgctggcgcgtgccggccacggttctcgccgtgaaatcgaatctattattgaagccggtcgtgtgagtgttgatggcaaaattgctaaactcggcgatcgcgttgaaattacccctggactgaaaatccgtatcgatggtcacctgatttcggtacgtgagtccgctgaacaaatttgtcgcgttctggcctattacaaaccggaaggtgagttgtgtacccgtaacgatccggaagggcgtccaacggtgtttgaccgtctgccaaaactgcgtggcgcacgctggattgccgtaggtcgtctggacgttaacacctgtggtctgttgctgttcaccaccgacggtgaactggcaaaccgtttaatgcatccaagccgtgaagttgaacgtgaatatgccgtgcgtgtatttggtcaggttgacgacgcgaaactgcgtgatttgagtcgtggcgtgcagctggaagatggtccggcagcctttaaaaccatcaagttcagcggcggcgaagggatcaaccagtggtacaacgttactctgaccgaaggccgtaaccgtgaagttcgtcgtctttgggaagcggttggtgtgcaggtaagccgcctgattcgtgttcgttacggtgatatcccactgccaaaaggtctgccacgcggtggctggacggagctggacctcgcccagactaactatctgcgcgaactggtggagctaccgccagaaaccagctctaaagtcgctgtagaaaaagaccgtcgtcgcatgaaggcgaatcagattcgtcgtgcggtgaaacgtcacagtcaggtgagcggcggtcgtcgttctggcggacgtaataataacggttaa

SEQ ID NO: 2887 - DNA, 1893 bp, Escherichia coli
atgatggcagggatatatcgctgcattttgctgttgatagttgggctttttttctcttcgttgagttatgcgaaaaacacggagatcccttcttatgaagaagggatctcgctctttgatgttgaagccactctgcaaccgaatggggtgctcgacatcaaagagaacattcattttcaggcgcgaaatcagcagattaagcacggattttatcgtgatttaccgcgactctggatgcagcctgatggggacgctgcactgctgaactatcatattgttggcgtcacccgtgatggtattcctgaaccctggcatcttgactggcatatcgggttaatgagtattgtcgtgggcgataaacaacgtttcttgcctcaaggcgactatcattatcaaattcattatcaggttaaaaatgctttcctgcgtgagggggattctgatctgctaatctggaacgtgaccggtaaccactggccgtttgaaatttataagaccctattttcactcaagttgcctgatattgcgggtaatccatttagcgaaatcgatctctttactggagaagagggcgacacatatcgaaatggccgcatccttgaggacggaagaattgaatctcgcgatccgttttatcgtgaagatttcacggtcctctaccgctggcctcacgcattacttggtaatgccccggctccacaaacgacgaatattttcagtcatcttcttttaccctctacgtcatcgttgttaatttgctttccgagtctgttcctggcgtgtggatggttatatctctggaagcgcaggccgcaatttacgccggtagatgtgattgaaaccgatgtcattccgccagattacacgccgggcatgttacgtctcgatgcgaagctggtttacgacgataaaggtttttgtgccgatatcgtaaatctgattgtgaaaggaaaaattcatctggaagatcattatgacaagaaccagcaaatcctgattcgtgttaatgaaggcgcgaccagaaataatgcggtattactgcccgcagagcagttattactggaagcgttatttcgtaaaggcgataaggtcgttcttacggggagacgcaacagagtcttacgcaaggcatttttacggatgcagaaattttatctgccgcgtaaaaagtcttcgttttaccgacctgatgcgtttttgcaatggggcggaatggcaatattggcggtcattctctacggtaatctgagtcccgtaggttcggcaggaatgagtctggtgggcgatatgtttattatgatctgctggcttcttccttttttattttgttcccttgagcttttgtttgcccgcgatgatgacaagccttgcgttaatcgtgtcatcatcactttgtttttaccactgatttgttcaggcgtggccttctattctctctacatcaatgtcggagatgtattcttttactggtatatgccagcgggttattttagcgctgttttcctgaccggttatctcactggcatggggtatatttttctgccaaagtttacccaaaacgggcagcaacgttatgcccacggtgaagctatcgttaactatcttgcgcgtaaagaggcggcaacacacagtgggcggcggcggaaaggggaaacacggaaactggattacgctttgttaggttgggcggtctcggcaaaccttggcagagaatgggcagcacgtatcaccccgtcactcacagcggctgttcgcgccccggaaattgcccgtaacggcgttttattctcattacagacgcacctgagttgcggggcctataccagtttgttggggcggagctattctggtggtggttctggcgctggtggcggaggcggtggtggttggtaa

SEQ ID NO: 2888 - DNA, 621 bp, Escherichia coli
atgagccagtttttttatattcatcctgataacccgcagcaacgcctgatcaaccaggcggtggagatcgtgcgcaaaggcggggtgattgtttatccaactgattccggctatgcgctcggctgtaaaattgaagataaaaacgcgatggagcgtatttgtcgtattcgccagctgccggacggtcacaactttaccctgatgtgtcgcgatctttctgaactctcgacctattcatttgtcgataacgttgcgtttcgtttgatgaaaaacaacacgccaggcaactataccttcatcctgaaggggacgaaggaggtgccacgccgtctgttgcaggaaaaacgcaaaaccatcggtatgcgcgtgccgtctaacccgattgcgcaggcgctgcttgaagcattgggcgaaccgatgctttccacttcgctaatgctgccaggcagtgaatttaccgaatccgatccggaagaaattaaagaccgtctggaaaaacaggtggatttgattattcacggcggctatctcgggcagaaaccaacaacggttattgatctcaccgatgatacgccggtcgtggtgcgtgaaggcgtaggtgatgtgaagcctttcttataa

SEQ ID NO: 2889 - DNA, 882 bp, Escherichia coli
ttgagcgacacgaattacgcagtgatttacgacctgcacagccataccacagcttccgatggctgcctgacgccagaagcattggtgcaccgtgcagtcgagatgcgcgtcggcaccctggcgatcaccgaccatgacaccacagctgcaattgcaccagcaagagaggaaatttcacgttcgggactggcgctgaatcttattcctggtgtggaaatttccacggtctgggaaaatcatgaaattcatattgtcgggctgaatattgatattactcatccgctaatgtgcgagttcctcgcgcagcagacagaacggcgcaatcagcgggcgcagctgattgccgaaagacttgaaaaagcgcaaatacctggggcactggaaggcgcgcaacgactggcgcagggcggtgcggtgacgcgcggtcattttgcgcgtttccttgtggagtgcggaaaagccagttcaatggcggatgtctttaaaaagtatctggcgcgcgggaaaaccggatacgttccgccacagtggtgtacaatagagcaatctattgatgtcattcatcattctggcggtaaggcggtgctagctcatcctgggcggtacaatcttagtgctaaatggctgaaaagattggttgcgcattttgccgaacaccacggcgacgcgatggaagtcgcgcagtgccagcaatcgcccaatgaacgcacccagctggcgacacttgcgcgtcagcatcatttatgggcatcacaaggatctgattttcatcagccatgcccgtggatcgaactgggtcgtaaactttggctgcccgcaggcgttgaaggcgtctggcagctatgggaacagccgcagaacaccacagagagggaattatga

SEQ ID NO: 2890 - DNA, 1563 bp, Escherichia coli
atgcaaacacaaaaaccgactctcgaactgctaacctgcaaaggcgcttatcgcgacaacccgactgcgctttttcaccagttgtgtggggatcgcccggcaacgctgctgctggaatccgcagatatcgacagcaaagatgatttaaaaagcctgctgctggtagacagtgcgctgcgcattacagcattaagtgacactgtcacaatccaggcgctttccggcaatggagaagctctgttgacactactggataacgccttgcctgcgggtgtggaaaatgaacaatcaccaaactgccgcgtactgcgcttcccgcctgtcagtccactgctggatgaagacgcccgcttatgctccctttcggtttttgacgctttccgcttattacagaatctgttgaatgtaccgaaggaagaacgagaagcaatgttcttcggcggcctgttctcttatgaccttgtggcgggatttgaaaatttaccgcaactgtcagcggaaaatagctgccctgatttctgtttttatctcgctgaaacgctgatggtgattgaccatcagaaaaaaagcacccgtattcaggccagcctgtttgctccgaatgaagaagaaaaacaacgtctcactgctcgccttaacgaactacgtcagcaactgaccgaagccgcgccgccgctgccggtggtttccgtgccgcatatgcgttgtgaatgtaaccagagcgatgaagagttcggtggcgtagtgcgtttgttgcaaaaagcgattcgcgccggagaaattttccaggtagtgccatctcgccgtttctctctgccctgcccgtcaccgctggcagcctattacgtgctgaaaaagagtaatcccagcccgtacatgttttttatgcaggataatgatttcaccctgtttggcgcgtcgccggaaagttcgctcaagtatgacgccaccagccgccagattgagatttacccgattgccggaacacgtccacgcggtcgtcgtgccgatggttcgctggacagagacctcgacagccgcatcgaactggagatgcgtaccgatcataaagagctttctgaacatctgatgctggtggatctcgcccgtaatgacctggcacgcatttgcacacccggcagccgctacgtcgccgatctcaccaaagttgaccgttactcttacgtgatgcacctggtctcccgcgttgttggtgagctgcgccacgatctcgacgccctgcacgcttaccgcgcctgtatgaatatggggacgttaagcggtgcaccgaaagtacgcgctatgcagttaattgccgaagcagaaggtcgtcgacgcggcagctacggcggcgcggtaggttattttaccgcgcatggcgatctcgacacctgcattgtgatccgctcggcgctggtggaaaacggtatcgccaccgtgcaagccggtgctggcgtagtccttgattctgttccgcagtcggaagcagacgaaacccgtaataaagcccgcgctgtactgcgcgctattgccaccgcgcatcatgcacaggagacgttctaa

SEQ ID NO: 2891 - DNA, 1596 bp, Escherichia coli
atggctgacattctgctgctcgataatatcgactcttttacgtacaacctggcagatcagttgcgcagcaatggtcataacgtggtgatttaccgcaaccatattccggcgcagaccttaattgaacgcctggcgacgatgagcaatccggtgctgatgctttctcctggccccggtgtgccgagcgaagccggttgtatgccggaactcctcacccgcttgcgtggcaagctgccaattattggcatttgcctcggacatcaggcgattgtcgaagcttacgggggctatgtcggtcaggcgggcgaaattcttcacggtaaagcgtcgagcattgaacatgacggtcaggcgatgtttgccggattaacaaacccgctgccagtggcgcgttatcactcgctggttggcagtaatattccggccggtttaaccatcaacgcccattttaatggcatggtgatggcggtgcgtcatgatgcggatcgcgtttgtggattccagttccatccggaatccattcttactacccagggcgctcgcctgctggaacaaacgctggcctgggcgcagcagaaactaaagccaaccaacacgctgcaaccgattctggaaaaactgtatcaggcccagacgcttagccaacaagaaagccaccagctgttttcagcggtggtacgtggcgaactgaaaccggaacaactggcggcggcgctggtgagcatgaaaattcgcggcgagcacccgaacgaaatcgccggagcagcaaccgcgctactggaaaacgccgcgccgttcccgcgcccggattatctgtttgccgatatcgtcggcaccggcggtgacggcagtaacagcatcaatatttctaccgccagtgcgtttgtcgccgcggcctgcgggctgaaagtggcgaaacacggcaaccgtagcgtctccagtaaatccggctcgtcggatctgctggcggcgttcggtattaatcttgatatgaacgccgataaatcgcgccaggcgctggatgagttaggcgtctgtttcctctttgcaccgaaatatcacaccggattccgccatgcaatgccggttcgccagcaactaaaaacccgcacactgttcaatgtgctggggccattgattaacccggcgcatccgccgctggcgttaattggtgtttatagtccggaactggtgctgccgattgccgaaaccttgcgcgtgctggggtatcaacgcgcggcggtggtgcacagcggcgggatggatgaagtttcattacacgcgccgacaatcgttgccgaactgcatgacggcgaaattaagagctatcaattgaccgctgaagattttggcctgacaccctaccaccaggagcaactggcaggcggaacaccggaagaaaaccgtgacattttaacacgcttgttacaaggtaaaggcgacgccgctcacgaagcagccgtcgcggcgaatgtcgccatgttaatgcgcctgcatggccatgaagatctgcaagccaatgcgcaaaccgttcttgaggtactgcgcagtggttccgcttacgacagagtcaccgcactggcggcacgagggtaa

SEQ ID NO: 2892 - DNA, 1359 bp, Escherichia coli
atgcaaaccgttttagcgaaaatcgtcgcagacaaggcgatttgggtagaagcccgcaaacagcagcaaccgctggccagttttcagaatgagattcagccgagcacgcgacatttttatgatgcgctacagggtgcacgcacggcgtttattctggagtgcaaaaaagcgtcgccgtcaaaaggcgtgatccgtgatgatttcgatccggcacgcattgctgccatttataaacattacgcttcggcaatttcagtgctgactgatgagaaatattttcaggggagctttgatttcctccccatcgtcagccaaatcgccccgcagccgattttatgtaaagacttcattatcgatccttaccagatctatctggcgcgctattaccaggccgatgcctgcttattaatgctttcagtactggatgacgaacaatatcgccagcttgcagccgtcgcgcacagtctggagatgggtgtgctgaccgaagtcagtaatgaagaggaactggagcgcgccattgcattgggggcaaaggtcgttggcatcaacaaccgcgatctgcgcgatttgtcgattgatctcaaccgtacccgcgagcttgcaccgaaactggggcacaacgtgacggtaatcagcgaatccggcatcaatacttacgctcaggtgcgcgagttaagccacttcactaacggctttctgattggttcggcgttgatggcccatgacgatttgaacgccgccgtgcgtcgggtgttgctgggtgagaataaagtatgtggcctgacgcgtgaacaagatgctaaagcagcttatgacgcgggcgcgatttacggtgggctgatttttgttgcgacatcaccgcgttgcgtcaacgttgaacaggcgcaggaagtgatggctgcggcaccgttgcagtatgttggcgtgttccgcaatcacgatattgccgatgtggtggacaaagctaaggtgttatcgctggcggcagtgcaactgcatggtaatgaagatcagctgtatatcgacactctgcgtgaggctctgccagcacacgtcgccatctggaaggctttaagtgtcggtgaaactcttcccgcgcgcgattttcagcacatcgataaatatgtattcgacaacggtcagggcgggagcggacaacgtttcgactggtcactattaaatggtcaatcgcttggcaacgttctgctggcggggggcttaggcgcagataactgcgtggaagcggcacaaaccggctgcgccgggcttgattttaattctgctgtagagtcgcaaccgggtatcaaagacgcacgtcttttggcctcggttttccagacgctgcgcgcatattaa

SEQ ID NO: 2893 - DNA, 1194 bp, Escherichia coli
atgacaacattacttaacccctattttggtgagtttggcggcatgtacgtgccacaaatcctgatgcctgctctgcgccagctggaagaagcttttgtcagcgcgcaaaaagatcctgaatttcaggctcagttcaacgacctgctgaaaaactatgccgggcgtccaaccgcgctgaccaaatgccagaacattacagccgggacgaacaccacgctgtatctgaagcgcgaagatttgctgcacggcggcgcgcataaaactaaccaggtgctcggtcaggctttactggcgaagcggatgggtaaaactgaaattattgccgaaaccggtgccggtcagcatggcgtggcgtcggcccttgccagcgccctgctcggcctgaaatgccgtatttatatgggtgccaaagacgttgaacgccagtcgcccaacgttttccggatgcgcttaatgggtgcggaagtgatcccggtacatagcggttccgcgaccctgaaagatgcctgtaatgaggcgctacgcgactggtccggcagttatgaaaccgcgcactatatgctgggtaccgcagctggcccgcatccttacccgaccattgtgcgtgagtttcagcggatgattggcgaagaaacgaaagcgcagattctggaaagagaaggtcgcctgccggatgccgttatcgcctgtgttggcggtggttcgaatgccatcggtatgtttgcagatttcatcaacgaaaccgacgtcggcctgattggtgtggagcctggcggccacggtatcgaaactggcgagcacggcgcaccgttaaaacatggtcgcgtgggcatctatttcggtatgaaagcgccgatgatgcaaaccgaagacgggcaaattgaagagtcttactccatttctgccgggctggatttcccgtccgtcggcccgcaacatgcgtatctcaacagcactggacgcgctgattacgtgtctattaccgacgatgaagccctggaagcctttaaaacgctttgcctgcatgaagggatcatcccggcgctggaatcctcccacgccctggcccatgcgctgaaaatgatgcgcgaaaatccggaaaaagagcagctactggtggttaacctttccggtcgcggcgataaagacatcttcaccgttcacgatattttgaaagcacgaggggaaatctga

SEQ ID NO: 2894 - DNA, 807 bp, Escherichia coli
atggaacgctacgaatctctgtttgcccagttgaaggagcgcaaagaaggcgcattcgttcctttcgtcaccctcggtgatccgggcattgagcagtcgttgaaaattatcgatacgctaattgaagccggtgctgacgcgctggagttaggcatccccttctccgacccactggcggatggcccgacgattcaaaacgccacactgcgtgcttttgcggcgggagtaaccccggcgcagtgctttgaggtgctggcactcattcgccagaagcacccgaccattcccatcggccttttgatgtatgccaacctggtgtttaacaaaggcattgatgagttttatgccgagtgcgagaaagtcggcgtcgattcggtgctggttgccgatgtgcccgtggaagagtccgcgcccttccgccaggccgcgttgcgtcataatgtcgcacctatctttatttgcccgccgaatgccgacgatgatttgctgcgccagatagcctcttacggtcgtggttacacctatttgctgtcgcgagcgggcgtgaccggcgcagaaaaccgcgccgcgttacccctcaatcatctggttgcgaagctgaaagagtacaacgctgcgcctccattgcagggatttggtatttccgccccggatcaggtaaaagccgcgattgatgcaggagctgcgggcgcgatttctggttcggccatcgttaaaatcatcgagcaacatattaatgagccagagaaaatgctggcggcactgaaagcttttgtacaaccgatgaaagcggcgacgcgcagttaa

SEQ ID NO: 2895 - DNA, 654 bp, Escherichia coli
atgaaaaagttaacagtggcggctttggcagtagcaactcttctctctggcagtgcctttgcgcatgaagccggcgaattttttatgcgtgcaggttctgcaaccgtacgtccaacagaaggtgctggtggtacgttaggaagtctgggtggattcagcgtgaccaataacactcaactgggcctgacgtttacttatatggcgaccgacaacattggtgtggaattactggcggcatcgccgtttcgtcataaagttggcacagccactaccggggatattgcaactgtccaccatttaccgccaacactgatggcacaatggtattttggcgattcaggcagtaaattccgtccttacattggtgcgggtattaactacaccaccttttttaataatgacttcaatgacaccggtgaaggtcttggtttatctgaccttagtctgaaggattcatggggcgtggcggggcaagtaggtctggattatctcatcaaccgtgactggttgctgaatatgtcggtctggtacatggatatcgataccgaagtgaaatataaatccaacggcgcagtgctgcctgcagggcgttattctgacaacgtacgccttgacccgtgggtatttatgttctctgcgggttaccgcttctaa

SEQ ID NO: 2896 - DNA, 744 bp, Escherichia coli
atgtctatcacggcgcagtccgtataccgtgacaccggaaattttttccgtaatcaatttatgaccattctgttggtatcgttgctatgtgcgtttatcacagtggtgttagggcatgttttctcacccagtgatgcacagcttgcgcagctcaatgacggcgtacccgttagcggcagtagtgggttgttcgacctggttcagaatatgtcaccggaacagcaacaaattttgctgcaggcttcagcggcgtccactttttcaggattaatcggtaacgccattctcgccgggggcgtaatattaattatccagctggtgtctgcgggtcagagagtcagtgcactgcgagctattggtgccagtgcgccgatattgccaaagttatttattctgatttttctgactacccttttagtacagattggcatcatgctggtggtcgttccgggaattatcatggccattttactggctctggcaccggtgatgctggtacaggacaaaatgggcgtttttgcctcgatgcgtagcagtatgcggctgacatgggcgaatatacgtctggtggcacccgcagtactgagctggttgctggcaaaaacactgttgctgctttttgcctcttcttttgccgcattaaccccggaaattggtgccgtactggcgaacaccttgagcaacctgatttcagccgtattgctcatctatctgttccgcctgtatatgttgattcgccaataa

SEQ ID NO: 2897 - DNA, 540 bp, Escherichia coli
atgaagcagtttcttgattttttaccgctggttgtctttttcgcgttttacaagatttatgacatctatgcggctactgcggcgctcatcgtcgccacggcgattgtgcttatatatagctgggttcgctttcgtaaggttgagaagatggccctgatcacttttgttctggtggtcgtcttcggtggcttaacgctgttcttccacaatgatgagtttattaaatggaaggttactgtcatttatgccctgtttgcgggtgccctgttagtcagccaatgggtgatgaaaaagccgctaattcagcggatgctgggtaaagaactcaccctgccgcaatcggtatggtcgaagctgaatctggcctgggctgttttctttatcctttgcggtctggcaaacatctacatcgcattctggctgccgcaaaatatttgggtcaactttaaagtctttggcctgaccgcccttaccttaatcttcacattgttaagcggtatctatatctaccgccacatgccgcaggaagataaatcctaa

SEQ ID NO: 2898 - DNA, 399 bp, Escherichia coli
atgtctacaacacataacgtccctcagggcgatcttgttttacgtactttagccatgcccgccgataccaatgccaatggtgacatctttggtggttggttaatgtcacaaatggatattggcggcgctattctggcgaaagaaattgcccacggtcgtgtagtgaccgtgcgggttgaaggaatgactttcttacggccggttgcggtcggggatgtggtgtgctgctatgcacgctgtgtccagaaagggacgacatcagtcagcattaatattgaagtgtgggtgaaaaaagtggcgtctgaaccaatcgggcaacgctataaagcaacagaagcattatttaagtatgtcgcggttgatcccgaaggaaaacctcgcgccttacccgttgagtaa

SEQ ID NO: 2899 - DNA, 717 bp, Escherichia coli
atgacccttgatttacctcgccgcttcccatggccgacgttactttcggtctgcattcatggtgctgttgtggcgggtctgctctatacctcggtacatcaggttattgaactacctgcgcctgcgcagccgatttctgtcacgatggttgcgcctgctgatcttgaaccgccacaagccgttcagccaccaccggagccggtggtagagccagaaccggaacctgagccgatccctgaaccgccaaaagaagctccggtggtcattgaaaagccgaagccgaaacctaagccaaaaccgaagccggtgaaaaaggtggagcagccaaaacgcgatgtcaaacccgtagagtcgcgtccggcatcaccgtttgaaaatacgacacccgcgcgcccgacatcaagtacggcaacggctgcaaccagcaagccggttaccagtgtggcttcaggaccacgcgcattaagccgtaatcagccgcagtatccggcacgagcacaggcattgcgcattgaagggcaggttaaagttaaatttgatgtcacgccagatggtcgcgtggataacgtacaaatcctctcagccaagcctgcaaacatgtttgagcgtgaggtgaaaaatgcgatgcgcagatggcgttatgagccgggtaagccaggcagtgggattgtggtgaatatcctgtttaaaattaacggcactaccgaaattcagtaa

SEQ ID NO: 2900 - DNA, 297 bp, Escherichia coli
gtgttgtatgttatttacgctcaagacaaagctgatagcctcgaaaaacgcctttccgttcgtccggcacatttagcacgtttacagttactgcatgatgaaggtcgtttgttgaccgccggtccaatgccagcggtagacagtaacgatccaggggctgcgggatttactggctcaaccgttattgctgaatttgagtcgctggaagcagctcaggcctgggccgatgctgacccgtacgtagcggcaggagtctatgaacacgtttcagtgaaaccatttaagaaagtgttctga

SEQ ID NO: 2901 - DNA, 1254 bp, Escherichia coli
gtgagtcactggactacattcaaacaaacagcaacaaagttatgggtgaccctacggcacgacattctcgcgctggccgtctttttaaatggattgcttatttttaaaacaatctatggtatgtcggtcaatttgcttgatattttccatatcaaagcattttcagagctggatctctccttgctggcaaacgccccactatttatgctcggcgtatttcttgtcctgaactccattggcttactgttccgggcaaagctcgcatgggcaatcagtatcattttgttgttgatagcgctaatttacactctgcatttttatccctggctgaaatttagtattggattttgcatttttacgctggtgtttttgctgatactgcgcaaagacttctcccacagtagcgcagcagccgggacaattttcgcatttattagtttcacgacgttactgttttactccacttacggtgcgctttatttaagcgaaggttttaatccgcgaatagaaagtttgatgaccgcgttctatttttcgatagaaaccatgtcaaccgtcggctatggcgatattgtccctgtttctgaatcagcacgattgttcactatttcggtcattatttccggcattaccgtttttgccacatctatgacctcaatttttggtccgcttatccgcgggggattcaacaaacttgtaaaaggaaacaatcatacaatgcatcgtaaagatcattttattgtttgcggacattcgattctcgccatcaatacgattctgcaactgaatcaacgcggacaaaacgtaacggttatcagcaacttgcctgaagatgatatcaagcaacttgagcaacgcttaggcgataacgccgatgttatccccggtgacagtaatgacagttcagtgttaaagaaagcgggaatcgatcgttgccgggccattctggcgctgagtgataacgatgcagataacgcgtttgttgtactctcggcaaaagatatgagcagtgatgtcaaaacagttctcgccgtcagtgatagcaaaaacctgaataagattaagatggtacatccggatatcattctctcaccacaactgtttggcagcgaaattctggcgcgagttttaaatggtgaagagattaataatgatatgctcgtttcaatgttgttgaactccggtcatggcattttcagcgataacgatgaacaagaaacgaaagctgacagtaaagaatcggcgcaaaaatag

SEQ ID NO: 2902 - DNA, 1461 bp, Escherichia coli
atgacaaccgtttatacgttggtgagttggttggccattctgggatactggttgctcattgcaggcgtaactttacgcattctaatgaaacgacgcgcagttccctccgcgatggcctggctgttgattatttacattctgccgttagtcggaattattgcctatcttgccgttggcgagctccatttaggcaaacgccgcgctgaacgcgccagagcgatgtggccttccaccgcaaaatggcttaacgaccttaaagcctgtaagcatatcttcgccgaagaaaatagcagtgtcgctgcgccattattcaagctttgcgagcgtcgtcaggggatcgctggggtcaaagggaatcagctacaactgatgaccgagtcagatgatgtgatgcaggcgttaatccgcgacatccagctcgcgcgccataatattgagatggtgttttatatctggcagcccggcggcatggcggaccaggtggctgaatcattaatggccgctgcacggcgtggtattcattgccgattgatgctcgactccgccgggagtgtggcttttttccgcagcccgtggcccgagctaatgcgtaatgctggtattgaagttgtcgaagccttaaaggtcaatctgatgcgtgtgtttttacgccgtatggacctgcgccaacatcgcaagatgatcatgattgataattacatcgcgtacaccggcagcatgaatatggtcgaccctcgctacttcaaacaagatgcgggcgtagggcaatggattgatctgatggcgcgtatggaaggccccatcgccaccgcgatggggattatttattcctgcgactgggagattgaaaccgggaaacgtattctgccgccgccaccagatgtcaatattatgccgtttgagcaggccagcggtcacactattcacacaattgcttctggccccggctttccggaagatctcattcaccaggcattattgactgctgcttattcggctcgtgaatatttgatcatgacaacgccctattttgtgccaagcgatgatttacttcatgcgatttgcacggcggcgcagcgcggggtggatgtcagtattatccttccgcgaaaaaatgactcgatgctggtcggctgggccagtcgcgcattctttacagaactgctggctgctggggttaaaatttatcagtttgaaggcgggttactgcataccaagagcgtgctggtcgatggtgaactaagtctggttggcaccgttaaccttgatatgcgtagtctgtggctaaatttcgagattaccctggcaatcgacgataaaggttttggtgcagacctcgccgccgttcaggacgattatatttcgcgttctcgtctgctcgatgcccgtttatggctaaaacgtccattatggcaacgtgtcgccgagcgactgttttacttcttcagcccgttgctgtaa

SEQ ID NO: 2903 - DNA, 330 bp, Escherichia coli
atggatatggatctaaacaatcgcctgactgaagatgaaacgcttgagcaggcctacgatatttttctcgaactggctgccgacaatctcgatccagctgatgttctgctgttcaatcttcagtttgaagagcgcggcggcgcggagttattcgatccggcggaagactggcaggaacatgttgatttcgatttgaacccggacttttttgccgaagtggtgattggtctggcggacagtgaagatggtgaaatcaacgatgttttcgcgcgcattctgttatgccgcgaaaaagatcacaaactttgccatatcatctggcgggaataa

SEQ ID NO: 2904 - DNA, 1005 bp, Escherichia coli
atgaatgctgtaaccgaaggaagaaaagtcctcctcgaaatcgccgatctgaaagtgcactttgaaatcaaagatggcaaacagtggttctggcaaccgccgaaaacgctcaaagccgtcgatggtgtaactcttcgcctgtatgaaggggaaacattaggtgtggtaggggaatcgggatgcggtaagtccacctttgctcgcgccatcattggcctggttaaagcgaccgacggtcatgttgcctggttaggtaaagagttgctgggcatgaagcccgatgaatggcgtgccgtacgcagtgatattcagatgattttccaggatccgttggcatcgctgaacccgcgtatgaccatcggcgagatcatcgctgaaccactgcgtacttatcatccgaaaatgtcacgccaggaagttcgcgagcgcgtgaaggcgatgatgctgaaagtcggtttgttgcctaacctgattaaccgctatccgcatgagttctccggtgggcagtgccagcgtatcgggattgctcgtgctcttattcttgaaccgaagctgattatctgtgatgagccggtgtcggcgctggacgtgtcaattcaggcgcaggtggtcaacctgctccagcagttgcaacgtgagatgggattgtcattaatttttatcgctcacgacctggccgtggtaaaacacatttccgatcgtgtgctggtgatgtatctcggccatgcggtagaactggggacctatgatgaggtctaccacaatccgctacatccttacaccagggcattgatgtcggcagtccccatacctgatccggatctggagaagaacaaaaccatccagttactggaaggggaattaccgtcgccgatcaacccgccttccggttgtgttttccgtacccgttgtccgattgccggtcctgagtgcgccaaaacacgtcctgtgctggaagggagtttcagacacgccgtttcttgcctgaaagtcgatccgctttaa

SEQ ID NO: 2905 - DNA, 1014 bp, Escherichia coli
atgagcgtaattgaaactgcaactgtgccgctcgcacaacaacaggctgacgcactgctgaacgtgaaagatttgcgtgtcacctttagtaccccggatggcgacgtcacggcggtcaatgatttgaatttttcgctacgtgccggagaaacgctgggcatcgtaggtgagtctggttcgggcaaatcgcaaaccgcatttgcgttgatgggcctgttggctgccaacggacgtattggcggatcggcaaccttcaatgggcgtgaaatcctcaatttgccagagcgtgaactcaataaactgcgagctgaacaaatctcaatgatttttcaggacccaatgacttcgttgaatccctatatgcgcgtcggtgagcagttgatggaagtgctgatgctgcataagaacatgagcaaagctgaggcgtttgaagaatcggtgcggatgctcgatgcggtaaaaatgccggaagcgcgtaaacgcatgaaaatgtacccgcacgaattttctggcggcatgcgtcagcgagttatgattgcgatggcattgctatgtcgacctaagctgctgattgcggatgaacccactactgcgctggacgtcaccgtacaggcgcagatcatgacgctattgaatgaactgaagcgggaatttaataccgccatcattatgattacccacgatcttggcgtggtggcggggatctgcgacaaagtgctggtaatgtacgccgggcgcacgatggaatatggcaacgcgcgcgatgtcttttatcaacccgtacatccttattctatcggtttgctcaacgcggtgccgcgtctcgatgcggaaggtgaaacaatgttgactattccgggtaatccgccaaacctgctgcgattaccgaaaggttgcccgttccagccacgttgtccgcatgcgatggaaatttgtagtagcgcaccgccgctggaagagtttacgcctggccgtctgcgtgcttgctttaaaccggtggaggaactgttatga

SEQ ID NO: 2906 - DNA, 909 bp, Escherichia coli
atgatgttaagtaagaaaaacagcgagacgctggaaaatttcagtgaaaagctggaggtcgaagggcgcagcttgtggcaggacgcacgtcgacgttttatgcataaccgtgcggcggttgccagtctgatagtgctggtgctgatcgcgttatttgtaatcctggcaccgatgctttcgcagtttgcctatgacgatactgactgggcgatgatgtccagcgccccggatatggagtccggtcactactttggtactgactcatccggtcgcgacctgcttgtgcgcgttgcgattggcgggcgtatctcactcatggtcggtgttgctgcggcactggtggcagtggtcgtggggacactttatggttcgctttccggttatctgggcggtaaagtggattcggtaatgatgcgtctgctggaaatcctcaactccttcccattcatgttcttcgtcattttgctggtgacctttttcggtcaaaacatcctgctgattttcgtggcgattggcatggtttcctggctggatatggctcgtattgtgcgtgggcaaaccctgagtctgaagcgcaaagagtttattgaggcggcacaagttggcggtgtatcgacgccgggcattgttattcgccacattgtgccgaacgtactcggtgtggtggtggtctatgcgtcgcttctggtgcccagcatgatcctctttgaatctttccttagcttcctgggattaggtacgcaagagccgttaagcagctggggtgcattgctgagtgatggcgcgaactcgatggaagtttctccatggttactgttgttcccagcgggattcctcgtagtaacgctgttttgtttcaactttatcggcgatggcttgcgtgatgccctcgacccgaaagatcgttaa

SEQ ID NO: 2907 - DNA, 921 bp, Escherichia coli
atgttaaaatttattctacgtcgctgtctggaagcgattccgacgctatttattcttattactatttcgttctttatgatgcgcctcgcaccgggcagtccttttaccggcgaacgtactttaccaccggaagtgatggccaatatcgaagcgaaatatcatcttaatgatccgatcatgacacagtatttcagctacctgaaacaactggcgcatggcgatttcggtccatcgtttaaatataaagattattcggtcaacgacctggttgcatccagttttcccgtttctgccaaactgggagccgcagcatttttccttgcggtaatactgggtgttagtgctggcgttattgccgcattaaaacaaaacaccaaatgggactataccgtgatggggctggcaatgaccggggttgttatccccagttttgtggttgcgccattattagtcatgatatttgcgatcattttgcattggctgccgggcggtggctggaatggtggagcgcttaaattcatgatattgccaatggtggcgttatcactcgcctatatcgccagtattgcgcgtattacccgtggttctatgattgaggttttacactccaactttattcgtactgcccgggcgaaagggttacctatgcggcggatcattttacgccacgcattaaaacctgctctgttacccgtgctctcctatatggggcccgcatttgtcggcattattaccggttcgatggtcatcgaaaccatttatggtttaccggggattgggcaattgttcgttaatggcgcattgaaccgtgactattccttagtgttaagtctgaccattctggttggcgcgttaaccattttgtttaatgccattgtcgatgtgctatatgcggttatcgacccgaaaatccgttactga

SEQ ID NO: 2908 - DNA, 1677 bp, Escherichia coli
atgctggttaataccagtaattataatgagggagtccaaaaaacaatgaccaacatcaccaagagaagtttagtagcagctggcgttctggctgcgcttatggcagggaatgtcgcgctggcagctgatgtacccgcaggcgtcacactggcggaaaaacaaacgctggtacgtaacaatggttcagaagttcagtcattagatccgcacaaaattgaaggtgttccggagtctaatatcagccgagacctgtttgaaggcttactggtcagcgatcttgacggccatccggcacctggcgtcgctgaatcctgggataataaagacgcgaaagtctggaccttccatttgcgtaaagatgcgaaatggtctgatggcacgccagtcacagcccaagactttgtgtatagctggcaacgttctgttgatccgaacaccgcttctccgtatgccagttatctgcaatatgggcatatcgccggtattgatgaaattcttgaagggaaaaaaccgattaccgatctcggcgtgaaagctattgatgatcacacattagaagtcaccttaagtgaacctgttccgtacttctataaattacttgttcacccatcaacttcaccggtgccaaaagccgctatcgagaaattcggcgaaaaatggacccagcctggtaatatcgtcaccaacggtgcctataccttaaaagattgggtcgtaaacgaacgaatcgttcttgaacgcagcccgacctactggaacaacgcgaaaaccgttattaaccaggtaacctatttgcctattgcttctgaagttaccgatgtcaatcgctaccgtagtggtgaaatcgacatgacttataacaacatgccgatcgaattgttccagaagctgaaaaaagagatcccggacgaagttcacgttgatccatacctgtgcacttattattacgaaattaacaaccagaaaccgccattcaacgatgtacgtgtgcgtaccgcactgaaactgggtatggaccgcgatatcattgttaataaagtgaaagcgcagggcgacatgccagcctatggttacactccaccgtatactgatggcgcaaaattgactcagccggaatggtttggctggagccaggaaaaacgtaacgaagaagcgaaaaaactgctggctgaagcgggttataccgcagacaaaccgttgaccatcaacctgttgtataacacctccgatctgcataaaaagctggcgattgctgcctcttcattgtggaagaaaaacattggtgtaaacgtcaaactggttaaccaggagtggaaaacgttcctcgacacccgtcaccagggcacttttgatgtggcccgtgcaggctggtgtgcagactacaacgaaccaacttccttcctgaacaccatgctgtcgaacagctcgatgaataccgcgcattataagagcccggcctttgacagcattatggcggaaacgctgaaagcgactgacgaggcgcagcgcacagctctgtacactaaagcagaacaacagctggataaggattcggccattgttcctgtttattactacgtgaatgcgcgtctggtgaaaccgtgggttggtggctataccggcaaagatccgctggataatacctacacccggaatatgtacattgtgaagcactaa

SEQ ID NO: 2909 - DNA, 297 bp, Escherichia coli
atgcggttcttactcgccaatacattttgcaaaattgttaagcaattctcttttattgaccgtatcagaatctatagcttgcatccatgtcttaacaaacatcttttaattcaattaaatagagattggttaagcatgtctctcttttctgattacagttccagtagtgaaatgcacaataatttaacaattgattattatttagcactttcctctaccaaaggcagtggaattactaatatcatttcaattattcttcagcaagcccaggattatgatgtggcgaaaataacatga

SEQ ID NO: 2910 - DNA, 156 bp, Escherichia coli
atgctccgtttacttcgtcattatttttactttgttcccgcgcagttatcaaaagcaaaaggaatgggtgaaaatattcttctcaaattacagttggttataaggatttccttaactgcttctcctcaccatcatgttattttcgccacatcataa

SEQ ID NO: 2911 - DNA, 648 bp, Escherichia coli
gtgattcagaccctttttgattttcccgtttacttcaaatttttcatcgggttatttgcgctggtcaacccggtagggattattcccgtctttatcagcatgaccagttatcagacagcggcagcgcgaaacaaaactaaccttacagccaacctgtctgtggccattatcttgtggatctcgctttttctcggcgacacgattctgcaactttttggtatatcaattgattcgttccgtatcgccgggggcatcctggtggtgacgatagcgatgtcgatgatcagcggcaagcttggcgaggataaacagaacaagcaagaaaaatcagaaaccgcggtacgtgaaagcattggtgtggtgccactggcgttgccgttgatggcggggccaggggcgatcagttctaccatcgtctggggtacgcgttatcacagcattagctatctgtttggtttctttgtggctattgcattgttcgctttatgttgctggggattgttccgcatggcaccgtggctggtacgggttttacgccaaaccggcatcaacgtgatcacgcgtattatggggctattgctgatggcattggggattgaatttatcgttactggtattaaggggattttccccggcctgcttaattaa

SEQ ID NO: 2912 - DNA, 2676 bp, Escherichia coli
atggctgttactaatgtcgctgaacttaacgcactcgtagagcgtgtaaaaaaagcccagcgtgaatatgccagtttcactcaagagcaagtagacaaaatcttccgcgccgccgctctggctgctgcagatgctcgaatcccactcgcgaaaatggccgttgccgaatccggcatgggtatcgtcgaagataaagtgatcaaaaaccactttgcttctgaatatatctacaacgcttataaagatgaaaaaacctgtggtgttctgtctgaagacgacacttttggtaccatcactatcgctgaacccatcggtattatttgcggtatcgttccgaccactaacccgacttcaactgctatcttcaaatcgctgatcagcctgaagacccgtaacgccattatcttctccccgcacccgcgtgcaaaagatgccaccaacaaagcggctgatatcgttctacaggctgctatcgctgccggtgctccgaaagatctgatcggctggatcgatcaaccttctgttgagctgtctaacgcactgatgcaccacccagacatcaacctgatcctcgcgactggtggtccgggcatggttaaagccgcatacagctccggtaaaccagctatcggcgtaggcgcgggcaacactccggttgttatcgatgaaactgctgatatcaaacgtgcagttgcatctgtactgatgtccaaaaccttcgacaacggtgtaatctgtgcttctgaacagtctgttgttgttgttgactctgtttatgacgcagtacgtgaacgtttcgcaacccacggcggctatctgttgcagggtaaagagctgaaagctgttcaggacgttatcctgaaaaacggtgcgctgaacgcggctatcgttggtcagccagcctataaaattgctgaactggcaggcttctctgtaccagaaaacaccaagattctgatcggtgaagtgaccgttgttgatgaaagcgaaccgttcgcacatgaaaaactgtccccgactctggcaatgtaccgtgctaaagatttcgaagacgcggtagaaaaagcagagaaactggttgctatgggcggtatcggtcatacctcttgcctgtacactgaccaggataaccaaccggctcgcgtttcttacttcggtcagaaaatgaaaacggctcgtatcctgattaacaccccggcttctcagggtggtatcggtgacctgtataacttcaaactcgcaccttccctgactctgggttgtggttcctggggtggtaactccatctctgaaaacgttggtccgaaacacctgatcaacaagaaaaccgttgctaagcgagctgaaaacatgttgtggcacaaacttccgaaatctatctacttccgccgtggctccctgccaatcgcgctggatgaagtgattactgatggccacaaacgtgcgctcatcgtgactgaccgcttcctgttcaacaatggttatgctgatcagatcacttccgtattgaaagcagcaggcgttgaaactgaagtcttcttcgaagtagaagctgacccgaccctgagcatcgttcgtaaaggtgcagaactggcaaactccttcaaaccagacgtgattatcgcgctgggtggtggttccccgatggacgctgcgaagatcatgtgggttatgtacgaacatccggaaactcacttcgaagaactggcgctgcgctttatggatatccgtaaacgtatctacaagttcccgaaaatgggtgtgaaagcgaaaatgatcgctgtcaccaccacttctggtacaggttctgaagtcactccgtttgcggttgtaactgacgacactactggtcagaaatatccgctggcagactatgcactgaccccggatatggcgattgtcgacgccaaccttgttatggacatgccgaagtccctgtgtgctttcggtggtctggacgcagtaactcacgccatggaagcttatgtttctgtactggcatctgagttctctgatggtcaggctctgcaggcactgaaactgctgaaagaatatctgccagcgtcctaccacgaagggtctaaaaatccggtagcgcgtgaacgtgttcacagtgcagcgactatcgcgggtatcgcgtttgcgaacgccttcctgggtgtatgtcactcaatggcgcacaaactgggttcccagttccatattccgcacggtctggcaaacgccctgctgatttgtaacgttattcgctacaacgcgaatgacaacccgaccaagcagactgcattcagccagtatgaccgtccgcaggctcgccgtcgttatgctgaaattgctgaccacctgggtctgagcgcaccgggcgaccgtactgcagctaagatcgagaaactgctggcatggctggaaacgctgaaagctgaactgggtattccgaaatctatccgtgaagctggcgttcaggaagcagacttcctggcgaacgtggataaactgtctgaagatgcattcgatgaccagtgcaccggcgctaacccgcgttacccgctgatctccgagctgaaacagattctgctggatacctactacggtcgtgattatgtagaaggcgaaactacagcgaagaaagaagctgctccggctaaagctgagaaaaaagcgaaaaaatccgcttaa

SEQ ID NO: 2913 - DNA, 1206 bp, Escherichia coli
atgctcattggacaggcccttgatttggtatcccgttacgattctctgcgtaacccactgacttctctgggggattacctcgcccccgaactcatctctcgttgccttgccgaatcaggtactgtaacgctacacaagcgccgtcttcccctcgaaatgatggtctggtgtattgttggcatggcgcttgagcgtaaagaacctcttcaccagattgcgaatcgcctggacatcatgctgccgggcaatcgccccttcgttgcccccagtgccgttattcagacccgccagcgtctgggaattgaggctgtccgccgcgtgttcacgaaaacagcgcagctctggcataacgccacgccgcatccgcactggtgcggcctgaccctgctggccatcgatggtgtgttctggcgcacaccggatacaccagagaacgatgcagccttcccccgccagacacatgccgggaactcggcgctctacccgcaggtcaaaatggtctgccagatggaactgaccagccatctgctgacgactgcagccttcggcacgatgaagaacagcgaaaatgagcttgctgagcaacttatagaacaaaccggcgataacactctgacgttaatggataaaggttattactcaccaggactgttaaatacctggagcctggcgggagaacaccgccactggatgatccctctcagaaagggagcgcaatatgaagagatcagaaaactgggtaaaggcgatcatctggtgaagctgaaaaccagcccgcaggcacgaaaaaagtggccgggactgggaaatgaggtgacagcccgcctgctgaccgtgacgcgcaaaggaaaagtctgccatctgctgacgtcgatgacggacgccatacgcttccccgggacgtataccggagctgatgcgcgatcttgcaagtatgggacaaccagtgaaattaccgacaagaagggaaagggccttcccgagagtggtaaaggagaggccctggaaataccccacagccccgaaaaagagccagtcagttgcttaactgactggcattaccccttctggggccgttttttgttttcccaaaacaacttttccataaaccggcagcattgtccttcatcatatttgcgacgatgtataacgcctacacacagcgatattgtactttacaggttacaagtcaatgtcggtgtataa

SEQ ID NO: 2914 - DNA, 618 bp, Escherichia coli
atggcacagctatatttctactattccgcaatgaatgcgggtaagtctacagcattgttgcaatcttcatacaattaccaggaacgcggcatgcgcactgtcgtatatacggcagaaattgatgatcgttttggtgccgggaaagtcagttcgcgtataggtttgtcatcgcctgcaaaattatttaaccaaaattcatcattatttgatgagattcgtgcggaacatgaacagcaggcaattcattgcgtactggttgatgaatgccagtttttaaccagacaacaagtatatgaattatcggaggttgtcgatcaactcgatatacctgtactttgttatggtttacgtaccgattttcgaggtgaattatttattggcagtcaatacttactggcgtggtccgacaaactggttgaattaaaaaccatctgtttttgtggccgtaaagcaagcatggtgctgcgtcttgatcaagcaggcagaccttataacgaaggtgagcaggtggttattggtggtaatgaacgctacgtttctgtatgccgtaaacactataaagaagcgttagaagtcggctcattaacggctattcaggaaaggcatcgccacgattaa

SEQ ID NO: 2915 - DNA, 414 bp, Escherichia coli
atgagcgaagcacttaaaattctgaacaacatccgtactcttcgtgcgcaggcaagagaatgtacacttgaaacgctggaagaaatgctggaaaaattagaagttgttgttaacgaacgtcgcgaagaagaaagcgcggctgctgctgaagttgaagagcgcactcgtaaactgcagcaatatcgcgaaatgctgatcgctgacggtattgacccgaacgaactgctgaatagccttgctgccgttaaatctggcaccaaagctaagcgtgctcagcgtccggcaaaatatagctacgttgacgaaaacggcgaaactaaaacctggactggccagggccgtactccagctgtaatcaaaaaagcaatggatgagcaaggtaaatccctcgacgatttcctgatcaagcaataa

SEQ ID NO: 2916 - DNA, 909 bp, Escherichia coli
atggctgccattaatacgaaagtcaaaaaagccgttatccccgtagcgggattaggaaccaggatgttgccggcgacgaaagccatcccgaaagagatgctgccacttgtcgataagccattaattcaatacgtcgtgaatgaatgtattgcggctggcattactgaaattgtgctggttactcactcatctaaaaactctattgaaaaccactttgataccagttttgaactggaagcaatgctggaaaaacgtgtaaaacgtcaactgcttgatgaagtgcagtctatttgtccgccgcacgtgactattatgcaagttcgtcaggggctggcgaaaggcctgggacacgcggtattgtgtgctcacccggtagtgggtgatgaaccggtagctgttattttgcctgacgttattctggatgaatatgaatccgatttatcacaggataacctggcagagatgatccgccgctttgatgaaacgggtcatagccagatcatggttgaaccggttgctgatgtgaccgcatatggcgttgtggattgcaaaggcgttgaattagcgccgggtgaaagcgtaccgatggttggcgtggttgaaaaaccaaaagcggatgttgcgccgtctaatctcgctattgtgggtcgttacgtacttagcgcggatatttggccgttgctggcaaaaacccctcctggagctggtgatgaaattcagctcaccgacgcaattgatatgctgatcgaaaaagaaacggttgaagcctatcatatgaaagggaagagccatgactgcggtaataaattaggttacatgcaggccttcgttgaatacggtattcgtcataacacccttggcacggaatttaaagcctggcttgaagaagagatgggcattaagaagtaa

SEQ ID NO: 2917 - DNA, 1014 bp, Escherichia coli
atgacgcagccattggtcggaaaacagattctcattgttgaagatgagcaggtatttcgctcgcttctggattcgtggttttcctcattgggagcgacaacggtactggcggctgatggggttgatgcccttgagttgctgggaggtttcactccagacctgatgatatgtgatatcgcgatgccacgaatgaacgggcttaaactgctggaacatatacgcaacagaggtgaccagacaccggttctggtgatatctgccactgaaaatatggcagatattgccaaagcgttacgtctgggcgttgaagatgttttgctgaaaccagttaaagatctgaatcgcttgcgcgagatggtttttgcctgtctctatcccagcatgtttaattcccgcgttgaggaagaggaaaggctttttcgcgactgggatgcaatggttgataaccctgctgcagcggcgaaattattacaggaactacaaccgccggttcagcaggtgatttcccaatgccgggttaattatcgtcaattagttgccgcggacaaacccggcctggtgcttgatattgccgcactttcggaaaacgatctggcattttattgccttgatgtcacccgagctggacataatggcgtacttgctgccttgttattacgcgcattgtttaacggattattacaggaacagcttgcacaccaaaatcaacggttgccagagttgggcgcgttattgaagcaggtaaaccatttactccgtcaggccaatctgccggggcagtttccgctattagttggctattatcatcgcgaactgaaaaatctcattctggtttctgcgggtctgaatgcgacgttaaataccggcgaacatcaggtgcaaatcagtaatggtgttccgttaggcactttaggtaacgcttatttgaatcaattgagccagcgatgcgatgcctggcaatgccaaatatggggaaccggtggtcggctgcgcttgatgttgtctgcagaatga

SEQ ID NO: 2918 - DNA, 945 bp, Escherichia coli
gtggctacgattgcattccaggggaatcttgcgggaataatgagaaagataaaaatagggctggcgctgggatctggcgcggcaagaggttggtcgcatattggcgtaattaatgcgctaaaaaaagtgggtattgaaattgatatcgttgcaggatgttcaattggttcgctggtgggcgctgcctatgcatgcgatcgattatctgcgctggaagattgggtgacctctttcagttattgggatgttttacgcctgatggatctctcctggcagcgcggtgggttactgcgcggcgagcgtgtcttcaatcaatatcgcgaaataatgccggaaacagagatcgaaaattgttcccgtcgcttcgcggctgttgccaccaatttaagtactgggcgtgaattatggtttactgaaggcgatctccatcttgctattcgtgcatcatgcagtattccaggactaatggcacccgttgcgcataacggctactggctggttgatggcgctgtagttaacccaattcctatttccctcacgcgtgcattgggggctgatattgtgatagcggtcgacctgcagcacgatgctcatttgatgcaacaagatttgctctcctttaatgtcagtgaagaaaatagcgagaatggtgattctctgccgtggcatgcgcgtctgaaagaaaggttaggcagcataacgacacgtcgggcggtgacagcgccaacggcaacagagattatgaccacttctatccaggtgctggagaaccgccttaaaaggaaccgcatggcaggtgatccgcccgatattctgattcaacctgtttgcccgcaaatatctacgcttgatttccatcgcgcgcacgctgccattgcggccgggcagctggcagtggaaaagaaaatggacgaacttttgccgttggtacgcaccaacatttga

SEQ ID NO: 2919 - DNA, 459 bp, Escherichia coli
gtgtctcagctttgtccctgtggtagtgctgtcgagtatagcctatgttgccacccttatgtgtctggtgaaaaggttgcacctgatccagaacatctcatgcgttcgcgttactgcgcttttgtgatgcaagacgcagattatttaataaagacctggcatccatcttgtggagcaacggcgttacgtgccgaattgattgccggatttgcgcatactgaatggttgggattgaccgtatttgaacattgctggcaggacggcggcaatatcggatttgtcagttttgttgctcgatttaccgagggtggcaaaacaggtgcaataattgaacgttcgcgatttttgaaagaaaacggtcaatggtactatattgacggtacacgtccgcagtttggccgcaacgatccctgcccttgtggttcaggtaaaaaatttaaaaagtgctgcggccaataa

SEQ ID NO: 2920 - DNA, 843 bp, Escherichia coli
atgcattcactccaacgtaaagttctgcgtactatttgtccggaccaaaaaggtctgatcgcacgtattaccaatatttgctacaagcacgagttaaatatcgtgcagaacaatgaatttgtagatcatcgtaccgggcgcttttttatgcgcacggaactggaagggatttttaatgattccaccctgctggcggatctcgatagcgcattgccagaaggctccgtgcgtgagctgaatcctgccggtcgtcgccggatagtaattctggtcactaaagaagcgcattgccttggcgatttgttgatgaaagccaattacggtggcctggatgtcgaaatcgcggcagttattggtaaccacgatactttacgttctctggttgagcggtttgatattccgtttgagctggtaagccatgaagggttaagccgcaacgagcacgatcaaaagatggcggatgccattgatgcttatcaacctgactatgtggtgctggcgaagtatatgcgggtattaacgccggaatttgtggcacgcttcccgaataagatcatcaatattcaccattcattcctgccagcgtttatcggcgcacgtccttatcaccaggcctatgagcgtggagtgaagattattggcgcaaccgctcactatgtgaatgacaatctggacgaaggcccaatcatcatgcaggacgttattcatgtcgatcatacctacacagctgaagatatgatgcgcgcaggtcgtgacgtcgagaaaaacgtcttaagtcgtgcgctatacaaagtactggcgcagcgcgtctttgtttacggtaatcggacgattattctttaa

SEQ ID NO: 2921 - DNA, 1200 bp, Escherichia coli
atgcctgctcgccaagtatgtcagaattttttccgcggtgctttagcaccatttcacaaataccgacaaaatgctttgttggatgccactatcgcactaatcaatggcgcatctctgacgctgaccagcatcggacgttatttacccggtaatgctcaggtcaaaaataaaataaaacgtgttgatcgtctgctcggtaatgagtctcttcatcacgacatccccctgattttcagaaacattatttccatgctgacgagcaagctgtcactgtgtgtcatcgccgttgactggagtggatacccctctcaggagtatcacgtactccgcgccagcctgatttgcgatggacattcgattccattgctgagttggatagttccttcggaaaaacagcaaaatgcaaagatacagcaagcctttcttaatactctttccgaagcggtaaacccaaaagcaagggtaatcatcgtcacggatgcagggttccagaatgcctggtttcggcacataaaatcactcggctgggattttattggccggatacgaggcaataaacaactgcatctggcgagaaaaggggaatgctggttcaggcgtcaggaattacaggccggtaacaaacctgaatatctggggccggggacgctttcccgggcggaatacgcccgttgcgatggtcatttttatttgcacaaaaaagagccgaaaggccggagaaataaacgttcgcgttgcggtatagccagaccatcacagataaaagatgccaggtcggcggcaaaagaaccatggttaatattcagcagcacagatgactttaaaccgcgagaaatcatgaagttatacagccgccgaatgcagattgagcaaaactccagggatgaaaaaagtgagcgttttgggttcggtctgcgagccagttacagctgttcggcaggaagaatgctggtactgagcctgctggcaacactgagcacaatagtgctgtggcttattggctatcacgctgaaaatcaagggttacatcttagatatcaggccaacagcattaaaacgcggcgggtaatctcgtatctgaggttagcggagaatgtcttacgacactccccgctaattttaaaacgaacggtgctaagcaccattcttaatcacctcaccagaacctaccagaatatggtgttggtttattatcgctga

SEQ ID NO: 2922 - DNA, 678 bp, Escherichia coli
atgcaattcctgaatatgttcttctttgatatctacccgtacatagccggggcggtcttcctgattggtagctggctgcgttatgactacgggcagtacacatggcgtgcggcgtccagccagatgctggatcgcaaagggatgaatctggcgtcgaacctgttccatatcggtattctggggatttttgtcggtcacttcttcggtatgctgacgccgcactggatgtatgaagcctggctgccgattgaagtgaaacagaaaatggcgatgtttgctggtggtgccagcggcgtactgtgtctgattggcggcgtgctgttgttgaaacgtcgtctgttcagcccacgcgtgcgtgcaacgactaccggagcggatatcttgatcctgtcgctgctcgttatccagtgcgcgctgggcctgctgaccattccgttctccgcccagcatatggacggtagcgagatgatgaaactggttggctgggcgcagtctgtagtgaccttccacggtggcgcttctcaacatcttgatggcgtggcgtttatcttccgtctgcacctggtgttggggatgacgttattcctgctgttcccgttctcgcgtctggtacacatctggagcgtcccggtggagtatctgacgcgtaagtatcagctggtgcgcgctcgtcactaa

SEQ ID NO: 2923 - DNA, 711 bp, Escherichia coli
atgatcgaactcgtgattgtatcgcgtctccttgaatatccggatgctgccttatggcagcatcaacaagagatgtttgaggcgattgccgcgtcgaaaaatctgccaaaagaggatgcccatgcgctgggcattttcctgcgcgatttaacgacgatggatccgctcgatgcccaggcgcagtacagcgaactgttcgaccgtggccgcgccacgtcactgttgctatttgaacatgttcacggtgaatcccgtgaccgcggccaggcgatggtggatctgctggcgcagtacgagcagcacggcttgcagttaaacagccgcgaattgcccgaccatctgccgctgtatctggagtacctggcgcagctgccgcaaagcgaagccgtggagggtttgaaagatattgcgccgattctggcattgctgagcgcgcgtctgcaacagcgtgaaagccgttatgccgtgctgtttgatctgctgctgaaactggcgaataccgcaatcgacagcgacaaagtggcggaaaaaattgccgatgaagcgcgcgacgatacgccgcaggcgctggatgcagtctgggaagaagagcaggttaaattctttgctgacaaaggctgcggtgattcagcaatcactgctcatcagcgtcgctttgccggtgccgtcgcgccgcaatatctgaatatcaccaccggaggacagcactaa

SEQ ID NO: 2924 - DNA, 1539 bp, Escherichia coli
atgaaaattcgttcacaagtcggcatggtgctgaatctcgataagtgcatcggctgccacacctgttcagtgacctgtaaaaacgtctggaccagccgtgaaggcgtggaatacgcgtggttcaacaacgtggaaaccaagccgggccagggcttcccgactgactgggaaaaccaggaaaaatacaaaggcggctggatccgtaaaatcaacggcaaactgcagccgcgcatgggtaaccgtgccatgctgctgggtaaaatcttcgctaacccgcatctgccggggatcgacgattattacgagccgttcgattttgattatcagaacctgcataccgcgccggaaggcagcaaatcacagccgattgcccgtccgcgttcactgattaccggcgaacggatggcgaaaatcgaaaaagggccgaactgggaagatgacctgggcggtgagtttgacaagctggcgaaagacaagaacttcgacaacatccagaaggcgatgtatagccagttcgaaaacaccttcatgatgtatttgccgcgcctgtgcgaacactgtctgaacccggcatgtgtggcgacctgcccgagcggtgcgatttacaagcgtgaagaagatggcatcgtcctgatcgaccaggataaatgccgtggctggcgtatgtgcatcaccggatgcccgtacaaaaaaatctacttcaactggaagagcggtaagtctgagaagtgcatcttctgctatccgcgtattgaagccggccagccgacaatatgttcagaaacctgtgtcggtcgtatccgttatcttggcgtgctgctgtacgatgccgacgcgattgaacgtgcggcaagtaccgagaacgagaaagatctctaccagcgtcagctggatgtgttcctcgatccgaacgatccgaaagtcatcgagcaggcgattaaagacggtattccgctgagcgttattgaggctgcacagcagtcgccagtttataaaatggcgatggaatggaaactggcgctgccgctgcatccggaatatcgcacactgccgatggtctggtacgtgccgcctctgtcgccgattcagtctgcggcagacgcgggtgaactgggcagcaacggcattctgccagacgtcgaaagcctgcgtattccggtacagtatctggcgaatctgctgaccgccggtgataccaaaccggtactgcgcgcgctgaaacgtatgctggcgatgcgtcattacaaacgtgctgaaaccgttgacggtaaagtcgatacccgtgcgctggaagaggtcggtctgaccgaagcccaggcacaggagatgtatcgttatctggctattgccaactacgaagatcgctttgtggtgccgagcagtcatcgtgaactggcgcgggaagccttcccggagaaaaatggctgcggctttacctttggtgatggctgccacggttcagataccaaattcaatctgttcaacagccgccgtatcgatgccatcgatgtaaccagcaaaacggagccgcacccatga

SEQ ID NO: 2925 - DNA, 3744 bp, Escherichia coli
atgagtaaattcctggaccggtttcgctacttcaaacagaagggtgaaacctttgccgatgggcatggccagcttctcaataccaaccgtgactgggaggatggatatcgccagcgttggcagcatgacaaaatcgtccgctctacccacggggtaaactgcaccggctcctgcagctggaaaatctacgtcaaaaacggtctggtcacctgggaaacccagcagactgactatccgcgtactcgcccggacctgccaaaccatgaacctcgcggctgcccgcgcggtgccagctactcctggtatctttacagcgctaaccgcctgaaatacccgatgatgcgcaaacgcctgatgaaaatgtggcgtgaagcgaaggcgctgcatagcgatccggttgaggcatgggcttctatcattgaagacgccgataaagcgaaaagctttaagcaggcgcgtggacgcggtggttttgttcgttcttcctggcaggaagtgaacgaactgatcgccgcatctaacgtttacaccatcaaaaattacggtccggaccgtgtcgctggcttctcgccaattccggcaatgtcgatggtttcttacgcatcgggtgcgcgctatctctcgctgattggcggtacttgcttaagcttctacgactggtactgcgacctgcctcctgcgtctccgcaaacctggggtgagcaaactgacgtaccggaatctgctgactggtacaactccagctacatcatcgcctggggttcaaacgtgccgcagacgcgtaccccggatgctcacttctttactgaagtgcgttacaaaggaaccaaaactgttgccgtcacaccagactacgctgaaatcgccaaactgtgcgatctgtggctggcaccgaaacagggcaccgatgcggcaatggcgctggcaatgggtcacgtaatgctgcgtgaattccacctcgacaacccaagccagtatttcaccgactatgtgcgccgctacaccgacatgccgatgctggtgatgctggaagagcgcgacggttactacgctgcgggtcgtatgctgcgcgctgctgatctggtggatgcactgggccaggaaaacaatccggaatggaaaactgtcgcctttaataccaatggtgaaatggttgcgccgaacggttctattggcttccgctggggcgagaagggcaaatggaatcttgagcagcgcgacggcaaaactggcgaagaaaccgagctgcaactgagcctgctgggtagccaggatgagatcgctgaggtgggcttcccgtactttggtggcgatggcacggaacacttcaacaaagtggaactggaaaacgtgctgctgcataagctgccggtgaaacgcctgcaactggctgatggcagcaccgccctggtgaccaccgtttatgatctgacgctggcaaactacggtctggaacgtggcctgaacgacgttaactgtgcaaccagctatgacgatgtgaaagcttacacccctgcctgggcagagcagattaccggcgtttctcgcagccagattattcgcatcgcccgtgaatttgccgataacgctgataaaacgcacggtcgttcgatgattatcgtcggcgctgggctgaaccactggtatcacctggacatgaactatcgtggtctgatcaatatgctgattttctgcggctgtgtcggtcagagcggcggtggctgggcgcactatgtaggtcaggaaaaactgcgtccgcaaaccggctggcagccgctggcgtttgccctcgactggcagcgtccggcgcgtcacatgaacagtacctcttatttctataaccactccagccagtggcgttatgaaaccgtgactgcggaagaactgctgtcgccgatggcggataaatctcgctataccggacacttgatcgactttaacgtccgtgcagaacgcatgggctggctgccgtctgcgccgcagttaggcactaacccgctgacaatcgctcgcgaagcagaaaaagccgggatgaatccggtggactatacggtgaaatccctgaaagagggttctatccgtttcgctgcggaacagccggaaaacggtaaaaaccacccgcgtaacctgttcatctggcgttctaacctgctcggttcttccggtaaaggtcatgagtttatgctcaagtacctgctggggacggagcacggtatccagggcaaagacctgggtcagcagggcggcgtgaagccggaagaagtggactggcaggacaacggtctggaaggcaagctggatctggtggtgacgctggacttccgtctgtcgagcacctgtctctattccgacatcattttgccgacggcgacctggtacgaaaaagacgacatgaatacttcggatatgcatccgtttattcacccgctgtctgcggcggtcgatccggcctgggaagcgaaaagcgactgggaaatctacaaagccatcgcgaagaaattctccgaagtgtgcgttggtcatctgggtaaagaaactgacatcgtcacgctgcctatccagcacgactctgccgctgaactggcgcaaccgctggatgtgaaagactggaaaaaaggcgaatgcgacctgatcccaggtaaaactgcaccgcacattatggtcgtagagcgcgattatccagcaacttacgaacgctttacctctatcggcccgctgatggagaaaatcggtaacggcggtaaaggaattgcctggaacacccagagcgagatggatctgctgcgtaagctcaactacaccaaagcggaaggtccggcaaaaggccagccgatgctcaataccgcaattgatgcggcagagatgatcctgacgctggctccggaaaccaatggtcaggtagctgtaaaagcctgggctgccctgagcgagtttaccggccgtgaccatacgcatctggcgctgaataaagaagacgagaagattcgcttccgcgatattcaggcacagccgcgcaaaatcatctccagcccgacatggtctggccttgaagatgaacacgtttcttacaacgccggttacaccaacgttcacgagctgatcccgtggcgtacgctctctggccgtcagcagctgtatcaggatcaccaatggatgcgtgatttcggtgaaagcctgctggtttatcgtccgccgatcgacacccgttcggtgaaagaagtgatgggccagaaatccaatggcaacccggaaaaagcgctcaacttcctgacgccacaccagaagtggggtatccactccacctacagcgacaacctgctgatgctgactttaggtcgcggtggtccggtggtctggctgagtgaagccgatgccaaagagctgggtatcgccgataacgactggattgaagtcttcaacagcaacggtgcactgactgcccgtgcggttgtcagccagcgtgttccggcagggatgaccatgatgtaccacgcgcaggaacgtatcgttaacctgcctggttcggaaattacccaacagcgtggtggtatccataactcggtcacccgtatcacgccgaaaccgacgcatatgatcggcggctatgcccatctggcatatggctttaactactacggcaccgtaggttctaaccgcgatgagtttgttgtagtgcgtaagatgaagaacattgactggttagatggcgaaggcaatgaccaggtacaggagagcgtaaaatga

SEQ ID NO: 2926 - DNA, 1392 bp, Escherichia coli
atgagtcactcatccgcccccgaaagggctactggagctgtcattacagattggcgaccggaagatcctgcgttctggcaacaacgcggtcaacgtattgccagccgcaacctgtggatttccgttccctgtctgttgctggcgttttgcgtatggatgttgttcagcgctgttgcggtgaacttaccgaaagtcggttttaattttacgaccgatcagctatttatgttgactgcgctgccttcggtttctggcgcgttattacgtgttccatactcctttatggttcctatcttcggtggtcgtcgctggacggcgttcagcaccggtattctgattattccttgcgtctggctgggttttgccgtgcaggatacctccacgccttatagcgtcttcatcatcatttctctgctgtgcggctttgctggcgcgaacttcgcatccagtatggcaaacatcagcttcttctttccgaaacagaagcagggtggcgcgctgggtctgaatggtggtctgggcaacatgggcgtcagcgtcatgcagttggttgctccgctggtggtatcactgtcgattttcgcagtatttggtagccagggcgtcaaacagccggatgggactgagctgtatctggcgaatgcgtcctggatatgggtgccgttccttgccatcttcaccattgcggcgtggtttggcatgaacgatcttgctacctcgaaagcctccatcaaggagcaattgccggtactcaaacggggtcatctgtggattatgagcctgctgtatctggcaaccttcggctccttcatcggcttctccgcgggctttgcgatgctgtcaaaaacgcagttcccggatattcagattctgcaatacgctttcttcgggccgtttattggtgcgctggcgcgttctgcaggtggtgcattatctgaccgtctgggcggaactcgtgtcactctggtgaactttatcctgatggcaattttcagcggcctgctgttcctgaccttaccgactgacgggcagggcggaagcttcatggcgttcttcgcggtcttcctggcgctgttcctgacagctgggctgggtagtggttccactttccagatgatttccgtgatcttccgtaaactgacaatggatcgcgtgaaagcagaagggggttctgacgaacgtgcgatgcgtgaagcggcaaccgacacggcggcggcgctgggtttcatctctgcgattggcgcgattggtggcttctttatcccgaaagcgtttggtagctcgctggcattaacgggttcgccagtcggcgcaatgaaagtatttttgattttctatatcgcctgcgtggtgattacctgggcggtatatggtcggcattctaaaaaataa

SEQ ID NO: 2927 - DNA, 219 bp, Escherichia coli
atgagcaataaccttaatgaatgtgacgatacattctggaatggcagtattctcggctattggctgaagtatacccatacccggaaagagttactccttatttgccgtgtggttagtcgctttacatcggtaagggtagggattttacagtaccgtgaaaaatctcataatttttatgaaatcactgtactcactatggataatgataaatatcaatga

SEQ ID NO: 2928 - DNA, 1797 bp, Escherichia coli
atgcttaaacgttgtctctctccgctcaccctggttaatcaggttgcgcttattgtgttgctttctactgctattggactggcagggatggcggtttctggctggctggtgcaaggcgttcagggcagcgcccatgcgatcaacaaagcgggatcgctgcgcatgcaaagttaccgtctgttggcagcagtgccattaagcgagaaagacaagcccttaattaaagagatggaacaaacagcatttagcgccgagttgactcgagcagcagaacgagacgggcaactggcgcaattacagggtttacaagattactggcgtaatgaactgatccctgcactgatacgtgcacaaaaccgcgaaacggtgtcagcggatgtcagccagtttgttgccgggcttgatcagctggtatctggttttgaccgcaccacggaaatgcgcattgagacagtggtgctggtccatcgggtaatggcggtatttatggcacttttactggtattcactattatctggttgcgggcgagattgctacaaccgtggcggcaactgctggcaatggcgagtgccgtcagccatcgcgattttacccaacgcgcaaacaccagcgggcgcaacgaaatggcgatgcttggaactgcgttgaacaatatgtctgcagaactggccgaaagttatgccgtacttgagcagcgggttcaggagaaaaccgccgggctggagcataaaaatcagatcctctcttttttatggcaggctaaccgccgtttgcattcccgcgccccgctgtgtgaacgcctgtcacctgtactcaacggattacagaatttaaccctgctacgtgatatcgaactgcgggtgtatgacactgatgatgaagagaatcatcaggagtttacctgccagcctgatatgacttgtgatgataaaggctgccagctctgcccgcgcggcgtattacccgttggcgatcgcggcacaaccctgaagtggcggctggctgacactcatacgcagtacggtattttgctggcgaccctgccgcaggggcgtcatcttagccatgatcaacaacaactggtggataccctggttgaacaactcaccgccacgctggcgctggatcgccatcaggaacgtcagcaacagttgatcgtgatggaagagcgtgccaccattgcgcgcgaactgcatgattctattgcccaatctctctcttgcatgaagatgcaggtgagttgcttacagatgcagggcgatgcgctgccagaaagcagccgcgaactgttaagtcagatccgtaacgaactgaatgcatcctgggtgcagttgcgtgaattgctcaccacattccgtttgcagctcaccgagcctggattacgtccggcgctggaggcgagttgcgaagagtacagcgccaaatttggcttcccggtgaagctggattatcaattgccgcctcgtctggtgccttcgcatcaggcaatccacttgttgcaaattgcccgtgaggcattaagtaacgccctcaaacattcgcaagcgagtgaggtcgtggtgaaggtggcgcaaaacgataatcaggtcaaactgaccgtccaggataacggctgcggcgtgcctgaaaatgccatccgcagcaatcactacggcatgataataatgcgcgaccgtgcgcaaagtttacgaggcgattgccgcgtccgccgtcgtgaatcaggtggcaccgaagtggtggtcacctttattcccgaaaaaactttcacagacgtccaaggagatacccatgagtaa

SEQ ID NO: 2929 - DNA, 651 bp, Escherichia coli
atgagtaatcaggaaccggctactatcctgctgatcgacgatcacccgatgttgcgaactggcgtaaaacagcttatcagtatggcaccagatatcaccgtggttggcgaagcgagtaatggcgaacagggtattgaactggcggagtctcttgatcccgatctgatcctgttagatctcaatatgcccggcatgaacggtctggaaacgctggataaactgcgcgaaaagtccctctccgggcgcattgtggtattcagcgtctctaaccatgaagaagatgtggtcaccgcactgaaacgcggcgcggatggctatctgttaaaagatatggaaccggaagatctgctgaaagcgttacatcaggcagctgctggcgaaatggtattaagcgaagcattaacgcctgttctggccgccagcttgcgcgctaaccgtgccactactgagcgcgatgttaaccagttaaccccacgcgagcgcgatattctcaagctaattgcccagggtttgccgaacaagatgattgcccgccgcctggacatcaccgaaagcacagtaaaagttcacgtcaagcacatgctgaagaaaatgaagctaaagtctcgcgtggaagctgcggtatgggtgcatcaggagcgcattttctga

SEQ ID NO: 2930 - DNA, 1395 bp, Escherichia coli
ttgagccgtttcgttcctcgcattattccgttttatttactcttgctggcggcaggcggtacagctaacgcacaatctaccttcgagcaaaaagcggcaaatccctttgataataacaatgatggtctgccggatttaggcatggcacctgaaaatcatgatggggaaaaacactttgctgaaattgtgaaagatttcggcgaaaccagtatgaatgataacgggctggatactggcgagcaggcaaaagctttcgcattgggaaaggtccgcgacgcgcttagtcaacaggttaatcagcacgtagagtcctggctatcaccgtggggaaatgccagtgttgacgtcaaagtggataacgaaggacatttcaccggcagtcgtggaagctggtttgtgccgttacaagataatgatcgttatctcacctggagccagcttggtcttactcagcaggatgatgggctggtgagcaatgtgggcgttgggcaacgctgggcgcgcggcagctggctggtgggttataacactttttatgacaacttgctggacgaaaatcttcagcgagcgggctttggcgctgaagcgtggggcgaatatttgcgactatcggcaaacttttatcagccgtttgctgcatggcatgaacagacagccacgcaggaacaacggatggcgcgcgggtacgacctgacagcccggatgcgcatgccgttctatcaacacctcaataccagtgtcagcgtagaacagtattttggtgatcgtgtcgatttgtttaactctggtacgggttatcacaatcccgtcgcgttgagtctgggattaaattacacccctgtgcccttagtcactgtgacggcccagcataaacagggtgaaagtggcgagaatcaaaataacctcgggctgaatcttaactaccgctttggtgtaccgctcaaaaaacaactttctgcgggcgaggttgccgaaagtcagtcgttacgtggtagtcgctatgacaatccgcagcgaaataatctgccgactcttgagtaccgacagcgaaaaacgttaacggtgtttctggcgacacctccgtgggatctaaaacctggcgaaacagtgccgctgaaattacaaatccgcagtcgttacggtattcggcaactgatttggcagggcgatacgcagatattaagtttgacgccgggcgcacaagccaacagtgaggagggctggacgctgatcatgcctgactggcaaaacggggaaggcgcaagcaatcactggcgattgtcagtggtggtggaagataaccaggggcagcgtgtctcctccaatgagatcacgctaacgcttgtcgaaccgttcgacgcattgtcaaacgacgaactgcgctgggaaccgtaa

SEQ ID NO: 2931 - DNA, 354 bp, Escherichia coli
atgcaaaaaatcgtgatcgttgccaatggcgcaccttacgggagcgaatccttgtttaacagcttgcggctggccattgcgttacgagagcaggagaacaatctggatctgcgtctgttcctgatgtctgatgcggtaacagccgggttgcgcgggcaaaaaccaggggaaggctacaacattcagcaaatgctggagatccttaccgctcagaatgtaccggtgaaattgtgcaaaacctgtaccgacgggcgcgggattagtacacttcctctgattgatggggtggaaatcggtactcttgttgaactggcgcaatggacgctgtcagccgataaagtgctcacattttaa

SEQ ID NO: 2932 - DNA, 717 bp, Escherichia coli
atgcagtggcggaggtgtaaggtgataacgcgtgatttcttgatgaatgccgattgtaaaacggcatttggtgccattgaagaatcactcttatggtcagcagaacaacgggcggcttcgctggcggcgacgctggcttgtcgacctgatgagggaccggtgtggatcttcggttatggatcgttgatgtggaatccggcactggagtttaccgagtcgtgcaccggtacactggttggatggcatcgcgcgttttgcctgcgtctgaccgccgggcgcgggactgcgcaccagccgggacgaatgcttgcactgaaagagggcggacgcaccacaggcgtcgcctatcgactgccagaagagacgctggagcaggaactaaccctgctgtggaagcgcgagatgattaccggctgttatctgccaacctggtgtcagcttgatcttgatgatggacgcacagtaaacgccattgtgtttattatggacccgcgacatccagaatatgaatctgacactcgcgctcaggtcatagcgccgttgattgcggcggcgagcggtccgctgggaaccaatgcacaatacctgttttcactggaacaggagcttatcaaactgggaatgcaggacgatgggctgaatgatttgctggtatcggtaaaaaaactgctggcggagaattatccggatggtgtgttacggccgggattcgcctga

SEQ ID NO: 2933 - DNA, 231 bp, Escherichia coli
atgccgtataaaacgaaaagcgatctgccggaaagcgtaaagcacgtgcttccgtctcatgcccaggatatctataaagaagcgttcaacagcgcatgggatcaatataaagataaagaagatcggcgtgatgacgccagtcgcgaagaaacagcgcataaagtggcctgggctgctgtgaagcatgaatatgccaaaggggatgatgataaatggcataaaaaatcgtaa

SEQ ID NO: 2934 - DNA, 1101 bp, Escherichia coli
atgtcaaatgctcaagaggcggtaaaaacccgccacaaggagacttcgcttattttcccggttctggcgctggtagtgctgttcctgtggggaagcagccagacactaccagtggtcattgccatcaatcttcttgcgcttattggtattttaagtagcgcctttagtgttgtccgtcatgcggacgtattagcccatcgcctgggagaaccttacggttcgcttattcttagcctttcagtggttattcttgaagtcagtttgatttcagctttaatggcaaccggcgacgccgcgccaacgctaatgcgtgatacgctctattcaatcattatgattgttaccggtgggctggttggcttttcattattgttgggcggacgcaagtttgccacccaatatatgaatctgtttggtatcaagcagtatttaattgcgctgttccccctggcgataatcgtactggtatttccaatggctctgcctgcggcgaatttttcaaccggtcaggcgttactggtagcattaatttctgcggcaatgtatggcgtatttttgctgatccagaccaaaacgcatcaaagtttatttgtctacgagcacgaagatgacagtgatgatgacgacccgcaccacggtaaaccgtctgcccatagcagcctgtggcatgctatctggttgattgtccatctgattgccgttattgcggtgaccaaaatgaacgccagcccgctggagacattgctcgacagcatgaatgcccctgtcgcctttactggcttcctggtggctctgttgattctgtcgccggaaggtttaggtgcgttaaaagcagtgttgaacaaccaggtccagcgcgcgatgaatctgttctttggttcagtgttagcaaccatttcgcttaccgtacctgtcgtcacgctaattgcctttatgacgggtaacgaattacagtttgcacttggtgcgccagaaatggtggtgatggtggcctctttagtgctgtgccatatctccttctccaccggacgtactaacgtgctcaatggcgcagcgcatctggcactgtttgccgcctatttgatgacgatatttgcctga

SEQ ID NO: 2935 - DNA, 855 bp, Escherichia coli
atgaaacaaaaagtggttagcattggcgacatcaacgtagcaaatgacctgccgttcgtactgtttggcggtatgaacgtgctggaatctcgcgatctggcgatgcgcatttgcgagcactacgtaaccgtgacccagaaactgggtatcccttacgtgttcaaagcctcttttgacaaagccaaccgctcctccatccactcttatcgtggaccgggcctggaagaagggatgaaaatcttccaggagttgaagcagacttttggcgtgaaaattatcaccgacgttcacgaaccaagccaggcacagcccgttgctgatgttgtagatgtgattcagttgccggcgtttcttgctcgccagactgacctggttgaagccatggcgaaaaccggtgcggtaattaacgtcaagaaaccgcagtttgtcagcccgggacagatgggtaatatcgttgataaattcaaagaaggcggcaacgaaaaagtgattctttgcgatcgcggtgctaacttcggctatgacaacctggttgttgatatgctgggcttcagcattatgaagaaagtgtctggcaattcgccggtgattttcgacgttacccacgcactgcaatgtcgcgatccatttggcgcagcttccggcggtcgccgtgctcaggtggctgagctggcaagagccggtatggcggtaggtctggcggggctgtttattgaagcgcatccggatccggaacatgcgaaatgtgatggtccatccgcgctgccgctggctaaactggaaccgttcctcaagcaaatgaaagcgattgatgatctggtgaaaggtttcgaagaactggataccagcaagtaa

SEQ ID NO: 2936 - DNA, 810 bp, Escherichia coli
atgagatcgttagctgatttcgaatttaataaagcgccattgtgcgaaggcatgatcctggcttgcgaagcaatccgccgcgattttccctcgcaagatgtttacgacgaactggagcgtctcgttagtctggcgaaggaagaaattagccagcttctgccattagaagagcagctagaaaaattaatcgcgctgttttacggcgaatgggggtttaaagcctcacgcggcgtttatcgtctttccgatgcattatggctggaccaggtgttaaagaatcgacagggcagtgcggtatcattaggtgcggttttattatgggtcgcgaatcgtctcgatttgccgctgctgccggtgattttccctacgcagctgatattgcgcattgaatgtccggatggcgaaatttggctgattaatccttttaacggtgaatcgttaagcgaacatatgctggatgtgtggttaaagggaaatatcagcccgtcggcggaactgttttatgaagaccttgatgaagctgataacattgaggtaatccgcaaattgctggatacactcaaagcttcgttgatggaagaaaatcagatggagctggcgttacgcaccagcgaagctttattacaattcaacccggaagatccctatgaaattcgcgatcgcgggttgatttatgcgcaactggattgcgaacacgttgcgttgaacgatttaagttatttcgttgaacagtgtccggaagacccgatcagcgaaatgatccgtgcgcaaataaataacatcgcgcataaacatattgtgctgcattaa

SEQ ID NO: 2937 - DNA, 393 bp, Escherichia coli
atgacaagtttttctacgttgcttagcgttcatctcattagtatcgcgctttctgttgggctattgaccttacgtttctggctacgttatcagaagcatccacaggcatttgctcgctggacgcgcattgtgccgccggttgtcgatacgctgttattgttaagcggcattgcgttgatggctaaagcgcacatccagccattttccgggcaggcacagtggctgactgaaaagctgtttggagttatcatttatattgttttgggttttattgcactcgattatcgtcgtatgcacagtcagcaggcgcgcattattgccttcccgctggcgttggtggtgctgtacatcatcattaaactcgccaccacaaaagtaccgttactggggtaa

SEQ ID NO: 2938 - DNA, 834 bp, Escherichia coli
atggaatatcaacactggttacgtgaagcaataagccaacttcaggcgagcgaaagcccgcggcgtgatgctgaaatcctgctggagcatgttaccggcagagggcgtacttttattctcgcctttggtgaaacgcagctgactgacgaacaatgtcagcaacttgatgcgctactgacgcgtcgtcgcgatggtgaacccattgctcatttaaccggggtgcgagaattctggtcgttgccgttatttgtttcgccagcgaccttaattccgcgcccggatacggagtgtctggtggagcaggcactggcgcggttgcctgaacaaccttgccgtattctcgatctcgggacgggtaccggggcgattgcgctggcgctggccagcgagcgtccggactgcgaaattaccgctgtagatcgtatgccagatgctgtctctctggcgcaacgtaatgcccagcatctggctatcaaaaatatccacattctgcaaagcgactggtttagcgcgctagccgggcagcagtttgcgatgattgtcagcaatccgccgtatattgacgagcaggacccacatcttcaacaaggcgatgtccgctttgagccgctcactgcgctggttgcggcagacagtggaatggcagacatcgtgcatatcatcgaacagtcgcgtaacgcgctggtatccggcggctttctgcttctggagcatggctggcagcagggtgaagcggtgcgacaggcatttatcttcgcggggtatcatgacgtcgaaacctgccgtgactatggggataacgagcgcgtaacgctcggccgctattatcaatga

SEQ ID NO: 2939 - DNA, 1083 bp, Escherichia coli
atgaagccttctatcgttgccaaactggaagccctgcatgaacgccatgaagaagttcaggcgctgctgggtgatgcgcaaaccatcgctgaccaggaacgttttcgcgcattatctcgtgaatatgcgcagttaagtgatgtttcgcgctgttttaccgactggcaacaggttcaggaagatatcgaaaccgcacagatgatgctcgacgatcctgaaatgcgtgagatggcgcaggatgaactgcgcgaagctaaagaaaaaagcgagcaactggaacagcaattacaggttctgttactaccaaaagatcctgatgacgaacgtaacgccttcctcgaagtccgtgccggaaccggcggcgacgaagcggcgctgttcgctggcgatctgttccgtatgtacagccgttacgccgaagcccgccgctggcgtgtagaaatcatgagcgccagcgaaggtgaacatggtggttataaagagatcatcgccaaaattagcggtgatggtgtatatggtcgtttgaaattcgaatctggcggtcatcgcgtgcagcgtgttcctgctacggaatcgcagggtcgtattcatacttctgcttgtaccgttgcggtaatgccagaactgcctgatgcagaactgccggacatcaacccagcagatttacgcattgatactttccgctcgtcaggggcgggtggtcagcacgttaacaccaccgattcggcaattcgtattactcacttgccgaccgggattgttgttgaatgtcaggacgaacgttcacaacataaaaacaaagctaaagcactttctgtactcggtgctcgcatccacgctgctgaaatggcaaaacggcaacaggccgaagcgtctacccgtcgtaacctgctggggagtggcgatcgcagcgaccgtaaccgtacttacaacttcccgcaggggcgcgttaccgatcaccgcatcaacctgacgctctaccgcctggatgaagtgatggaaggtaagctggatatgctgattgaaccgattatccaggaacatcaggccgaccaactggcggcgttgtccgagcaggaataa

SEQ ID NO: 2940 - DNA, 1326 bp, Escherichia coli
ttgatcttacgcatcctgtatgatgcaagcagactaaccctatcaacgttggtattatttcccgcagacatgacccttttagcactcggtatcaaccataaaacggcacctgtatcgctgcgagaacgtgtatcgttttcgccggataagctcgatcaggcgcttgacagtctgctcgcgcagccgatggtgcagggcggtgtggtgctgtcgacgtgtaaccgcacagaactttatctcagcgttgaagaacgggatgacctgcaagaggcgctcattcgctggttgtgtgattaccataatctcaacgaagacgatctgcgtaatagcctctactggcatcaggataacgatgcggtcagtcatttaatgcgcgttgccagtgggcttgattctctcgtccttggcgagccgcagatcctcggtcaggttaaaaaagcgtttgccgattcgcaaaaaggtcatatgaaggccagcgaactggaacgcatgtttcagaaatctttctctgtggcgaaacgcgttcgcactgaaacagatatcggtgccagtgctgtgtctgtcgcttttgcggcttgtacgctggcgcggcagatctttgaatcgctctctacggtgacggtactgctggttggcgcgggcgaaaccatcgagctggtggcgcgtcatctgcgcgaacacaaagtacagaagatgattatcgccaatcgcactcgcgaacgtgcccaaattctggcagatgaggttggcgcggaagtgattgccctgagcgatatcgacgaacgtctgcgcgaagccgatatcatcatcagttccaccgccagcccgttgccgattatcggtaaaggcatggtagagcgcgcattaaaaagccgtcgcaatcaaccaatgctgctggtggatattgccgttccgcgcgatgttgagccggaagttggtaaactggcgaatgcttatctttatagcgttgacgatctgcaaagcattatttcgcacaacctggcgcaacggaaagctgctgctgtggaggcggaaactatcgtcgcccaggaggccagtgaatttatggcatggcttcgagcacaaagcgccagcgaaactattcgcgattatcgtagccaggcagagcaggttcgtgatgagttaactgctaaagcgttagcggcccttgaacagggcggcgatgcgcaaaccattatgcaggatctggcatggaaactgactaaccgcctgatccatgcaccaacaaaatcacttcaacaggccgcccgtgacggggataacgaacgcctgaatattctgcgcgacagcctcgggctggagtag

SEQ ID NO: 2941 - DNA, 624 bp, Escherichia coli
atgcccctgcccgattttcgtcttatccgcctgctaccgctggctgctcttgtgctcactgcctgttccgttaccacgcccaaaggtcctggcaaaagcccggattcgccacaatggcgtcagcatcagcaagacgtgcgcaatcttaatcagtatcaaactcgcggcgcgttcgcttatatttctgaccaacaaaaagtgtacgcccgtttcttctggcaacaaactggccaggatcgctaccgtctgctgctgactaacccattgggcagcacggaactggagctgaatgctcaaccgggtaacgtgcagttagtcgacaataaaggtcagcgttatacctccgatgacgccgaagagatgattggcaaattgaccggaatgccaattccgctcaacagcttgcgccagtggattttaggtttaccgggtgatgcgactgactacaaacttgacgaccagtaccgcctgagcgaaatcacctacagccagaatggcaaaaactggaaagttgtttacggtggttatgacacaaaaactcaacctgcgatgccagccaatatggaactcaccgacggtggtcaacgcatcaagttaaaaatggataactggatagtgaaataa

SEQ ID NO: 2942 - DNA, 852 bp, Escherichia coli
atgcggacacagtggccctctccggcaaaacttaatctgtttttatacattaccggtcagcgtgcggatggttaccacacgctgcaaacgctgtttcagtttcttgattacggcgacatcatcagcattgagcttcgtgacgatggggatattcgtctgttaacgcccgttgaaggcgtggaacatgaagataacctgatcgttcgcgcagcgcggttgttgatgaaaactgcggcagacagcgggcgtctttcgatgggaagcggtgcgaatatcagcattgacaagcgtttgccgatgggcggcggtctcggcggtggttcatccaatgccgcgacggttctggtggcgttaaatcatctctggcaatgcggactaagcatggatgaactggcggaaatggggctgacgctgggcgcagatgttcctgtctttgttcgtggtcatgccgcgtttgccgaaggcgttggtgaaatactaatgccggtggatccgccagagaagtggtatctggtggcgcaccctggtgtaagtattccaacaccggtgatttttaaagatcctgaactcccgcgcaatacgccaaaaaggtcaatagaaacgttgctaaaatgtgaattcagcaatgattgcgaggttatcgcaagaaaacgttttcgcgaggttgatgcggtgctttcctggctgttagaatacgccccgtcgcgcctgactgggacaggggcctgtgtctttgctgaatttgatacagagtctgaagcccgccaggtgctagagcaagccccggaatggctcaatggctttgtggcgaaaggcgttaatctttccccattgcacagagccatgctttaa

SEQ ID NO: 2943 - DNA, 1014 bp, Escherichia coli
atgcctggcccgcacagttttcggcagattctttccaccaatggacgcatgcctgaggttcttctcgtgcctgatatgaagctttttgctggtaacgccaccccggaactagcacaacgtattgccaaccgcctgtacacttcactcggcgacgccgctgtaggtcgctttagcgacggcgaagtcagtgtacaaattaatgaaaatgtacgcggtggtgatattttcatcatccagtccacttgtgcccctactaacgacaacctgatggaattagtcgttatggttgatgccctgcgtcgtgcttccgcaggtcgtatcaccgctgttatcccctactttggctatgcgcgccaggaccgtcgcgtccgttccgctcgtgtaccaatcactgcgaaagtggttgcagacttcctctccagcgtcggtgttgaccgtgtgctgacagtggatctgcacgctgaacagattcagggtttcttcgacgttccggttgataacgtatttggtagcccgatcctgctggaagacatgctgcagctgaatctggataacccaattgtggtttctccggacatcggcggcgttgtgcgtgcccgcgctatcgctaagctgctgaacgataccgatatggcaatcatcgacaaacgtcgtccgcgtgcgaacgtttcccaggtgatgcatatcatcggtgacgttgcaggtcgtgactgcgtactggtcgatgatatgatcgacactggcggtacgctgtgtaaagctgctgaagctctgaaagaacgtggtgctaaacgtgtatttgcgtacgcgactcacccgatcttctctggcaacgcggcgaacaacctgcgtaactctgtaattgatgaagtcgttgtctgcgataccattccgctgagcgatgaaatcaaatcactgccgaacgtgcgtactctgaccctgtcaggtatgctggccgaagcgattcgtcgtatcagcaacgaagaatcgatctctgccatgttcgaacactaa

SEQ ID NO: 2944 - DNA, 1653 bp, Escherichia coli
atgcctttccgcgctctgatcgacgcttgctggaaagaaaaatatactgccgcacggtttacccgtgacctgattgccgggataaccgtcgggattattgctatcccgctggcgatggcgttggctattggtagtggtgtggccccccagtacggtttatataccgcagctgttgcggggattgtcattgctctgacgggggggtcacgctttagcgtttccggtccgactgcggcatttgtggtaattctctatcccgtttcgcaacagtttggactggcaggactgctggttgcgaccttgctgtcgggaatctttttgattctgatggggctggcacgctttggtcgcctgattgagtatattccggtttccgtcaccttaggtttcacctcgggtatcgggatcaccatcggtaccatgcagattaaagattttctcggtctgcaaatggcccatgtcccggaacattatctacaaaaagtcggcgcattatttatggcgctgccgaccattaatgtgggtgatgcagccattggcattgtgacgcttggcattctggttttctggccgcgtctgggcatacgtttacccggccaccttccggccttgctggctggttgcgcggtgatggggattgttaacctgctcggcggacatgttgctaccatcggttcgcaattccactacgtcctggccgatggttctcagggtaacggtattccgcaactgctgccgcaactggtgctgccgtgggatctgcctaattcagaattcacgctaacctgggattctattcgcaccctgctgcctgcggcattctcaatggcaatgctcggcgcaatcgaatctctgctctgcgccgtggtgctggatggtatgaccgggacgaaacacaaggcgaacagcgaactggttggacagggactggggaatattatcgctccgttctttggtggtattaccgctacagctgccatcgcgcgttctgccgctaacgtccgtgccggggcaacttcccctatctcggcggtgatccactctattctggttattcttgccctgctggtactggcaccgctgctctcctggctgccgctttccgccatggcagccctgctgttgatggtggcgtggaacatgagtgaagcgcacaaagtggtcgacttgctgcgtcatgcaccgaaagatgacatcatcgtcatgctgctgtgcatgtcgctgaccgtgctgttcgatatggttattgccatcagcgtggggatcgtgctggcatcgctgctgtttatgcgtcgtatcgcacgtatgactcgcctggcaccggtagtcgtagacgttccagacgatgtcctggttctgcgcgttattggcccgctgttttttgctgccgctgaaggcttattcacggacctggagtcacgtcttgaaggcaaacggattgtgattctgaagtgggatgccgttccggtacttgatgctggtggtcttgatgcgttccagcgttttgtgaagcgtctgcccgaaggatgtgaactgcgcgtgtgcaacctggaattccagccactgcgcactatggctcgcgcaggcattcaaccgatcccgggacgcctcgcattcttcccgaatcgtcgcgcggcgatggcggatttataa

SEQ ID NO: 2945 - DNA, 279 bp, Escherichia coli
atgaaacgcaaaaacgcttcgttactcggtaacgtgctcatggggttgggtctggtggtaatggtggtcggcgtggggtattcaatcctcaaccagttaccacagtttaatatgccccagtatttcgcacatggtgcagtgctaagtattttcgtcggtgcgattctctggctggcaggtgcccgtgttggcgggcatgaacaggtgtgcgaccgttactggtgggttcgccactatgacaaacgttgccgccgtagcgataatcgccgtcatagctaa

SEQ ID NO: 2946 - DNA, 585 bp, Escherichia coli
gtgacgattaaattgattgtcggcctggcgaaccccggtgctgaatacgccgcaacgcgacataatgctggtgcctggttcgttgacttactggcagagcgattgcgcgctccgctgcgcgaagaggctaaattctttggttatacttcgcgagtcacccttggaggcgaagatgtccgcctgttagtcccgactacatttatgaatctcagcggcaaagccgttgcggcgatggccagttttttccgcattaatccggacgaaattctggtggcccacgacgaactggatctgcctcctggcgtcgccaaatttaagttgggtggcggtcatggtggtcacaatggactgaaagacatcatcagtaaattgggtaataaccctaactttcaccgtttacgcatcggaatcggtcatccgggcgataaaaataaagttgtcggttttgtgttaggcaaaccgcctgttagtgaacagaagttaattgatgaagccatcgacgaagcggcgcgttgtactgaaatgtggtttacagatggcttgaccaaagcaacgaaccgattgcacgcctttaaagcgcaataa

SEQ ID NO: 2947 - DNA, 1092 bp, Escherichia coli
atgggattcaaatgcggtatcgtcggtttgcccaacgtcgggaaatctaccctgttcaacgcgctgaccaaagccggtattgaagcggccaactttccattctgcaccatcgagccgaacactggcgtcgtaccaatgcctgaccctcgcctggatcaactggctgaaatcgtaaaaccgcagcgtacacttcccacgaccatggaatttgtcgatatcgccggtctggtaaaaggcgcatcgaaaggcgaaggtctgggtaaccagttcctgaccaacatccgtgaaaccgaagcgatcggtcacgttgttcgctgctttgaaaatgacaacatcattcacgtttccggcaaagttaacccggcggatgatattgaagttatcaacaccgaactggcgctggcggatctcgacacctgtgaacgtgcgattcatcgcgtacagaagaaagccaaaggtggcgataaagacgcgaaagccgagctggcggtactggaaaaatgcctgccccagttggaaaacgcaggtatgctgcgcgcgctggatttaagcgctgaagagaaagcggctattcgttacctgagcttcctgacgctaaaaccaacaatgtacatcgccaacgtcaacgaagacggttttgaaaacaacccgtatcttgaccaggtgcgtgaaatcgcagcgaaagaaggttctgttgtagttccggtttgtgctgctgttgaagcagacattgccgaactggacgacgaagagcgtgacgagtttatgcaggagcttgggctggaagagccgggcctgaaccgtgtgatccgtgccggttataagctgctgaacctgcaaacttacttcaccgctggggtgaaagaagtgcgtgcatggaccattccggttggtgcaaccgcgccgcaggcagcgggcaaaatccatactgattttgaaaaaggctttatccgtgcacaaaccatctcgtttgaagatttcatcacttacaaaggtgaacaaggcgcgaaagaagcaggcaaaatgcgtgcagaaggcaaagattacatcgttaaagatggcgatgtgatgaacttcctgttcaacgtctaa

SEQ ID NO: 2948 - DNA, 1920 bp, Escherichia coli
atgagtggcgcttttaacaacgatggtcggggcatatctcccttaattgcaacctcctgggagagatgcaataagctgatgaaacgggagacatggaacgtaccacaccaggctcagggcgtgacatttgcttctatttatcggcgtaagaaagcgatgctgacgctcgggcaggctgcgctggaagatgcctgggaatatatggcaccgcgagagtgtgcgttgcttatcctcgatgaaaccgcctgcattctcagccgtaatggcgatccgcaaaccttgcagcagctaagtgtactgggattcaatgacggcacgtattgcgccgagggaattattggtacttgtgcgctatcgttagcggctatctctggtcaggccgtgaaaacgatggccgatcaacatttcaaacaggcactctggaactgggccttttgcgcaacgccgttgtttgacagcaagggccgattgacgggaacaatagcgctggcgtgtccggttgagcaaactaccgcagctgatttgccgttgacgttggcaatcgcacgcgaggtcggaaatttactgctgacggacagtttgctcgctgaaactaaccgtcatttaaatcaacttaatgccctgttagaaagtatggatgatggcgtgattagctgggacgagcagggtaatttgcaatttatcaacgcccaggcggcgcgagtcttgcgccttgacgcgacggcaagtcagggaagggcaatcactgaactcttaacgttacccgccgtattgcaacaagcaataaaacagtcacatccgctcaaacacgtagaagccacctttgaaagtcagcatcagtttattgatgcgctgataacccttaaaccgataatagaaacgcagggaaccagctttattttattgctccatcctgtggaacagatgcggcagttaatgaccagtcaattaggaaaagtcagccataccttcgctcatatgccacaggacgatccgcaaacccgccgcttgattcattttggtcgccaggcggcacgcagtagctttcctgtcctgctttgtggagaagagggcgtgggcaaggcactgctaagtcaggcaattcataatgaaagcgagcgtgcagcggggccttatatcgccgtcaattgtgagttatatggtgatgcggcgctggcggaagaatttattggtggcgatcgcacggatagtgaaaatggccgtctgagtcggctggaactggcgcacggcggcacgctgtttcttgaaaagattgaatatctggcggtggagttacagtctgctttgcttcaggttatcaagcagggggttatcacgcgactggatgcgcggcgtttaatacccattgatgtcaaagtgattgccacaacgaccgcggacctcgcaatgctggtggaacaaaatcgttttagtcgccagctgtattacgcgctgcatgcatttgaaattaccatcccgccactgcgtatgcggcgtggcagcattccggcgctggtgaataacaaattacgcagccttgaaaaacgcttctctacgcggctgaaaattgatgacgatgccctcgctcgcctggtttcctgtgcatggcctggcaacgattttgaactttacagcgtcatcgagaatcttgctctgagtagtgataatgggcgcattcgcgtcagtgatttgccggaacatctgtttaccgagcaggcgacagatgatgtcagcgccacccgcctttccaccagtctgtcatttgcggaagttgaaaaagaggcaattattaacgcagcccaggtcacaggcggtcgcattcaggaaatgtcggctttacttgggatcggccgcactacgctgtggcggaaaatgaagcaacatggcattgatgcagggcagtttaagcgccgtggatag

SEQ ID NO: 2949 - DNA, 1071 bp, Escherichia coli
atgaaaaaattgatcaatgatgtgcaagacgtactggacgaacaactggcaggactagcgaaggcgcatccatcgctgacactgcatcaggatccggtgtatgtcacccgagctgatgcccccgttgcagggaaagtcgccctgctgtcgggtggcggcagcggacacgagccgatgcactgtggctatatcggtcaggggatgctttcgggagcctgtccgggcgaaattttcacctcaccgacgcccgataaaatctttgaatgcgccatgcaaattgatggcggcgaaggtgtactgttgattatcaaaaattacaccggcgatattcttaacttcgaaacagcaaccgagttactgcacgatagcggcgtaaaagtgaccactgtggtcattgatgacgacgttgcagtaaaagacagtctttataccgccgggcggcgcggcgttgccaacaccgtattaattgaaaaactcgtaggtgcagcggcggagcgtggcgactcactggacgcctgtgcggaactggggcgtaagttgaataatcaaggccattcaataggtatcgctctcggtgcctgtaccgttcctgccgcgggcaaaccttcttttaccctggcggataatgagatggagtttggcgtcggcattcatggtgagccaggtattgaccgccgccccttctcttcccttgatcaaaccgtcgatgaaatgttcgacaccctgctggaaaatggctcataccatcgcactttgcgtttctgggattatcaacaaggcagctggcaggaagaaccacaaaccaaacaaccgctccagtctggcgatcgggtgattgcgctggttaacaatcttggcgcaactccgctttctgagctgtacggcgtctataaccgcctgaccacacgttgccagcaagcgggattgactatcgaacgtaatttaattggcgcgtactgcacctcactggatatgaccggtttctcaatcaccttactgaaagttgatgacgaaacgctggcactctgggacgcccctgtccacaccccggcccttaactggggtaaataa

SEQ ID NO: 2950 - DNA, 633 bp, Escherichia coli
atgtcactgagcagaactcaaattgttaactggctcactcgttgtggcgatattttcagcaccgagagcgagtatcttactggactggatcgcgagattggcgacgctgaccacgggctaaatatgaatcgaggctttagcaaagtggtggaaaaactccctgctatcgcagataaagatatcggtttcattctcaagaataccggcatgacgctactttccagcgtcggaggtgccagtggtccgctgttcggtaccttctttatccgcgccgcacagacaacccaggcacggcaaagcctgacgctggaagagctttatcagatgttccgcgatggcgcggacggcgtaatcagtcgcgggaaagccgaacctggcgataaaaccatgtgtgatgtgtgggtgccggtggtggaatcgttacgtcagtcctgcgagcaaaatctccctgttccggcggcgctcgacgctgccagtagcatcgccgaatccgctgcacaaagtacgattacgatgcaagcccgcaaaggccgcgccagttatctcggtgaacgcagtattggtcaccaggatcccggcgcgacctcggtgatgtttatgatgcaaatgttggcgttagccgcaaaagagtaa

SEQ ID NO: 2951 - DNA, 1419 bp, Escherichia coli
atggtaaacctggtcatagtttcacatagcagccgactgggagaaggtgtcggtgaattagcccgtcagatgttaatgagtgatagttgtaaaatcgccattgccgcgggaattgacgatccacataatcccattggtaccgatgccgtcaaagtgatggaggccatcgaatctgttgccgatgccgaccatgtgctggtcatgatggatatgggtagcgcattattgagtgctgaaactgcgctggaattgctggctcccgagatcgccgcaaaagtacgtttgtgtgctgcgccgttggtcgaaggtacactggcagcaacggtcagcgcggcctcgggagcggatatcgacaaagttatctttgacgccatgcatgcgctggaagccaaacgtgaacaactgggtttaccgtcctccgacactgaaatctctgacacatgtcctccgtacgatgaagaagcccgttctctgtcggtggtcataaaaaaccgtaacggcctgcatgtacgtccggcctcccggctggtttataccttatcgacatttaatgccgatatgttgctggagaaaaacggcaaatgcgttacaccggagagtattaaccagattgcgttactacaagttcgctataacgatacgctgcgcctgattgcgaaaggaccagaagctgaagaggcactgatcgctttccgtcagctggctgaagataactttggtgaaacggaggaagttgctccacctactctgcgtcccgttccgcctgtttcgggtaaagccttttattatcaacctgttttatgtacggtacaggcaaaatcaaccctgaccgtggaagaagaacaagaacgattacgccaggccattgacttcacgttattagatctgatgacgttaacagcgaaagcagaaaccagtgggcttgacgatattgccgcaatcttttctggtcaccatacactgttagatgatccggaactgcaggcggcggcaagcgaactccttcagcatgaacattgcacggcggaatatgcctggcagcaagttcttaaagaacttagccagcaataccaacagctggatgatgaatatctacaggctcgctatatcgatgtggacgatcttctgcatcgcaccctggtccacctgacccaaacgaaagaagaactcccgcagtttaactcgccaactattctactggcggagaacatttatccctccacagtactgcaactggatccagcggttgtaaaaggtatctgccttagcgccggaagtccgctatcccacagtgccctaatcgcccgtgaactgggaattggctggatttgccagcagggtgagaaactgtatgcgatacaaccagaagaaacgctaacgctggacgttaaaacgcaacgtttcaaccgtcagggttaa

SEQ ID NO: 2952 - DNA, 1698 bp, Escherichia coli
atgaaatcccccgcaccttctcgcccgcaaaaaatggcgttaattccagcctgcatctttttgtgtttcgctgcgctatcggtgcaggcagaagaaacatcggtaacaccacaaccgcctgatattttattagggccgctgtttaatgatgtgcaaaacgccaaactttttccggaccaaaaaacctttgccgatgccgtgccgaacagcgatccgctgatgatccttgctgattatcggatgcagcaaaaccagagcggatttgatctacgccatttcgttaacgtcaatttcaccctgccgaaagagggcgagaaatatgttccgccagaggggcaatcactgcgcgaacatattgacggactttggccggtattaacgcgttctaccgaaaacaccgaaaaatgggattctctattaccgctgccaaaaccttatgtcgtgcccggcggacgttttcgcgaggtatattactgggacagttacttcaccatgttaggacttgccgaaagcggtcactgggataaagtcgcggatatggtagccaattttgctcatgaaatagacacttacggtcatattcccaacggcaaccgcagttactatttaagccgctcgcagccgcccttctttgccctgatggtagagttactggcgcagcatgaaggcgacgccgcgttgaaacaatacctgccgcaaatgcaaaaagaatatgcttactggatggacggtgttgaaaacctgcaagccggacaacaggaaaaacgcgttgtaaaacttcaggatggtacccttctcaaccgctactgggacgatcgcgatacgccacgaccagagtcatgggtggaagatattgccactgccaaaagcaatccgaatcgacctgccactgaaatttaccgcgacctgcgctctgccgctgcgtctggctgggatttcagctcgcgctggatggacaatccgcagcagttaaacaccttacgcacaaccagcatcgtaccggtcgatctgaacagcttgatgttcaaaatggaaaaaatcctctcccgcgccagcaaagctgccggagataacgcgatggcaaaccagtacgaaacgctggcaaatgcccgtcaaaaagggatcgaaaaatacctgtggaacgatcaacaaggctggtatgccgattacgacctgaaaagtcataaagtgcgcaatcagttaaccgcggccgccctgttcccgctgtacgtcaatgcggcagcgaaagatcgcgccagcaaaatggcgacggcgacgaaaacacatctgctgcaacccggcggcctgaacaccacgtcggtgaaaagtgggcaacaatgggatgcgccaaacggctgggcaccgttgcagtgggtcgcgacagaaggattacaaaactacgggcaaaaagaggtagcgatggacattagctggcacttcctgaccaatgttcagcacacctatgaccgggagaaaaagctggtggaaaaatatgatgtcagcaccaccggaacagggggcggcggtggcgaatatccattacaggatggctttggctggaccaatggcgtgacgctgaaaatgctggatttgatctgcccgaaagagcaaccgtgtgacaatgttccgacgacgcgtccactcagtgaatcaacaacacagccgctaaaacaaaaagaggcggaacctacgccttaa

SEQ ID NO: 2953 - DNA, 1023 bp, Escherichia coli
atgtcactaaccagacggaggtttacacagattcttgcgtcgacattgttcctgcatcatctgccgtcctttgcacaatcagtcaaattctgggcctcactgacgcttcccgaagcccaaaacattacacgcatcgtcagcgcaggcgcgcccgccgatttactattgctggctgtcgcgccagaaaaaatggtcggtttttcctcttttgattttgcccgtcaggcattaattccattgccagagcacattcgccagttccccaggctgggacgactcgccgggcgcgccagcacactctcgctggaagggcttatggcgttacatcccgatttggtcgttgattgcggcaatacggatgaaacctggatctcccaggcacggcaggttagcgaacagacacaaataccctggttattgcttaacgggaaactggaacaatcagcagaacagttaacaacgcttggcaaaacgttaggcgaagagcaccgcgccgcagaacaagccaatctcgccagccgcttcgttggtgaagctcaggcattcgccacctcacccgccgctaatctcagcttttatgctgcgcgcggtcctcgagggctggaaacgggcttacagggttcgttgcataccgaggcggcggaattattaggtttgcacaacgtcgcgcaaatagccgatcgccacggtctgacacaggtttccatggaaaatctcctgcgctggcagccggatattattctggttcaggaggccgttactgcagattttattcgtcgtgatcctctctggcagggcgtgaaagcggttgcggaacaacgcatcttatttttaagtggcctgccctttggctggctggatgccccgccgggaatcaaccgtcttctgggattacgcagacttcacgcctggctggatcccgccatcaatcgccagtttaaaagtgacatgcagcattacgcccaactgttctggcattgttcactcagtgacgccgactatcaaaaattggtggcgagctaa

SEQ ID NO: 2954 - DNA, 981 bp, Escherichia coli
atgagaaccgtaaacggatgtattttgctgctggcagctatcagtatcacttttgccgccgtaagtggggcttatcatctcgatatgcagcaactgctggcgctcattcttcgtcaagaaaatgttcctgtgcaagaacaaattgtcttctggcaaatccgcgtgccgcgtattcttgctgcgctgtttctgggcgcggcgctggcaggggccggaaccacctatcagggaatgttccgtaatcccttagtgtcaccggatattttaggcgtctccgccggtgccggacttggtgcctgcgcggcaatcctgtggggattatccattgtttacatccagctgtacgcattttgcggcgggctgatggtggtcgcgggcgtctggttgattacgcgtcgggtgacccgccacgatccgatcttaaccctggtgctggtaggcattgcgttaggaacgttgtgcggagcggggatatcgctaataaaaacgctggccgatccttacacccagttaccgtcaattaccttctggttgctgggggggctgtccaccgtgaccttacgcgatctctgctatgctgcaccgatcattctcataggctccttgcccctgttttttctccgctggcgcatgaatttactcacgctttccgacgacgaagcccgttcgctgggactgaacgtgacacgtctgcgctttggattgattgtctgcgccacactcatcaccgccagcacggtagcaatagcaggcataattgattgggtcggcctggtcgttccgcacattgcccgcttgttgaccggtcataaccatcagcagctgttgcccatggcaatgtgtactggcgcgattctgctcctgcttaccgatacgctggcacgcagcattggaacaacagaaatcccacttggcattctgaccgcttttgttggcgcaccgtttttcctgtttttgttgttacgcggaggtcgccagtga

SEQ ID NO: 2955 - DNA, 759 bp, Escherichia coli
gtgactttgcttgccgtccgtcatgcgtctctgggttactcccgccatccggtgctacgcgacgtgtccttcaccctgtcgcaaggaacaatttgttgtctgttaggagtcaatggttgcggcaaaaccacactcatgcgctccattcttggcgttataccgttattaaaaggcgagatcttactggatagcctccctgtgcagacactcagccatcgccagcgcgcgcaggctattgcctgggtgccgcaggcgcacgacggcatttttgcttttagtgtgctggatatggtgttgatgggcctggcccccaccataggcgctttttccgttcccggtaagcaagaacgcctgaaagcaacggagcaactggaaaagctgggcattttgcatctggcgacacgacgctggaatacgcttagcggcggtgaacgtcagctggctttaatcgcccgtgcactcgtccagcaaccgcgcttgttattactggatgagcctgcctccagcctcgatttcggtcatcagatccaacttctggacacgctggcgcagctcaaaaataacggcatgacaatgttaatgtcgactcatcatccgctccatgcaaacgccattgccgacagcattatccaggtagagccagatggacgagtaacacaaggcttaccgaccgaacagttaacaacgaaaaaactggctgccctgtaccgggtttctgccgaccagattcaccatcacctctctgcaattaagcactaa

SEQ ID NO: 2956 - DNA, 813 bp, Escherichia coli
atgctcattgacgatattgattttgcagacctttaccttcagcaactcaggctggcccatcgcacagaaaaaacgccggatcactgggatcaacgggcggaaaaaatggcggaaaattgcgcctcgcctacggacagctacctgcaacaactgacctcaaaaattgacctgcaaggcgcgcaaaccttattcgatatgggctgcggaccgggtaccgtatcgctggcgctggcggacaaactcacgacgatttatggcgttgattacagtcaggggatgctgaacgttgccgcccgtcgcgccgccgcgctaaaggcagacaatgtccactggatccagcgcgcctgggaagaggactggagtgacctgccacgctgcgatattgccgtggcttcccgctccactctggtggctgatatgcgccaggcaatgagcaaactgaataatcaggcacggcttcgcgtctatacgactcatctggtcagcacctcgttcgtctctccagccattcagcgggcggctggtcgggaagtgatcgaattacccaactatatctttgcactcaacgtcctgtatcagatgggaatttatgctcacgttgattttatccgtggacaaaattgccaacaggataacagcacctgggaacgttttgagcagaacgtcagctggagtctgggcgcgcttaacgacgatgagcgtgagcggttatatcgctggtatcaacaacaagatgctcgtgccctcgcccctgccagccgcgactgggcgctcatctggtgggatagcgtaccgcaggagacactgcgatga

SEQ ID NO: 2957 - DNA, 855 bp, Escherichia coli
atgattttcctttctcaggcacaaatcgatgcgttacttctggaagatatccagggcggtgacctgaccacgcgagcattaaatattggacaccagcatggctatatagagttttttctccgtcagggcggctgcgtcagcggaatttctgtcgcgtgtaagatgttaactacgctgggattaactattgatgacgcggtcagcgacggttcacaagcgaacgcgggtcagcggctaatccgtgcgcaaggtaatgccgcagcacttcatcagggatggaaggcagtccagaatgtgctggagtggagttgcggtgtttctgattatctcgctcaaatgctggcgttacttcgtgaacgttaccctgatggcaatatcgcctgcacccgaaaagcaattccgggcacccgcttactggcctcgcaggcaattctggctgccggaggactgattcatcgtgccggatgtgcggaaaccatattattgtttgccaaccaccgccattttcttcatgacaatcaggactggtcaggcgcaatcaatcagttacgtcgccacgcacccgagaagaaaatagttgttgaagccgacacgccgaaagaggcaatcgccgcgttacgcgcgcaaccagacgtacttcagctcgacaaatttagtccgcaacaggcaactgaaattgcgcaaatagcaccgtcgctggctccccactgcacgctggctctgaccggcggaattaatctgacaacactcaaaaattacctcgactgcggcattcgcctttttattacctccgcgccttattacgcggcacctgctgacattaaagtcagtctgcaacccgcagcctctatttaa

SEQ ID NO: 2958 - DNA, 1971 bp, Escherichia coli
atgagactcaaaaaacgttatctctgcacagtattatcacttgcctttacccagcagtccgtagcggctcaggagagcgacacgctgaccgtatggtccagtccggtatcatcaacgacgaccaccgttctcgatcaacccaccatgaaggccctggataaacagaatgtcgctcaggcattaagtgtcgtccccggcgtggtgctgcaaaagtcaggtagccgcaacgaagaacaggtcaaagttcgtggctttgatagtcgtcaggtgccggtctatttcgacggtgtgcccatttatgttccctatgacggcaacctcgatctggcgcggattctgaccaacaatttgggggcagttgaagtttccaaaggatattcgtcgctgcttcaggggcctaatcagatgggcggagccattaatatcaccacccagaagccgactaaaccgctggaaaccagtctgggatatcgtcagggatggagccgtagccaggacaatgcctacgatatgcatgcttcatttgccgccagcagcgatctggggtatttgcaagtcagcggtagccagctaaagcaggattttctcggcctgccgcatggtgtaaataatgatattgcaggcaaacacggcaagatgattaattcatcggctgatgataaacgcggcattgtgaagctcggttttacaccacgcgaaaacgatgaatacacattgacttacattaagcaggatggtgaaaaagataacccgccatacagtggaaatagtggtcagaaatcacgctactggcagtggccagagtatgacaaagaaagtttttattatcagggaacgacccaactaaacgatcgttttaccctgaaaagtcggctgtatcacgacacctttgaaaatacgctaatgatgtacaactcgctggctgatttgaaaaataaaaaaggcagctacagccattattccgattacagcgacggtgccgggttacaactggcagccgatgtgcgtgaaaacgatctgctgtcgtttgccgttaactggaaagatgacgtacaccgggaaaaaggtgcgccgcacgccgcttacgatcgctatgaagatcgtacctggtcgctcgccagtgaatatcaatgggctgctgccgataatgtcgatgtcgtggctggaatcagctatgactggcgcgatagcgtagaagcgaaaaaacatgagaaagatggcagtatcacccattatgacgacaacaatcagtcagcttttaactggcaggtgatggggaaataccactttgccaatgaagacacgctggcgctttcgtactatgaccgcacacgctttccgacgctgaaagaacgctataccacgtccaaacctgcgtataaccagatagcgattgttaacccgcagctcaagccggaacgcgcgcgcggggtggatttaacctggaatggtgccttcacgcacgactggggatttgaggtcagcgtttactataaccgggtgagtgatgccatcctctcgcacaatatcgatgccgataccattcaaaatcagaacagcggcacggtggattacagcggtctggatgccggtattaaggggaaaatcagcaatatactggatgtaggattgagctacgccctgatccacgctgatgccaaacgtaaagacatcggcaagataaccgatctgccaacgcagacaatgaccgcatggatgactctcaaaccgtgggagccgttaagcgtaacgctgtcggaagaggcgcgttcctccagctacagcaacagtgacggttcacaaaaagccgccggttttgcggtgacccacattcgagccgattacaccttaggtcatggcttcagcgttaatgcgtcggtcaataacctgtttgataccaaatatgcctacagtgaagggtttattgaagaaggtcgcaatttctgggctggtatcgagtatacgttctga

SEQ ID NO: 2959 - DNA, 255 bp, Escherichia coli
atgggaattattgcctggattatttttggcctgatagccggtattatcgccaagctaatcatgccggggcgtgatggtggtggatttttcctgacctgtattcttgggatagtcggtgcggtggtcggcggctggctggcgaccatgtttggcattggcggctccatcagcggttttaatttgcacagcttcctggtggcggtggtgggcgctatcctggtgctgggcgtattccgcctcctgcgaagagaataa

SEQ ID NO: 2960 - DNA, 735 bp, Escherichia coli
gtgagtcattaccatgagcagttcctgaaacaaaatccgttagccgtcctgggcgtgttacgcgatttgcacaaagccgcaattcctttgcgtatcagctggaatggcgggcagctgatcagcaaaatactggccataactccggataaactggtgctggatttcggcagccaggccgaagacaacatcgccgtgctaaaggcgcagcacattaccattaccgccgaaactcagggtgcgaaagtcgagtttactgttgaacaactacagcagagtgaatacttgcagcttccggcatttattaccgtaccgcctcccaccttatggtttgtacaacgacgccgatatttccgcatcaccgccccactccatccgccttatttttgccagaccaaactggcggataacagtacgttacgtttccgcctgtatgatttgtcgttaggcggcatgggcgcattactggaaacagcaaagcctgccgaattacacgaaggcatgcgcttcgctcagattgaagtcaacatggggcaatggggtgtttttcactttgacgcccagttaatctccatcagcgagcgcaaagtgattgatggcaaaaatgaaaccatcaccactccccgtctgagcttccgttttcttaacgtcagcccgacggtggagcggcaattacagcggattattttctctctcgagcgagaagcccggaaaaaagcggacaatgtgcgcgactga

SEQ ID NO: 2961 - DNA, 612 bp, Escherichia coli
gtgaaattgagatggtttgcctttttgattgtgttattagcgggttgttcatcaaagcatgactatacgaacccgccgtggaacgcgaaagttccggtgcaacgtgcgatgcagtggatgccaataagccagaaagccggtgcagcctggggcgtcgatccacaattgatcacggcgattatcgctatcgaatcgggtggtaatccgaacgcggtgagtaaatcgaatgccattggtttgatgcagataaaagcttcaacctccggacgtgatgtatatcgtcgtatgggctggagcggtgagccgacgaccagcgagctgaaaaatccggagcgtaatatttcaatgggggcggcttacctgaatattctggaaaccggcccgctggcaggcattgaagatccgaaggtactgcaatatgcgctggtggtgtcatacgctaacggggcaggtgcgctgctacggactttctcgtcagatcggaaaaaggcgatcagcaaaatcaacgatctggatgctgatgagttcctcgatcacgtagcgcgaaatcatcctgcgccgcaggctccgcgctatatctacaaacttgagcaggcactggacgcgatgtaa

SEQ ID NO: 2962 - DNA, 915 bp, Escherichia coli
atgtctctgtttcacttaattgccccatcgggttactgcattaaacagcacgccgcgctgcgtggtatccagcgccttaccgacgcggggcatcaggtcaataacgtcgaggttattgcccgtcgttgtgagcgttttgcgggtacggaaacggagcgtctggaagatctcaattctcttgccagactgactacccccaacaccatcgtgctgtctgtacgcggcggttacggtgccagtcgtttactggcagatattgactggcaggcactggtggctcgccaacaacatgacccgttactcatttgcggacatagcgattttaccgccattcagtgcggtcttctggcgcaaggcaatgtcatcacctttagcggccccatgctggtagcaaactttggcgcggatgaactaaatgcctttaccgagcaccacttctggctggcgttacgcaataaaacgttcaccattgaatggcaaggggaaggcccgacatgtcagaccgaaggcacgctgtggggaggcaatcttgcgatgctgatttcactgattggtacaccgtggatgccaaaaattgagaacggtattctggtgctggaagatattaacgagcaccctttccgcgtcgaacgtatgctgttgcagctctatcatgctggaattttgccacgtcagaaggcgattattctcggtagctttagcggcagcacgcctaatgattatgacgcaggttacaacctggagtcagtgtacgcgtttttgcgttcccgcctgtcgattccactcattaccggcctcgattttggtcatgaacaacgcacggttacactgccgttgggcgcacatgccattcttaataacacccaggaaggcacccagttgacgattagcggtcatcctgttcttaaaatgtaa

SEQ ID NO: 2963 - DNA, 1737 bp, Escherichia coli
ttggatgccacaacaataattagccttttcatcttaggatccatccttgtcaccagcagtatattacttagttcattttcttcccgtcttggcattcccattctggttatttttctggcgatcggcatgctggcgggggttgatggcgtcggcggtatcccgtttgataattaccccttcgcctacatggtaagtaacctggcgctggcgattattttgctcgacggcgggatgcgtactcaggccagttcctttcgtgtggcgttaggaccggcactgtcgctggcgacgctgggcgtgcttatcacctctggtttaaccggcatgatggcggcgtggctgtttaatcttgatttgattgaaggattattaatcggcgctatcgtcggctccaccgatgctgcagcggtcttttctctgctgggtggtaaggggcttaacgaacgtgttggctcgacgctggaaattgaatccggcagtaatgatccaatggcggtctttctgacgattaccctgattgcgatgatccagcaacatgaaagcagtgtcagttggatgttcgtggtcgatattctgcagcaatttggcctcgggattgtcatcgggcttggcggtggttatttactgctgcaaatgattaatcgcatcgccctgcccaccggattatatccattgctggcattaagcggcggtattttaatttttgctttaaccacggcgctggaaggcagcggtattctggctgtttatctgtgcggttttctgctgggtaatcggccgattcgcaaccgctacggcatcctgcaaaatttcgacggcctcgcctggctggcgcaaatcgccatgttcctggtgctggggctattggttaacccaagcgatctgctgcctattgccattccggcgctcattttgtccgcatggatgattttcttcgcccgtcctctttcggtatttgccggattgctaccgttccgtggcttcaatctgcgtgagcgcgtgtttatcagctgggtaggattacgcggcgcggtgccgattattctggctgtgttcccgatgatggcggggctggagaatgcgcgactgttctttaatgtcgccttctttgtggtcctggtttcactgctattgcagggaacatcactctcgtgggcggcgaaaaaagccaaagtggtcgttccgccagtgggacgtccggtgtcacgcgttggcctggatattcatccggaaaatccgtgggagcagtttgtttatcaattgagtgccgataaatggtgcgtgggcgcggcactgcgtgatttgcatatgccaaaagagacgcgtattgcggcactgtttcgtgataaccagttgcttcatcccaccggcagcacccgactgcgcgaaggcgatgtgttgtgtgtaattggtcgggaacgcgatctcccggcgctcggtaaactgttcagccagtcgccgccggtcgcgctggatcaacgcttctttggtgacttcattctcgaagccagcgccaaatatgctgatgtggcgctgatatatggcctggaagacgggcgagaatatcgcgataagcagcaaacgctgggtgaaatcgtccagcagttgttaggcgcagcaccggttgtcggtgaccaggtagagtttgccgggatgatctggacggtggccgagaaagaagataatgaagtgttgaagattggtgttcgggtagcggaggaagaagccgaatcttaa

SEQ ID NO: 2964 - DNA, 1071 bp, Escherichia coli
atgacccgtccgatacaggccagcctcgatctgcaggcattaaaacagaatctgtccattgtccgccaggccgcgccgcgcgcgcgcgtctggtcggtggtaaaagcgaacgcttacgggcacggtattgagcgtatctggagcgcgatcggggctaccgatggctttgcattgcttaacctggaagaggcaataacgttacgtgagcgcggctggaaaggaccgatcctgatgctggaaggatttttccatgctcaggatctggagatttatgaccagcaccgcctgaccacctgcgtacacagcaactggcagctcaaagcactgcaaaatgcgcggctaaaagcaccgttggatatttatcttaaagtgaacagtggaatgaatcggttgggcttccagcccgatcgcgtgcttaccgtctggcagcagttgcgggcgatggcgaatgttggcgaaatgaccctgatgtcacattttgccgaagcggaacatcctgatggaatttccggcgcgatggcgcgtattgagcaggcggcggaagggctggagtgtcggcgttcgttgtccaattcggcggcgactctgtggcacccggaagcgcattttgactgggttcggcctggcattattttgtatggcgcttcgccgtccggtcagtggcgtgatatcgccaataccggattacgtccggtgatgacgctaagcagtgagattattggtgtccagacgctaaaagcgggcgagcgtgtgggctacggcggtcgctatactgcgcgcgatgaacagcgaatcggcattgtcgccgcaggatacgccgacggttatccgcgccacgcgcctaccggtacccctgttttagtggacggcgttcgcaccatgacggtggggacagtctcgatggatatgctggcggtcgatttaacgccttgcccgcaagcgggtattggtacgccagttgagctgtggggcaaggagatcaaaattgatgatgtcgccgccgctgccggaacggtaggctatgagttgatgtgcgcgctggcgttacgcgtcccggttgtgacggtgtaa

SEQ ID NO: 2965 - DNA, 1299 bp, Escherichia coli
atgcgagttgtcatactgggaagtggtgtggtaggcgttgccagcgcctggtacttaaatcaggcaggacatgaggtcaccgtcattgatcgggagccgggggccgccctggaaaccagtgccgcgaatgcagggcaaatctcccccggatatgctgcaccgtgggcggcaccaggtgtgcctttaaaagcgattaaatggatgttccagcgccatgcgccgctggcggttcgtctcgacggtacgcagttccagttgaaatggatgtggcaaatgttacgtaactgcgacaccagccactatatggaaaacaaagggcggatggtgcgtctggcggaatacagccgtgattgcctgaaagcattgcgcgccgaaaccaatattcagtatgaagggcgtcagggtgggacgctgcaactgttccgtaccgaacaacagtatgaaaacgcgacccgcgatatcgccgtgctggaagatgccggcgtaccgtatcagctgctggaatccagccgcctggcggaagtggagcccgcgctggcagaagtggcgcacaaactgacgggcggcctgcaactgcccaatgatgaaaccggagactgccagctgtttacccagaatctggcgcggatggcggagcaggcgggggttaaattccgctttaatacgcccgttgaccaactgctttgcgacggcgagcaaatctacggcgtgaagtgtggtgatgaagtgattaaggccgatgcgtatgtgatggcgtttggttcttactcgacggcgatgctcaaaggcattgttgatattccggtgtatccgctgaaaggctactcgctgactattccgattgcgcaggaagatggtgcgccggtgtctactatccttgatgaaacctacaaaatcgccattacccgtttcgataaccgcattcgtgttggcggaatggcggaaattgttggctttaacaccgagctgttgcaaccgcgtcgtgaaacgctggagatggtggttcgcgatctctatccacgcggcggtcatgttgagcaggcgactttttggactggcctgcgcccgatgacgccagacggcacgccggttgtcgggcgtacacgctttaaaaatctgtggctgaataccggtcacggcacgctcggctggacgatggcttgcggttccggtcagttgttaagcgatctgctctcggggcgcacgccagcgatcccgtatgaagatctaagcgtagcgcgctacagccgtggatttacgccattacgcccgggccatttacatggcgcacacagctaa

SEQ ID NO: 2966 - DNA, 1533 bp, Escherichia coli
atggcgacgatcgattctatgaataaggacaccacacgtttgagcgatggacccgactggacgttcgacctgctggatgtttatctggcagagatagaccgggtggcgaaactctaccggctggatacctacccgcaccagattgaagtgataacctcagaacagatgatggatgcctactccagcgtcggcatgccaattaactatccgcactggtcattcggtaaaaagtttatcgagactgaacggctgtataagcacggtcagcaaggactggcctatgaaatcgtcattaactctaacccgtgtatcgcttacctgatggaagagaacaccattaccatgcaagcgctggtgatggctcatgcctgctatgggcataactctttcttcaaaaacaattacttattccgtagctggaccgacgccagttcgattgtcgattatctgatttttgcccgtaaatatattaccgagtgcgaagagcgttatggcgttgatgaagtagaacggcttctggactcgtgccacgcgctgatgaactacggcgtggaccggtacaaacgcccgcaaaaaatctcgctgcaagaagagaaagcccggcagaagagtcgcgaagagtatctgcaaagtcaggtcaatatgctctggcgtaccctgccgaagcgcgaggaagagaaaacggttgctgaagcgcgccgctatccgtccgaaccacaagaaaacctgctctattttatggagaaaaatgcgccactgctggaatcatggcagcgtgaaatcctgcgtattgtgcgtaaggtgagccagtatttttatccgcaaaaacagactcaggtgatgaacgaaggctgggcgaccttctggcactacaccatccttaaccatctgtatgatgaagggaaagtaacggaacgttttatgctggagtttttgcacagccacaccaatgtggtcttccagccgccctataacagcccgtggtacagcggcatcaacccgtatgccctcgggtttgccatgttccaggatattaaacggatttgtcagtcaccaacggaagaagacaaatactggttcccggatatcgccggttccgactggctggaaacgctgcatttcgcgatgcgtgatttcaaagatgagagttttatcagccagttcctgtcaccgaaagtgatgcgtgatttccgcttcttcaccgtgctggatgatgatcggcataattatctggagatttccgctattcataatgaagaaggttatcgggaaatccgtaaccggttatcgtcgcaatataacttaagtaatctggagccgaatattcagatctggaacgtggatttgcgcggcgaccgttcgctgacgctgcgttacattccacataatcgcgcaccgctggatcgggggcgcaaagaagtgctgaagcatgtgcatcgcctgtggggatttgatgtgatgctggaacagcaaaacgaagacggcagcgtcgagttgctggaacgttgcccgccgagaatgggaaatctgtaa

SEQ ID NO: 2967 - DNA, 720 bp, Escherichia coli
atggtcattaaggcgcaaagcccggcgggtttcgcggaagagtacattattgaaagtatctggaataaccgcttccctcccgggactattttgcccgcagaacgtgaactttcagaattaattggcgtaacgcgtactacgttacgtgaagtgttacaacgtctggcacgagatggctggttgaccattcaacacggcaagccgacgaaggtgaataatttctgggaaacctctggtttaaatatccttgaaacactggcgcgactggaccacgaaagtgtgccgcaacttattgataatttgctgtcggtgcgtaccaatatttcaactatttttattcgcaccgcgtttcgtcaacatcccgataaagcgcaggaagtgctggcaaccgctaatgaagtggccgatcacgccgacgcctttgccgagctggattacaacattttccgcggcctggcgtttgcttccggcaacccgatttacggtctgatccttaacgggatgaaagggctgtatacgcgcattggtcgtcactatttcgccaatccggaagcgcgcagtctggcgctgggcttctatcacaaactgtcggcgttgtgcagtgaaggcgcacacgatcaggtatatgaaacagtgcgtcgctatgggcatgagagtggcgagatttggcaccggatgcagaaaaatctgccgggtgatttagccattcagggacgataa

SEQ ID NO: 2968 - DNA, 1542 bp, Escherichia coli
atggagatctcctggggccgcgcactatggcgcaattttttgggccagtcccccgactggtacaaactcgccctcatcattttcttaatcgtaaatccgttaattttcctcatcagccctttcgtcgctggctggttgctggtagcggaatttattttcactctggcgatggccctgaaatgctacccgctgctccccggtggtctgttggctatcgaagcggtattcatcggcatgaccagcgcggaacatgttcgtgaagaagtggcggcaaatcttgaagtcttgctgttactgatgtttatggtggcgggtatctattttatgaaacagctgttgttgttcatatttacccgtttgctgttaagtattcgctccaaaatgctgctgtcgctctctttttgcgtggcggcggcgttcctctccgcgttcctcgatgccttaaccgtcgtggcggtggtgatcagcgttgcagtcggtttttatggtatttatcaccgcgtagcctcttcccgtactgaagataccgacctgcaagacgatagtcatatcgacaagcattacaaagtggttctggaacagttccgtggctttctgcgtagtctgatgatgcatgccggtgtcggcaccgcattaggcggcgtgatgaccatggtgggcgaaccacaaaacctgatcatcgctaaagcggctggctggcattttggcgatttcttcctgcgcatgtcgccggtgaccgtcccggttctgatttgtggcctgttaacctgcctgctggtagagaagctgcgttggtttggctacggtgaaacgctgccggagaaagtccgcgaagtgctgcaacagtttgacgatcaaagccgtctccagcgtacacgtcaggacaaaattcgtctgattgtgcaggcgattatcggcgtctggctggtcaccgcgctggcactacatctggcagaagtcggtttgattggtttgtcggtcattattctggcgacatcattgaccggtgttaccgatgaacatgctatcggtaaagccttcaccgaatctctgccattcaccgcactgttgacggtgtttttctcagtagtcgcggtgattatcgaccaacaactgttttcgccgattattcagtttgtgttgcaggcatctgaacatgctcagctgtcgttgttctatattttcaacggtctgctgtcatccatttcggataacgtcttcgtggggacgatttatatcaacgaagcgaaagcggcaatgaaaagtagcgctatcacgttgaagcaatatgagctgctggcggtcgccattaataccggtaccaatctgccctccgtcgctacgccgaacggtcaggctgcgttcctgttcctgctgacctctgcactcgcgccattgattcgtctctcttatggccgcatggtgtggatggccctgccttacaccctcgtcctgacactcgtcgggctgctctgcgtcgagtttacgcttgctcctgtaaccgaatggtttatgcaaatgggctggatagcaacgctttga

SEQ ID NO: 2969 - DNA, 531 bp, Escherichia coli
atgttgcgatttttgaaccaatgttcacaaggccggggtgcatggctgttgatggcgtttactgctctggcactggaactgacggcgctgtggttccagcatgtgatgttactgaaaccttgcgtgctctgtatttatgaacgctgcgcgttattcggcgttctgggtgctgcgctgattggcgcgatcgccccgaaaactccgctgcgttatgtagcgatggttatctggttgtatagtgcgttccgcggtgtgcagttaacttacgagcacaccatgcttcagctctatccttcgccgtttgcgacctgtgattttatggctcgtttcccggaatggctgccgctggataaatgggtgccgcaagtgtttgtcgcctctggcgattgcgccgagcgtcagtgggaatttttaggtctggaaatgccgcagtggctgctcggtatttttatcgcttacctgattgtcgcggtgctggtggtgatttcccagccatttaaagcgaaaaaacgtgacctgttcggtcgctaa

SEQ ID NO: 2970 - DNA, 1269 bp, Escherichia coli
atgtttgccctctgtgatgtaaacgcgttttatgccagctgtgagacggtgtttcgccctgatttatggggtaaaccggtggttgtgctatcgaataatgacggttgcgttatcgcccgaaacgctgaggcaaaggcgctgggcgttaaaatgggcgatccctggttcaaacaaaaagatctgtttcgtcgctgtggcgtggtttgctttagcagcaattatgagctttacgcagacatgagtaatcgggtgatgtcgacgctggaagaactatcgccccgcgtcgagatttacagtattgatgaggcattctgcgatctgacaggtgtgcataattgtcgcgatctgactgattttggcagagaaattcgcgcaacggtgctacaacgtacccatcttactgttggtgtggggatcgcccagaccaaaacgctggctaagcttgccaattatgcggcaaaaaaatggcagcggcagacgggcggggtggtggatttatcaaatctggaacgccagcgtaaattaatgtctgctctccccgtggatgaagtctgggggattggacggcggatcagcaaaaaactggacgcgatggggatcaaaaccgttctcgatttggcggattcagatatccggtttatccgtaaacattttaatgtcgtgctcgaaagaacggtgcgtgaactgcgcggtgaaccctgtttgcaactggaagagtttgcaccgacgaagcaggaaattatctgttcccgctcgtttggtgaacgcatcacggattatccgtcgatgcggcaggccatttgtagttacgctgcccgggcggcggaaaaacttcgcagcgagcatcaatattgtcggtttatctccacgtttattaagacgtcaccatttgcgttcaatgaaccttattacggcaatagcgcatcggtaaaactgctgacgcccactcaggacagcagggatatcattaacgccgctacgcgatctctggatgccatctggcaagcgggccatcgctaccaaaaagcgggcgtgatgctgggggatttcttcagtcagggagtcgcgcagctcaatttattcgatgacaacgcaccgcgccccgggagtgagcaattgatggcggtaatggatacgctgaatgctaaagagggcagaggaacactctattttgccgggcaggggatccagcaacaatggcagatgaagcgtgccatgctttcaccatgttatacaacgcgaagttctgatttactgcgggtcaaataa

SEQ ID NO: 2971 - DNA, 420 bp, Escherichia coli
atgttgtttatcaagcctgcggatctccgcgaaattgtgacttttccgctatttagcgatcttgttcagtgtggctttccttcaccggccgcagattacgttgaacagcgcatcgatctgaatcaactgttgatccagcatcccagcgcgacttatttcgtcaaagcaagtggtgattctatgattgatggtgggattagtgacggtgatttactgattgtcgatagcgctattaccgccagccatggtgatattgtcatcgctgctgttgacggtgagtttacggtgaaaaaattgcaactacgcccgacggtacagcttactcctatgaacagtgcgtactcgcccattaccatcagtagcgaagatacgctggatgtctttggtgtggtgatccacgtcgttaaggcgatgcgctga

SEQ ID NO: 2972 - DNA, 447 bp, Escherichia coli
atgagcgatgtacctttctggcaaagtaaaaccctggacgaaatgagcgatgcggaatgggagtcgttgtgtgatggttgcggtcagtgttgcctgcataaactgatggatgaagacaccgacgaaatctacttcactaacgtcgcctgtcgccagctcaatattaaaacctgtcaatgtcggaactacgaacgtcgtttcgagtttgaacccgactgcattaaattaacccgtgaaaatctgccaacattcgaatggctgccaatgacctgcgcttatcgtttgctggcggaaggtaaaggtttacctgcgtggcatccgctacttactggttcgaaagcggcaatgcatggtgaacgtatctctgtgcgtcatatcgcagtaaaagaatcagaagtgattgactggcaggatcatatcttaaataaacctgactgggcgcagtga

SEQ ID NO: 2973 - DNA, 660 bp, Escherichia coli
atgtatcaacatcacaactggcaaggtgcgctgctggattatccggtgagtaaagtagtctgtgttggcagtaactatgccaaacatattaaagagatgggcagcgcagtacccgaagagccagtgctgtttattaaaccagaaacggcactgtgcgatctgcggcagccattggcgatcccatccggtttcggttcagttcatcatgaagtcgaactggcggtgttgattggcgcgacgctgcgtcaggctacggaagagcatgtccgcaaagccattgccggttacggcgtggcgctcgatctgacattgcgtgatgttcagggaaaaatgaagaaagccgggcagccgtgggaaaaggccaaagcgtttgataactcttgtccgctttccgggtttattcccgcggcggagtttaccggcgacccgcaaaatacaacgctgggcctgagcgtaaacggcgagcaacgccagcaaggtacgactgcggacatgatccataaaatcgttccgctgatcgcttatatgagcaagttttttaccctcaaggccggtgacgttgtgctgacaggcacgcctgatggtgtcggcccgttgcaaagcggtgatgagctgacagtcactttcgatgggcattctttgacaactcgcgttttgtaa

SEQ ID NO: 2974 - DNA, 294 bp, Escherichia coli
atgttttgtgtgatttatcgaagcagcaagcgtgaccagacctatttatatgtcgaaaaaaaagacgatttttcgcgtgttcctgaggaactgatgaaaggttttggtcagcctcagttagcgatgattcttccgctggatgggcggaagaaactggtcaatgccgatattgaaaaggttaaacaggcattaaccgagcaaggttactatttgcagttaccgccaccacccgaagatttgctgaagcaacatctttccgtcatggggcagaaaacagacgacacgaacaaataa

SEQ ID NO: 2975 - DNA, 402 bp, Escherichia coli
atgaaaattaagggcatcagtaaggctgtattgttgcttgcactgctaacctccacgagctttgctgcgggtaagaatgtcaatgttgagttcagaaaaggccatagcagcgctcagtactccggcgaaataaagggatacgattacgatacatataccttctatgccaaaaaaggtcagaaagtgcacgtgagtatctctaatgaaggcgctgatacttacctcttcgggccaggaatcgatgattctgttgatttatccagatattccccagaactcgatagtcacggacaatactcactccctgcttctggcaaatatgagctgcgagtgctgcaaacccgaaacgacgcccgtaaaaacaaaactaaaaaatataacgtcgatattcaaattaagtaa

SEQ ID NO: 2976 - DNA, 369 bp, Escherichia coli
atgaatatgatgcgtattttttatatcggattgtcaggtgtggggatgatgttctcatcaatggcgtctggaaatgacgctggcggacttcaatctccggcgtgcggcgttgtttgcgacccgtatatttgtgttaactcagatggcatttccccagagttaacaaggaaatatctcggcgaaaaagccgctgaaaacttacaatcagtacaaggttacgatcccagcgaatttacattctctaacggtgtattttgcgatgttaaagaaaaattatgtcgtgatgatcgttattttggtgtgaatggtaagcggagtggaaaaatcaatcaaaccaccacaaagatgttatttatgtgtcgtgagtga

SEQ ID NO: 2977 - DNA, 696 bp, Escherichia coli
atgtcaaacacgccaatcgagcttaaaggcagtagcttcactttatctgtggttcatctgcatgaggcagaacctaaggttattcatcaggcgctggaagacaaaatcgctcaggcccccgcatttttaaaacatgcccccgttgtactcaacgtcagtgcactggaagacccggtaaactggtcggcgatgcataaggcggtttcggcaactggtttgcgggttattggcgtaagtggctgcaaagatgcgcaacttaaagccgaaattgaaaagatggggctgcctatcctgacggaaggaaaggaaaaagcgccgcgtccagctcccgcaccgcaggctccagcgcaaaatacaacgccggtcacaaaaacgcgtttaattgataccccagtgcgttccggtcagcgtatttatgctccacaatgtgatctgattgttacaagccacgttagcgcaggggccgaattgattgccgatggtaacattcatgtctatggcatgatgcgcggtcgtgcgctggcaggggcaagtggtgaccgggaaacgcaaatattttgtacgaacctgatggcggaactggtgtccatcgcaggtgaatactggctgagtgatcaaatcccagcagaattttatggcaaagcggcacgactgcagttagtcgaaaacgctttgaccgttcaaccgttaaattga

SEQ ID NO: 2978 - DNA, 813 bp, Escherichia coli
atggcacgcattattgttgttacttcgggcaaagggggtgttggtaagacaacctccagcgcggccatcgccactggtttggcccagaagggaaagaaaactgtcgtgatagattttgatatcggcctgcgtaatctcgacctgattatgggttgtgaacgccgggtcgtttacgatttcgtcaacgtcattcagggcgatgcaacgctaaaccaggcgttaattaaagataaacgtactgaaaatctctatattcttccggcatcgcaaactcgcgataaagatgccctcacccgtgaaggggtcgccaaagttcttgatgatctgaaagcgatggattttgaatttatcgtttgtgactccccggcagggattgaaaccggtgcgttaatggcactctattttgcagacgaagccattattaccaccaacccggaagtctcctcagtacgcgactctgaccgtattttaggcattctggcgtcgaaatcacgccgcgcagaaaatggcgaagagccgattaaagagcacctgctgttaacgcgctataacccaggccgcgtaagcagaggtgacatgctgagcatggaagatgtgctggagatcctgcgcatcaaactcgtcggcgtgatcccagaggatcaatcagtattgcgcgcctctaaccagggtgaaccggtcattctcgacattaacgccgatgcgggtaaagcctacgcagataccgtagaacgtctgttgggagaagaacgtcctttccgcttcattgaagaagagaagaaaggcttcctcaaacgcttgttcggaggataa

SEQ ID NO: 2979 - DNA, 267 bp, Escherichia coli
atggcattactcgatttctttctctcgcggaagaaaaacacagccaacattgcaaaagaacggttgcagattattgttgctgaacgccgtcgcagcgatgcagaaccgcattatctgccgcagttgcgtaaagatattcttgaggtcatttgtaaatatgtacaaattgatcctgagatggtaaccgtacagcttgagcaaaaagatggcgatatttctattcttgagctgaacgtgaccttaccggaagcagaagagctgaaataa

SEQ ID NO: 2980 - DNA, 285 bp, Escherichia coli
atggcggatatgaatcgcaccacgaaaggtgcattgctaggcgcaggcgttggtttacttactggcaatggtgttaatggcgtactgaaaggtgcagctgttggcgctggtgttggtgcagtaacagaaaaaggccgcgacggtaaaaatgcgcgtaaaggtgcaaaagtgggtgccgccgttggtgctgtcactggcgttctgaccggcaatggcctcgaaggggcgattaaaggtgccgtgattggcggtacgggtggtgcaattctgggtaaaatgaaataa

SEQ ID NO: 2981 - DNA, 330 bp, Escherichia coli
atgaaaaaatttgctttactggcgggtctgtttgttttcgcaccaatgacctgggcgcaggactacaatattaagaacggtttgccatcagaaacctatattacttgcgcagaagccaacgaaatggcaaaaactgacagcgcacaggttgcagaaattgttgcggtaatgggtaatgccagcgttgccagccgtgatttaaaaattgagcaatctccggaactgagcaccaaagtggtagaaaaactgaatcaggtttgcgctaaagatccgcaaatgctgttgatcacggcaattgatgacaccatgcgtgctatcggcaaaaaataa

SEQ ID NO: 2982 - DNA, 528 bp, Escherichia coli
atgcgtctgaacgatcgtgcaggtgaaacgcgttacatcgatcctgtaactgaacaggagcgttcaagccgattttggctatgtcaaattggcgggcataatgcctggcgtgacagcaacggacagttgagaacgacctcggcacaggccatctggatgggcgtcgatcataatgtgcacacggaagccaatggctcacgtattgagaatgacgcaaataacaatatccagacccgacttggtttccacacctttattcgtactcaggagaaaaacagcggtccgcacggtgacgactttgaaccttttgttgaaatgaacgggatccataacagtaaagattttgctgtctcaataaacggtgtgaaagttgaacaagccggggcgcgtaatctgggggaaattaaacatggcgtaaatggcaatctgaatccggcggccagcgtctggggtaatgtgggtgtgcagctgggtgataatggctacaatgacaccgcggtgatggtgggcctgaaatataggttctga

SEQ ID NO: 2983 - DNA, 363 bp, Escherichia coli
gtggaaaataacaccagtcttgaaaccacagataaaacgaacattgttacctatgggaaaaatgcagtaggagttcttgcatgttcaagtcctggagagtctcgaacatgtgtcgatgctgtagatgatgaagtttgtgattctaacagttacgaagttattagccgtgctgatttaaaaatgaatggtggttccataacaactaatggtattaatagctatggtgcttatgctaatgggaaaaaagcatatattaatttagattatgtggtacttgaaactgtggctgatggaagttatgcagttgctattcgacaaggtaacattgatataaaaaagttctattacaacaaatggcactaa

SEQ ID NO: 2984 - DNA, 180 bp, Escherichia coli
atgaaactgaaaaaactcccctggttcagtttaggacttattgctctggcggtgggtaatgcatatgcaacacaattgttggataattatagtataatttcctatataaccgatgaagaatcaccgattgaaatcaaaaataatacttctacaagtaatggggagtatctaatcacttaa

SEQ ID NO: 2985 - DNA, 681 bp, Escherichia coli
gtgttagcccgctggaaacaacctcacggtggatatatatcacccgcggcatttattccacttgctgaaaaatgcggattaatcgttccgcttacgcaaagcctgatgaatcaggttgccagacagatgaacgctatcgcgagtaaactgccggaaggttttcatattgggattaattttagcgcctcgcatattatttcgccgacgtttgtcgacgagtgcttaaattaccgtgacagttttacccgccgcgatttaaaccttgttctggaagtcaccgagcgtgagccattaaatgttgatgaaagtctggttcagcggttgaacattctgcatgaaaatggttttgtcatcgcgctggatgatttcggtactggttactcagggctttcttatctgcatgacctgcatattgattatatcaaaattgatcacagtttcgttggccgcgtcaacgcagacccagcatcaacccgaattctggattgtgtattggatctggcgcgtaaactttcgatcagtatcgtcgctgaaggtgtcgaaacgagagaacaatttgactatctgaaccaaaataatatcacatttcagcagggttattatttctataaacctgttacatacatcgacctggtcaaaattatcctttctaaaccgaaggtgaaggttgtggttgagtga

SEQ ID NO: 2986 - DNA, 249 bp, Escherichia coli
atgaataattcaatcccagagagatttatttttcaatgtgctttgtttaaaaatctcgagagggaggtgttcatgacacatggatatgttgatagtcatattattgctcaggctttacgcttgcgtttaaaagatgagaccagtgttattctttctgatctctatctgcaaatcttgcagcacattgaaatgcataagactacactaacggatatcattattaatgacagggaatccgtgctctcttaa

SEQ ID NO: 2987 - DNA, 267 bp, Escherichia coli
atgcttgaagatactactattcataatgcaatatctgataaagcgttatcaagttactttcgtagttcaggtaatttgttagaagaagagtctgctgtgttagggcaggctgtgaccaatttaatgctttcaggcgataatgttaataataaaaatattatcttaagtctgatacactccctggaaacaacaagtgatattctcaaagctgatgtgattagaaaaacactggaaatcgtgttgcgatacacagctgatgatatgtaa

SEQ ID NO: 2988 - DNA, 237 bp, Escherichia coli
atgcatcaaaattcagtgacttcagattctgcaggagcaatcactcgttactttgcaaaagctaacttgcctactcagcaggaaactctcggggaaattgtgactgagattttgaaagatggacgtaatctgagtcgaaagtcgctttgtgccaaacttctttgccggttggaacaagcgacaggggaagaggaacagaaacattataatgcactaattgggttgctttttgaataa

SEQ ID NO: 2989 - DNA, 1212 bp, Escherichia coli
atgcttaccacccttatttatcgtagccatatacgtgacgccgaacctgtcaaaaaaatcgaagaaatggtttcgatagcaaatcgcaggaacatgcggtctgacgtaacagggatcttactgtttaatggttctcattttttccagcttctggaaggtccggaagaacaggttcaaatgatatatcgggccatatgccaggatccacggcactataatattgttgaactgttgtgcgattacgcgcctgctcgccgttttggcaaagcaggaatggaattatttgatttacgcctgcacgagcgagatgacgttttacaggccgtattcgacaaaggcacatcaaaatttcagctaacttatgatgacagagcgctacaattttttcgtacttttgtccttgcaactgaacaatcaacctatttcgagattcctgctgaagactcctggctttttatcgctgacggatctgataaagaacttgattcttgtaccctttcatcaaatataaacgaccactttgcctttcatcctattgtcgaccctttatcgcggcggataatcgcttttgaagccattgtgcaaaaaaatgaagacagcccgtcagctatagcggttgggcagcgtaaagaaggggaaatctacacagcggatctcaaaagtaaggcgcttgcattcgcgatggcacacgcacttaagctcggtgataaaatgatttcaatcaatctattacctatgaccctggttaacgagcctgacgcagtctcttttttacttgatgaaataaaggccaatgctctggtgcctgaacaaatcatcgttgaatttactgaaagtgaagtcatatctcggtttgatgagtttgccgaagcggttaaatcgctaaaggctgccggtatcagtgtagcaattgatcattttggcgcaggttttgctggtttgttactcctgtcacgcttccagcctgacagaattaaaatcagtcaggaattgattaccaatgttcataaaagcggaccacggcaggcaattattcaggcgatcatgaaatgctgtacatcacttgaaattcaagtctctgctatgggtgtggcaacaccagaagagtggatgtggcttgaatctgcaggaattgagatgtttcagggagatctgttttccaaagctaaattgaatggtatcccttcagttgcgtggccggagaaaaaataa

SEQ ID NO: 2990 - DNA, 732 bp, Escherichia coli
gtggcttattacagcattggtgatgttgctgaacgttgcgggattaatcctgtcactctccgggcctggcaacgccgctacggtttgttaaaaccacagcgcagtgaaggcggacaccgactctttgatgaagaagacatacaacgcatcgaagagattaagcgttggataagtaatggcgttcctgtaggcaaagttaaagcattactggaaactaccagccaggatacgcaagatgactggagccgcttgcaagaagagatgatgtcaattcttcgtatggctaatcctgccaaactacgcgcgagaattatttcactgggtcgagagtacccagtagatcaattgattaatcatgtttaccttcctgttcgccagcgtctcgtgcttgatcacaacacctcccgcattatgagcagtatgtttgacggcgcattaattgaatacgcagcggcctcacttttcgaaatgcgccgtaagcccggtaaagaggccattctgatggcgtggaatgttgaagagagagcacgattgtggctggaagcatggcgtttatcattgtcaggatggcacatttctgttcttgctgatcccattgaatcgccgcgcccggaactgttcccaacgcaaacattgattgtctggacaggcatggcaccaacgagaaggcaaaacgaacttttacaacactggggtgagcaaggttataaagtcatctttcatgccccctaa

SEQ ID NO: 2991 - DNA, 405 bp, Escherichia coli
atggatcaggtcgttgtttttcaaaagatgtttgagcaagtgagaaaagagcaaaacttctcctggttttattcagaattaaaacatcaccgtattgcacattacatttattatctggctacggataacatcagaattattactcacgatgacacggttttgttattaagaggaaccaggaacctgttaaaagttagtacgaccaagaacccagctaaaataaaagaggccgcattgcttcatattcgcggaaaatctacatttcgggaatactgttcaacactggcaggcgctggcgttttccggtgggttactgatgttaatcataacaaacgcagttactacgccattgataatacgcttttatatattgaagatgtagaaaataataaaccattaatctag

SEQ ID NO: 2992 - DNA, 153 bp, Escherichia coli
atgggctggactgaagccgcagacctgattgttaaaggtatggaaggcgcaatcaacgccaagaccgtaacctatgacttcgaacgtctgatggaaggcgctaaactgctgaaatgcagcgagtttggtgacgcgatcatcaaaaatatgtaa

SEQ ID NO: 2993 - DNA, 915 bp, Escherichia coli
atgcgctcaataaaaaaagtaaccatgctcttggggggcctcgcactcacctgctcgatcgcatttcaggcaagtgcaactgaaaaatttaaggtcattacaacatttaccatcatcgcggatatggccaaaaacgtggcgggagatgctgcagaagtctcatccataaccaagcctggtgcagaaattcatgagtatcagcctacccctggcgatattaaacgtgcgcagggggcacaactgattctcgccaatggtatgaatctggaattgtggttccaacgcttttaccagcatctcaatggggttccagaagtaattgtctcttcgggtgtgacgcctgtagggatcaccgaaggaccctatgagggcaaacctaacccccatgcatggatgtcgccagataatgctctgatttacgtcgataatattcgtgatgcgttgataaaatacgatccggcaaatgcacaaacctaccaacgcaatgccgatacttataaagccaagattacccaaacccttgcccccctgcgtaagcagattacggaactccctgagaatcagcgatggatggtcaccagtgaaggggctttttcttatctcgcacgcgatttggggctaaaagagctttatctgtggccgattaatgccgatcaacaaggaacaccgcagcaggtacgtaaggttgttgatatagttaagaaaaatcatatcccggcagtctttagcgagagtacgatttccgataaaccagcgcgtcaggttgcgcgtgaaaccggcgcacactacggcggtgtgctctatgtcgattccctgagcacagaaaacggcccggtaccgacgtatatcgaccttcttaaggttactaccagtacgctggtacagggaattaaagccgggaaaagggagaaataa

SEQ ID NO: 2994 - DNA, 828 bp, Escherichia coli
atgatgcaatctgcaggcattgtcgttaatgatgttgctgtcatctggcgtaacgggcacacagcactgcgcgatgcatccttcacagtaccaagtggatctattgccgctctggttggggtaaacggttccggaaaatcgacgttgtttaaagcgattatgggatttgtgcgtctgaccagcggaaagatatctgttctgggtattcccacgcgacaggcgttacagaaaaacctggttgcctacgtccctcagtcagaagaggttgactggtcatttcctgtactggtggaagatgtggtgatgatgggccgctatgggcatatgggtatgttgcgtatcgccaaaaagagggatcgtcaaattgtcaccgatgcgctagaacgtgtcgatatggtgaattttcgccatcgacaaatcggcgagctttccggtggacaaaagaaacgcgtctttctggcgagagcgattgcacagcagggtgatgtgatcctgctggatgaaccttttactggcgttgatgtgaaaaccgaagccaaaatcatcagcctgttgagggagttacgcgcggaaggcaaaacgatgcttgtctcaacgcacaatctcggatccgtcacgacattttgcgattatacggtcatggtcaaaggcaccgtcctggcaagcgggccgacagacaccacttttacaaccgagaacctggagctggcttttagcggcgtactgcgccatgtcacacttaacggctcggaagaaagcattattactgacgatgaacgcccttttgtggctcatcgaccgtcagcggtgcagagggaagaaagatga

SEQ ID NO: 2995 - DNA, 858 bp, Escherichia coli
atgaacgtgctactggaacccttcagctatgaatatatgctcaatgcgatgtgggtctcggcgatggtcggcggtctctgcgctttcctgtcatgctatctgatgctaaaaggctggtcgctgattggcgatgcgttgtcgcactctattgtcccgggtgttgcgggggcatatatgctggggcttccgttttctctgggagccttcttttccggcggactggctgcgggcagcatgctgtttcttaaccaacgcacccgcttaaaagaagatgccatcatcggcctgatcttctcgtccttttttggcctggggctgtttatggtgtcattgaacccgacatctgtgaacattcagaccatcgtcctgggcaatattctggcaatcgatccggcggatatcctgcaactcactatcattggcattctctcgatcatcgtgctttttttcaaatggaaagatcttatggtgacctttttcgacgagaatcacgcccgtgctattggattgcatccgggcagattaaaactcctcttcttcaccctgctgtcggtttcgaccgttgcggcgctgcaaacggttggtgcctttctggtgatctgtctggtggtgactcccggagcaacagcatggttgttaaccgatcgttttccccgcctgctcatgattgctgtaactattggcagtgtaaccagtttcctcggcgcgtgggtcagttactttctggacggcgcgacaggtggaatcatcgtggtggcgcagacactgctgtttcttttagcatttgtctttgcgcccacccatgggcttttggcaaatcgtcggcgtgcgcataaggcgctggaggatcgctcatga

SEQ ID NO: 2996 - DNA, 858 bp, Escherichia coli
atgatggcattattactggagccactgcagttcacctttatgagtcacgcactgctgatttcactggtagtttccataccctgtgcgctgctgtcggtctttctggtcctgaaaggctgggcactgatgggtgacgcgatgagtcatgcggtttttcctggcatcgtgcttgcctggattctggggttacctttggctacaggggcattcgtcgccggagtattctgcgcggtggcgacgggatacctgaaagacaacagccgaatcaagcaagatacagtgatggggattgttttttctggcatgtttgccgcaggtctgattttgtatattgcagtcaaaccagacgtacatcttgaccatattcttttcggcgacatgctcgggataaccatcggcgatataatccagacggtgattattgctgggctggttacacttgttattagcgtaaaatggcgagattttttgctgttcagctttgattatcaacaggcgcaggtaagcggtttgcatacgagatggctgcattatgggctgctgtgcatggtctctctgaccattgtggcgacgctgaaagcggtaggtatcattctctccatttctctgctcattgcgcctggcgccattgcggtactcctgacacaacgcttttatattgcgctcctactggcgactggcatatcggtaatagtgtcaatgaccggtgtctggctgtccttttttatcgacagcgcaccagctccgacgattgtcgtcttattcgcggtcgcgttcatcatgacgtttaccgttaccagcatcaacgcacgcacaaagggaaacgcccatacacaggatctgttatcacccaattag

SEQ ID NO: 2997 - DNA, 294 bp, Escherichia coli
atggatataagccccttacttcatgcactttgtgctgtggctgcgcagatactggttggtctttttaccggaaactgggcttacggagcgatagccggttgtacgttcttcattgcgcgtgaacatacccaggcagaatatcgctggattgaaatgttcgggcatggcaagcgaatgaatatgccgtggtggggcggttttgatccgcgtgcttgggatgtggcaagcctgatggattttgctgtgccggtggtggcgtgtctgctggtctggctgttggttaatcgtgggtga

SEQ ID NO: 2998 - DNA, 279 bp, Escherichia coli
atgaaagatttaactttgaagtttcatgacaaactgcagtttaaggccttcctgtcatctcttggctgggcggaagatgaagacctccagaataaactgttagttgatgaaattggtttcacctacacagaaacaggggtaacagaagagggagaacctgtctgtatccggaatgatggttattttgtcaacattcgcattcttgatgacttgtttgatgtttctgtattctctgattatgtcgtggagctggaaacaccgcttcgggaatggagctga

SEQ ID NO: 2999 - DNA, 2061 bp, Escherichia coli
atggcagtacagatttcaggcgtgctgaaagacggtgcaggaaaaccgatacagaactgcaccattcagctcaaagcaaaacgtaacagcaccacggttgtggtgaacacggtggcctcagaaaatccggatgaagccggacgttacagcatggatgtcgagtatggccagtacagcgttatcctgctggttgaaggttttccgccttcacatgccgggaccatcaccgtgtatgaggattctaagccggggacgctgaatgattttctgggggccatgacggaagaggatgtcatgccggaggcattgcgtcgttttgaggtaatggtggaggatgtggcacgcaacgctgaagccgcctctcagagcgcagcggcagcaaagaaatcagaaacagcagcggcatcgtccaggaacgcggcgaaaacatcagagacgaatgcaggtaacagcgcgaaagcggcagcttcttcaaaaacagccgcacaaaacgcagcaacagcggcagaacgttcagagacaaatgcccgtgcgtcagaagaagcctccgcagacagtgaagaggcttcccgccgtaatgcagagtcagccgctgaaaatgccggagtcgccaccacaaaagcgcgggaggctgcagcagacgcaacaaaggccgggcagaaaaaggatgaggctctgtcggcagcgacacgagctgaaaaggcggcagaccgcgcagaagccgcagcggaagtgactgcagagccctatgcgaatatagtgccgccgctgcctgatgtgtggataccgtttaacgattcactggatatgattgcgggtttttctccgggctataaaaaaatagctattggtgacgatgtggttcaggtcgccagtgataaacaggttaatttcagtcgcgcatcaacggcaacatatatcaacaaatctggcgaactgaaaacggcggaaattaatgagccgcgatttgagtgtgatggcctgcttattgagggacaaagaacgaactacatgctcaattcggaaagtccagccagctgggggaagtcatcaaacatggatgtgcccgaaaccgggacggatagttttggttttacttatggaaagtttgtctgcaacgattctctggttgggcaaacttcggctattaatatggcatcaattgctgcaacaaagtcagttgatgtctcaggcgataacaagtacgtgacaacctcatgccgttttaaaacagaacgacaggtaaggttacgtatacggtttgataagtatgatggtagtgcaacaacttttcttggcgatgcgtacattgatacgcaaacgcttgaaattaatatgacaggtggtgctgccggcagaattacggcacgagtcaggaaggataagaccacgggctggatttttgcagaggcaacgattcaggcaattgatggtgagttaaaaataggctctcagatacagtattctcctgagcagggtggggcaacagtatctggtgactatatttatcttgccaccccacaagtagagaatgggccgtgtgtaccatcatttattatttcaggaggcagcgcaacgacaagagccagtgatttggttagtatccccaccagaaataatctttataagttaccatttacttttttacttgagattcataaaaactgggatattgcaccaaacgccgcaccccgcgtgtgggatatagcagcagccaataccgggcaatcagcaattgcagcaatcaacagaggtagtggtaagttatatatgagtctgtcaaacccttcaggctcgtatgttaatagcgcagcgacagatgtatttgcagagaaaaccacatttggatgtattgcaaaagctgatggtcactttcatgtggtgacaaatggtaaagcggttaatgaagtttattgtgaatataatggcgtgaccgctgataaaaatatccgatttggagggcagacgaatactggagaacgacatctgtttggccatattcgcaatttccgcatatggcataaagaattaaatgacaggcaattaaaagaggtcgtatga

SEQ ID NO: 3000 - DNA, 1803 bp, Escherichia coli
gtggaggtccagtccgtcaccgacggcgtgaaggtgaaagtgagccgtgttcctgacggcgttgctgaatacagcgtgtgggggctgaagctgccgacgctgcgccagcgcctgttccgctgtgtgagtatccgggagaacgatgacggtacgtatgccatcaccgccgtgcagcatgtaccggaaaaagaagccatcgtggataacggggcgcactttgacggtgaccagagcggcacggtgaatggtgccactccgccagcagtgcaacacctgaccgcagaagtcaccgcagacagcggggaataccaggtgctggcgcgctgggatacgccgaaggtggtgaagggcgtgagctttatgcttcgcctgaccgtggcagcggatgacggcagtgagcggctggtcagcacggcccggacgacggaaaccacataccgcttcaggcagctggctctgggaaattacagtctgacagtccgggcggcaaatgcccgggggcagcagggcgatcctgcatcggtatcgttccggattgccgcaccggcagcgccatcgcggattgagctgacgccgggctattttcagataaccgccacgccccatcttgccgtttatgatccgactgtacagtttgagttctggttctcggaaacgcggattaccgatatcaggcaggttgaaaccacagcccgctatcttggcacggcgctgtactggatagctgccagtatcaatatcaagccgggccatgattattatttttatatccgcagtgtgaatactgttggcaaatcggcattcgtggaggctgtcggtcgggcgagcgatgatgcggaaggttacctggattttttcaaaggccagataaccgaatcccatctcggcaaggagctgctggaaaaagtcgagctgacggaggataacgccagcaaactggaggagttctcgaaagagtggaaagacgccaacgataaatggaatgccatgtggggtgtcaaaattgagcagaccgaagacggcaaacattatgtcgcggggcttggcctcagcatggaggatacagaggaaggcaaactgagccagttcctggttgccgctaaccgtatcgcgtttattgacccggcaaacgggaatgaaacgccgatgtttgtggcgcagggcaaccagatattcatgaacgaagtgttcctgaagtatctgacggctcccaccattaccagcggcggcaatccgccggtattttccctgacaccggacgggcggctgacggcgaaaaatgccgatatcagcggtaacgtgaatgcgaactccgggacgctcaataatgtcacgattaaccagaactgtcggattatgggaaaactgtctgccaaccagattgaaggtgatattgtcaaaacggtgggaaaagcctttccgagaaatggcagttatgccagcggtacaataacggtcactgtgtacgatgaccaggcttttgaccgtcagatagtaatcccacccgttctgtttcgcggtggtaagcatgaaaacttcaacagcaacaaccaacagtcatactggtattcaacctgtaagctgcaggtactgaagaacggacaggaaatctttcagcaacccgcgacggatgtcagcagggtattttcatcagtcattgatatgcctgccggacacggccatgtcaccctgactttcaatgtttcttcatatggtgctaataactggacgccaacgaccagtatcagcgaccttcttgttgttgtgatgaagaaatctacagccggtatcagtatcagttga

SEQ ID NO: 3001 - DNA, 528 bp, Escherichia coli
atggcaggaaaaacgatgataccgttactcgcctttgctgcatggagtggcaccggaaaaacaacgctgctgaaaaaattgatcccggcattatgcgccagagggatccgtccggggctgattaagcatacgcaccatgatatggatgttgataaaccgggcaaagatagctatgagctgcgcaaggctggcgcggcgcaaaccatcgttgccagccaacagcgatgggccttgatgacagaaacaccagacgaagaagagctggatctacattttctcgcaagtcgaatggatacctcaaagctggatttgattctggtcgaagggtttaagcatgaagagatcgcaaagattgtgctgtttcgcgatggagccggacatcgaccggaagaattagtgatagacaggcatgttattgctgtagccagtgatgtgccgcttaatcttgatgtcgcgttactggatattaatgatgttgaggggctggctgattttgtggtggagtggatgcaaaagcaggacggataa

SEQ ID NO: 3002 - DNA, 585 bp, Escherichia coli
gtgaatctgatgacgacgataacaggcgttgtgctggcgggcggtaaagccagacgaatgggcggcgtagataaaggattgcttgaattaaacggcaaaccattatggcaacatgtcgctgacgcgcttatgacgcagctttctcacgtcgtggttaatgctaatcgtcatcaggaaatctatcaggtaagcggtctgaaagtgattgaagattcactggcggattaccctggccctctggcaggaatgctttcagtaatgcagcaggaatcgggtgagtggtttttgttttgcccgtgcgatacgccttacattccccatgatttagcctcccggcttaatcatcagcgcaaagatgcgcctgtcgtgtgggtccacgacggtgaacgcgatcacccgactattgctctggtaaaccgcgcaattgagcctttattactggaatatctgcaagcaggagaacgccgggttatggcatttatgcgtctggctggcggtcatgcggttgatttcagcgatcgtaaagaggcatttataaacgtgaatacgccagaggagcttgcccgatggcaggaaaaacgatga

SEQ ID NO: 3003 - DNA, 270 bp, Escherichia coli
atgaaatgtaaacgtctgaatgaagttattgaactcctccagccagcctggcaaaaagagccagaccttaacctgctgcaatttttgcagaaactggcgaaagagtcaggttttgacggcgaactggcggatttgacggatgacattctgatctatcacctgaaaatgcgtgattccgcgaaagatgcggtgatcccgggtttgcagaaagattatgaagaagatttcaaaacggcactattacgcgcacgtggcgtaattaaagagtaa

SEQ ID NO: 3004 - DNA, 987 bp, Escherichia coli
atgaacaacagcgcttttactttccagacactacacccggataccatcatggacgctctgtttgagcatgggattcgggtggattccggtcttaccccgcttaacagctatgaaaaccgtgtctatcaatttcaggacgaagatcgtcgacgttttgtcgtcaaattttatcgccctgaacgttggacagccgatcaaatcctcgaagaacatcaatttgcgttgcagctggttaacgatgaagttccggtcgcagcacctgtggcctttaatggtcagactttattgaaccatcagggattttatttcgctgtttttccaagcgtcggtggtcgccagttcgaagctgataatatcgatcagatggaagcggttgggcgttatttagggcgtatgcaccagacggggcgcaaacagctttttatccatcgcccgaccatcggtttgaatgaatatctcattgagccacgcaagctgtttgaggacgctacactgataccttccgggttgaaagcggcattcctgaaagcgacagatgagctgattgccgccgttacagcacactggcgggaagatttcaccgttctgcggctacatggagactgccacgccgggaatattctctggcgcgatggtccaatgtttgttgatctggatgatgcacgtaatggtccagccgttcaggatttgtggatgttgctcaatggtgataaagccgagcagcggatgcaactggaaactattattgaggcttatgaagaatttagcgagttcgacaccgctgaaatcggactgattgaacctttacgcgccatgcgtttggtttattatcttgcctggctaatgcggcgttgggctgatcccgcgttcccgaaaaatttcccgtggttaaccggggaagattactggctacgacagacggtgacttttatagaacaggcaaaagttctacaagaaccccctttgcaattaacacctatgtattaa

SEQ ID NO: 3005 - DNA, 627 bp, Escherichia coli
atgaaaaagatttggctggcgctggctggtttagttttagcgtttagcgcatcggcggcgcagtatgaagatggtaaacagtacactaccctggaaaaacaagttgctggcgcgccgcaagtgctggagtttttctctttcttttgcccgcactgctatcagtttgaagaagttctgcatatttctgataacgtgaagaaaaaactgccggaaggcgtgaagatgactaaataccacgtcaacttcatggggggtgacctgggcaaagagctgactcaggcatgggctgtggcgatggcgctgggcgtggaagacaaagtcacagttccgctgtttgaaggcgtacaaaaaacccagaccattcgttcagcatctgatatccgcgatgtatttatcaacgcaggtattaaaggtgaagagtacgacgcggcgtggaacagcttcgtggtgaaatctctggtcgctcagcaggaaaaagctgcagctgacgtgcaattgcgtggtgttccggcgatgtttgttaacggtaaatatcagctgaatccgcagggtatggataccagcaatatggatgtttttgttcagcagtatgctgatactgtgaaatatctgtccgagaaaaaataa

SEQ ID NO: 3006 - DNA, 1431 bp, Escherichia coli
atgatacgtaagtcagctacaggtgccattgttgcgttagccgtaatctggggtggtggcacatggtacacaggtacgcaaattcagcctggtgtcgaaaagtttattaaaggttttaacgatgctaaaaagaaaggtgaacatgcctacgatatgacgttaagttataaaaattttgacaaaggcttttttaattcccgttttcaaatgcaaatgacatttgataacggtgcacccgatctcaatatcaagccaggccagaaaattgtatttgatgtggatgttgagcacggtccgttgcccatcacaatgttaatgcatggtaatgtcatcccagcactggcagcggcaaaagtgaacttagtgaataatgagctgacacaaccgctatttatcgccgcgaaaaataaatcgcccgtggaagcgacattgcgattcgcgtttggtggcccattctccacgacattagatgttgcccctgcagagtatggaaagttttcttttggtgaaggccagtttacttttaatggtgatgatagttcattgtctaacctggatattgaaggcaaagtcgaagatattgttctgcaattttcaccaatgaacaaagtaacggcgaaaagttttaccattgattctctgacacgattagaagaaaagaaatttccggttggtgaaagcgagtcgaaatttaatcaggttaatattatcaaccagggggaagtcgttgcccaaatcgatgctttcgttgcaaaaaccaggctggatcgcgttaaagacaaagattatatcaatgtcaatctgacctacgaacttgataagttaacaaaagggaatcagcaactcggtagtggtgagtggtcattgattgctgaatctattgatccctcagcggtgcgccaatttatcatccagtataacattgcgatgcagaagcagcttgctgcacaccctgagttagcaaacgatgaagttgctctgcaagaagtgaatgctgcattgttcaaagagtatttaccgttattacaaaaaagtgagccgaccattaaacaaccagtaagatggaagaacgcactcggcgaactaaatgccaatctggatatcagtattgccgaccccgccaaatcttcatcatccacaaacaaagatattaaatcgctcaattttgatatgaagttaccgcttaatgtcgccacagaaaccgcaaaacagcttaatttatctgaagggatggatgcggaaaaagcgcaaaagcgggctgataaacaaatcagcgggatgatgacattaggtcagatgttgcagttaatcacgattgacaacaataccgcctcgctgcaactgcgttatacaccgggtaaagttttttttaacggtcaggagatgagcgaagaagaatttatgtctcgtgccggacgttttgttcattaa

SEQ ID NO: 3007 - DNA, 933 bp, Escherichia coli
atggctaaccttttgaataaattcattatgacgagaatactcgctgcgataacccttttgctgagtatcgtattgaccattttggtcactattttttgttccgtcccgatcatcattgccgggattgtaaaactattgctacctgtgccagtcatttggcgaaaggtttcgcgtttttgtgattttatgatgtattgctggtgtgaaggtctggcggtattactgcatctgaacccacacctgcaatgggaagttcacgggctggaagggttaagtaagaagaactggtatctgcttatttgtaaccaccgtagttgggcagatattgtcgtactgtgcgtgctgtttcgtaagcacattccgatgaataaatatttcctcaagcagcagctggcctgggtgccttttcttggcctggcgtgctgggcgctggatatgccgtttatgaagcgttattcccgcgcttatttattacgtcatccggagcgacgtggtaaagatgttgaaaccactcggcgttcttgtgaaaagtttcgcctgcatcccaccactattgtcaatttcgttgaaggctcccgtttcacgcaagaaaaacatcagcaaacccactccacttttcaaaacttgttgccaccaaaggcggcaggcattgcgatggcgctaaatgtactgggtaaacaattcgataaactgcttaatgttacgctgtgttatccggacaataaccgtcagccgttcttcgatatgttaagcggtaaactgacgcgaattgtcgtacatgtggatttacagcctattgccgatgagttacatggcgactacatcaatgacaaaagctttaagcgccattttcagcaatggctgaactcattgtggcaggaaaaagaccggcttctgacatcgttgatgtcatcacagcggcaggaaaagtaa

SEQ ID NO: 3008 - DNA, 2787 bp, Escherichia coli
atggttcagatcccccaaaatccacttatccttgtagatggttcatcttatctttatcgcgcatatcacgcgtttcccccgctgactaacagcgcaggcgagccgaccggtgcgatgtatggtgtcctcaacatgctgcgcagtctgatcatgcaatataaaccgacgcatgcagcggtggtctttgacgccaagggaaaaacctttcgtgatgaactgtttgaacattacaaatcacatcgcccgccaatgccggacgatctgcgagcacaaatcgaacctctgcacgcgatggttaaagcgatgggactgccgctgctggcggtttctggcgtagaagcggacgacgttattggtactctggcgcgcgaagccgaaaaagccgggcgtccggtgctgatcagcactggcgataaagatatggcgcagctggtgacgccaaatattacgcttatcaataccatgacgaataccatcctcggaccggaagaggtggtgaataagtacggcgtgccgccagaactgatcatcgatttcctggcgctgatgggtgactcctctgataacattcctggcgtaccgggcgtcggtgaaaaaaccgcgcaggcattgctgcaaggtcttggcgggctggatacgctgtatgccgagccagaaaaaattgctgggttgagcttccgtggcgcgaaaacaatggcagcgaagctcgagcaaaacaaagaagttgcttatctctcataccagctggcaacgattaaaaccgacgttgaactggagctgacctgtgaacaactggaagtgcagccaccggcggcggaagagttgttagggctgttcaaaaagtatgagttcaaacgctggactgctgatgtcgaagcgggcaaatggctacaggctaaaggggcgaaacccgcagccaggccgcaggaaaccagtgttgcagacgaagcgccagaagtgacggcaacggtgatttcttatgacaactacgtcactatccttgatgaagaaacactgaaagcgtggattgcgaagctggaaaaagcgccggtatttgcatttgataccgaaacagacagccttgataacatctctgctaacctggtcgggctttcttttgctatcgagccaggcgtagcggcatatattccggttgctcatgattatcttgatgcgcccgatcaaatctctcgcgagcgtgcactcgagttgctaaaaccgctgctggaagatgaaaaggcgctgaaggtcgggcaaaacctgaaatacgatcgcggtattctggcgaactacggcattgaactacgtgggattgcgtttgataccatgctggagtcctacattctcaatagcgttgccggacgtcacgatatggacagcctcgcggaacgttggttgaagcacaaaaccatcacttttgaagagattgcgggtaaaggcaaaaatcaactgacctttaaccagattgccctcgaagaagccggacgttacgccgccgaagatgcagatgtcaccttgcagttgcatctgaaaatgtggccggatctgcaaaaacacaaagggccgttgaacgtcttcgagaatatcgaaatgccgctggtgccggtgctttcacgcattgaacgtaacggtgtgaagatcgatccgaaagtgctgcacaatcactctgaagagctcaccttgcgtctggctgagctggaaaagaaagctcatgaaattgcaggtgaagaatttaacctttcttccaccaagcagttacaaaccattctgtttgaaaaacagggcattaaaccactgaagaaaacgccgggtggcgccccgtcaacgtcggaagaggtactggaagaactggcgctggactatccgttgccaaaagtgattctggagtatcgtggtctggcgaagctgaaatcgacctacaccgacaagctgccgttgatgatcaacccgaaaaccgggcgtgtacatacctcttatcaccaggcagtaaccgcaacgggacgtttatcgtcaaccgatcctaacctgcaaaacattccggtgcgtaacgaagaaggtcgccgtatccgccaggcgtttattgcgccagaggattatgtgattgtctcagcggactactcgcagattgaactgcgcattatggcgcatctctcgcgtgacaaaggcttgctgaccgcattcgccgaaggaaaagatatccaccgtgcaacggcggcagaagtgtttggtttgccactggaaaccgtcaccagcgagcaacgtcgtagcgcgaaagcgatcaactttggtctgatttatggcatgagtgctttcggtctggcgcggcaattgaacattccgcgtaaagaagcgcagaagtacatggacctttacttcgaacgctaccctggcgtgctggagtatatggaacgcacccgtgctcaggcgaaagagcagggctacgttgaaacgctggacggacgccgtctgtatctgccggatatcaaatccagcaatggtgctcgtcgtgcagcggctgaacgtgcagccattaacgcgccaatgcagggaaccgccgccgacattatcaaacgggcgatgattgccgttgatgcgtggctacaggctgagcaaccgcgtgtgcgtatgatcatgcaggtacacgatgaactggtatttgaagtccataaagatgatgtcgatgccgtcgcgaagcagattcatcaactgatggaaaactgtacccgtctggatgtgccgttactggtggaagtggggagtggcgaaaactgggatcaggcgcactaa

SEQ ID NO: 3009 - DNA, 633 bp, Escherichia coli
ttgactaatttgaattatcaacagacgcattttgtgatgagtgcgcctgatattcgccacctaccttccgataccggaattgaagtggcttttgcaggccgttccaacgcaggtaaatccagcgcgctgaacacgctgactaaccagaaaagcctggctcgtacctcaaaaaccccagggcgcacccagcttatcaacctgtttgaagtggctgacggcaagcgtctggttgacttgcctgggtacggttatgcggaagtcccggaagagatgaagcgcaaatggcagcgcgcgctcggcgagtacctcgaaaaacgtcagagcctgcaaggtctggtggtgctaatggatattcgccatccgctgaaagatttggatcagcagatgattgagtgggcggtagacagcaatatcgccgtgctggtactgctgaccaaagcggacaaactggcaagcggcgcacgtaaagcgcaattgaatatggtgcgtgaagcggtgctggcgtttaacggtgatgtgcaggttgaaacgttttcttcgctgaagaaacaaggcgtggacaagctgcggcagaaactggatacctggtttagcgagatgcaacctgtagaagaaacgcaggacggcgaataa

SEQ ID NO: 3010 - DNA, 510 bp, Escherichia coli
atgaaaccatcatcttcaaactcacgcagcaaaggtcatgcaaaagcgcgtagaaaaacacgcgaggagctggatcaggaagctcgtgaccgtaagcgtcagaaaaaacgtcgtggtcatgcgccgggcagccgcgcagcgggtggtaacaccacgtcaggcagcaaaggccagaacgcaccaaaagatccacgtattggcagtaaaacccctattccattgggcgtggctgaaaaagtcaccaaacagcacaaaccgaagagtgagaaacctatgctttcaccgcaggcggagttggagttactggaaacggatgagcgtctggatgcgctgctggaacgtctggaagcaggcgaaaccctgagcgccgaagagcaatcctgggtggatgccaaactggatcgtattgatgagttgatgcagaaacttggcctctcttatgacgatgacgaagaagaggaagaagacgagaagcaagaagacatgatgcgtctgctgcggggcaactaa

SEQ ID NO: 3011 - DNA, 1374 bp, Escherichia coli
atgtctgtacagcaaatcgactgggatctggccctgatccagaaatataactattccgggccacgatacacctcgtacccgaccgcgctggagttttcagaagacttcggcgaacaggcgtttttacaagccgtggcgcgctatcctgagcgtccattatctctctacgtacatattccgttctgccataagctttgttacttctgcggttgcaataagattgttactcgccagcagcacaaggccgatcagtatctggacgcgctggagcaagaaatcgtccatcgtgcaccgctgttcgccgggcgtcacgtcagccaattgcactggggcggcggaacgccgacgtatctgaataaagcgcaaatcagccgtctgatgaagctgctgcgcgaaaacttccagttcaatgccgatgcggagatctcgatcgaagtcgatccgcgggaaatcgaactggatgtactcgatcatttacgcgccgaaggctttaatcggctgagcatgggcgtgcaggacttcaacaaagaagtgcaacgtctggttaaccgcgagcaggatgaagagttcatctttgcactgcttaaccatgcgcgtgagattggctttacctccaccaacatcgacctgatttacggcctgccgaaacagacgccggagagtttcgcctttaccctgaaacgcgtggcggagctgaaccccgatcgtctgagcgtctttaactacgcgcatttgccgaccatttttgctgctcagcgcaaaatcaaagatgctgacctgccgagtccgcagcaaaaactcgatatcctgcaggaaaccatcgccttcctgacacaatcgggctatcagtttatcggtatggatcactttgctcgcccggatgacgagctggcggtggcccagcgtgaaggcgtgctgcatcgtaacttccagggctacaccacccagggcgataccgatctgcttgggatgggcgtttccgccatcagcatgattggcgactgctacgcgcagaaccagaaagagttgaagcagtactatcagcaagtggatgaacaaggcaatgcgctgtggcgtggtattgcgctaacgcgtgatgactgtattcgccgcgatgtgattaagtcgctcatctgcaacttccgtctggattacgcccctattgagcaacagtgggatttgctcttcgctgattactttgcggaagatctcaagttgctcgccccgttagcaaaagatgggctggtggatgtggatgagaagggaatacaggtgacggcgaaaggtcgcttgctgatccgcaacatttgcatgtgctttgatacctatctgcgccagaaagcgcggatgcagcagttctctcgggtgatttaa

SEQ ID NO: 3012 - DNA, 1410 bp, Escherichia coli
atgcaacgagggatagtctgggtagtcgatgacgatagttccatccgttgggtgcttgaacgtgcgctcgctggagcgggtttaacctgtacgacatttgagaacggcgcggaagtactggaggcgctggcgagcaaaacgccggatgtgctgctttcagatatccgtatgccgggaatggacgggctggcgctgctcaagcagattaaacagcgccatccgatgcttccggtcatcattatgaccgcacattccgatctggatgctgccgtcagcgcctatcaacaaggggcgtttgattatctgcccaaaccgtttgatatcgacgaagccgtggcgctggttgagcgcgccatcagtcattatcaggaacagcagcagccgcgtaatgttcagcttaacggcccaacgaccgatatcatcggcgaagcgccagccatgcaggacgtgttccgtattatcggtcggctttcgcgttcttccattagcgtgctgatcaacggcgaatccggcactggtaaagaactggtcgctcatgccctgcatcgccacagcccgcgagccaaagcgccgtttatcgcgctcaatatggcggctatcccgaaggatttgatcgaatcagaactgtttggtcacgagaaaggcgcatttaccggcgcgaataccattcgtcaggggcgttttgaacaggctgatggcggtacattatttctcgatgaaattggcgatatgccgctggatgtgcagacgcgtttgctgcgcgtgctggcagacggtcagttttatcgcgttggcggctatgcgccggtgaaagtagatgtgcggattatcgctgccactcaccagaatcttgaacagcgggtgcaggaaggcaagttccgtgaggatctgttccaccgcctgaacgtcatccgcgttcatctgccgccgctgcgcgaacgtcgggaagatattccccgtctggcgcgccattttttacaggttgccgcgcgagagctgggcgtagaagcgaagttgctgcatccggaaaccgaagccgcgctgacgcgtctggcgtggccaggcaacgtgcgccagctggaaaacacctgtcgctggctaacggtgatggccgccgggcaggaagtgttgattcaggatttgcctggcgaactgtttgaatccaccgtagcagaaagcccttcgcacatgcagccggacagttgggcaacgctgttagcacagtgggcagacagagcgctgcgttccggtcatcaaaacctgctttccgaagcacagccagagctggaacggacgttactgaccaccgcgctgcgacatacgcaggggcataaacaggaagcggcgcggctacttggctggggccgcaacaccctgacgcgtaagttaaaagagctggggatggagtga

SEQ ID NO: 3013 - DNA, 1050 bp, Escherichia coli
atggcaacaggcacgcagcccgatgctgggcagatcctcaactcgctgattaacagtattttgttaatcgatgacaacctggcgatccattacgccaaccccgccgcgcaacaactgctcgcccaaagctcccgcaaattgtttggtacaccgttaccggaactgttgagctacttctcattaaatatcgagctgatgcaagaaagtctggaggcggggcaaggttttaccgataacgaagtgacgctggtcatcgacgggcgctcgcatatcctttctgtgacggctcagcgtatgccggacggcatgatcctgctggagatggcaccgatggataaccagcgccgcttaagtcaggaacagctacagcacgcccagcaggttgctgcccgtgatttagtgcgcggcctggcacatgagattaaaaatccgcttggcggtttacgtggcgcggcgcagctactcagcaaagcattacctgacccgtcactactcgaatataccaaagtgattatcgaacaggcggaccggctgcgaaatctggtcgaccgtctgttggggccgcagctgcccggtacgcgcattaccgaaagtattcacaaagtggctgaacgcgtggtgacgctggtgtcgatggaactgccgaacaacgtgcggttgattcgggattacgaccccagcctgccggaactggcgcacgacccggatcaaattgaacaggtcttgctgaatattgtgcgcaatgcgctacaggcgctggggccggagggtggtgaaatcattctgcgtacccgcacagcgtttcaactgaccttacacggcgagcgctatcggctggcggcgcggattgatgtggaagataacgggccgggcattccgcctcatttgcaggatacgctgttttacccgatggtcagcggccgcgaaggtggcaccgggcttggcttatccatcgcccgtaatttgattgatcagcattcaggcaaaattgaatttaccagttggccaggtcataccgagttctcggtttacctgcctatcaggaaataa

SEQ ID NO: 3014 - DNA, 1410 bp, Escherichia coli
atgtccgctgaacacgtactgacgatgctgaacgagcacgaagtgaagtttgttgatttgcgcttcaccgataccaaaggtaaagaacagcacgtcactatccctgctcatcaggtgaatgctgaattcttcgaagaaggcaaaatgtttgacggctcctcgattggcggctggaaaggcattaacgaatccgacatggtgctgatgccagacgcatccaccgcagtgattgacccattcttcgccgattctaccctgattatccgttgcgacatccttgaacctggcaccctgcaaggctatgaccgtgacccgcgctctattgcgaagcgcgccgaagattacctgcgttccactggcattgccgacaccgtactgttcgggccagaacctgaattcttcctgttcgatgacatccgtttcggatcatctatctccggttcccacgttgctatcgacgatatcgaaggcgcatggaactcctccacccaatacgaaggtggtaacaaaggtcaccgtccggcagtgaaaggcggttacttcccggttccgccggtagactctgctcaggatattcgttctgaaatgtgtctggtgatggaacagatgggtctggtggttgaagcccatcaccacgaagtagcgactgctggtcagaacgaagtggctacccgcttcaataccatgaccaaaaaagctgacgaaattcagatctacaaatatgttgtgcacaacgtagcgcaccgcttcggtaaaactgcgacctttatgccaaaaccgatgttcggtgataacggctccggtatgcactgccacatgtcgctgtctaaaaacggcgtcaacctgttcgcaggcgacaaatacgcaggtctgtctgagcaggcgctgtactatattggcggcgtaatcaaacacgcgaaagcgattaatgccctggcaaacccgaccaccaactcttacaagcgtctggtcccgggctacgaagcaccggtaatgctggcttactctgcgcgtaaccgttctgcgtctatccgtattccggtggtttcttctccgaaagcacgtcgtatcgaagtacgtttcccggacccggcggctaacccgtacctgtgctttgctgccctgctgatggccggtcttgacggtatcaagaacaagatccatccgggcgaagcgatggacaaaaacctgtatgacctgccgccggaagaagcgaaagagatcccacaggttgctggttctctggaagaagcactgaacgaactggatctggaccgcgagttcctgaaagccggtggcgtgttcactgatgaagcgatcgatgcgtacatcgctctgcgtcgcgaagaagatgaccgcgtgcgtatgactccgcatccggtagagtttgagctgtactacagcgtctaa

SEQ ID NO: 3015 - DNA, 1824 bp, Escherichia coli
gtgatcgaaaaattgcgtaatatcgccatcatcgcgcacgtagaccatggtaaaaccaccctggtagacaagctgctccaacaatccggtacgttcgattctcgtgccgaaacccaagagcgcgtgatggactccaacgatttggagaaagagcgtgggattaccatcctcgcgaaaaacaccgctatcaaatggaatgattaccgtatcaacatcgttgataccccggggcacgccgacttcggtggtgaagttgaacgtgtaatgtccatggtagactcagtgctgctggtggttgacgcatttgacggcccgatgccgcaaacgcgcttcgtaaccaaaaaagcgtttgcttacggcctgaagccgattgttgttatcaacaaagttgaccgccctggcgcgcgtcctgattgggttgtggatcaggtattcgatctgttcgttaacctcgacgcgaccgacgagcagctggacttcccgatcgtttacgcttctgcgctgaacggtatcgcgggtctggaccacgaagatatggcggaagacatgaccccgctgtaccaggcgattgttgaccacgttcctgcgccggacgttgaccttgacggtccgttccagatgcagatttctcagctcgattacaacagctatgttggcgttatcggcattggccgcatcaagcgcggtaaagtgaagccgaaccagcaggttactatcatcgatagcgaaggcaaaacccgcaacgcgaaagtcggtaaagtgctgggccacctcggtctggaacgtatcgaaaccgatctggcggaagctggcgatatcgtggcgatcacgggtcttggcgaactgaacatttctgacaccgtttgcgacacgcaaaacgttgaagcgctgccggcactctccgttgatgagccgaccgtttctatgttcttctgcgttaacacctcgccgttctgcggtaaagaaggtaagttcgtaacgtctcgtcagatcctggatcgtctgaacaaagaactggtacacaacgttgcgctgcgcgtagaagaaaccgaagacgccgatgcgttccgcgtttctggtcgtggcgaactgcacctgtctgttcttatcgaaaacatgcgtcgtgaaggtttcgaactggcggtatcccgtccgaaagtaatcttccgtgaaatcgacggtcgtaaacaagagccgtatgaaaacgtgacgctggacgttgaagaacagcatcagggttctgtgatgcaggcgctgggcgaacgtaaaggcgacctgaaaaacatgaatccagacggtaaaggccgcgtacgtctcgactacgtgatcccaagccgtggtctgattggcttccgttctgagttcatgaccatgacttccggtactggtctgctgtactccaccttcagccactacgacgacgtacgtccgggcgaagtgggtcagcgtcagaacggcgtactgatctctaacggtcagggtaaagcggtagcgttcgcgctgttcggtctgcaggaccgcggtaagctgttcctcggtcacggtgcagaagtttacgaaggtcaaattatcggtattcacagccgctctaacgacctgactgtaaactgcctgaccggtaagaaactgaccaacatgcgtgcttccggtactgacgaagccgttgttctggttccgcctatccgcatgactctggaacaagctctggagttcatcgatgatgacgaactggtagaagtgactccgacctctattcgtattcgtaaacgtcacctgacggaaaacgatcgtcgtcgcgctaaccgcgcaccgaaagacgattaa

SEQ ID NO: 3016 - DNA, 693 bp, Escherichia coli
atgaaaaatattaatgcaataattttattatcttctctgacctctgcctcggtattcgctggcgcatacgtcgaaaacagggaagcatataatctcgcctccgatcagggtgaggttatgctacgtgtgggttataacttcgatatgggcgcgggtattatgctaaccaatacctacacctttcagcgagaagatgaactcaaacatggctataatgaaattgaaggttggtatcctttatttaaacctaccgataaattaaccatccagcccggtggcttaattaatgacaagagtatcggttcgggtggtgctgtttatctggatgttaactacaaatttactccgtggtttaacctgacggtgcgtaatcgctataaccataataattacagctctacagatttgaacggcgaattggataataacgacacctatgaagttggcacctactggaactttaaaataacagaaaaattttcctatacatttgaaccacattacttcatgcgagtgaatgactttaatagtagcaacgggaaagatcatcattgggaaatcactaacaccttccgttaccgtattaatgaacactggcttccttatttcgaattgcgctggttagaccgcaacgtcgagccgtaccaccgcgagcaaaaccagattcgtatcggaacgaagtatttcttctga

SEQ ID NO: 3017 - DNA, 1404 bp, Escherichia coli
atgtctgaccataatccactgacattaaaactgaatctgcgggaaaaaatcgcctatggtatgggcgacgtcggttcgaatttaatgcttagcatcggcactctgtatctcctcaaattttataccgatgaattagggatgcctgcttactatggcgggattatctttctggtggcgaagttttttaccgcatttaccgatatgctcaccggatttttactcgactcgcggaaaaatattggacctaaaggaaaattcaggccgtttattttatacgcagcgattccggcggcgttaattgcaacgctccagtttatcgccaccacctttagtttgccggttaaaacgacgattgccaccgcactgtttatgatgtttggactttcatacagtctgatgaactgctcgtatggcgcgatgatcccggccattaccaaaaacccgaatgagcgcgcgcaactcgctgcttaccgccagggtggtgcaaccatagggctattgatctgtaccgtggcgtttattcctttgcagtcactattttctgactccaccgtcggctacgcctgcgcggcactgatgttctccattggcggctttatttttatgatgctgtgctacagaggtgtcaaagagcattatgtggacgcgacgccaaccggacataaggccagtattctcaaatcattttgcgcgatatttcgtaatccacctttgctggtattgtgcattgctaacctgtgtaccctggcggcatttaatatcaaactggcgattcaggtctattacacccagtatgtgctgaatgatattaacttattgtcgtggatgggattctttagtatgggatgcattctcatcggcgtattactggtgccactaactgtaaaatgttttggtaaaaaacaggtttatctggctggcatggtgctgtgggcggtgggggatatcctgaattattgctggggcagtaactcattcactttcgtcatgttctcttgtgtcgccttttttggcacggcctttgtaaacagcctgaactgggcactggtaccagataccgtagattatggtgaatggaaaacaggtatacgtgccgaaggttctgtttataccggttataccttctttcgtaaaatttcagccgcacttgctggcttcttacccggcattatgctgacgcaaatcggttatattcccaacatcgcgcaaagcgatgcaacattacagggtttgcgtcagctcatttttatctggccttgtgcgctggcaattattgctgcattgacgatggggttcttttacacgctcaatgagaaacggtttgcactgattattgaggaaattaaccaacgcaaaaataaagaaattgagacagaagaaaaaacggcttccgtaacgttataa

SEQ ID NO: 3018 - DNA, 1386 bp, Escherichia coli
atgagtcacatcacaacggaagatccagcaactctacgcctgccctttaaagagaaactctcttacggtatcggcgatctggcctctaacatcctactggatatcggcacgctttatcttttgaagttttataccgatgttctggggctgcctggcacctatggcggcattatctttttgatttcaaaattctttaccgcctttaccgatatgggtaccggcattatgttggattcccgacgcaagatcggtccaaaaggtaagttccgtccttttattctgtatgcgtcatttccggtcaccctgctggcgatcgccaactttgtcggcacaccgtttgatgtcaccggtaaaacggtgatggccaccatcctgtttatgctttacggactgtttttcagcatgatgaactgctcgtatggcgcgatggtccccgctattactaaaaaccccaacgaacgtgcatcgctggcagcatggcgtcagggtggcgctacattgggcctgctgctgtgtacggtgggattcgtgccggttatgaatcttatcgagggtaatcagcaacttggctatatcttcgccgccacgctgttttcactgttcggcctgctgtttatgtggatctgctattcgggcgtgaaagagcgttatgtcgaaacccaacctaccaatccggcgcaaaagcctggcttgttgcaatctttccgcgcaattgcggggaaccgcccactgttcattttgtgcattgccaacctctgtaccttaggggcgtttaacgtcaagctcgccattcaggtctattacacccagtacgtgcttaacgatcccatcctgttgtcatatatgggatttttcagcatgggctgtattttcatcggcgtgttcctgatgcctggtgcagtcagacgttttggtaagaagaaggtctatatcggcggtctgctgatctgggtgctgggcgatctgctcaactatttcttcggcggcggctcggtcagctttgtggctttctcctgcctggcgttctttggttcggcgtttgttaacagcctgaactgggcgctggtttctgacaccgtcgagtatggcgagtggcgcaccggtgtgcgttcggaaggtacggtctacaccggtttcaccttctttcgcaaagtatctcaggcgctggcaggtttcttcccaggctggatgctgacgcaaattggctatgtgccaaacgtcgcccaggctgaccacactatcgaagggttgcgccaactgatcttcatctacccaagcgcactggcagtagtcaccattgtggcaatgggttgcttctacagtctgaacgagaagatgtacgtccgcattgttgaagagatagaagcccgtaaacgcacggcgtaa

SEQ ID NO: 3019 - DNA, 2037 bp, Escherichia coli
atggatacgccacgcccacagctattagattttcaatttcatcagaataacgacagttttactctacgttttcaagaccgccttattttaatccatagcaaagataatccttgtttatggattggttcaggtatagcggatatcgatatgttccgcggtaatttcagcattaaagataaattgcaggagaaaattgcgcttaccgacgccatcgtcagccagtcaccggatggctggttaatccatttcagccgtggttctgacattagcgccacgctgaatatctctgccgacgatcatggccgtttattgctggaactacaaaacgacaaccttaaccacaaccgcatctggctgcgccttgcctcacagccggaagatcatatctacggctgcggcgaacaattctcctactttgatctgcgcggcaaaccgttcccgctgtggaccagtgaacaaggcgttggtcgcaacaaacaaacctatgtcacctggcaggccgactgcaaagagaatgcgggaggggattactactggaccttctttccacaacccacgtttgttagcacgcagaagtattactgccatgttgataacagttgctatatgaacttcgactttagcgcgccggaataccatgaactggcgctgtgggaagacaaagcaacactgcgttttgaatgtgctgatacatacatctccctgctggaaaaattaaccgcgctgctgggacgccagccagaactgcccgactggatttatgacggagtaacgctcggcattcagggcggcactgaggtgtgccagaagaaactggacaccatgcgtaacgcgggcgtgaaggtcaacggcatctgggcgcaggattggtccggtattcgtatgacctcttttggcaaacgcgtaatgtggaactggaagtggaacagcgaaaactacccgcaactggattcacgtatcaagcagtggaacaaagagggcgtacagttccttgcctatatcaacccgtatgttgccagcgataaagacctctgcgaagaagcggcaaagcgcggctatctggcaaaagatgccgccggcggcgattatctggtggagtttggcgagttctacggcggcgttgtcgatctcactaatccggaagcctacgcctggttcaaggaagtgatcaaaaagaacatgattgaactcggctgcggcggctggatggctgacttcggcgagtatctgcccaccgacacttacctgcataacggcgtcagcgccgaaattatgcataacgcctggcctgcgctgtgggcgaaatgtaactacgaagcccttgaagaaacgggcaagctcggcgagatcctcttctttatgcgcgccggttccaccggtagccaaaaatattccaccatgatgtgggcgggcgaccagaacgttgactggagtctggacgatggactggcgtctgtcgtcccggcggcgctgtcgctggcaatgaccggacatggcctgcatcacagtgatattggcggttacaccaccctgtttgagatgaagcgcagcaaagagctgctgctgcgctggtgcgatttcagcgccttcacgccgatgatgcgcacccatgaaggtaaccgtcctggcgacaactggcagtttgacggcgacgcggaaactatcgcccattttgcccgtatgaccaccgtcttcactaccctgaaaccttacctgaaagaggccgtcgcgctgaatgcgaagtccggcctgccggttatgcgccctctgttcctgcattacgaagacgatgcacagacctacaccctgaaatatcagtacctgttaggccgcgacattctggtcgccccggtacacgaagaaggtcgcagcgactggacgctctatctgccggaggataactgggtccatgcctggacgggtgaagcgttccggggcggggaagtgaccgttaatgcgcccatcggtaaaccgccggtcttttatcgcgccgatagcgaatgggcggcactgttcgcgtcgttaaaaagcatctaa

SEQ ID NO: 3020 - DNA, 876 bp, Escherichia coli
atggacttttttacgttattttcaccggatggggtcatgctggaaacaaacgtggtatgtatcgttatcgcgttaatgtttctttatacctttgtggggatatgcgcgggatttggcggtggtttaaccaccatgccgctcgtcacgttaatgctccccgtaaaaatggcaactccgctctcggtgattgtcggcaccgcgaccgccttgtacgccacctggctgtcacgtaaagaaacggattggcgatcggcaatggtactgattattttctcgtttctgggaatacccgtcggtttatatgcgctgtcgtatttacccgaccattttatgaaagtgggcttaggcggattccttatcctgtactccttttacagtatgtttattccacgcctgccgatttatgaccgtagctggatcgccgcacctatcggcgccgtggcaggagcgttaggggcagcattttcaaccaacggaccgccgatggttatctacggtatgctgcgtaacttaggcccggcggcatttcgcggcactctgaacgctttcttcaccgcaaacaacatcgcggtgatcggcgggctggcgaccagcggaattttgactgtctctatctttaaactggtgctgttttgtattcccaccatgatcctcggttcactggttggacaatatgtgcataaacgcatttcgggcaaagtgttccgtgtgatggtctttttattgctgattgcctccggttctatgttgataaaaggcgcgctgggaattcccgccgctgccgcacttcttcctccgtttaccttgttagttatactgcaactggcatttggtaaaaaagtggcggcaatccgtcgggctgaagaaagtaaataa

SEQ ID NO: 3021 - DNA, 903 bp, Escherichia coli
atgcaaatcaccaacatgcattgcagtggacagaccgtttcacttgccgcgggggattatcacgcgaccattgtgaccgtcggtgcaggtctggctgaattaacctttcagggctgtcatttagttattccgcataaacccgaagagatgccgctggcacatctgggcaaagtccttattccgtggccaaaccggatcgccaacggctgttatcgctatcaggggcaggaatatcagttacccattaatgaacatggttcaaaagccgctattcatgggctgctcgcctggcgtgactggcaaatcagcgaattaagcgccaccagcgtcacattaaccgcctttctgccacccagttacggctacccgtttatgctggcttcgcaggtggtttattcgctcaacgcccgcacgggtctttccgttgagatcgcaggccagaatatcggcactgtcgcagcgccttacggtgtgggtattcacccttatttaacctgcaacttaacatctgttgatgaatatctgttccagcttccggcaaaccaagtttatgccatcgataagcacgctaatccgacaacgcttcaccacgttgatgagctggatttaaatttcacgcaggcgaaaaaaatagccgcgacaaaaatcgaccacacctttaaaaccgctaatgatctgtgggaaatgactattacccatccacagcaggcgctttcggtgagcctctgttccgatcaaccctgggtgcaggtttatagcggtgaaaaattacaacgtcagggactggcagttgaaccaatgagttgcccgcctaacgcctttaattcaggtatcgacttattattactggaaccagggaaaacgcaccgcctgttttttaatattcacgggcagcacaattaa

SEQ ID NO: 3022 - DNA, 1242 bp, Escherichia coli
atgaaatggtttaacactttaagtcacaaccgttggctggaacaggaaaccgatcgcatctttgattttggtaaaaaatccgtagtaccgaccggatttggctggttaagcaataaagggcaaatcaaagaagagatgggcacccatctgtggatcacagctcgtatgttgcacgtttattccgttgctgcggcgatgggccgacctggcgcttactcgttggttgatcacggtatcaaagccatgaatggcgcactgcgcgataaaaaatatggcggttggtatgcctgcgtgaatgacgagggcgtggtggatgcctccaaacagggctatcaacatttctttgctctgctgggtgctgccagcgccgtcactaccggtcatccggaagcgcgcaagctgctcgattacaccattgaaattatcgagaaatacttctggagcgaagaagagcagatgtgcctggagtcctgggatgaagccttcagcaaaaccgaagagtatcgcggcggcaatgccaatatgcacgcggtggaagccttcctgattgtctatgacgtcacccatgacaaaaaatggctggatcgcgcgattcgcgtggcttccgtgattatccacgacgtcgccagaaataatcattatcgcgttaacgaacacttcgatacccagtggaatccgctgccagattacaacaaagataacccggcgcaccgcttccgcgcgttcggaggtactccgggccactggatcgaatggggccgtttaatgctgcacattcacgcggccctggaagcccgttgcgaacaaccgccagcatggctgctagaagatgccaaaggtctgtttaacgccaccgtgcgcgatgcctgggcacccgatggcgcggacgggattgtttataccgttgactgggaaggaaaaccggtggtccgcgaacgtgtgcgttggcctatcgtcgaagcgatgggtacggcctacgcgctctacaccgtcactggcgatcgccagtacgaaacctggtatcagacatggtgggactactgcatcaaatacctgatggactacgaaaatggttcatggtggcaggagctggatgcggacaataaggtcaccaccaaagtctgggacggcaaacaggatatttatcatctgctgcattgtctggtgatcccacgtatcccgttagcgccaggcctggctccggcggttgcggcgggtctgctggatattaacgcgaaataa

SEQ ID NO: 3023 - DNA, 879 bp, Escherichia coli
atgaataagtacaccatcaacgacattacgcgtgcatcgggcggttttgccatgctggctgtcgatcagcgcgaagccatgcgcatgatgtttgccgcggctggcgcacccgctccagtagccaatagcgttttaactgatttcaaagttaacgccgcgaagactctttcaccttatgcatcggcgattctggtagatcaacaattctgctaccgccaggtggttgagcaaaacgcgattgccaaaagttgcgccatgattgtcgccgccgatgagttcattcctggcaacggtattccggtagatagcgtggtcattgaccgcaaaatcaatccgctacaaatcaaacaagacggtggcaaagccttaaaactgctggtgctgtggcgtagtgatgaagatgcgcagcaacgcctggatatggtgaaagagtttaacgaaatgtgccactcacacggtctggtaagcatcattgagccagtcgtccgcccaccgcgtcgtggcgataaattcgatcgcgaacaagcaatcatcgatgcagccaaagagctgggcgacagtggcgctgatctctacaaagttgaaatgccgctttacggtaaaggtccgcaacaagagcttctcagtgcttcacaacgtctgaatgaccatatcaatatgccgtgggtgatcctctcttccggtgtcgacgaaaaactgttcccgcgtgccgtacgcgtggcaatgacagcgggtgcatcgggcttcctggctggtcgtgccgtctgggcatcggtcgtcggtttaccagacaacgagctgatgctgcgtgacgtttgcgcaccgaaattacaacaacttggcgatatcgtcgacgaaatgatggctaaacgccgttaa

SEQ ID NO: 3024 - DNA, 897 bp, Escherichia coli
atggcagcaatcgcgtttatcggtttagggcaaatgggttcgccaatggcgagcaatttattgcagcaagggcatcaactttgcgtcttcgatgtgaataccgaagccgtacagcatctggtcgacaaaggggcgactcccgctgctaacccagcgcaggccgctaaaggtgccgaatttatcattaccatgttgccgaatggcgatctggtgcgtcacgtgttgttcggtgaaaacggtgtctgtgagagcttatcttccgatgcgctggtcattgatatgtcgaccatccacccgctgcaaaccgataaattgattgctgatatgcaggccagaggcttcagcatgatggatgttccggtaggccgtacttccgcaaatgccattaccggtactctgctactgctggctggcggcactgctgaacaagttgaacgcgccacgccgatcctgatggcgatgggcagcgagttgatcaacgcgggcggtccgggcatggggatccgcgttaagcttatcaacaactacatgagcatcgcgctcaatgcgttgtcggcagaagccgccgttttgtgcgaagccctcaatcttcccttcgatgttgccgtcaaggtaatgagcggtactgccgccggtaaaggccacttcaccacttcctggccgaacaaagtcctcagcggagatctttctcccgccttcatgatcgatcttgcccataaggatcttggcatcgcccttgatgtcgccaaccagttgcatgtgccgatgccactgggggccgcctcacgggaggtttatagccaggcgcgcgcagcgggtcgcggtcgccaggactggtccgccattctggagcaggtccgtgtcagtgccgggatgactgccaaagtaaaaatgtaa

SEQ ID NO: 3025 - DNA, 897 bp, Escherichia coli
atgattcgtgttgcttgtgtaggaattaccgtgatggatcgcatctattacgtggaaggattgccgacggagagcggtaaatacgtggcgaaaaattatacggaagttggcggcgggccagcggctacagcagcagttgcggcggccagactaggtgcgcaggtcgattttattggtcgcgtcggtgacgacgacacgggcaacagcctgctggcagagctggaatcctggggtgttaacacccgttacaccaaacggtataaccaggcgaaatcttcgcaatccgccatcatggtggatgccaaaggtgagcgcatcatcattaactatcccagcccagacctgctgcctgatgcagagtggttggaggaaattgatttctctcagtgggacgtggtgctggcagatgtacgctggcacgacggcgcgaaaaaagccttcactctggcgcggcaggcgggcgtgatgaccgtgctggacggcgatattacgccgcaggatatcagcgaactggtggcgttaagcgatcatgcagctttttcagaaccgggtctggcgcgcttaacgggcgtgaaagagatggcgagtgccctaaaacaggcacaaatgctcacaaatggtcatgtctatgtgacccagggcagtgcaggctgtgactggctggagaatggcgggcgacagcatcaaccggccttcaaagttgatgtggtagataccacaggtgcgggtgatgtttttcacggcgcattggcggtggcgctggcaacaggtggggatttagcggaatcagtccgcttcgccagcggagtagcggcgttgaaatgcacgcgtcccggtggacgagccgggatccctgactgtgatcaaacccgatcttttttgtcactttttgtataa

SEQ ID NO: 3026 - DNA, 786 bp, Escherichia coli
atgagccttaccgaactaaccggtaacccgcggcacgaccaactcctcatgctgatcgccgagcgtgggtatatgaatattgatgagctggcaaatctgctggatgtctccacgcagacggtgcgccgggatattcgtaaattaagcgagcaaggactgattacgcgccatcacggtggcgcgggtcgggcttccagcgtcgttaatacggcgttcgagcagcgtgaggtttcgcaaaccgaagaaaaaaaagcgattgccgaagcggtggcagattatattcctgatggttcaacaatatttatcaccattggtacgaccgttgagcatgttgcccgggcgttacttaaccataaccatttgcggataatcaccaacagcctgcgtgtggcgcatattctttaccacaacccgcgctttgaagtgatggtgcctggcggaacgctgcgttcccataacagtgggatcattggcccttcagcggcgtcctttgtggccgattttcgcgcagattatctggtaacaagcgtaggcgcaatcgagagcgatggcgcgttgatggagtttgatgttaacgaagctaacgtggtgaaaacgatgatggcgcacgcgagaaatatcctgctggtcgccgatcacactaagtatcatgcttcggcggcggttgaaattggtaacgtggcacaggtcactgcgctctttaccgacgagctgccgcccgctgcgctaaaatcacgcttacaagacagccaaattgaaatcatccttccccaggaagacgcgtag

SEQ ID NO: 3027 - DNA, 600 bp, Escherichia coli
atgctctatatctttgatttaggtaatgtgattgtcgatatcgactttaaccgtgtgctgggggcctggagcgatttaacgcgtgttccactggctacgcttaagaagagtttccacatgggcgaggcgtttcatcagcatgagcgtggggaaattagcgacgaagcgttcgcagaggcactgtgtcatgagatggccctgccgctaagctatgagcagttctcccacggttggcaggcggtatttgttgcgctacgaccggaagtgatcgccatcatgcataaactgcgtgagcaggggcatcgcgtggtggtgctttccaatactaaccgcctgcatactaccttctggccggaggaatacccggaaatccgtgatgctgctgaccatatctatctgtcgcaagacttgggtatgcgcaaacctgaagcacgaatttatcagcatgttttgcaggcagaaggtttttcaccagacgatacggtctttttcgacgataacgccgataatatagaaggagctaatcggctaggcattactagtattctggtgaaagataaaaccaccatcccggactatttcgcgaaggtgttatgctaa

SEQ ID NO: 3028 - DNA, 873 bp, Escherichia coli
atgctaaaaaccattcaggacaaagccaggcatcgtacccgtccactatgggcctggctaaaactactctggcaacgcattgatgaggacaacatgacaaccctggcaggtaaccttgcctatgtgtcgttgctctcattagtgccgctggttgccgttgtttttgcgcttttcgccgcttttcccatgttttccgacgtcagcattcagttgcgtcactttatttttgccaactttctgcctgctactggcgatgttatccagcgatatatcgaacagtttgtcgccaattccaacaaaatgaccgccgtcggggcgtgcgggctgatcgtcacggcgttattgttgatgtactccatcgatagcgcgttgaataccatctggcgcagtaaacgagcgcgacccaaaatttactcgtttgccgtgtactggatgattttaacgctggggccgctgttggcaggggccagtctggcgatcagctcctatctgctgtctctgcgctgggcgagcgatctcaatactgtcatcgataatgtgttgcgtatttttccgctgctgttgtcgtggatctctttctggctgctgtacagcatcgttcctaccatccgtgtacctaaccgcgacgcgattgtcggcgcgtttgtcgccgcgctcctgttcgaagcaggaaagaaaggtttcgcgctttatatcaccatgttcccatcatatcagctcatttacggtgtgctggcggtgatccccattctctttgtttgggtctactggacatggtgtatcgtcttgcttggcgcggaaattactgtcactctcggggaataccgcaaattaaaacaagctgctgaacaagaagaagacgacgaaccatga

SEQ ID NO: 3029 - DNA, 438 bp, Escherichia coli
atgattgcattaattcaacgcgtaacccgtgccagcgtcaccgtggagggagaagtgacgggtgaaattggcgcgggacttttggtgttattgggtgtcgaaaaggatgacgacgaacagaaagcaaaccgtctgtgcgagcgtgtgctcggctaccgcatctttagcgatgccgaaggcaagatgaatctcaacgtgcaacaggcgggcggcagtgtactggtggtttcccagtttacccttgccgcagataccgaacgggggatgcgcccaagtttctccaaaggcgcatcaccggatcgcgcagaggcgttatatgactatttcgtcgaacgctgccgtcagcaagagatgaacacgcaaacaggacgcttcgctgcggatatgcaggtatcgctggtcaatgatggccccgtgacattctggttgcaggtatga

SEQ ID NO: 3030 - DNA, 942 bp, Escherichia coli
atgtatcaccttcgggttccacaaacagaagaagaattagagcgttactatcagtttcgctgggaaatgttgcgtaagcccctgcatcaaccaaaaggttcggaacgcgacgcgtgggatgcgatggcgcatcaccagatggtcgtcgacgagcagggtaatctggtagcggtaggccgactgtatattaatgccgacaatgaagcgtccattcgctttatggccgttcatcctgacgtgcaggacaaagggctgggaacgctgatggcgatgaccctggagtcggtagcgcgccaggaaggcgttaagcgcgtgacctgtagcgcccgtgaagacgcggtggagtttttcgccaagctggggtttgttaatcagggagaaatcaccacgccaaccaccacgccgattcgccattttctgatgattaaacccgtcgccactctggatgatattcttcatcgcggcgactggtgcgcccagctccagcaagcgtggtatgaacatatcccgttaagcgaaaaaatgggtgtgcgcattcagcaatataccgggcaaaaatttatcaccaccatgccggaaaccggcaatcagaatccgcatcacacgctgtttgccgggagtttattctcgctggctacgctcaccggttgggggcttatctggctgatgctgcgcgaacgccacctcggcggaacgattattctggcggatgcgcatatccgctatagcaaacctattagtggtaaaccccatgcggtagccgaccttggtgccttaagtggcgatctcgaccgtctggcgcgcggacgaaaagcgcgggtacaaatgcaggtcgaaatctttggcgacgagacgccgggtgcagtgtttgaaggcacgtatatcgttctgcccgcgaagccatttggcccgtatgaagagggcgggaacgaagaagagtag

SEQ ID NO: 3031 - DNA, 909 bp, Escherichia coli
atggcactggaaaaaggaattgcagagttagtcgaagagtttatcgctgcgggtcgcccctcatcgcgccaacaaagtattacgcagcgcagagagggctatatcgccagcgctgtccttgcgggtgagacagaaacgcgggtagatattcagactatcgaacttgaagggatgaccttacgaatagtgtcaccgctgaatgccccgacattactcccgacgataatttattactacggtggctgttttgttagcggcgggttcgcaactcacgacaaccagctgcgccagttagcctattacgggcaatgtcggattattgccgtccagtatcggctggcaccggaacatactttccccgccgcccatgatgatgcacaacgaggtgcagaattagtccggcaacacgccgaacgactcggcgttgataaacaacgaataactcttgccggtgacagtgcgggagggcatctggcgctggtaactgctttgcgattgaagcgtgctggcgagtggcaaccagcacaactcatcttaatttatcctatgcttgatgcgactgcgcatttcgaaagctacatacgcaatggtcacgattacatcatcacacgcgacactttactgagcggctttgagatgtacctgccaggcattgaacgcaggcatcctgaagccagccctatttggcgcaatgatttcaatggcttgccacctgtacatatcattaccgctgaatacgacccactttgcgatgaaggtgaagcgttgtatcaccgcatgacagggcaaggagtgcaatgcacctgccaacgctaccttggcgttatccacggattttttcagttaggtggtatcagtgaggctgcgcgatcggcgctacgggatgttgcctggagagcgggaaggtaa

SEQ ID NO: 3032 - DNA, 312 bp, Escherichia coli
atgctcttcatcgaaacggaaatttttactgaagatgttcaaaaactgctgaacgacgatgaattcagtcgttttcagtttttcctggccttgaatcctgactatggtgaggtaatacctgaaactggtgggttaagaaaggttcgatgggtctcaggaggaaaggggaaacgtgctggtgtcagggttatttactttcatcaggttaaacattatgagatcagattactgcttatttatcgtaagggtattaaagatgatctgtctccccaggaaaaagcaatgctccggttgttaaatacgaggtggtaa

SEQ ID NO: 3033 - DNA, 291 bp, Escherichia coli
atggataaggcactttttgagcggttgactcacagcatggcccagatgaatgaaattattgaaggaacgcgacagccttcacgtacttttgaagttgatgctatgaaaatcaaagaaatacgccgcgcttcagggttgtcacaatctaaatttgccgatcttatttccgtaagcgtagacacgttgcgtaactgggagcaggggcgacgttcaccgaccgggcctgcaaaggctttgctgcgagcgattgccaatgatccgcaacatgtgctgcaagcacttaaccgttag

SEQ ID NO: 3034 - DNA, 213 bp, Escherichia coli
atgacccgtaatcgtgctgaacgtcgccatcatatggtgcgattaaaaaaaatccgctgtcgttatcgcactgcaggcgatggaagcaaaaaagcatcaggtatttgctttcgtactccctgtatttgttcttgttggatgtgtgggcatcgacgctatcataatggtccccgcgtatcggaaattcgtgcaaaagcacgctatgcgaattaa

SEQ ID NO: 3035 - DNA, 279 bp, Escherichia coli
atgtccacgtttaatacgcgtaaagatagggatcgtaatggtaaagcgaagccgcataagcattcagggatcccaacacttacaggtaaatggcgtcacccttcaatggattgttgggtaaactacagtacaccgggcgatcatgaatggaagcggctctatactacgcttcgccgtcgcgcagatgatcgacgccaatgtcatcgggtaatgcagggggatgatccggaaggaatcgtctggttcccggactgttatccacaaatttactactactaa

SEQ ID NO: 3036 - DNA, 219 bp, Escherichia coli
atggcgatgaatacggtttttcttcatttatcagaagaggcaattaaacggctgaacaagcttcggggatggcgtaaggtttcgcgctctgcaattttacgcgaagcggtagagcaatatctggagcggcagcaatttccggtgcgtaaggcaaaaggcggcaggcaaagggacgaggcagttggtgttgaagaactatgtaagcagcataaggaatga

SEQ ID NO: 3037 - DNA, 930 bp, Escherichia coli
atgagtattcgcataatcccgcaagatgagctgggttcgagcgagaaacgtacggcggatatgattccgccgttattgttccctcggctcaagaatttatacaaccgccgcgccgagcgtctgcgcgagctggcagaaaataatccgctgggtgattacctgcgctttgctgcgcttatcgcccacgcccaggaagtggtgctgtacgaccatccgctggagatggatctgaccacgcgcattaaagaagccagcgcacaaggcaagcccccgctggatattcacgttctgccgcgtgataagcactggcaaaagctgctgatggcgctgattgctgagctgaaacctgaaatgagcggcccggcgctggcagtgattgagaatctggagaaggcatcgactcaggagctggaagatatggccagcgcactgtttgcctctgatttctcgtccgtcagcagcgataaagcgccgtttatctgggctgcgctgtcgctctactgggcgcagatggctaatctgatccccggcaaagcccgcgctgaatacggcgaacaacgtcaatattgcccggtatgtggctctatgccggtgtccagcatggtgcaaattggcaccactcagggtctgcgttacctgcactgcaacctgtgtgaaactgaatggcacgtagtgcgcgtaaaatgcagcaactgtgaacagagcggcaaactgcattactggtcgctggatgacgaacaggccgcgattaaagccgaaagctgcgatgactgcggcacttacctgaagattctttatcaggaaaaagaaccgaaagttgaagccgtggcagatgacctcgcctctctggtactggacgcgcgaatggagcaagaaggctatgcccgtagttccattaacccgttcctgtttccgggtgaaggggagtaa

SEQ ID NO: 3038 - DNA, 636 bp, Escherichia coli
atgaaacgacgtgacaccatcgtgcgctacaccgcgccggaacgtatcaaccactggatcaccgccttctgcttcatcctggcggcggtgagcgggctgggctttttgttcccgtccttcaactggttgatgcaaatcatgggcacaccgcagctggcgcgaattctgcacccgtttgtcggcgtggttatgtttgcctcgttcatcatcatgtttttccgttactggcatcacaacctaatcaatcgggatgatatcttttgggcgaagaatattcgtaagatcgtcgtcaacgaggaagtaggtgacaccgggcgttataacttcggtcagaaatgcgttttctgggcggcgattattttcctggtcctgttgctggtgagcggcgtgattatctggcgtccttattttgcgcctgctttctcaatcccggtgatccgattcgcgttaatgctgcattcatttgccgcagtggcgttaattgtggttatcatggtgcatatctacgccgccctttgggtgaaaggcacgattaccgccatggtggaaggatgggtgaccagcgcctgggcgaagaaacatcacccgcgctggtaccgtgaggtccgcaagacaacggaaaagaaagctgaatga

SEQ ID NO: 3039 - DNA, 903 bp, Escherichia coli
atggcttatcaatcgcaagatatcattcgtcgttccgcgactaacggtctgacccccgcgcctcaggcgcgggacttccaggaagaagtggcgaaactcatcgacgttaccacctgtatcggctgtaaagcctgtcaggtggcgtgttcagagtggaacgacattcgcgataccgtcggcaataacattggggtgtacgacaaccccaatgatttaagtgccaaatcgtggacagtgatgcgattctcggaagtggagcagaacgacaaactggaatggctgatccgcaaagacggctgtatgcactgttccgatccaggctgcctgaaagcgtgcccggcggaaggggcaattattcagtatgccaacggtatcgtcgacttccagtccgagcagtgcatcggctgcggttattgcattgcgggctgtccgttcgacattccgcgcctcaacccggaagacaaccgcgtctacaaatgtacgttgtgcgttgaccgcgtggtggttgggcaagaaccggcctgcgtgaagacctgcccaacgggcgcgattcacttcggtacgaaagagtcgatgaaaacgctggcgagcgagcgcgtggcggagctgaaaacccgtggttacgacaatgcgggtttgtacgacccagcaggcgtcggtggtacacatgttatgtacgtgctgcaccatgctgacaagccaaatctgtatcatggcttgccggagaacccggaaatcagcgaaaccgtgaaattctggaaaggcatctggaaaccgctcgcagctgttggctttgcggctaccttcgcagccagtatcttccactacgtgggtgtcggtccgaaccgtgcggatgaggaagagaataatctgcacgaagagaaagacgaggagcgcaaatga

SEQ ID NO: 3040 - DNA, 2415 bp, Escherichia coli
atgaccaaccactgggtcgacatcaagaatgccaacctcgtcgtggtgatgggcggtaacgccgctgaagctcacccggtcgggttccgctgggcgatggaagccaaaattcacaacggcgcaaagctgattgttatcgatcctcgctttacacgtacagcggcggtggctgactactatgcccctatccgttccggtactgacattgctttcctgtcaggcgtattgctgtacctgctgaacaatgaaaaattcaaccgcgaatacaccgaagcctataccaacgccagcctgatcgtgcgtgaggattacggctttgaagatggcctgttcaccggctacgacgcggaaaaacgcaagtacgataagtccacctggacttacgaactggacgaaaacggcttcgccaaacgtgatacaaccctgcaacatccacgttgcgtgtggaacttgctgaaacagcacgtttcccgttatacgccagatgtggttgaaaacatctgcggtacgccaaaagacgcgttcctgaaagtctgcgaatacatcgccgaaaccagtgctcacgataaaacagcgtcgttcctctacgccctcggctggacgcaacactccattggtgcgcaaaacattcgtacgatggcgatgatccagctgctgctcggcaacatggggatggcaggcggcggcgttaacgccctgcgcggtcactccaatattcaggggctgacggacctggggctactgtcgcagagtctgccaggttacatgacgctgccaagcgagaagcagaccgatctgcaaacttaccttaccgccaacacgccgaaaccactgctggaaggccaggttaactactggggcaactacccgaaattcttcgtctctatgatgaaggcattctttggtgataaagcgacggcggaaaatagctggggctttgactggttgccgaagtgggataaaggctacgacgtcctgcaatacttcgagatgatgaaagaaggcaaggtcaatggctatatctgccagggctttaaccctgttgcctcattcccgaacaaaaacaaagtgatcggctgtctgtcgaagctgaaattcctcgtgactatcgacccgctgaacactgaaacctctaacttctggcagaaccacggtgagctgaacgaagttgactcgtcgaagatccagaccgaagtgttccgtctaccatcgacctgcttcgcggaagagaacggttctatcgttaactcaggtcgctggttacagtggcactggaaaggtgcggacgccccggggattgcgctgactgatggcgagatcctctccggtatcttcctgcgcttgcgcaagatgtatgccgaacagggtggcgcgaacccggaccaggtgctgaacatgacctggaactacgccattccgcatgagccatcttcagaagaagtggcaatggagagcaacggcaaagcgctggccgatattaccgacccggcaaccggtgcggttatcgtcaagaaaggccaacaacttagctcgttcgcccaactgcgcgatgacggcacaacctcctgtggctgctggattttcgccggtagctggacgccggaaggcaaccagatggcgcgtcgtgataacgccgatccgtctggcctcggtaacacgctgggctgggcatgggcatggccgcttaaccgccgcattctgtataaccgcgcctccgcagatccgcagggtaacccgtgggatccgaagcgtcagttgctgaaatgggacggcactaagtggaccggctgggatattccggattacagcgcagcgcctccgggcagcggcgtagggccgtttatcatgcagcaggaaggcatgggacgtctgtttgccctcgataagatggcggaaggtccgttcccggaacactacgagccgtttgaaacgccgctgggaactaacccgctgcatccaaacgttatctcgaatccggcggcgcgtatctttaaagacgatgccgaagcattaggtaaagccgataagttcccgtatgtcggaaccacctatcgtctgaccgagcacttccactactggaccaaacacgcgctgttgaacgcgattttgcaaccagagcagtttgtggaaatcggggagtcgctggcgaataaacttggcattgcccagggcgatactgtgaaagtctcctccaaccgtggctatatcaaagccaaagcggtagtgaccaaacgtattcgcacgctgaaagcaaacggcaaagatatcgataccatcggtattcctattcactggggctatgaaggtgttgcgaaaaaaggctttattgccaatacgttgacgccattcgtcggtgatgcgaacacgcagacgccggagtttaagtccttccttgtgaatgtggaaaaggtgtaa

SEQ ID NO: 3041 - DNA, 588 bp, Escherichia coli
atgcaggtcagcagaaggcagttctttaagatctgcgctggcggtatggcaggcaccacggcagcggcactgggttttgcacccagcgtagcactcgcggaaacccggcagtataaactgctgcgcacccgcgaaacccgtaatacctgcacctattgttccgtaggctgtgggctgttgatgtacagcctcggtgacggagcaaaaaacgccaaagcatctatcttccatatcgaaggtgacccggatcacccggtcaaccgcggagcactttgtccgaaaggcgctggcctggtggatttcatccactccgaaagccgtctgaagtttccggaataccgtgcgccaggttctgataaatggcaacaaatcagttgggaagaggcgtttgatcgcatcgccaaactgatgaaagaagaccgcgatgcgaactacattgcgcaaaacgccgaaggcgtgactgttaaccgctggctctccaccgggatgctgtgtgcttccgcgtcgagtaacgaaaccggctatttaacgcaaaaattctcccgcgcgctgggtatgctcgcggtcgacaaccaggcgcgtgtctga

SEQ ID NO: 3042 - DNA, 834 bp, Escherichia coli
gtgaaaaaaacacagcaaaaagaaatcgagaatgtgacaaatatcacaggtgttcgtcaaattgagttatggcggcgtgatgatttacaacacccacggttagatgaggtggcggaagaagttcccgttgcgctggtctacaacggcatttcgcacgtggtgatgatggcgtcgcccaaagaccttgagtactttgcgctcggtttttcgctttccgaaggaattatcgaaagcccgcgcgatatcttcggcatggatgtcgttccttcctgtaatggcctggaagtacaaattgagctttccagccgccgctttatggggttgaaggaacgccgccgggcgctggcgggacgtacgggctgtggcgtatgcggtgtagaacagcttaacgatatcggtaaaccggtgcagccgctgccgttcacccagacgtttgatctcaacaaactggatgatgcattacgtcatctcaatgatttccagccagtggggcaactgactggttgtactcacgccgctgcatggatgttgccatctggcgaactggtcggcgggcatgaagacgtgggtcgccatgtggcgctggacaaactgttaggccgccggtcacaagaaggggaaagctggcagcaaggtgcggtgctggtttccagccgtgccagttatgaaatggtgcaaaagtcggcgatgtgcggcgtagagattttgtttgcggtgtctgccgcgaccacacttgctgtagaagtggctgagcgctgtaatctgacgctggtgggcttttgtaaaccgggtcgggcaacggtttatacccatccgcagcgtttgagcaattaa

SEQ ID NO: 3043 - DNA, 195 bp, Escherichia coli
gtggcgttaacgcctgcgctgcaacctattgatggcgtggcggtgagttatattgatgctgccgtagcgttgggtaataccattaacgaaatggataaatattacacccaggaaaattataaagacgatgcgtttgcgaaagggaaaacgctgcaccagacattcttaaaaatctggaagcctttgaacctgtag

SEQ ID NO: 3044 - DNA, 381 bp, Escherichia coli
atgatttcagcgaaacaaattaataacctgatatcgcaagataagtttgatgcagaagcggcaatgaagaaagtgtctgaactggaaacgctggtggcgcaggccaaagaagcggataaaagcggcatgaatttctcgtttattaattcggcaggccagtatcaactcgaggctaaaaaatacgttcgccgcatcagagataaagtcccgtactctgactgggataaagagcaacttcaggacgcaaactcaagctggatggccgaagactcatttccacgagcgttatgcgattacaacgaaatggtcgatgaaatatttcagttaattgtaatcgcggggcgggtttgtgatgagcacggatatgtcacgaagtcgtaa

SEQ ID NO: 3045 - DNA, 1395 bp, Escherichia coli
atgaaaaaatcgacattatctttagccatcggtttattattggcatgtagtaccggtatggcaaaaacacagcatttaacgctggaacaacgcatggcattgctggaagaacgcctggaagcggcagaaatgcgggcagcaaaagcagaggggcaggttaaacagcttcagacacaacaagccgccgagatccgcgaaattaaaaccgcacagggcaacacgccggtaaacggtcaatcaacgacggagtcagagaagaaaaacgccaccccgcctaatctcctgctttcagggtatggcgatttaaaaatctacggtgacgtagaatttaatatggatgcggaaagtaatcatggcctgctggcaatgaccaacgctgatgtgaatagcgatcccactaatgaacagtggaatctcaatggtcgtattctgttaggttttgatggtatgcgaaaactggataatggctatttcgctgggttctccgcacaaccgctgggggatatgcacggttcagtaaatatcgatgatgcggttttcttctttggcaaagaaaacgactggaaggtcaaagtaggccgttttgaagcctacgatatgttcccactgaatcaggatacctttgttgaacattccggtaatactgcgaacgatctttatgacgatggcagcggttatatctatatgatgaaagagggccgcgggcgttctaacgctggcggtaatttcctcgtcagcaaacaactcgataactggtattttgaattaaacacgttactggaagacggaacatctttatataacgacggtaattatcatggacgcgatatggaacagcagaaaaatgttgcttatctgcgtccggtaattgcctggtcgccgacggaagaattcaccgtttccgcagcgatggaagcgaatgtggtaaataatgcttatggttataccgatagcaagggtaattttgtcgatcagtccgatcgtaccggttatggcatgagcatgacctggaatggcctgaaaaccgatccggaaaatggcatcgtggttaatcttaataccgcctatttagatgctaataatgaaaaagatttcactgccgggattaacgcgctgtggaaacgtttcgagctgggttatatctacgcgcacaataagattgatgaattcagcggtgtagtttgtgataacgactgctggattgatgatgaagggacgtacaccattcacaccattcatgcgtcttatcagttcgctaatgtgatggatatggagaactttaatatttacctcgggacgtattactccattctggatagcgacggtgataaaaaacacggtgatgatactgatgaccgttacggcgcacgcgttcgctttaaatacttcttctga

SEQ ID NO: 3046 - DNA, 315 bp, Escherichia coli
atgatccgcaaagcctttgtcatgcaggttaaccccgacgcccacgaagagtatcagcgtcggcataatccaatctggccggaactggaagcagtgttgaaatctcacggtgcgcataactacgccatttacctcgacaaagcgcgtaatctgctgtttgccacggtagagattgaatctgaagaacggtggaatgcggtagccagtactgatgtttgccaacgttggtggaaatatatgaccgacgttatgccagctaacccggataacagcccagtcagtagcgagctgcaagaagtgttttacctgccttaa

SEQ ID NO: 3047 - DNA, 825 bp, Escherichia coli
atgcaaaacataacccagtcctggtttgtccagggaatgatcaaagccaccaccgatgcctggctgaaaggctgggacgagcgcaacggcggcaacctgacgctgcgcctggatgacgccgatatcgcaccatatcacgacaattttcaccaacaaccgcgctatatcccgctcagccagcccatgcctttactggcaaatacaccgtttattgtcaccggctccggcaaattcttccgtaacgtccagcttgatcctgcggctaacttaggcatcgtaaaagtcgacagcgacggcgcgggctaccacattctttgggggttaaccaacgaagccgtccccacttccgaacttccggctcactttctctcccactgcgagcgcattaaagccaccaacggcaaagatcgggtgatcatacactgccacgccaccaacctgatcgctctcacctacgtgctggaaaacgacaccgcggtcttcactcgccaactgtgggaaggcagcaccgagtgtctggtggtattcccggatggcgttggcattctgccgtggatggtacccggcacggacgaaatcggccaggcaactgcacaagagatgcaaaaacattcgctggtgttgtggcccttccacggtgtgttcggttccggaccgacactggatgaaaccttcggtttaatcgacaccgcagaaaaatcagcacaaatattagtgaaggtttattcgatgggcggcatgaaacagaccatcagccgtgaagagttgatagcgctcggccagcgtttcggcgttacaccactcgccagtgcgctggcgctgtaa

SEQ ID NO: 3048 - DNA, 1260 bp, Escherichia coli
atgaccactcaactggaacaggcctgggagctggcgaaacagcgtttcgcggcagtagggattgatgtcgaggaggcactgcgccaacttgatcgtttacccgtttcaatgcactgctggcagggcgatgatgtttccggttttgaaaacccggaaggttcgctgaccggtggtattcaggctactggtaattatccgggcaaagcgcgtaatgccagcgagctgcgtgccgatctggaacaggctatgcggctgattccggggccgaaacggcttaatttacatgccatctatctggaatcagacacgccagtctcgcgcgaccagatcaaaccagagcacttcaaaaactgggttgaatgggcgaaagccaatcagctcggtctggattttaacccctcctgtttttcgcatccgctaagcgccgatggctttacgctttcccatgccgacgaccgcattcgccagttctggattgaccactgtaaagccagccgccgtgtttcagcctattttggtgagcaactcggcacaccgtcggtgatgaacatctggatcccggatggcatgaaagatattaccgttgaccgtctcgccccacgccagcgtttgctggcagcactggatgaggtgatcagcgagaagctaaaccctgcgcaccatatcgacgccgttgagagcaaattgtttggcattggcgcggagagctacacggttggctccaatgagttttacctggggtatgccaccagccgccagacagcgctgtgcctggacgccgggcatttccacccgactgaagtgatttccgacaagatttccgccgccatgctgtatgtgccgcagttgctgctgcacgtcagccgtccggttcgctgggacagcgatcacgtagtgctgctggatgatgaaacccaggcgattgccagtgagattgttcgtcacgatctgttcgaccgggtgcatatcggcctcgacttcttcgatgcctctatcaaccgcattgccgcgtgggtcattggtacacgcaatatgaaaaaagccctgctacgtgcgttgctggaacctaccgctgaactacgcaagctggaagcggcgggcgattacactgcgcgtctggcgctactggaagagcagaaatcgttgccgtggcaggcggtatgggaaatgtattgtcagcgtcacgatacgccagcgggtagcgaatggctggagaacgtgcggacttatgagaaagaaattttgagtcgccgcgggtaa

SEQ ID NO: 3049 - DNA, 1470 bp, Escherichia coli
atgacctttcgcaattgtgtcgccgtcgatctcggcgcatccagtgggcgcgtgatgctggcgcgttacgagcgtgaatgccgcagcctgacgctgcgcgaaatccatcgttttaacaatggcctgcatagccagaacggttatgtcacctggaatgtggatagcctggaaagtgccattcgccttggattaatcaaggtgtgcgaggaagggattcgtatcgatagcattgggattgatacctggggcgtggactttgtgctgctcgaccaacagggtcagcgtgtgggcctgcccgttgcttatcgcgatagccgcaccaatggcctaatggcgcaggcacaacaacaactcggcaaacgcgatatttatcaacgtagcggcatccagtttctgcccttcaatacgatctatcagctacgtgcactgacagagcagcaaccagaacttattccacacattgctcacgctttgctgataccggattactttagttatcgcctgaccggcaagatgaactgggaatataccaacgccacgaccacgcaactggtcaatatcaatagcgacgactgggacgagtcgctactggcgtggagcggtgccaacaaagcctggtttggtcgcccgacgcatccgggtaatgtcataggtcactggatttgcccgcagggtaatgagattccggtggtcgccgttgccagccatgataccgccagcgcggttatcgcctcgccgttaaacggttcacgcgccgcttatctctcttctggcacctggtcattgatgggcttcgaaagccagacgccatttaccaatgacacggcgctggcagccaatatcaccaacgaaggcggggcggaaggtcgctatcgggtgctgaaaaatattatgggcttatggctgcttcagcgagtgcttcaggagcggcaaatcaacgatcttccggcgcttatcgccgcaacacaggcacttccggcctgccgcttcatcatcaatcccaatgacgatcgctttattaatcctgacgagatgtgcagcgaaattcaggctgcgtgtcgggaaacggcgcaaccgatcccggaaagtgatgctgaactggcgcgctgtattttcgacagtctggcgctgctgtatgccgatgtgttgcatgagctggcgcagctgcgtggtgaagatttctcgcaactgcatattgtcggcggcggctgccagaacacgctgctcaaccagctgtgtgccgatgcctgcggtattcgggtgatcgcagggcctgttgaagcctcgacgctcggcaatatcggcatccagttaatgacgctggatgaactcaacaatgtggatgatttccgtcaggtcgtcagcactaccgcgaatctgaccacctttacccctaatcctgacagtgaaattgcccactatgtggcgcagattcactctacacgacagacaaaggagctttgcgcatga

SEQ ID NO: 3050 - DNA, 837 bp, Escherichia coli
atgaccgtattacatagtgtggatttttttccgtctggtaacgcgtccgtggcaatagaaccccggctcccgcaggcggattttcctgaacatcatcatgattttcatgaaattgtgattgtcgaacatggcacgggtattcatgtatttaatgggcagccctataccatcaccggtgggacggtctgtttcgtacgcgatcatgatcggcatctgtatgaacataccgataatctgtgtctgaccaatgtgctgtatcgctcgccggatcgatttcagtttctcgccgggctgaatcagttgctgccacaagagcaggatgggcagtatccgtctcactggcgcgttaaccacagcgtattgcagcaggtgcgacagctggttgcacagatggaacagcaggaaggggaaaatgatttaccctcgaccgccagtcgcgagatcttatttatgcaattattgctcttgctgcgtaaaagcagtttgcaggagaacctggaaaacagcgcatcacgtctcaacttgcttctggcctggctggaggaccattttgccgatgaggtgaattgggacgctgtggcggatcaattttctctttcattgcgtacgctgcatcgccagcttaagcagcaaacggggctgacgcctcagcgttacctgaaccgcctgcgactgatgaaagcccgacatctgctacgtcacagtgaggccagcgttactgacatcgcctatcgctgcggattcagcgacagtaaccacttttcgacgctttttcgccgagagtttaactggtcaccgcgtgatattcgtcagggacgggatggttttctgcaataa

SEQ ID NO: 3051 - DNA, 939 bp, Escherichia coli
atggttttctgcaataacgcgaatcttctcaacgtatttgtacgccatattgcgaataatcaacttcgttctctggccgaggtagccacggtggcgcatcagttaaaacttctcaaagatgatttttttgccagcgaccagcaggcagtcgctgtggctgaccgttatccgcaagatgtctttgccgaacatacacatgatttttgtgagctggtgattgtctggcgcggtaatggtctgcatgtactcaacgatcgcccttatcgcattacccgtggcgatctcttttatattcatgctgacgataaacactcctacgcttccgttaacgatctggttttgcagaatattatttattgcccggagcggctgaagctgaatcttgactggcagggagcgattccgggatttagcgccagcgcagggcaaccacactggcgcttaggtagcgtggggatggcgcaggcgcggcaggttatcggtcagcttgagcatgaaagtagtcagcatgtgtcgtttgctaacgaaatggctgagttgctgttcgggcagttggtgatgttgctgaatcgccatcgttacaccagtgattcgttgccgccaacatccagcgaaacgttgctggataagctgattacccggctggcggctagcctgaaaagtccctttgcgctggataaattttgtgatgaggcatcgtgcagtgagcgcgttttgcgtcagcaatttcgtcagcagactggaatgaccatcaatcaatatctgcgacaggtcagagtgtgtcatgcgcaatatctcctccagcatagccgcctgttaatcagtgatatttcgaccgaatgtggctttgaagatagtaactatttttcggttgtgtttacccgggaaaccgggatgacgcccagccagtggcgtcatctcaattcgcagaaagattaa

SEQ ID NO: 3052 - DNA, 1035 bp, Escherichia coli
atgagtaacgcgattacgatggggatattttggcatttgatcggcgcggccagtgcagcctgtttttacgctccgttcaaaaaagtaaaaaaatggtcatgggaaaccatgtggtcagtcggtgggattgtttcgtggattatcctgccgtgggccatcagcgccctgttactaccgaatttctgggcgtattacagctcgtttagtctctctacgctgctgcctgtttttctgttcggcgctatgtgggggatcggtaatatcaactacggcctgaccatgcgttatctcggcatgtcgatgggaattggcatcgccattggcattacgttgattgtcggtacgctgatgacgccaattatcaacggcaatttcgatgtgctgattaataccgaaggcggacgcatgacgttgctcggcgttctggtggcgctgattggcgtagggattgtaactcgcgccgggcagttgaaagagcgcaagatgggcattaaagccgaagagttcaatctgaaaaaagggctggtgctggcggtgatgtgcggcattttctctgccgggatgtcctttgcgatgaacgccgcaaaaccgatgcatgaagccgctgccgcgctgggcgtcgatcccctgtatgtcgctctgccaagctacgttgtcatcatgggcggcggcgcaatcatcaacctcggcttctgcttcattcgtctggcaaaagtgaaagatttgtcgctaaaagccgacttctcgctggcaaaaccgctgatcattcacaatgtgctactctcagctctgggtgggttgatgtggtatctgcaattctttttctatgcctggggccacgcccgcattccggcgcagtatgactacatcagttggatgctgcatatgagcttctatgtattgtgcggcggtatcgttgggctggtgctgaaagagtggaacaatgcaggacgccgtccggtaacggtgttgagcctcggttgtgtggtgattattgtcgccgctaacatcgtcggcatcggcatggcgaattaa

SEQ ID NO: 3053 - DNA, 621 bp, Escherichia coli
atgagttataccctgccatccctgccgtatgcttacgatgccctggaaccgcacttcgataagcagaccatggaaatccaccacaccaaacaccatcagacttacgtcaacaacgccaacgcggcgctggaaaacctgccagaatttgccaacctgccggttgaagagctgatcaccaaactggaccagctgccagcagacaagaaaaccgtactgcgcaataacgctggtggtcacgctaaccacagtctgttctggaaaggtctgaaaaaaggcaccaccctgcagggcgacctgaaagcggctatcgaacgtgatttcggttccgttgataatttcaaagcagaatttgaaaaagcggcagcttcccgctttggttccggctgggcatggctggtgcaaaaaggcgataaactggcggtggtttctactgctaaccaggactctccgctgatgggcgaagccatttctggcgcttccggcttcccgattctgggcctggatgtgtgggaacatgcttactatctgaaattccagaaccgccgtccggactacattaaagagttctggaacgtggtgaactgggacgaagcagcggcacgtttcgcggcgaaaaaataa

SEQ ID NO: 3054 - DNA, 942 bp, Escherichia coli
atgctcgtcccgctattccttggcgcactgtgccacaccttctcgccgggggcggggaaatattttggatcattcaccaacgggatgattaccggtacggtgcccattctggcggtgtggtttttttgcatgggggcgtcaataaaattaagcgcgacgggaacggtactgcgtaaatccggtacgctggtggtaactaaaattgccgtcgcgtgggtggttgcggcaattgcctcgcgcattattccggaacatggtgttgaagttggattttttgccggactttcaacgttggcgctggtggcggcgatggatatgaccaacggcggactttacgcttccatcatgcagcagtacggcacaaaagaagaagctggggcatttgtgttgatgtcgttggagtccgggccgctcatgacgatgattattctgggcactgccgggattgcctcgtttgaaccgcatgttttcgtcggcgcagtattgccgttcctggtgggctttgccctggggaaccttgaccctgagttacgagaatttttcagcaaagcggtgcagacgctgattccattctttgccttcgcactgggcaataccattgatttgactgtaattgcccagacaggtttgctggggatcctgttgggtgtggcagtaattatcgtgaccggtattccgttgattatcgccgataaattgattggcggtggcgatggcactgccggaattgctgcttccagttccgcaggggccgcggtagcgacacctgtgctgattgctgaaatggtgcctgcgtttaaaccgatggctccggcagcaacttcgctggtcgcgacggcggtcattgtgacttcgattctggtgccaattcttacctctatctggtcacgtaaagtcaaagccagagtggcgaaaatcgaaattttaggcacggtaaaataa

SEQ ID NO: 3055 - DNA, 675 bp, Escherichia coli
atgcgatatccggttgatgtatacacaggcaagattcaggcttatcccgaaggcaaacccagcgcaattgccaaaatccaggttgatggtgagttgatgctgacggacctggggctggaaggtgacgaacaggcggagaaaaagatccacggcgggccagacagagcgctgtgtcattatcctcgtgagcattatctctactgggcgcgggaatttccggaacaggcggagctgtttgttgcgcctgcgtttggcgaaaatctctcaaccgacggtctgacggaaagtaatgtttatattggtgatattttccgctggggagaggcattaattcaggtcagccagccacgctcaccttgctataaactcaattaccattttgatatcagcgatatagcgcagttgatgcaaaacacgggtaaagtggggtggttgtatagcgtaattgcaccaggggtggtatctgctgatgcgccgctggagttggtttcccgtgtcagcgatatgaccgtgcaggaggctgccgccatcgcatggcatatgccgtttgatgacgatcagtatcaccgtttactctccgccgcagggttatcgaaaagctggacgcgaacgatgcaaaagcgccgacttagcggcaagatcgaagatttttcccgccgtttgtggggaaaataa

SEQ ID NO: 3056 - DNA, 1374 bp, Escherichia coli
atgataggcagcttaaccgcgcgcatcttcgccatcttctggctgacgctggcgctggtgttgatgttggttttgatgttacccaagctcgattcacgccagatgaccgagcttctggatagcgaacagcgtcagggtctgatgattgagcagcatgtcgaagcggagctggcgaacgatccgcccaacgatttaatgtggtggcggcgtctgttccgggcgattgataagtgggcaccgccaggacagcgtttgttattggtgaccaccgaaggccgcgtgatcggcgctgaacgcagcgaaatgcagatcattcgtaactttattggtcaggccgataacgccgatcatccgcagaagaaaaagtatggccgcgtggaactggtcggtccgttctccgtgcgtgatggcgaagataattaccaactttatctgattcgtccggccagcagttctcaatccgatttcattaacttactgtttgaccgcccgctattactgctgattgtcaccatgctggtcagtacgccgctgctgttgtggttggcctggagtctggcaaaaccggcgcgtaagctgaaaaacgctgccgatgaagttgcccagggaaacttacgccagcacccggaactggaagcggggccacaggaattccttgccgccggtgccagttttaaccagatggtcaccgcgctggagcgcatgatgacctctcagcagcgtctactttctgatatctctcacgaactgcgcaccccgctgacgcgtctgcaactgggtacggcgttactgcgccgtcgtagcggtgaaagcaaggaactggagcgtattgaaaccgaagcgcaacgtctggacagcatgatcaacgatctgttggtgatgtcacgtaatcagcagaaaaatgcgctggttagcgagaccatcaaagccaaccagttgtggagtgaagtgctggataacgcggcgttcgaagccgagcaaatgggcaagtcgttgacggttaacttcccacctgggccgtggccgctgtacggcaacccgaacgccctggaaagtgcgctggaaaacattgttcgtaatgctctgcgttattcccatacgaagattgaagtgggctttgcggtagataaagacggtatcaccattacggtggacgacgatggtcctggcgttagcccggaagatcgcgaacagattttccgtccgttctatcggaccgatgaagcacgcgatcgtgaatctggcggtacaggtttggggctggcgattgtagaaaccgccattcagcagcatcgtggctgggtgaaggcagaagacagcccgctgggcggtttacggctggtgatttggttgccgctgtataagcggtcataa

SEQ ID NO: 3057 - DNA, 699 bp, Escherichia coli
atgaataaaatcctgttagttgatgatgaccgagagctgacttccctattaaaggagctgctcgagatggaaggcttcaacgtgattgttgcccacgatggggaacaggcgcttgatcttctggacgacagcattgatttacttttgcttgatgtaatgatgccgaagaaaaatggtatcgacacattaaaagcacttcgccagacacacaagacgcctgtcattatgttgacggcgcgcggcagtgaacttgatcgcgttctcgggcttgagctgggcgcagatgactatctcccaaaaccgtttaatgatcgtgagctggtggcacgtattcgcgcgatcctgcgccgttcgcactggagcgaacaacagcaaaacaacgacaacggttcaccgacactggaagttgatgccttaagtctcaatcctggtcgccaggaagccagcttcgacgggcaaacactggagttaaccggtactgagtttaccctgctctatttgctggcacagcatctgggtcaggtggtttcccgtgagcatttaagccaggaagtgctgggcaagcgcctgacgcctttcgaccgcgctatcgatatgcacatttccaacctgcgtcgtaaactgccggatcgtaaagatggtcacccgtggtttaaaaccctgcgtggtcgcggctatctgatggtttctgcttcatga

SEQ ID NO: 3058 - DNA, 501 bp, Escherichia coli
atgcgcatagttaccgctgccgtcatggcctcaacgctggcagtcagttcattaagccacgctgctgaagtcggttcaggcgataactggcatccgggtgaagaacttacgcagcgcagtacgcagagccatatgttcgacggcataagtttaaccgaacatcagcgtcagcagatgcgagatcttatgcaacaggcccggcacgaacagcctcctgttaatgttagcgaactggagacaatgcatcgccttgtcaccgcagaaaattttgatgaaaacgctgtgcgcgcacaggcagaaaaaatggcgaacgagcaaatagctcgtcaggttgagatggcaaaagtccgcaaccaaatgtatcgcctgttaacgccggagcagcaagcggttttaaacgagaaacatcaacaacgaatggagcagttgcgcgacgtgacgcaatggcaaaaaagttcatcgttgaagctattgagtagtagcaactcacgttcccagtag

SEQ ID NO: 3059 - DNA, 903 bp, Escherichia coli
atgaatcaatcttatggacggctggtcagtcgggcggcgattgctgcaacggcgatggcttcactgctattgctgattaaaatttttgcatggtggtataccgggtcggtgagtattctcgccgcgctggtggattcgctggtggatatcggcgcgtcgttgacgaatttactggtggtgcgatattccctgcaacctgccgacgataatcactcgtttggtcacggtaaagctgagtccctcgcggcgctggcgcaaagtatgtttatctccggttcggcactattcctgtttttgacgggtattcaacatctggtatctccaacaccgatgacagatccaggcgtcggggttatcgtgacaattgtggcgctaatttgtacgattatccttgtctcgtttcagcgttgggtggtgcgccggacgcaaagccaggcggtgcgggctgatatgctacattaccagtctgatgttatgatgaacggcgcaattctgctggcgctggggttgtcctggtacggctggcatcgcgccgatgctctgtttgcattgggaatcggcatctatattttatatagcgcgttacgcatgggatatgaggcggtacagtcattactggatcgcgcattacctgatgaggaacggcaagaaattattgatatcgtgacttcctggccgggtgttagcggcgctcacgatcttcgcacgcggcagtcagggccgacccgctttattcagattcatttggaaatggaagactctctgcctttggttcaggcacatatggtggcggatcaggtagagcaggctattttacggcgttttccgggatcggatgtgattatccatcaggacccctgttccgtcgtacccagggagggtaaacggtctatgctttcataa

SEQ ID NO: 3060 - DNA, 963 bp, Escherichia coli
atgattaagaaaatcggtgtgttgacaagcggcggtgatgcgccaggcatgaacgccgcaattcgcggggttgttcgttctgcgctgacagaaggtctggaagtaatgggcatttatgacggctatctgggtctgtatgaagaccgtatggtacagctagaccgttacagcgtttctgacatgatcaaccgtggtggtacgttcctcggttctgcgcgtttcccggaattccgcgacgagaacatccgcgccgtggctatcgaaaacctgaaaaaacgtgggatcgacgcgctggtggttatcggcggtgacggttcctacatgggtgcaatgcgtctgaccgaaatgggcttcccgtgcatcggcctgccgggcactatcgacaacgacatcaaaggcactgactacactatcggtttcttcactgcgctgagcaccgttgtagaagcgatcgaccgtctgcgtgacacctcttcttctcaccagcgtatttccgtggtggaagtgatgggccgttattgtggcgatctgacgttggctgcggccattgccggtggctgtgaattcgttgtggttccggaagttgaattcagccgtgaagacctggtaaacgaaatcaaagcgggtatcgcgaaaggtaaaaaacacgcgatcgtggcgattaccgaacatatgtgtgatgttgacgaactggcgcatttcatcgagaaagaaaccggtcgtgaaacccgcgcaactgtgctgggccacatccagcgcggtggttctccggtgccttacgaccgtattctggcttcccgtatgggcgcttacgctatcgagctgctgctggcaggttacggtggtcgttgcgtaggtatccagaacgaacagctggttcaccacgacatcatcgacgctatcgaaaacatgaagcgtccgttcaaaggcgactggctggactgcgcgaaaaaactgtattaa

SEQ ID NO: 3061 - DNA, 990 bp, Escherichia coli
atgaaaaagtggggcgtagggttaacatttttgctggcggcaaccagcgttatggcaaaggatattcagcttcttaacgtttcatatgatccaacgcgcgaattgtacgaacagtacaacaaggcattcagcgcccactggaaacagcaaactggcgataacgtggtgattcgtcagtcacacggtggttcaggcaaacaagcgacgtcggtaatcaacggtattgaagctgatgttgtcacgctggctctggcctatgacgtggacgcaattgcggaacgcgggcggattgataaagagtggatcaaacgtctgccggataattccgcaccgtacacttccaccattgttttcctggtacgtaagggtaatccgaagcagatccatgactggaacgatctgattaaaccgggtgtttcggtgatcacgcctaatccgaaaagctctggtggcgcgcgctggaattacctggcagcctggggctacgcgctgcatcacaacaacaacgatcaggcaaaagcacaggattttgttcgggcactgtataaaaacgtcgaagttctggattctggcgcgcgcggatccactaacacttttgtcgagcgcggaattggcgatgtactgattgcctgggaaaatgaagctctgctggcagcgaatgaactggggaaagataaattcgaaatcgtcacgccgagtgagtctatcctcgcagagccaaccgtgtcggtggtcgataaagtggtcgagaaaaaagacaccaaagaggtggcggaagcctacctgaaatatctctactcgccagaaggtcaggaaattgcagcgaaaaactactaccgtccgcgcgacgctgaggtagcgaaaaagtacgaaaatgcgtttccaaaattgaagttattcaccattgatgaagagttcggcggctggacgaaagcgcaaaaagagcattttgctaacggcggtacgttcgatcagatcagcaaacgctga

SEQ ID NO: 3062 - DNA, 756 bp, Escherichia coli
atgaaaaaagcgggtcttctttttttggtgatgatagttatcgccgttgtggctgccggtattggttactggaaattaaccggtgaagagtcagacacgttacgtaagattgttcttgagcaatgtttgcccaaccagcaggaaaaccaaaacccgtcgccatgtgcggaagtcaaacccaacgccggatacgtggttttaaaagatcgtcatggcccactgcaatatctgttgatgccaacgtaccgtattaacggtactgaaagcccattgttgaccgatccgtcaacgcctaattttttctggttagcttggcaggcgcgtgattttatgagccaaaaatacggccagcctgttcccgatcgcgcggtatctctggcgatcaactcccgcaccgggcgtacgcaaaaccattttcatattcatatttcttgtattcgtcctgatgtgcgcgaacagctggataacaatctggcgaacatcagtagccgctggttgccactgccaggtggtttgcgtgggcatgagtacctggcgcgtcgggtaacggaaagcgaactggtacaacgcagcccatttatgatgctggcggaagaagtgcctgaggcgcgggaacatatgggaagctacgggctggcgatggtacggcagagtgataactcatttgtattgctggcgacacaacgaaatctactgacgctgaaccgtgcttcagccgaagaaatccaggatcatcagtgtgagattttgcgttaa

SEQ ID NO: 3063 - DNA, 768 bp, Escherichia coli
atgcgacatcctttagtgatgggtaactggaaactgaacggcagccgccacatggttcacgagctggtatctaacctgcgtaaagagctggcaggtgttgctggctgtgcggttgcaatcgcaccaccggaaatgtacatcgatatggcgaagcgtgaagctgaaggcagccacatcatgctgggtgcgcaaaacgtggacctgaacctgtccggcgcattcaccggtgaaacctctgctgctatgctgaaagacatcggcgcacagtacatcatcatcggccactctgaacgtcgtacttaccacaaagaatctgacgaactgatcgcgaaaaaattcgcggtgctgaaagagcagggactgactccggttctgtgcatcggtgaaaccgaagcggaaaacgaagcgggcaaaactgaagaagtttgtgcacgtcagatcgacgcggtactgaaaactcagggtgctgcggcattcgaaggtgcggttatcgcttacgaacctgtatgggcaatcggtactggcaaatctgcaactccggctcaggcacaggctgttcacaaattcatccgtgaccacattgctaaagttgacgctaacatcgctgaacaagtgatcattcagtacggcggctctgtaaacgcgtctaacgctgcagaactgtttgctcagccagacatcgacggcgcgctggttggcggtgcttctctgaaagctgacgctttcgccgtgatcgttaaagctgcagaagcggctaaacaggcttaa

SEQ ID NO: 3064 - DNA, 600 bp, Escherichia coli
atgaagccagggtgtacgctgttttttctcttatgttctgcattaaccgttacaacaacggcgcatgcacaaacaccagatacggcaacgaccgcgccttatctgctggctggagcccctactttcgatctctccatcagccagtttcgagaagactttaacagccagaatcccagcctgccactgaacgaatttcgtgccatcgacagcagtcccgacaaagccaatctcactcgtgcagcaagtaaaattaacgagaacttgtatgcttctactgcgctggagcgcggtaccttaaaaatcaaaagcattcaaataacctggctacccatccaggggccagagcaaaaagccgcgaaagcgaaagctcaggcatacatggcagcggtgatccgcacactcaccccattaatgaccaaaactcaaagccagaaaaaactgcagtcgctactaacggcggggaaaaacaaacgttattacaccgagacagaaggtgcactgcgttatgttgtcgcggacaacggcgaaaaggggctgaccttcgctgttgaaccgattaagctggcgctatctgaatcgcttgaaggtttgaataaatga

SEQ ID NO: 3065 - DNA, 441 bp, Escherichia coli
atgaccatacagcaatggttattctcatttaaagggcgtattggacgccgtgatttctggatttggataggcctgtggttcgcaggcatgctggtgcttttctcactggcgggtaaaaatttactcgatattcagaccgcggcgttttgccttgtgtgcttgctttggccaacagcggcagtaaccgttaagcgcttgcatgatcgcgggcgttccggcgcatgggcatttctgatgattgtggcgtggatgctgctggcgggtaactgggcaattttaccgggtgtctggcaatgggcggtggggcgttttgtcccgacattgattctggtgatgatgcttatcgatcttggtgcgtttgttggcacacaaggcgaaaataaatatggtaaagatacccaggatgtgaagtataaagccgacaataaatcaagtaattaa

SEQ ID NO: 3066 - DNA, 300 bp, Escherichia coli
atgaaagatgtcgtagataaatgcagtactaaaggatgtgcgattgatatcggtacggtgattgataacgacaactgtaccagtaagttttcgcgcttttttgccacccgcgaagaagcagagtcctttatgaccaaactgaaagagcttgccgccgctgcatcctctgcagatgaaggggccagcgtggcctataagattaaggatctggaagggcaagttgagcttgatgcggccttcaccttctcatgccaggccgagatgattatttttgagttatcactgcgttcgttagcttga

SEQ ID NO: 3067 - DNA, 429 bp, Escherichia coli
atggcttataaacacattggcgtggcaatttccgggaatgaagaagatgccttactggtgaataaagccctggagctcgccagacataatgacgctcacctgacgttaattcatattgatgatggcttaagcgagttgtatccgggtatctacttccctgcaacagaagatattcttcaattgttgaagaataagtcggataacaagctgtataaactgacgaaaaatattcaatggccgaagacaaaactgcgtattgaacgcggagaaatgccggaaacactgctggaaattatgcaaaaagagcagtgcgacctccttgtctgtggtcatcaccactcatttatcaaccgtttgatgccggcatatcgcgggatgatcaataagttgagtgcggatctcttgatcgtgccgtttatcgacaagtaa

SEQ ID NO: 3068 - DNA, 747 bp, Escherichia coli
atggctgattgggtaacaggcaaagtcactaaagtgcagaactggaccgacgccctgtttagtctcaccgttcacgctcccgtgcttccgtttaccgccgggcaattcaccaaacttggccttgaaattgaaggcgaacgcgttcagcgcgcctactcctatgttaactcgcccgataatccggatctggagttttacctggtcaccgtccccgatggcaaattaagtccacgactggcggcactgaaaccgggcgatgaagtgcaggtggttagcgaagccgctggcttctttgtgctggatgaagtaccagattgcgaaacgctatggatgctggcaaccggtacagcgattggcccttatttatcgattctgcaattgggcaaagatttagaacgcttcaaaaacatggtgctggttcacgccgcacgatatgccgccgacttaagctatctacctctgatgcaggaactggaaaaacgctacgaggggaaactgcgcattcagacggtggtcagtcgggaaacggctgcgggttcgctcactgggcgattaccggcgttaattgaaagtggtgaactggaaagcgcggttggcctgccgatgaataaagaaaccagccatgtgatgctgtgcggcaatccacagatggtgcgcgatacacaacagttgctgaaggagacccggcagatgacgaaacatttacgtcgccgaccgggccatatgacagcggagcattactggtaa

SEQ ID NO: 3069 - DNA, 1011 bp, Escherichia coli
atgagacgagaacttgccatcgaattttcccgcgtcaccgaatcagcagcgctggctggctacaaatggttaggacgcggcgataaaaacaccgcggacggcgcggcggtaaacgccatgcgtattatgctcaaccaggtcaacattgacggcaccatcgtcattggtgaaggtgaaatcgacgaagcaccgatgctctacattggtgaaaaagtcggtactggtcgcggcgacgcggtagatattgctgttgatccgattgaaggcacgcgcatgacggcgatgggccaggctaacgcgctggcggtgctggcagtaggcgataaaggctgtttcctcaacgcgccagatatgtatatggagaagctgatcgtcggaccgggagccaaaggcaccattgatctgaacctgccgctggcggataacctgcgcaatgttgcggcggcgctcggcaaaccgttgagcgaactgacggtaacgattctggcaaaaccgcgccacgatgccgttatcgcagaaatgcaacaactcggcgtacgcgtatttgctattccggatggcgacgttgcggcctcaattctcacctgtatgccggacagtgaagtcgatgtactgtacggcattggcggcgcgccggaaggcgtggtttctgcggcggtgatccgcgcattagatggtgacatgaacggtcgtctgctggcgcgtcatgacgtcaaaggcgacaacgaagagaatcgtcgcattggcgagcaggagctggcacgctgcaaagcgatgggcatcgaagccggtaaagtattgcgtttgggcgatatggcgcgcagcgacaacgtcatcttctctgccaccggtattaccaaaggcgatctgctggaaggtattagccgcaaaggcaatatcgccaccaccgaaacgctgctgatccgtggtaaatcacgcaccattcgtcgcattcagtccatccactatctggatcgtaaagacccggaaatgcaggtgcacatcctctga

SEQ ID NO: 3070 - DNA, 1509 bp, Escherichia coli
atgactgaaaaaaaatatatcgttgcgctcgaccagggcaccaccagctcccgcgcggtcgtaatggatcacgatgccaatatcattagcgtgtcgcagcgcgaatttgagcaaatctacccaaaaccaggctgggtagaacacgacccaatggaaatctgggccacccaaagctccacgctggtagaagtgctggcgaaagccgatatcagttccgatcaaattgcagctatcggtattacgaaccagcgtgaaaccactattgtctgggaaaaagaaaccggcaaacctatctataacgccattgtctggcagtgccgtcgtaccgccgagatctgcgaacatctcaaacgcgatggcatggaagagtacattcgtaacaacaccggtctggtgattgacccgtacttctctggcaccaaagtgaagtggatcctcgaccatgtggaaggctctcgcgagcgtgcgcgtcgtggtgaattgctgtttggtacggttgatacgtggcttatctggaaaatgactcagggccgtgtccatgtgaccgattacaccaacgcctctcgtaccatgttgtttaacatccatactctggactgggacgacaaaatgctggaggtgctggatattccacgcgagatgctgccagaagtgcgtcgttcttccgaagtatacggtcagactaacattggcggcaaaggcggcacgcgtattccaatctccgggatcgccggtgaccagcaggcggcgctgtttggtcagttgtgcgtgaaagaaggaatggcgaagaacacctatggcactggctgctttatgctgatgaacactggcgagaaagcggtgaaatcagaaaacggcctgctgaccaccatcgcctgcggcccgactggcgaagtgaactatgcgctggaaggtgcagtgtttatggcgggcgcgtccattcagtggctgcgcgatgagatgaagttgattaacgacgcctacgattccgaatatttcgccaccaaagtgcaaaacaccaatggtgtgtatgtggttccggcctttaccgggctgggtgcgccatactgggatccgtatgcacgcggggcgattttcggtctgactcgtggggtgaacgctaaccacattatacgcgcgacgctggagtctattgcttatcagacgcgtgacgtgctggaagcaatgcaggccgactctggtattcgactgcacgccctgcgcgtggatggcggcgcagtagcaaacaatttcctgatgcagttccagtccgatattctcggtacgcgcgttgagcgcccggaagtgcgcgaagtcaccgctttgggtgcggcctatcttgctggtctggcggttggcttctggcagaatcttgacgagctgcaagagaaagcggtgattgaacgcgagttccgtcctggcatcgaaaccactgagcgtaattaccgttacgcaggctggaaaaaagcggtcaaacgcgcgatggcatgggaagaacacgacgagtaa

SEQ ID NO: 3071 - DNA, 846 bp, Escherichia coli
atgagtcaaacatcaaccttgaaaggccagtgcattgctgaattcctcggtaccgggttgttgatttttttcggtgtgggttgcgttgcagcactaaaagtcgctggtgcgtcttttggtcagtgggaaatcagtgtcatttggggactgggggtggcaatggccatctacctgaccgcaggggtttccggcgcgcatcttaatcccgctgttaccattgcattgtggctgtttgcctgtttcgacaagcgcaaagttattccttttatcgtttcacaagttgccggcgctttctgtgctgcggctttagtttacgggctttactacaatttatttttcgacttcgagcagactcatcacattgttcgcggcagcgttgaaagtgttgatctggctggcactttctctacttaccctaatcctcatatcaattttgtgcaggctttcgcagttgagatggtgattaccgctattctgatggggctgatcctggcgttaacggacgatggcaacggtgtaccacgcggccctttggctcccttgctgattggtctactgattgcggtcattggcgcatctatgggcccattgacgggctttgccatgaacccagcgcgtgacttcggtccgaaagtctttgcctggctggcgggctggggcaatgtcgcctttaccggcggcagagacattccttacttcctggtgccgctttttggccctatcgttggcgcgattgtaggtgcatttgcctatcgcaaactgattggtcgccatttgccttgcgatatctgtgttgtggaagaaaaggagaccacaactccttcagaacaaaaagcttcgctgtaa

SEQ ID NO: 3072 - DNA, 240 bp, Escherichia coli
atgtcattagaagtgtttgagaaactggaagcaaaagtacagcaggcgattgataccatcactctgttgcagatggaaatcgaagagctgaaagaaaaaaacaactcactgtcgcaggaagttcaaaatgcccagcatcagcgcgaagagctggagcgtgagaacaaccatctgaaagaacagcagaacggctggcaggaacgtctgcaggccctgctgggtcgcatggaagaggtctga

SEQ ID NO: 3073 - DNA, 486 bp, Escherichia coli
atgaaatacgatacttccgagctttgtgacatctatcaagaagatgttaacgtcgtggaaccgctgttctccaactttggcggacgggcgtcgtttggcggacaaataatcacggtaaaatgtttcgaggacaacgggttgctgtacgatctgctcgaacagaatggccgtggtcgtgttcttgtcgtcgatggcggaggttctgttcgtcgcgcactggtcgatgctgaactggcgcgtctggcagtacaaaatgaatgggaaggtctggtcatttacggcgcggtgcgtcaggtagatgacctggaagagttggatatcggcatccaggcgatggcggcaattccggttggtgccgctggcgaaggcattggcgaaagcgatgtccgcgtcaattttggcggtgtcaccttcttctccggcgaccatctttatgccgacaataccgggattattctttcagaagatccgctggatattgaatga

SEQ ID NO: 3074 - DNA, 927 bp, Escherichia coli
atgactgaacaacaaattagccgaactcaggcgtggctggaaagtttacgacctaaaaccctccccctcgcctttgctgcaattatcgtcgggacggcgctggcatggtggcaaggtcacttcgatccactggtcgccctgctggcattgattaccgccgggctattacagatcctttctaacctcgccaatgattacggcgatgcggtaaaaggcagcgataaacctgaccgcattgggccgctacgcggcatgcaaaaaggggtcattacccagcaagagatgaaacgggcgctcattattaccgttgtgctcatctgtctttccgggctggcactggttgcagtggcgtgccatacgctggccgattttgtcggtttcctgattcttggcgggttgtcgatcattgccgctatcacctacaccgtgggcaatcgtccttatggttatatcggtttgggtgatatttccgtactggttttctttggctggttgagcgtcatggggagctggtatttacaggctcatacattgattccggcactgatccttccggcaaccgcatgcggcctgctggcaacggcagtactgaacattaataacctgcgtgatatcaatagcgaccgcgaaaacggcaaaaacacgctggtggtgcgcttaggcgcagtaaacgcgcgtcgttatcatgcctgcctgctgatgggctcactggtgtgtctggcgctgtttaatctcttttcgctgcatagcctgtggggctggctgttcctgctggcggcaccgttgctggtgaagcaagctcgttatgtgatgcgcgaaatggacccggtggcgatgcgaccaatgctggaacgcactgtcaaaggagcgttactgactaacctgctgtttgttttagggatattcctaagccagtgggcagcataa

SEQ ID NO: 3075 - DNA, 1332 bp, Escherichia coli
atgtctgaaatgaccccacgcgaaatcgtcagcgaactggataagcacatcatcggccaggacaacgccaagcgttccgtggcgattgctctgcgtaaccgctggcgtcgcatgcagctcaacgaagagctgcgccatgaagtgaccccgaaaaatatcctgatgatcggcccgaccggtgtcggtaaaactgaaatcgcccgtcgtctggctaagctggcgaatgcgccgttcatcaaagttgaagcgaccaaattcaccgaagtgggctatgtcggtaaggaagtggattctattattcgcgatctgaccgatgccgccgtgaaaatggtacgcgtccaggctatcgagaaaaaccgttatcgcgctgaagaactggcagaagaacgtattctcgacgtactgatcccaccggctaaaaacaactggggacagaccgaacagcagcaggaaccgtccgctgctcgtcaggcattccgcaaaaaactgcgtgaaggccagcttgatgacaaagaaatcgagatcgatcttgccgcagcaccgatgggcgttgaaattatggctcctccgggcatggaagagatgaccagccagctgcagtccatgttccagaacctgggcggtcagaagcaaaaagcgcgtaagctgaaaatcaaagacgccatgaagctgctgattgaagaagaagcggcgaaactggtgaacccggaagagctgaagcaagatgctatcgacgctgttgagcagcacgggatcgtgtttatcgacgaaatcgacaaaatctgtaagcgcggcgagtcttccggtccggatgtttctcgtgaaggcgttcagcgtgacctgctgccgctggtagaaggttgcactgtttccaccaaacacgggatggtcaaaactgaccacattctgtttatcgcttctggcgcgttccagattgcgaaaccatctgacctgatcccggaactgcaaggtcgtctgccaatccgcgttgagctgcaggcactgaccaccagcgacttcgagcgtattctgaccgagccgaatgcctctatcactgtgcagtacaaagcactgatggcaactgaaggcgtaaatatcgagtttaccgactccggtattaagcgcatcgcggaagcggcatggcaggtgaacgaatctaccgaaaacatcggtgctcgtcgtttacataccgttctggagcgtttaatggaagagatttcctacgacgccagcgatttaagcggtcaaactatcactattgacgcagattatgtgagcaaacatctggatgcgttggtggcagatgaagatctgagccgttttatcctataa

SEQ ID NO: 3076 - DNA, 531 bp, Escherichia coli
gtgacaactatagtaagcgtacgccgtaacggccatgtggtcatcgctggtgatggtcaggccacgttgggcaataccgtaatgaaaggcaacgtgaaaaaggtccgccgtctgtacaacgacaaagtcatcgcgggctttgcgggcggtactgcggatgcttttacgctgttcgaactgtttgaacgtaaactggaaatgcatcagggccatctggtcaaagccgccgttgagctggcgaaagactggcgtaccgatcgcatgctgcgcaaacttgaagcactgctggcagtcgcggatgaaactgcatcgcttatcatcaccggtaacggtgacgtggtgcagccagaaaacgatcttattgctatcggctccggcggcccttacgcccaggctgcggcgcgcgcgctgttagaaaacactgaacttagcgcccgtgaaattgctgaaaaggcgttggatattgcaggcgacatttgcatctataccaaccatttccacaccatcgaagaattaagctacaaagcgtaa

SEQ ID NO: 3077 - DNA, 855 bp, Escherichia coli
atggtcgctattgctgccgccgttcttgtgacctttatcggtggtctgtacttcattacgcatcacaagaaagaagagtccgagacgctgcaaagccagaaagtgaccggaaacggactaccaccaaaaccagaagaacgctggcgctacatcaaagagctggaaagtcgccagccgggtgtgcgtgcgcctacagaaccttctgccggtggtgaagtgaaaacgccggagcaactgacaccagaacaacgccagcttcttgagcaaatgcaggctgatatgcgccagcagccaacgcagctggttgaagttccgtggaatgaacagacgccggaacagcgtcagcaaacgctacagcgccagcgtcaggcgcagcaattagcggagcagcaacgcctggttcagcagtcgcgtacgactgaacaaagctggcagcagcagacgcgtacgtcgcaagccgcgccggtacaggcgcaaccgcgccagtctaaaccggcttatactcagcagccgtaccaggatctgctgcaaacccctgcgcacacgaccgcgcagtcgaagccgcagcaagctgcgccggttgctcgtgccgctgacgcgccaaaaccgacggcggagaaaaaagacgaacgccgctggatggtgcagtgcggttcgttcagaggcgcggaacaggcagagacggtacgtgctcagctggcgttcgaaggctttgactcaaaaattaccaccaacaatggctggaatcgtgtggtgattggcccggtgaaaggcaaagagaacgcagacagcaccctcaatcgcttgaagatggcgggtcatacaaactgcattcggctcgccgccgggggttga

SEQ ID NO: 3078 - DNA, 1026 bp, Escherichia coli
gtgaaagcgaagaagcaggaaactgccgcgaccatgaaagacgttgccctcaaggcaaaagtctctacagcgaccgtctcccgagcattaatgaatcccgataaagtctcccaggccactcgtaatcgggttgaaaaagcggcccgggaagtgggttatttaccacagcctatggggcgcaacgtcaagcgtaatgaatcccgtaccattctggtgattgtcccggatatctgcgatcccttctttagcgaaattattcgcggtatcgaagttacggcggcaaatcacggatatctggtgctgattggcgactgtgcgcatcaaaatcagcaggaaaaaacctttatcgatttgatcatcaccaagcaaattgatggcatgttgttgctgggttcaaggctgccgtttgatgccagcattgaggaacagcgtaatctgccgccgatggtgatggcgaacgaatttgcaccggaactggagctgcctaccgttcatatcgacaatctgaccgccgcatttgatgcagtaaattatttatatgagcaagggcataatcggattggctgtatagccggtcccgaagagatgccgctgtgtcactaccgcctgcaaggctacgtccaggcgctgcgtcgctgcggcattatggttgatccgcaatacatcgcccgtggcgacttcaccttcgaagctggaagcaaagcaatgcagcagctgcttgatcttccacaaccgcctactgctgtcttctgccatagcgatgtgatggcgctcggcgcactttctcaggcaaaacgccaggggctgaaagtcccggaagacctttccataatcggttttgataacatcgacctgacgcaattttgtgatccgccgctgacaaccatcgcgcagccgcgttacgaaatcggtcgggaagctatgctgttattgcttgatcaaatgcaggggcaacacgttggcagtggctctcgtttaatggactgcgaacttatcatccggggatcaacacgcgcgttaccttaa

SEQ ID NO: 3079 - DNA, 2199 bp, Escherichia coli
atgcccgttgcccacgttgccttgcccgttccgcttcctcgtacctttgactatctgctgccagaaggcatgacggttaaagccgggagtcgcgtgcgcgtgccgtttggcaaacaacaggagcgcatcggggttgtggtgtcagtgagcgatgtcagtgagctgccgcttaacgagctgaaagcggtagttgaagtgctggacgttgagccggtatttactcactccatctggcgattactgctctgggcggcagattactatcatcatccgattggcgatgtgctgtttcatgccttgccgattttactgcgccaggggcggcctgcggcgaacgcgccgatgtggtactggtttgccactgaacaaggtcaggcggtggatctgaacagcctgaaacgttcgccaaagcaacaacaggcgctggcagcgttacggcaaggcaaaatctggcgcgaccaggttgccacgctcgaatttaatgatgccgcgttgcaggcactgcgcaaaaaaggtctgtgtgatttagcaagtgaaacaccagagtttagcgactggcgaacgaactatgccgtttctggtgagcggttgcggttgaataccgaacaggccaccgccgttggcgcaattcatagcgcggcagatactttttctgcctggctgctggcgggcgttaccggttccggtaaaacggaggtttacctcagtgtactggaaaacgtgctcgctcagggcaaacaggcgctggtgatggtgccggaaatcggcctgacaccgcaaactatcgcccgttttcgtgaacgttttaatgccccggtggaagttctgcattccggcctgaacgacagcgagcgtctttcggcgtggttgaaagcgaaaaatggcgaggcggcgattgtcatcggcacccgctccgcgctgtttacgccgtttaaaaatctcggcgtgattgttattgatgaagagcacgacagctcctacaagcagcaggaaggctggcgctatcatgcccgcgacctggcggtgtatcgtgcgcatagcgagcaaatcccaattattcttggctctgcaacgcccgcactggaaacgttatgcaacgtgcagcagaaaaaataccgcctgctgcgcctgacccgtcgggcgggcaatgcgcgcccggcaattcaacatgtgctggatttaaaaggtcagaaggtgcaggcaggtctggctccggcgttaatcacccgtatgcgccagcatttacaggccgacaaccaggttatcctctttcttaaccgccggggttttgcgcctgcgctactgtgccacgactgtggttggatagccgaatgcccacgttgcgatcactactacacgctgtatcaggcgcaacagcatttgcgctgccaccattgcgacagtcagcgtccggtgccgcgccagtgcccttcttgcggttccacgcacctggtacccgtggggctgggcaccgaacagcttgaacagacgctcgcgccgttgttccctggtgtccccatttctcgtatcgaccgcgataccaccagccgcaaaggcgcgctggaacaacaactggcggaagtacatcgcggtggcgcgcggattttgattggcacgcaaatgctggcgaaaggtcaccactttccggatgtgacgctggtggcgttactggatgtggacggcgcgctgttttctgcggattttcgctcggcagagcgttttgcccagctttatacccaggtggcaggccgtgccgggcgtgcgggtaaacagggtgaagtagttctgcaaacgcaccatcctgaacatccgctgttgcaaacgttgctctataaaggctacgacgcctttgccgaacaggcactggctgaacgacgcatgatgcaactgccgccgtggaccaaccatgtgattgtgcgtgcggaagatcataacaatcagcacgcgccgctgttcctgcaacagttgcgtaatctgatcctcgccagcccgcttgcagacgacaaactgtgggttctcggtccggttccggcactggcccctaagcgtggtggccgctggcgctggcaaattttgttgcagcacccttcccgcgtgcgattacagcacatcatcaatggtacgctggcgcttattaatacaataccggattcccgtaaggtgaaatgggtgctggatgtcgatcccatcgagggctaa

SEQ ID NO: 3080 - DNA, 213 bp, Escherichia coli
atgaaaaaagatattcacccgaaatacgaagaaattactgctagctgctcttgcggtaacgtaatgaaaatccgctccaccgttggtcatgacctgaacctcgacgtgtgcagcaagtgccacccgttcttcactggcaaacagcgtgatgttgctaccggtggccgtgttgaccgcttcaacaagcgtttcaacatcccgggcagcaaataa

SEQ ID NO: 3081 - DNA, 609 bp, Escherichia coli
atgaaaatcaggctactgattctcagcctgctggtttctgtgcctgcatttgcctggcaaccacaaaccggcgacatcatctttcagatctctcgctcatcgcaaagtaaagcgatccaactggcgacccattccgattacagccacaccggtatgctggtgatacgcaacaaaaagccctacgtttttgaagcggccggcccggtaaaatacaccccactcaagcagtggatcgcccatggtgaaaagggcaaatacgttgttcgccgcgttgaaggcggactgagtgttgaacaacagcaaaaactggcgcaaacggcaaaacgttatctcggtaaaccgtatgactccagcttctcgtggagcgacgatcgccagtactgttcggaagtggtgtggaaggtctaccagaatgcgctgggaatgcgtgtgggcgagcagcagaagctgaaagagttcgatcttagtaacccgctagttcaggcaaagctcaaagaacgctacggcaaaaatattccgcttgaggaaacggtagtttcaccacaagccgttttcgacgcgccacaactcaccacggtcgccaaagaatggccgctgttttcctggtaa

SEQ ID NO: 3082 - DNA, 318 bp, Escherichia coli
atggctgaatggagcggcgaatatatcagcccatacgctgagcacggcaagaagagtgaacaagtcaaaaaaattacggtttccattcctcttaaggtgttaaaaatcctcaccgatgaacgcacgcgtcgtcaggtgaacaacctgcgtcacgcgaccaacagcgagctgctgtgcgaagcgtttctgcatgcctttaccgggcaacctttgccggatgatgccgacctgcgtaaagagcgcagcgacgaaattccggaggcggcaaaagagatcatgcgtgagatggggattaacccggagacgtgggaatactaa

SEQ ID NO: 3083 - DNA, 1161 bp, Escherichia coli
atgacgcgtaaacaggccaccatcgcagtgcgtagcgggttaaatgacgacgaacagtatggttgcgttgtccctcccatccatctttccagtacctataactttaccggatttaatgaaccgcgcgcgcatgattactcgcggcgcggcaacccaacgcgcgatgtggttcagcgagcgctggcagaactggaaggcggtgctggtgcagtacttactaataccggcatgtccgcgattcacctggtaacgaccgtctttttgaaacctggcgatctgctggttgcgccgcacgactgctacggcggtagctatcgcctgttcgacagcctggcgaaacgcggttgctatcgcgtgttgtttgttgatcaaagcgatgaacaggcattacgggcagcgctggcagaaaaccccaaactggtactggtagaaagcccaagtaatccattgttacgcgtcgtggatattgcgaaaatctgccatctggcaagggaagtcggggcggtgagcgtggtggataacaccttcttaagcccggcattacaaaatccactggcattaggtgccgatctggtgttgcattcatgcacgaaatatctgaacggtcactctgacgtggtggcaggcgtagtgattgctaaagacccggacgttgtcactgaacttgcctggtgggcaaacaatattggcgtgacgggcggcgcgtttgacagctatctgctgctgcgcgggttgcgaacgctggtgccgcgaatggagctggcccagcgcaacgcgcaggcgattgtgaaatatctgcaaacccagccgttggtgaaaaaactgtatcacccgtcgctgccggaaaatcaggggcatgaaattgccgcgcgccagcaaaaaggctttggcgcaatgttgagttttgaactggatggcgatgagcacacgctgcgtcgtttcctgggcgggctgtcgttgtttacgctggcggaatcattagggggagtggaaagtttaatctctcacgccgcaaccatgacacatgcaggcatggcgccagaagcgcgtgctgccgccgggatctccgagacgctgctgcgtatctccaccggtattgaagatggcgaagatttaattgccgacctggaaaatggcttccgggctgcaaacaaggggtaa

SEQ ID NO: 3084 - DNA, 2433 bp, Escherichia coli
atgagtgtgattgcgcaggcaggggcgaaaggtcgtcaactgcataaatttggtggcagtagtctggctgatgtgaagtgttatttgcgtgtcgcgggcattatggcggagtactctcagcctgacgatatgatggtggtttccgccgccggtagcaccactaaccagttgattaactggttgaaactaagccagaccgatcgtctctctgcgcatcaggttcaacaaacattacgtcgttatcagtgcgatctgattagcggcctgctacccgccgaagaagccgataacctcattagcgcttttgtcagcgatcttgagcgcctggcggcgttgctcgacagcggtattaacgatgcggtgtatgcggaagtggtgggccacggtgaagtgtggtcggcgcgcctgatgtctgcggtgcttaatcaacaagggctgccagcggcctggcttgatgcccgcgagtttttacgcgctgaacgcgctgcgcaaccgcaggttgatgaaggactttcttacccgttgctgcaacagctactggtacaacatccgggcaaacgtctggtggtgaccgggtttatcagccgtaacaacgccggtgaaacggtgctgctggggcgtaacggttccgactattccgcgacacaaatcggtgcgctggcgggtgtttctcgcgtaaccatctggagcgacgtcgccggggtatatagcgccgacccgcgtaaagtgaaagatgcctgcctgctgccgttgctgcgtctggatgaagccagcgaactggcgcgtctggcggctcccgttcttcatgcccgtactttacagcccgtttctggcagcgaaatcgacttgcaactgcgctgtagctacacgccggatcaaggttccacgcgcattgaacgcgtgctggcctccggtactggtgcacgtattgtcaccagccatgatgatgtctgcttgattgagtttcaggtgcccgccagccaggatttcaaactggcgcataaagagatcgaccagatcctgaaacgtgctcaggtgcgcccactggcggttggcgtgcataacgatcgccagttgctgcaattttgctacacctcagaagtggccgacagtgcgctgaaaatcctcgacgaagcgggattacctggcgaactgcgcctgcgtcaggggctggcgctggtggcgatggttggggcgggcgtcacccgtaacccgctgcattgccaccgcttctggcagcaactgaaaggccagccggtcgagtttacctggcagtccgatgatggcatcagcctggtggcagtactgcgcaccggcccgaccgaaagcctgattcaggggctgcatcagtccgtcttccgcgcggaaaaacgcatcggcctggtgttgttcggcaagggcaatatcggttcccgctggctggaactgttcgcccgtgagcagagtacgctttcggcacgtaccggctttgaatttgtgctggcaggcgtggtggacagccgccgtagcctgttgagctatgacggtctggacgccagccgcgcgttagccttcttcaacgatgaagcggtcgagcaggatgaagagtcgctgttcctgtggatgcgcgcccatccgtatgatgatttagtggtgctggacgttaccgccagccagcagctcgctgaccagtatcttgatttcgccagccacggtttccacgtcatcagtgccaacaaactggcaggagcgagcgacagcaataaatatcgccagatccacgacgccttcgaaaaaaccgggcgtcactggctgtacaacgctaccgtcggcgcaggcttgccgatcaaccataccgtgcgcgatctgatcgacagcggcgataccattttgtcgatcagtgggatcttctccggcacgctctcctggctgttcctgcaattcgacggtagcgtgccgtttaccgaactggtggatcaggcgtggcagcagggcttaaccgaacctgacccgcgtgatgacctttccggcaaagacgtgatgcgcaagctggtgattctggcgcgtgaagcgggttacaacattgaaccggaccaggtacgtgttgaatcactggtgcctgcccattgcgaaggcggcagcatcgaccatttctttgaaaatggcgatgaacttaacgagcagatggtgcaacgactggaagcggcccgcgaaatggggctggtgctgcgctacgtggcgcgtttcgatgccaacggcaaagcgcgtgtgggcgtggaagcggtgcgtgaagaccatccgctggcatcactactgccatgcgataacgtctttgccatcgaaagccgctggtatcgcgacaacccgctggtgatccgcgggccaggtgcagggcgcgacgtcaccgccggggcgattcagtcggatattaaccgactggcgcagttgttgtag

SEQ ID NO: 3085 - DNA, 861 bp, Escherichia coli
atgtatataaaaaagcactggatagctttatccattctattaataccttgcattggaaacgctcaggaaattaaaattgatgaaagctggttacatcaaagcttgaatgtcattggtcgcacagactctcgctttggcccaagactgactaacgacctctaccctgaatatactgtagcaggaagaaaagactggtttgatttttatggttatgttgatctaccgaaattctttggcgtcggcagtcactatgatgttgggatctgggatgagggctcaccactatttacggaaatagaacctcggttttccattgacaaattgaccggattaaatcttgcgttcggcccatttaaagaatggttcattgcaaacaactatgtctatgatatgggtgacaaccagtcatcccggcaaagtacatggtatatggggcttggtacagatatcgacacgggtctaccaattaagctttctgccaatatatacgccaagtatcagtggcaaaactatggtgccgctaatgaaaatgaatgggacggatatcgattcaaaataaaatatagcatccctcttacaaatttattcggagggcgattggtatacaatagttttactaactttgattttggctccgatcttgcggacaagtcacacaataataaacgaaccagtaatgctattgcttcaagccatatcctttcccttctatatgaacactggaaatttgcatttacactacgttattttcacaacggtggacaatggaatgcgggagagaaggttaacttcggagatggtccatttgaattaaaaaatacaggatggggaacctatactactattggttatcaattttaa

SEQ ID NO: 3086 - DNA, 1620 bp, Escherichia coli
atgaaaacagcgcagcgtactttatttgccgcaacattgctgactattttttcgacctcagttatggcgcaggatgtcacgattatttataccaatgatcttcacgctcatgtggattcctataaagtaccgtatgtcgcagacggaaaacgcgacattggtggctttgccaatatatccacgttagtaaaacaagagaaagccaaaaataaagccaccttttattttgatgctggagactatttcaccgggccatatatcagtagcctgacaaagggcgaagcaataattgatattatgaataccatgccttttgacgcagtatcaatcggtaatcatgagtttgaccatggctgggataatgccctccgacaattaagcaaagcgaatttccctgttttattaggcaatgtttatcataaagagagtgagaaacccttctggaacaagccctacaccatcctggaaaaagatggcatcaagattggtattgttgggctacacggcgtatttgcatttaatgacacggtctcggagctctctctccagggactcgataatgacaataataaccgatttgataaatcttccgcgcccctcaagaatcaggggattgaagcacgtgatgaagtgaagtatttgcagcattatatcgacgagttacgtgataaggttgacctcaccgtggcgctggttcatgaaggcgtaccggcgcgtcagtccagcattggcaatacagatgttagacgtgcgctggataaagatattcaaaccgcaagcaaggtgaaaggattggatattctgattaccgggcatgcccacgtcggaacgccagaaccaatcaaagtcggcaacaccttaatcctttcgactgacagtggcggtatcgatattggtaaattaatccttgatgtcaaccctacagctcgtactcataaagtgaagagctttgagctgaaaacggtttatgccgatgaatggatacctgatccaaccacacaaaaagttatcaatggctggaataaaaaactggcggatcttgtacgccaaccagtcggtgaatcatcgattgcattaactcgtgcctacggtgagtcatcgcaacttggcaacctgtttaccgatgcaatgcttgtcgctgcaccgactgcacaaattgcgttgataaactccggcagtttacgtgctgatataaatgcaggcacgattacctttggtgacattaccagtacattccccttcaagaatgaacttactgaaatggatctcagcggtaaggatctgcgtaacctactggaacacggggcatcgcttaccaatggcatcctgcaaatgtcaaaaggcgcagaaatgcgctataccctgcagaaaccagtaggtcagcgcattgtatcttttaaaattaatggtgaagagatcgttgatacgaatatttaccatgttgcgactacgactttccttgcacttgggggcgatggttttctggcattcaaagaagggaaaaatgtccaggtccgcgccggaaataacatgtccaatgtcgtaatcgattattttaagaaaggccacaagattactcctgcacaggtaaatgaaatgcgggtagaagtaagcaaataa

SEQ ID NO: 3087 - DNA, 1551 bp, Escherichia coli
atgaaaactgtatttacaacattatcagtcatattcggcgtgatattttctcacagtgttctagctcaggacgttactatttattatacgaatgacattcacgcacatgtcaatccggcaaaaatcatcgctgttgataagaacagacttataggtggtatggctaatattgcaggcatcgttaatgaagcgaagaaaaaaagcaaagatgtgtttttctttgatgcaggcgactattttaccgggccgtatatcagcacactgaccaaaggtgaagctattattgatatcatgaacactatgccctttgatgcggtgtctgttggtaatcacgagttcgatcacggtgtgcccaatatggtgtctcagttatcaaaagcaaaattccccattctgctgggaaatatctactacaccgatacgaataaaccagtttgggatcatccgtggaccattatcgaaaaagatggtttaaagattggtgtgattggattgcatggcgcattcgctttctatgatacagtcgcggcaaaagcacgtgaaggcgtagaagccagagacgaaattaaatatttaaataaagcacttgcagaattaaaaggtaaagtcgacattaccgttttgctaattcacgaaggtgtcccggcgcgtcaatcaagctttggtagtaaagatgtggagcggctactacaggcagatattgagacagctaaaaaagtgaatggtgttgatgtcttaattaccggtcacgcacatgtcggaacaccgcaaccaataaaagttaataacacattaattgtatctaccgatgcatacggcaccaacatcggaaaacttgtgcttgattacaatccgaaaacgaagaaaattgatagttataatggtgagttaatcaccatctttgcagatcaatttaaacctgacaccatcgttcaaaatactattgataaatggagtgcaaagcttaacaaaataacacaggaagttgtcggccattctcccgtagttttaacacgtgagtatggtagttcctcttctaccggcaaccttattcttgatgcaatgatggaaaaaacacctgatgccgttgccggatttcaaaatagcggtgggatgcgagctgattttcctaaaggcgatatcacactgggagatgttattagcacattcccctttaataatgacctcatcgagatggatttgacgggccgcgatctcaaatcattgatgacgcatgcaaccaatctaactaacggtgtgttacaagtttctaaaagtgttgcggttgtctatgacagcaaaaaaccattcaaccaacggttaatctctttcaccattaacggcaaacccgtggaagataatcaaacatatcgtattgccacgcactccttttgtgccagtggtggtgacggttttgaagcatttttgaatggaaaaaatgtgaagacgataccgggaacaacctcggcggaatctatcatcgattatttcaaaaatcataaacctgtcaccccagacttaactaaacgagtcatggacgtcgccaaataa

SEQ ID NO: 3088 - DNA, 1125 bp, Escherichia coli
atgtcgactctgtttacgattaatgcctgtaaaacgttcggttgccgaaatttgggattagcctcatcggaagattacagttggccagactataaactgggttatccggcactgcactgtcgggcatgtggcagttacccgccgttgtttgacgagcaacaatttcgtgactggttgtcagttcacttgtctacttatgcaattgagaaaggccatttctgcccggtatgttatggcacagacatgatttgttatggtcacaatccacagggttcgcaacgcattcaatgccgtaactgcaaaaaagtctggacgcctaaaaaatatcagaaagaaattacgcatccccaggccattgaaaccgttcaactgttcataccctttcaaggggccagcgcagtacaaaaactgtatgttttagtcagtcttgacgccactcgtggcaacattcttcatctctccacgaattatacgcaacatcagacaggagacagtctgcggtacagttacaagggcaacacagaaccaactatgcaccatcgcgatatcgtgcagaaggtagatatgcgtgaagcgcaattcttgcgccggagccagttcgatgaaattcagtatggcagtgctgtactcaagcgcaacggtaagggagccatactacgcccggttatcacggcacacgggcatttcagaatactgaaaatccgctatccagatgtcaaaacgcatattatttcacacgaatgttttctaagaggcgcaattattacagcctgggcagatcagttccgccaacaacaaggtgaactttggttcgtagaagaagaaatcagtgacagtaacgctgatacgccctggcattttaagggaacgacataccatggttggtggcaaaatcagtggcagcgctgggagcaggggaataactgcaagatggtctgcctactcacgggagccagcttagaaaggggcgcaaatgtttctctggcaaccagtcgttgttttatcacatggctgacagaccaacacgactttacccaaagcgcgttattatccgcaggtcgcgtaacgcagatgctgacctcactggcgttaaaatacaatgaatcgctcactccatcttgttag

SEQ ID NO: 3089 - DNA, 1554 bp, Escherichia coli
atgaaaattaaaatacttgctgcgggtatcgcattaacactgccgttctgggcttgcgctaaagatgtcactattatttataccaacgacctccatgcgcatgtagaaccttataaagtgccgtggatcgctgacggtaaacgggatattggcggctgggcaaatatcactacgctggttaagcaagaaaaagcaaaaaataaagcgacatggttttttgatgcgggcgactattttaccgggccatatatcagcagcctgaccaaaggtaaggctattatcgatattatgaatactatgccgtttgatgccgtcacaataggcaaccatgaatttgaccacggctgggacaacacattattacagttgagccaggcaaaattccctattgtgcagggcaatattttttatcagaacagcagtaaatcattctgggataagccatataccatcatcgaaaaagacggtgtgaaaataggcgttattggtttgcacggagtatttgcctttaatgacactgtctctgctgctacgcgcgtgggtattgaagcgcgcgatgaaattaaatggctacaacgttatatcgatgaactcaaaggcaaggttgatttgaccgtcgccctgatccacgaaggtgttccagcccgccagtccagtatgggaggcacagatgtgcgtcgcgcgttggataaagatattcagacggcaagtcaggtgaaagggctggatattttgatcaccggacatgcacatgtgggtacgccggaaccgattaaagtcggcaatacgctcatcctctccactgacagcggcgggattgatgtgggcaaactggttctcgactacaaagagaagccgcataattttacggtgaaaaacttcgagcttaaaaccatttacgctgacgagtggaagcccgatccgcaaacgaaacaggtgatcgacggctggaataaaaagcttgatgaagtggtgcaacaaacggtggcgcaatcgccggttgaattaaaacgtgcctatggtgaatcggcttccctcgggaacctggcggctgacgctttactggcagcagcgggtaaaaatacccaactggcgttaacaaactctggtggtatccgcaatgagatccccgcaggggcgatcacgatgggcggcgttatcagtacgttcccgttccccaacgaactggtgacgatggaactcacgggtaaacaattacgcagtctgatggaacacggcgcaagtttaagcaatggcgttttacaggtatcgaaaggcctggaaatgaagtacgacagcagcaagccggttggtcagcgggtaatcacactgactctgaatggcaaacccattgaagatgcgacggtttatcacattgctactcagagtttccttgctgatggtggagatggttttaccgcctttaccgaagggaaagcgcgtaacacaacgggcggttattacgtttatcacgcggtggttgattacttcaaagcgggcaacaccattacggatgaacagctcaacggtatgcgcgtgaaggatatcaaataa

SEQ ID NO: 3090 - DNA, 891 bp, Escherichia coli
atgagcttttttcacgccagccagcgggatgccctgaatcagagtctggcagaagtccaggggcagattaacgtttcgttcgaatttttcccgccgcgtaccagtgaaatggagcagaccctgtggaactccatcgatcgccttagcagcctgaaaccgaagtttgtatcggtgacctatggcgcaaactccggcgagcgcgaccgtacgcacagcattattaaaggcattaaagatcgcaccggcctggaagcggcaccgcatcttacctgcattgatgcgacgcctgccgagctgcggatcattgcacgcgactactggaataacggtattcgccatatcgtggcgctgcgtggcgacctgccgccgggaagtggtaagccagaaatgtatgcttctgacctggtgacgctgttaaaagaagtggcagatttcgatatctccgtggcggcgtatccggaagtacatccagaagcgaaaagtgcccaggccgatttactcaacctgagacgaaaagtggatgccggagccaaccgcgccattactcagttcttcttcgatgtcgaaagctacctgcgttttcgcgatcgctgcgtctcggcaggcattgatgtggaaatcattccgggaattttgccggtttcgaactttaaacaggcgaagaaatttgccgacatgaccaacgtgcgtattccggcgtggatggcacaaatgttcgacggcctggatgacgatgctgaaacccgcaagctggtgggcgcgaatattgccatggatatggtgaagattttaagccgtgaaggagtgaaagatttccacttctatacgcttaaccgcgctgaaatgagttacgcgatttgccatacactgggtgttcgacctggtttataa

SEQ ID NO: 3091 - DNA, 2181 bp, Escherichia coli
atgagcacgtcagacgatatccataacacgacagccaccggcaaatgcccgttccatcagggcggtcacgaccagagcgcaggtgggggcacaaccacgcgcgactggtggccaaatcaactccgtgttgacctgttaaaccaacattctaatcgttctaacccgctgggtgaggactttgactaccgcaaagaattcagcaaattagattactacggcctgaaaaaagatctgaaagccctgctgacagaatctcaaccgtggtggccagccgactggggcagctacgccggtctgtttattcgtatggcctggcacggcgcgggtacttaccgttcaatcgacggtcgcggcggcgcgggtcgtggtcagcaacgttttgcaccgctgaactcctggccggataacgtaagcctcgataaagcgcgtcgcctgttgtggccaatcaaacagaaatatggccagaaaatctcctgggccgacctgtttatcctcgcgggtaacgtggcgctggaaaactccggcttccgtaccttcggttttggtgccggtcgtgaagacgtctgggaaccggatctggatgttaactggggtgatgaaaaagcctggctgactcaccgtcatccggaagcgctggcgaaagcaccgctgggtgcaaccgagatgggcctgatttacgttaacccggaaggcccggatcacagcggcgaaccactttcggcggcagcagctatccgcgcgaccttcggcaacatgggcatgaatgacgaagaaaccgtggcgctgattgcgggtggtcatacgctgggtaaaacccacggtgctggtccgacatcaaacgtaggtcctgatccagaagctgcaccgattgaagaacaaggtttaggctgggcgagcacttacggcagcggcgttggcgcagatgccattacctctggtctggaagtggtctggacccagacgccgacccagtggagcaactatttcttcgagaacttgttcaagtatgagtgggtacagacccgcagcccggctggcgcaatccagtttgaagcggtagacgcaccggaaattatcccggatccgtttgatccgtcgaagaaacgtaaaccgacgatgctggtgaccgacctgacgctgcgttttgatcctgagttcgagaagatctctcgtcgtttcctcaacgatccgcaggcgttcaacgaagcctttgctcgtgcctggttcaaactgacgcacagggatatggggccgaaatctcgttacatcggaccggaagtaccgaaagaagatctgatctggcaagatccgctgccgcagccgatctacaacccgaccgagcaggacattatcgatctgaaattcgcgattgcggattctggtctgtctgttagtgagctggtatcggtggcctgggcgtctgcttctaccttccgtggtggcgacaaacgtggtggtgccaacggtgcgcgtctggcattaatgccgcagcgtgactgggatgtgaacgccgcagccgttcgtgctctgccagttctggagaaaattcagaaagagtctggcaaagcttcgctggcggatatcatcgtgctggcaggtgtggttggcgttgagaaagccgcaagcgccgcaggtttgagcattcatgtaccgtttgcgccgggccgcgttgatgcgcgtcaggatcagactgacattgagatgttcgaactgctggagccaattgctgacggtttccgtaactatcgcgctcgtctggacgtttccaccaccgagtcactgttgattgataaagcacagcaactgacgctgaccgcgccggaaatgactgcgctggtgggcgggatgcgcgtactgggtgccaacttcgatggcagcaaaaacggcgtcttcactgaccgcgttggcgtattgagcaatgacttcttcgtgaacttgctggatatgcgttacgagtggaaagcgaccgacgaatcgaaagaactgttcgaaggccgtgaccgcgaaactggcgaagtgaaatacacagccagccgtgcggatctggtctttggttctaactctgtcctgcgtgcggtggcggaagtctacgccagcagcgatgcccacgagaagtttgttaaagacttcgtggcagcgtgggtgaaagtgatgaacctcgaccgtttcgacctgctgtaa

SEQ ID NO: 3092 - DNA, 906 bp, Escherichia coli
atgtctgccgcaggaaagagcaacccactggcaatcagtggcctggttgtgctcacacttatctggagttatagctggattttcatgaagcaagtcaccagctacatcggtgccttcgacttcaccgccttacgctgcattttcggcgctctcgttttattcatcgtccttttattacgtggtcgcggaatgcgcccgacgccgtttaaatacaccttagccattgccctgttacaaacctgcgggatggttggcctggcacagtgggcgctggtcagcggcggagcggggaaggtggcaatcctgagctataccatgccgttctgggtggtaattttcgccgcgttgtttctcggtgaacgcctgcgacgtgggcaatatttcgcgatactgattgccgctttcggcttatttttggtgttgcagccgtggcaactcgatttctcttcgatgaaaagtgccatgctggcaatcctctccggtgtgagttggggggcgagcgcgattgttgctaaacgtctgtatgcccgccatccgcgcgtggatttattgtcgctaacatcctggcagatgctgtatgcggcgctggtgatgagcgtggtcgctttactggtgccgcaacgtgaaattgactggcaacccaccgtgttctgggcgctggcctacagtgcgattctggcgacagcgctggcgtggagcttatggttgtttgtattgaaaaacttgcctgccagtattgccagcttaagcacactggccgttcccgtttgcggcgtactcttttcctggtggctgctcggtgagaatccgggggcagttgaaggtagcggtattgtgctgattgtgctggcactggcgctggtgagccgtaagaaaaaagaagccgtcagtgtaaaaaggatctga

SEQ ID NO: 3093 - DNA, 618 bp, Escherichia coli
atgaaagcttcactggcgttattcagtcttctgacggtatttaccagttactccttaaaatctcccgccgttccaccaaccgtggtacaaatccaggctaacaccaatcttgccatcgcagacggcgccagacagcaaatcggcagcacgctattttacgatccggcgtatgtgcagcttacctatcctggcggtgatgtcccgcaagaacgcggcgtatgttccgatgtggtgatccgtgcattgcgcagccagaaggtcgatttgcagaaactggtgcacgaagatatggcgaagaattttgctgcgtacccgcaaaaatggcagttaaagcgcccggacagcaacatcgatcaccgtcgggtgcctaatctggaaacctggtttacccgccacgataaaacacgccccaccagcaagaaccccagtgactatcaagcgggcgatattgtctcctggcgattagataacgggctggcacatattggggtggtgtcagatggcttcgcccgcgacggtacgccgctggtgatacataacattggtgcaggcgcgcaggaagaagatgtactgtttagctggcggatggtggggcactatcggtattttgctaaataa

SEQ ID NO: 3094 - DNA, 1104 bp, Escherichia coli
atggaccgcattattcaatcaccaggtaaatacatccagggcgcagatgtaattaatcgtctgggcgagtacctgaagccactggcggaacgctggttagtggtgggtgacaaatttgttttaggttttgctcaatccactgtcgagaaaagctttaaagatgctggactggtagtagaaattgcgccgtttggcggtgaatgttcgcaaaatgagatcgaccgtctgcgtggcatcgcggagactgcgcagtgtggcgcaattctcggtatcggtggcggaaaaaccctcgatactgccaaagcactggcacatttcatgggtgttccggtagcgatcgcaccgactatcgcttctaccgacgcaccgtgcagcgcactgtctgttatctacaccgatgagggtgagtttgaccgctatctgctgttgccaaataacccgaatatggtcattgtcgacaccaaaatcgtcgctggcgcgcccgcgcgtctgttagcggcgggtattggcgatgcgctggcaacctggtttgaagcgcgtgcctgttcccgtagcggcgcgaccaccatggcgggtggcaagtgcactcaggcagcgctggcactggctgaactgtgctacaacaccctgctggaagaaggcgaaaaagcgatgcttgccgccgaacagcatgtagtgactccggcgctggagcgcgtgattgaagcgaacacctatttgagtggcgttggttttgaaagcggcgggctggcggcggcacacgcggtacataacggcctgaccgctatcccggacgcgcatcactattatcatggtgaaaaagtggcattcggtacgctgacgcagctggttctggaaaacgcgccggtggaggaaatcgaaaccgtagctgcgcttagccatgcggtaggtttgccaataactctcgctcaactggatattaaagaagatgtcccggcgaaaatgcgaattgtggcagaagcggcatgtgcagaaggtgaaaccatccacaacatgcctggcggcgcgacgccagatcaggtttacgccgcactgctggtagccgaccagtatggtcagcgtttcctgcaagagtgggaataa

SEQ ID NO: 3095 - DNA, 663 bp, Escherichia coli
atggaactgtatctggacaccgctaacgtcgcagaagtcgaacgtctggcacgcatattcccgattgccggggtgacaactaacccgagcattatcgctgccagcaaggagtccatctgggaagtgctgccgcgcctgcaaaaagcgttcggtgatgagggaattctgtttgctcagaccatgagccgcgacgcgcagggtatggtgaaagaagcgaaacgcctgcgcgacgctattccgggcattgtggtgaaaattccggtaacctctgaaggtctggcagcaattaaaatgctgaagaaagaaggcattactacgctgggaaccgcagtgtacagcgccgcgcaaggattactggcggcgctggctggagccaaatacgttgctccatacgttaaccgcgtagatgcccagggcggtgacggcattcgtactgtacaggagttgcaagcgttactggaaatgcatgcgccagaaagcatggtgctggctgccagctttaaaacaccacgtcaggcgctggattgtttgctggctggatgtgaatccatcacactgcccttagatgtagcgcaacaaatgcttaacacccctgcggtagagtcagctatagagaagttcgagcacgactggaatgccgcatttggcactactcatctctaa

SEQ ID NO: 3096 - DNA, 2502 bp, Escherichia coli
atggccctgattgtggaatttatttgtgagctacctaacggcgtccatgcgcgtccggcaagccacgttgaaacgctgtgtaatactttttcatcacaaattgagtggcataacctgcgcactgaccgcaagggcaacgccaaaagcgcccttgcgctgattggcaccgatacgctggtgggcgataactgccagttactgatttccggggccgacgaacaggaagcgtaccagcgtttaagccaatggctgcgcgatgaattcccccactgcgacgcaccgctggcggaagtaaaatctgacgaactggaaccactgccggtttcactgaccaatctgaatccgcaaattatccgtgctcgcaccgtgtgcagtggtagcgcaggcggcattctgacgccgatctcttctttagatctcaatgcgctgggtaatcttcccgcagccaaaggcgttgacgccgaacaatccgcactggaaaacggtctgacgctggtactgaaaaacatagagtttcgtctgctggatagcgacggtgctaccagcgcgattctggaagcgcaccgatccctggctggcgatacttccctgcgcgaacatttactggcaggtgtcagcgccggattaagctgcgccgaagcgattgttgccagtgcgaatcacttttgcgaagagttcgcccgttccagcagcagctacctgcaagaacgtgcgctggatgtgcgcgacgtctgcttccagttactccagcaaatctacggtgagcaacgcttcccggcaccgggcaaactgacgcagcccgccatttgtatggctgatgaactgacccccagccagttcctcgaactggataaaaatcacctcaaaggtctattactgaaaagtggcggcaccacctcacatacggtgatccttgcccgttcgttcaacattccgacgctggtaggtgtggatattgatgcccttactccgtggcaacatcaaacgatttatatcgacggcaacgcaggggcgattgtggttgagccaggggaatccgtggcccgttattatcagcaagaagcccgcgtacaggacgctctgcgtgagcaacagcgtgtctggctgacccagcaagcgcgtaccgcagacggtatccgcattgaaattgccgctaacatcgctcactccgtggaagcgcaggccgcattcggcaatggtgcggaaggcgttggtttgttccgcactgaaatgctctatatggatcgcaccagtgcaccgggtgaaagcgagctgtacaacattttttgtcaggcgctggagtctgccaacggacgcagcattattgtgcgcactatggacattggcggtgataaacccgttgattatctgaacattccggcagaagctaacccgttcctcggttatcgcgcggtgcgtatttatgaagaatacgcgtcgttgtttaccacacaactacggtcgatcctgcgcgcctctgctcacggcagcctgaaaatcatgatcccgatgatctcctcaatggaagagatcttatgggtgaaagaaaaactggcggaagccaaacagcaactgcgtaacgaacacattccgtttgatgagaagatccagctcggcatcatgctggaagtgccgtcggtgatgttcatcatcgatcaatgctgcgaagagattgatttctttagtattggtagtaatgacctgacgcaatatctactggcagtggatcgcgataacgctaaggtgactcgtcactacaacagcctgaatccggccttcttgcgggcgctcgattacgccgtgcaggcggtgcatcgccagggcaaatggattggtctgtgcggtgaactgggagcgaaaggttccgtgctgccgttgctggtcggtttagggctggatgaactcagcatgagcgcaccatcaattccggcggcgaaagcgcggatggcgcaacttgatagccgtgagtgccgccagttgctcaaccaggcaatggcctgccgtacttcgctggaagtggaacacctgctggcgcaattccgcatgacccaacaggacgcaccgctggtcaccgccgagtgcatcacactggaaagcgactggcgcagcaaagaagaagtgctcaaaggcatgaccgataacctgctgctggcgggccgctgccgctatccgcgtaaactggaagccgacttgtgggcgcgcgaggccgttttctctaccggactgggctttagtttcgccattccccacagtaaatcggaacacattgagcaatccaccatcagcgtagcgcgtctgcaagcgccagtgcgctggggcgatgatgaagcgcaattcatcattatgttaaccctgaacaaacacgccgcgggcgatcaacatatgcgcattttctcgcgcctcgctcgtcgcatcatgcacgaagaattccgtaatgcgctggttaacgccgcctctgccgacgctatcgccagcctgctgcaacatgaactggaactgtaa

SEQ ID NO: 3097 - DNA, 1080 bp, Escherichia coli
atgaatgagttggtgcagatcctgaaaaatacccgtcagcatttaatgacgggcgtttcacacatgattcccttcgtggtatcgggcggtattttgctggcggtttccgtcatgttgtatggcaaaggcgcagtgccggatgccgtagccgatccgaatctgaaaaaactgtttgatatcggcgttgcaggtttgacgctgatggtgcctttcctcgccgcttacatcggttattccattgcagaacgttctgcgctggctccatgcgctatcggtgcctgggttggtaacagctttggcgcgggcttctttggtgcgctgatcgccgggattatcggcggcatcgtggtgcattacctgaagaaaattccggtgcataaagttctgcgctcggtgatgccaatcttcatcattccaatcgtcggcacactgattaccgctggcgtcatgatgtgggggttgggcgaaccggtgggggcgttgaccaacagcctgacccagtggcttcaggggatgcagcagggcagcattgttatgctggcggtgatcatgggtctgatgctggcgttcgatatgggcggcccggttaacaaagtggcctatgccttcatgctgatttgcgttgctcagggtgtttataccgtggtggctattgccgctgttgggatttgtgttccaccgctggggatggggctggcgacgctgattggtcgtaaaaatttctccgcagaagagcgcgaaaccggcaaggcggcactggtgatgggctgtgttggcgttactgaaggggcgattcctttcgccgctgccgatccgctgcgtgtcattccttccatcatggtcggttcagtttgtggtgcggtaactgcggcgctggtcggtgcgcagtgctatgcaggctggggtggtctgattgtgctgccggtggttgaaggtaagttgggttacatcgcggcagtggctgtcggggcggttgtgacggcagtctgcgtgaacgtgctgaaaagtctggcgcgtaaaaatgggtcttcaactgaagagaaggaagacgacctggatctggattttgaaattaattaa

SEQ ID NO: 3098 - DNA, 321 bp, Escherichia coli
atgacgaaaattatcgcagtaaccgcatgtccttcaggtgttgcccatacttatatggcggcagaggcgctggaaagcgccgcgaaagcgaaaggctgggaagtgaaagtagaaacccaggggtcgattggtctggaaaatgaactgactgcggaagacgtggcaagcgccgatatggtgattttgaccaaagatatcggcatcaaatttgaagagcgttttgctggcaagactatcgtgcgtgtcaacatcagcgacgcggtaaaacgtgctgacgccattatgagcaaaattgaagctcacctggcacaaaccgcttaa

SEQ ID NO: 3099 - DNA, 2298 bp, Escherichia coli
atgacgaatcgtatctctcgcctcaaaactgcactgtttgccaatacccgtgaaatctcgctggagcgggcgttgctttataccgccagccatcggcaaaccgaaggggagccggtgataatgcgtcgggcgaaagcaacagcgtatatccttgaacacgttgaaatttcgattcgtgatgaagaactgattgccggtaaccgcaccgtaaaaccacgcgccgggattatgtcgccggaaatggacccttactggctgctgaaagagctggatcaattcccgacgcgtccgcaggaccgctttgctatcagcgaagaagataaacgtatctaccgcgaagagttgttcccgtactgggaaaaacgttcgatgaaagatttcatcaacgggcagatgacggatgaagtaaaagccgcgaccagcacgcagattttcagcatcaaccagacggataaaggccaggggcacattattattgattacccgcgcctgctgaatcacgggctgggggagctggtggcacagatgcagcaacattgtcagcaacagccggagaatcacttttatcaggcagcgctgttactgctggaagcctcgcagaaacatattttgcgttacgccgaactggcggaaacgatggcggcaagctgcactgatggcccgcgtcgcgaagaactgctgaccattgcggagatctcccgccataacgccgaacataagccgcagacgttctggcaggcgtgccagttattctggtacatgaacatcattctgcaatacgaatccaacgccagttcgctatcgttggggcgcttcgaccagtatatgttgccgttctatcagacatcattaacccagggcgaagatccggcattcctgaaagaactgctcgaatctttatgggtgaaatgcaacgacatcgtgctgttgcgctccaccagtagcgcgcgttatttcgccggtttccctaccggctataccgcactgctcggcgggttaaccgagaacggacgtagcgcggtgaacgtgctttcgttcctttgccttgacgcttatcaaagcgtgcaattaccgcaaccgaacctcggcgtgcgcactaacgccttgatcgacacccctttcctgatgaaaaccgcagaaaccattcgcctcggcaccggtattccgcaaatctttaacgatgaagtggtagtgccagcgttcctcaaccgtggcgtttcgctggaagatgcgcgcgactattccgtagtgggctgtgtggaattatctattcccggcagaacctacggcttgcatgacatcgcgatgtttaacctgctgaaagtgatggaaatctgcctgcatgaaaatgaaggcaacgctgcgctgacttatgaaggtttactggaacagatccgcgccaagatcagccactacatcaccctgatggttgagggcagcaatatttgtgatatcggccatcgcgactgggctcctgtaccgctactctcgtcttttatcagcgattgtctggaaaaaggtcgcgatattaccgatggcggcgcgcgttataacttctccggcgtacaggggatcggtatcgccaacctgagcgattctctccatgcgttgaaagggatgatttttgatcaacagcgtttaagttttgacgaattgctgtcggtattaaaagccaacttcgccacgccagaaggcgaaaaagtccgcgctcgcttaattaaccgcttcgagaaatacggtaacgatatcgacgaggtggataacatcagcgccgaactgttacgccactactgcaaagaagtggaaaaataccagaacccgcgcggcggctacttcacgccgggatcgtataccgtttctgcccacgtcccgttgggatcggtggttggcgcgacgccagacggtcgttttgccggggaacaactggcagacggtggcttgtcacccatgctgggtcaggatgcacaagggccaacggcggtactgaaatcagtcagtaagctcgataatacgctgctgtctaacggtacgttgctgaacgtgaaattcactccggcgaccctggaaggtgaagcgggattacgcaaactggccgacttcttacgggcgtttacccagcttaagttgcagcatattcagtttaacgtggtgaacgccgacacgttgcgggaagcgcaacagcgcccacaagattatgccgggctggtggtgcgcgttgccggatacagcgccttctttgtcgaactgtcgaaggagatccaggatgacatcatccgccggacagcgcatcagctgtaa

SEQ ID NO: 3100 - DNA, 879 bp, Escherichia coli
atgacatcatccgccggacagcgcatcagctgtaacgttgtggaaacgcgccgcaatgatgtggcgcgcattttcaacattcagcgttattcactgaatgacggcgagggcattcgtacggtggtcttttttaaaggctgtccgcatctttgcccatggtgtgctaatccggagtcgatctccggcaaaatccagacggtacgcagagaggcgaaatgtctgcactgtgcgaaatgtttgcgtgatgcggatgaatgcccctccggggcgtttgaacggattggtcgcgatatcagccttgacgctctggaacgggaagtgatgaaagatgacattttctttcgcacgtccggcggtggcgtcacgctttctggcggcgaagtgttaatgcaggcggagtttgcgacccgttttttacagcgactgcggctatggggtgtgtcatgcgccatcgaaactgccggagacgcgccagccagcaagctgttaccgctggcgaaattgtgcgatgaagtgttgttcgatttaaaaattatggatgcggctcaggcgcgggatgtggtgaagatgaacctgcaacgcgtgctggagaatctgcgtttgctggtgagtgagggtgtcaacgtgatcccgcgtttaccgctgatccctggtttcacgctcagccgggagaatatgcagcaggcgctggacgtgctgatcccgctgaatatcaagcagatccatctgttaccgtttcatcagtacggcgagccgaaataccgcctgctggggaaaacatggtcgatgaaagaggttgctgctccgtcgtcagccgatgtggcaacgatgcgtgaaatggcagaacgggccggatttcaggttaccgtgggaggttaa

SEQ ID NO: 3101 - DNA, 342 bp, Escherichia coli
atggcatacctggtggcagtaaccgcctgcgtaagcggcgtggcgcatacttatatggcggcggaacggctggaaaagttgtgccagttagagaagtggggcgttagcattgaaactcagggcgcgttgggaacggagaatcgtttagcggacgaggatatccgccgggcggatgttgcgctgttaattacggatatcgagcttgccggtgctgagcgatttgaacattgtcgctacgtgcaatgcagcatctacgctttcctgcgtgagccgcagagggtgatgagcgcagtgcgcaaagtgctttctgcgccgcagcaaacccatcttattctggagtag

SEQ ID NO: 3102 - DNA, 852 bp, Escherichia coli
atgtatcacgacgtcagctatctgctctcccgcctgatcaacggcccgctgtccctgcgccagatttactttgccagcagcaacggcccggtgcccgatcttgcgtatcaggtcgattttccacggctggaaattgtgctggaaggtgagtttattgataccggcgctggagcagcgttagttcccggcgatgtgctgtacgtccctgctggtggctggaattttccacaatggcaagcccccgccaccacctttagcgtgctgtttggcaaacagcaactcggcttcagcgttgtgcaatgggatggcaaacaatatcaaaatctggcgaagcaacacgtcgcccgacgcggcccgcgcattggttcttttctgctacaaacgctcaatgaaatgcaaatgcagtcgcaggagcagcaaacggccagacttatcgtcaccagcctgcttagccactgccgcgatttgctcggcagccaaatacagaccgcctcacgcagccaggctctattcgaagctattcgtgattatatcgacgaacgctatgcctccgcacttacccgcgaatctgtcgcacaggcgttctatatttcgccaaattacctctcgcacctgtttcaaaaaacgggggccattggttttaacgaatacctgaatcacacgcgactggagcacgctaagacattattgaaaggctatgacctgaaggtaaaagaagtggcgcacgcctgcggctttgtcgacagcaactacttctgccgtctgtttcgtaaaaataccgaacgctcgccgtcggaatatcgtcggcagtaccacagccaactgacagaaaaaccgactactccagaataa

SEQ ID NO: 3103 - DNA, 1734 bp, Escherichia coli
atgcattccacagaagtccaggctaaacccctttttagctggaaagccctgggttgggcactgctctacttttggtttttctctactctgctacaggccattatttacatcagtggttatagtggcactaacggcattcgcgactcgctgttattcagttcgctgtggttgatcccggtattcctctttccgaagcggattaaaattattgccgcagtgatcggcgtggtgctatgggcggcctctctggcggcgctgtgctattacgtcatctacggtcaggagttctcgcagagcgttctgtttgtgatgttcgaaaccaacaccaacgaagccagcgagtatttaagccagtatttcagcctgaaaattgtgcttatcgcgctggcctatacggcggtggcagttctgctgtggacacgcctgcgcccggtctatattccaaagccgtggcgttatgttgtctcttttgccctgctttatggcttgattctgcatccgatcgccatgaatacgtttatcaagaacaagccgtttgagaaaacgttggataacctggcatcgcgtatggagcctgccgcaccgtggcaattcctgaccggctattatcagtatcgtcagcaactaaactcgctaacaaagctactgaatgaaaataatgccttgccgccgctggctaatttcaaagatgaatcgggtaacgaaccgcgcaccttagtgctggtaattggcgaatcgacccagcgtggacgcatgagtctgtacggttatccgcgtgaaaccacgccggagctggatgagctgcataaaaccgatccgaatctgaccgtgtttaataacgtggttacgtctcgtccgtacaccattgaaatcctgcaacaggcgctgacctttgccaatgaaaagaacccggatctgtatctgacgcagccgtcgctgatgaacatgatgaaacaggcgggttataaaaccttctggatcaccaaccagcagacgatgaccgcccgcaataccatgctgacggtattttcgcgccagaccgacaagcagtactacatgaaccagcaacgtacgcagagtgcgcgtgaatacgacaccaacgtgctgaagccgttccaggaagtgctgaaggaccctgcgccgaagaaactgatcatcgttcatctgctgggtacgcatatcaagtacaagtaccgttatccggaagatcagggcaaatttgacggtaatacagagcatgttccaccgggattaaacgcagaagagctggagtcatataatgattatgacaatgctaacctgtacaacgatcacgtggttgccagcctgattaaagactttaaagcgaccgatccgaacggtttcctggtttatttctctgaccacggtgaagaggtttacgacacgccgccgcacaaaactcaggggcgtaatgaagacaacccgacgcgtcatatgtacaccattccgttcctgctgtggacgtcagaaaaatggcaagcgactcatccgcgtgatttctcacaggatgttgatcgtaaatacagcctggcggaactgatccacacctggtcagatttggcgggcttatcttacgacggttacgatccaacccgttcagtggtgaatccgcagttcaaagaaactacccgctggattggtaacccgtataagaaaaacgcactgatcgattacgacactctgccgtatggcgatcaggtgggtaatcagtaa

SEQ ID NO: 3104 - DNA, 2652 bp, Escherichia coli
atgaacgaacaatattccgcattgcgtagtaatgtcagtatgctcggcaaagtgctgggagaaaccatcaaggatgcgttaggagaacacattcttgaacgcgtagaaactatccgtaagttgtccaaatcttcacgcgctggcaatgatgctaaccgccaggagttgctcaccaccttacaaaatttgtcgaacgacgagctgctgcccgttgcgcgtgcgtttagtcagtttctgaacctggccaacaccgccgagcaataccacagcatttcgccgaaaggcgaagctgccagcaacccggaagtgatcgcccgcaccctgcgtaaactgaaaaaccagccggaactgagcgaagacaccatcaaaaaagcagtggaatcgctgtcgctggaactggtcctcacggctcacccaaccgaaattacccgtcgtacactgatccacaaaatggtggaagtgaacgcctgtttaaaacagctcgataacaaagatatcgccgactacgaacacaaccagctgatgcgccgcctgcgccagttgatcgcccagtcatggcataccgatgaaatccgtaaactgcgcccaagcccggtagatgaagccaaatggggctttgccgtagtagaaaacagcctgtggcaaggcgtaccgaattacctgcgcgaactaaacgaacaactggaagagaacctcggctacaaactgcccgtcgaatttgttccggtacgttttacctcgtggatgggcggtgaccgcgacggcaacccgaacgtcactgccgatatcacccgccacgtcctgctgctcagtcgctggaaagccaccgatttgttcctgaaagatattcaggttctggtttctgaactgtcgatggttgaagccacccctgaactgctggcgctggttggcgaagagggagccgcagaaccgtatcgctatctgatgaaaaacctgcgttctcgcctgatggcgacacaggcatggctggaagcgcgcctgaaaggcgaagaattgccaaaaccagaaggtctgctgacacaaaacgaagaactgtgggaaccgctctacgcttgctaccagtcacttcaggcgtgtggcatgggtattatcgccaatggcgatctgctcgacaccctgcgccgcgtgaaatgtttcggcgtaccgctggtgcgtattgatatccgtcaggagagcacgcgtcataccgaagcattaggcgaactgacccgctacctcggtatcggcgattatgaaagctggtcagaagccgacaaacaggcgttcctgatccgcgaactgaactccaaacgtccgcttctaccacgcaactggcaaccaagcgccgaaacgcgtgaagtgctcgatacctgccaggtgattgccgaagcgccgcaaggctccattgccgcctacgtgatctcgatggcgaaaacgccgtccgacgtgctggctgtccacctgctgctgaaagaagcgggtatcgggtttgcgatgccggttgctccgctgtttgaaaccctcgatgacctgaacaacgccaacgatgtcatgacccagctgctgaatatcgactggtatcgcggcctgattcagggcaaacagatggtgatgattggctattccgactcagcaaaagatgcgggcgtgatggcagcttcctgggcgcaatatcaggcacaggatgcattaatcaaaacctgcgaaaaagcgggtattgagctgacgttgttccacggtcgcggcggttccattggtcgcggcggcgcacctgcccatgcggcgctgctgtcacaaccgccaggaagcctgaaaggtggcctgcgcgtgaccgaacagggcgagatgatccgctttaaatatggtctgccagaaatcaccgtcagcagcctgtcgctgtacaccggggcgattctggaagccaacctgctgccaccgcctgagccgaaagagagctggcgtcgcattatggatgaactgtcagtcatctcctgcgatctctaccgtggctacgtacgtgaaaacaaagattttgtgccttacttccgctccgctacgccggaacaagaattgggtaaactgccgttgggttcacgtccggcgaaacgtcgcccaaccggcggcgtcgagtcactgcgcgctattccgtggattttcgcctggacgcaaaaccgcctgatgctccccgcctggctgggtgcaggtacggcgctgcaaaaagtggtcgaagatggcaaacagagcgagctggaagccatgtgccgcgattggccattcttctcgacgcgtctcggcatgctggagatggtcttcgccaaagcagacctgtggctggcagaatactatgaccaacgcctggtcgacaaagcactgtggccgttaggtaaagagttacgcaatctgcaagaagaagacatcaaagtggtgctggcgattgccaacgattctcacctgatggccgatctgccgtggattgcagagtctattcagctacggaatatttacaccgacccgctgaacgtattgcaggccgagttgctgcaccgctcccgccaggcagaaaaagaaggccaggaaccggatcctcgcgtcgagcaggcgttaatggtcactattgccgggattgcggcaggtatgcgtaataccggctaa

SEQ ID NO: 3105 - DNA, 1152 bp, Escherichia coli
atgaaaaacaaattaccgccatttatcgagatttaccgtgctctgattgccacaccttcaataagcgccacggaagaggcactcgatcaaagcaatgcagatttaatcactctgctggcggactggtttaaggatttaggcttcaatgtggaagtacagcctgtgccaggaactcgcaacaaatttaatatgctggccagttgcggacagggggctggcggtttgttgctggcggggcataccgatacggtgccatttgatgacggacgctggacgcgcgatccatttacgttgacggagcatgacggcaagctttacggcttaggcaccgccgacatgaaaggcttttttgcgtttatccttgatgcgctacgcgatgtcgacgtcacgaagcttgcaaaaccgctctacattctggcgactgccgatgaagaaaccagtatggccggagcgcgttattttgccgaaactaccgccctgcgcccggattgcgccatcattggcgagccaacgtcgctgcaaccggtacgcgcgcataaaggtcatatctctaacgccatccgtattcagggccagtcgggccactccagcgatccagcacgcggagttaacgctatcgaactgatgcacgacgccatagggcatattttgcaattgcgcgataacctgaaagaacgttatcactacgacgcgtttaccgtgccataccctacgctcaacctcgggcatatccacggcggcgatgcatctaaccgtatttgcgcttgttgtgagttgcatatggatattcgtccgctgccaggcatgacactcaatgaacttaacggtttgctcaacgatgcattggctccagtgagcgaacgctggccgggtcgtctgacggtcgacgagctgcatccgccgatccctggctatgaatgcccaccgaatcatcaactggttgaagtggttgagaaattgctcggagcaaagaccgaagtggtgaattactgtaccgaagcgccgtttattcaaacgttatgcccgacgctggttctggggcctggctcaattaatcaggctcatcagcctgatgaatatctggagacgaggtttatcaagcccacccgcgaactgatcacccaggtgattcaccatttttgctggcattaa

SEQ ID NO: 3106 - DNA, 1005 bp, Escherichia coli
atgttgaatacgctgattgtgggtgccagcggctacgctggcgcagagctagtgacctatgtaaatcgccatccgcatatgaacataaccgctttgactgtttcagcgcaaagcaatgatgcgggaaagttaatctccgatttgcatccgcagctaaaaggcatcgttgatctgccgttgcagccgatgtcggatatcagcgagtttagcccaggggtggacgtggtgtttcttgccaccgcccatgaagtcagccacgatttagcgccgcaatttcttgaagcaggctgtgtggtgttcgacctttccggcgcgtttcgtgttaacgatgtcgccttctatgaaaaatattacggctttacccatcaatacccggaactgctggaacaggcagcctacggtctggcggagtggtgcggtaataaattaaaagaagcgaacttgattgccgtgccaggctgttatccgacggcagcacagctggcgctgaaaccgttgattgatgccgatcttcttgacctcaatcagtggccggtgatcaacgccaccagcggcgtgagcggtgcaggacgtaaggcagcgatttcaaatagtttttgtgaagttagcctgcaaccgtatggcgtctttacccatcgccatcaaccagagatcgccacacacctcggtgctgacgttatcttcaccccgcatctgggcaatttcccgcgcggcattctcgaaaccattacctgccgcctgaagccgggtgtgagccaggtgcaagtggcgcaagcgttacagcaggcgtatgcccataaaccactggtgcggctgtatgacaaaggcgttccggcgctgaaaaatgtcgttggactgccattctgcgatatcggttttgccgttcagggcgagcatctgattattgtggcaaccgaagacaacttactgaaaggcgcggcggcacaagcggtgcagtgcgccaatattcgtttcggctatgcggaaacgcagtctcttatttaa

SEQ ID NO: 3107 - DNA, 777 bp, Escherichia coli
atgatgaatccattaattatcaaactgggtggcgtactgctggatagtgaagaggcgctggaacgtctgtttagcgcactggtgaattatcgcgagtcacatcagcgtccgctggtgattgtgcacggcggcggttgcgtggtggatgagctgatgaaagggctgaatctgccggtgaaaaagaaaaatggcctgcgggtgacgcctgcggatcagatagacattatcaccggagcactggcgggaacggcaaataaaaccctgctggcatgggcgaagaaacatcagattgcggccgtaggtttgtttctcggtgacggcgacagcgtcaaagtgacccagcttgatgaagagttaggccatgttggactggcgcagccaggttcgcctaagcttatcaacagtttgctggagaacggttatctgccggtggtcagctccattggcgtaacagacgaagggcaactgatgaatgtcaatgccgaccaggcggcgacggcgctggcggcaacgctgggcgcggatctgattttgctctctgacgtcagcggcattctcgacggcaaagggcaacgtattgccgaaatgaccgccgcgaaagcagaacaactgattgagcagggcattattactgacggcatgattgtgaaagtgaacgcggcgctggatgctgcgcgcacgttgggccgtccggtagatatcgcctcctggcgtcatgcggaacagcttccggcactgtttaacggtatgccgatgggtacgcggattttagcttaa

SEQ ID NO: 3108 - DNA, 1374 bp, Escherichia coli
atggcactttggggcgggcgttttacccaggcagcagatcaacggttcaaacaattcaacgactcactgcgctttgattaccgtctggcggagcaggatattgttggctctgtggcctggtccaaagccctggtaacggtcggcgtgttaaccgcagaagagcaggcgcaactggaagaggcgctgaacgtgctgctggaagatgttcgcgccaggccacaacaaatccttgaaagcgacgccgaagatatccatagctgggtggaaggcaaactgatcgacaaagtgggtcagttaggcaaaaaactgcataccgggcgtagccgtaatgatcaggtagcaactgacctgaaactgtggtgcaaagataccgttagcgagttgctgacggctaaccggcagttacaatccgctctggtcgagaccgcgcagaacaatcaggacgcggtgatgccgggttacacccacctgcaacgcgcccagccggtgacgttcgcgcactggtgcctggcctacgttgagatgctggcgcgtgatgaaagccgtttgcaggatgcgcttaagcgtctggatgtcagcccgctaggctgtggcgcactggcaggaacggcctatgaaatcgaccgtgaacagttagcaggctggctgggctttgcttcggcgacccgtaacagtctcgacagcgtttctgaccgtgaccatgtgttggaactgctttctgctgccgctatcggcatggtgcatctgtcgcgttttgctgaagatctgattttctttaacaccggcgaagcggggtttgtggagctttctgaccgtgtgacttccggttcatcattaatgccgcagaagaaaaacccggatgcgctggagctgattcgcggtaaatgcggtcgggtgcagggggcgttaaccggcatgatgatgacgctgaaaggtttgccgctggcttacaacaaagatatgcaagaagacaaagaaggtctgttcgacgcgctcgatacctggctggactgcctgcatatggcggcgctggtgctggacggcattcaggtgaaacgtccgcgttgccaggaagcggcgcagcagggttacgccaacgctactgaactggcggattatctggtggcgaaaggcgtaccgttccgcgaggcgcaccatattgtgggtgaagcggtggtggaagccattcgtcagggcaaagcgttggaagatctgccgctcagtgagttgcagaaattcagccaggtgattggcgaagatgtctatccgattctgtcgctgcaatcgtgcctcgacaagcgtgcagcaaaaggcggtgtctcaccgcaacaggtggcgcaggcgattgcttttgcgcaggcgcggttggggtaa

SEQ ID NO: 3109 - DNA, 1215 bp, Escherichia coli
atgaaaattattgctgtggatgtttttgttacttgtcccgggcgtaatttcgttacgcttaaaataaccactgaaagcggactttgtggattaggagatgccacgttaaatggtcgcgaattgtcggtcgcttcttatctgaaagatcatctttgtcctcaattaattggccgcgatgccagccgtatcgaagatatctggcaattcttttataaaggagcttactggcgacgtggtcccgtcacgatgtcggccatttctgccattgatatggcgttgtgggatatcaaagctaaagcggcaaatatgccattgtatcaactgcttggtggcgcttctcgtgaaggcgtgatggtttattgccacaccaccgggcggacgattgatgaagtccttgaagactatgcaaagcaccagcagatgggctttaaggcgattcgtgtgcagtgtggtgtaccgggtatgcaaaccacctatggtctggcgaagggcaaaggactggcgtatgaaccagcaaccaaaggcctgtggccagaagagcagttgtggtcttcagaaaagtatctcgattttacgccgaagttatttgaagcggtgcgtaataagttcggttttaacgaacatctgttgcatgacatgcaccatcgcctgacccccatcgaagcggcgcgctttgggaggagcattgaggattaccgcctgttctggatggaagatccgacgcctgccgagaaccaggaatgttttcgtctgattcgccagcataccgtgacgccgattgcggtcggtgaagtgtttaacagtatctgggactgcaaacagttaatcgaagagcagctgattgactatattcgcacgacgattacccatgcaggcggcattaccgggatgcgacggattgccgattttgcatcgctttatcaggtacgtaccggttcgcatggcccttcagatttatcgcctgtttgccatgcggcggcgctgcattttgacctctgggtgccaaactttggcgttcaggagtacatgggctattccgaacaaatgcttgaagtcttcccgcacagctggcgcttcgatgaaggttatatgcacccaggcgatgaaccggggctgggtatttctttcgatgagaaactggcggcgaaatatccgtatgacccggcgtatctccccgtcgcacgactggaagatggcacattgtggaactggtaa

SEQ ID NO: 3110 - DNA, 1284 bp, Escherichia coli
atggacgttgatgtgtcaaccagtgttgcgggtaataaaccgcaacggattcgtcgtattcagacagtgaccctggttttattatttatggcggggatcgttaattttctcgaccgttcgtcattgagcgtggcaggtgaagcaattcgtggcgagttaggattatccgctaccgagtttggtgttttgctttctgcattttctctgtcttatggtttttcacaacttccttccggtattttgctagaccgctttggcccacgaatagtgttaggcgcaggcttaatattctggtcattaatgcaggcattaacaggaatggttaattcttttagccactttattttaatgcgtatcggtctgggtattggcgaagcgccatttatgcctgcgggagtaaagtcgatcaccgactggtatgcgcaaaaagaacgcggcacggcgctggggatttttaactcatctaccgttatcggtcaggctatcgcgcctcctgctcttgtattgatgcaactggcatggggctggcggacgatgtttgtcatcatcggcgtagcagggattctggttgggatctgttggtacgcgtggtatcgcaaccgggcgcagtttgtcctgaccgaggaagaacggacatatctctccgcgccggttaaaccgcgtccacagttacaatttagcgagtggctggcgctgtttaagcatcggacaacctgggggatgattttaggtttctctggcgtcaattataccggttggctctacatcgcgtggttacccggttatttgcaggccgaacaaggtttcagtctggcgaaaaccggttgggtggcggcaattcctttcctcgcggcggcggtcgggatgtgggttaacggtattgttgtcgatcggctggcgaaaaaaggctatgacctggcgaagacgcgtaaaacggcgattgtctgcggtttgatgatgtcggcattaggcacgttgctggtcgtgcaatcttcctcgccagcccaggcggtagcgtttatctcaatggcgctgttctgcgtgcatttcgcgggaacatctgcatgggggctggtgcaggtgatggtgtcagaaacaaaagtggcttccatcgccgggattcaaaactttggcagttttgtttttgcttcctttgctccgatcgtaaccggttgggtcgtggataccacacactcgtttaatctggcgctggttatcgcggcctgtgtgacgttcaccggggcgctgtgttacttctttattgtcaaagatcggattgagtaa

SEQ ID NO: 3111 - DNA, 918 bp, Escherichia coli
atgaatattcgtgatcttgagtacctggtggcattggccgaacaccgccattttcggcgtgcggcagattcctgccacgttagccagccgacgcttagcgggcaaattcgtaagctggaagatgagttgggcgtgatgttgctggagcggaccagccgtaaagtgttattcacccaggcgggaatgctgctggtggatcaggcgcgtaccgtgctgcgtgaggtgaaagtccttaaagagatggcaagccagcagggcgagacgatgtccggaccgctgcatattggtctgattcccacggttggaccgtacctgctaccgcatattatcccgatgctgcaccagacctttccaaagctggaaatgtatctgcatgaagcacagacccaccagttactggcgcaactggacagcggcaaactcgattgcgtgatcctcgcgctggtgaaagagagcgaagcattcattgaagtgccgttgtttgatgagccaatgttgctggctatctatgaagaccacccgtgggcgaaccgcgaatgcgtaccgatggccgatctggcaggggaaaaactgctgatgctggaagatggtcactgtttgcgcgatcaggcaatgggtttctgttttgaagccggggcggatgaagatacacacttccgcgcgaccagcctggaaactctgcgcaacatggtggcggcaggtagcgggatcactttactgcctgcgctggctgtgccgccggaacgcaaacgcgatggggttgtttatctgccgtgcattaagccggaaccacgccgcactattggcctggtttatcgtcctggctcaccgctgcgcagccgctatgagcagctggcagaggccatccgcgcaagaatggatggccatttcgataaagtgttaaaacaggcggtttaa

SEQ ID NO: 3112 - DNA, 1401 bp, Escherichia coli
atgccacattcctacgattacgatgccatagtaataggttccggccccggcggcgaaggcgctgcaatgggcctggttaagcaaggtgcgcgcgtcgcagttatcgagcgttatcaaaatgttggcggcggttgcacccactggggcaccatcccgtcgaaagctctccgtcacgccgtcagccgcattatagaattcaatcaaaacccactatacagcgaccattcccgactgctccgctcttcttttgccgatatccttaaccatgccgataacgtgattaatcaacaaacgcgcatgcgtcagggattttacgaacgtaatcactgtgaaatattgcaggggaacgctcgctttgttgatgagcatacgttggcgctggattgcccggacggcagcgtcgaaacactaactgctgaaaaatttgttattgcctgcggttctcgtccatatcatccaacagatgttgatttcacccatccacgcatttatgacagcgactcaattcttagcatgcaccacgaaccgcgtcatgtacttatttacggtgctggagtgatcggctgtgaatatgcgtcgatcttccgcggtatggatgtaaaagtggatctgatcaacacccgcgatcgcctgctggcatttctcgatcaagagatgtcagattctctctcctatcacttctggaacagtggcgtagtgattcgtcacaacgaagagtacgagaagatcgaaggctgtgacgacggtgtgatcatgcatctgaagtcgggtaaaaaactgaaagctgactgtctgctctatgccaacggtcgcaccggtaataccgattcgctggcgttacagaacattgggctggaaactgacagtcgcggacagctgaaggtcaacagcatgtatcagaccgcacagccgcacgtttacgcggtgggcgacgtgattggttatccgagcctggcgtcggcagcctatgaccaggggcgcattgccgcgcaggcgctggtgaaaggtgaagccaccgcacatctgattgaagatatccctaccggcatttacaccatcccggaaatcagctctgtaggcaaaaccgaacagcagctgaccgcgatgaaagtgccatatgaagtgggccgcgcccagtttaaacatctggcacgtgcacaaatcgtcggcatgaacgtgggcacgctgaaaattttgttccatcgggaaacaaaagagattctgggtattcactgctttggcgagcgcgctgccgaaattattcatatcggtcaggcgattatggaacagaaaggtggcggcaacactattgagtacttcgtcaacaccacctttaactacccgacgatggcggaagcctatcgggtagctgcgctaaatggcttaaaccgcctgttttaa

SEQ ID NO: 3113 - DNA, 1167 bp, Escherichia coli
atgatcgaacactatattcgtgggtttgaggaagaacttcgcgagatccgccatcagatccacgaaaacccggagctgggattacaagaatttaaaaccagtgctttggttgcggaaaagctgcgccagtggggctatgaggttgagcaagggctggcgacaaccggcgtggtagccacgttaaaagtgggcgacggagagaaaagtattggcctgcgggcggatatggatgcgttgccgatttatgaaaatagtggcaagccctgggccagtaaacatcctggtttaatgcacgcctgcgggcatgacgggcataccaccatactgctgggggctgcgcgttattttgccgaaacccgccgttttaacggcacgttacgccttatcttccagcctgcggaagagatgattaacggcggtgagatcatggttaaagaggggctttttgatcgtttcccctgcgatgtcattttcgggatgcacaacatgccgggtttgccggtcggcaagtttttcttccagcctggggcgctgatggcgtcaatggatcagttccatattacggttcgtggttgtggcggacacggtgcgatcccgcacaaagccatcgatccagtgctggttgctgcacatatcaccaccgcattacaaagcattgtgtcgcgcaatgtcgatccgctggaagcggcggtaattaccgtcggcagcattgttgcgggtgaggcggctaacgtcattcctgacagtgctgagatgaaaatcagcgtccgctctcttagccgcgatacccgacaacttcttctgacccgtattcctgctcttgcacaagcccaggctgccagctttggcgctacggctgaggttacgcatgttaacggtacaccggtattagtaaatgacgaggagatggcgcgcttcgcctggcaggtggcgtgcaaaacatttggtgaagatcgggctgagtttggcatcaaacccctgatgggcagtgaagatttctctttcatgctggaagcccaacccaaaggcggtttcctgttattcggtaatggcgatgtcggggaaggttcctgcatggtgcataaccccggttacgactttaacgatgcaagcctggtcccggcaagcagctactggggcgcactggttgaagcctggctgcaataa

SEQ ID NO: 3114 - DNA, 1317 bp, Escherichia coli
atgacggcgatcgtaaatgaaaccgtgagtgtgaagaaaaagcccagcggcaggcgggtgatctttgcctcggcgtttggcaatgcgctcgaattttttgattttggcgtttacaacttttttgtggtctatatcagtacgcttttcttcccacccagtgccgatcataacgtcgcgctgttactggcatttgcaacgtttggtgtgagcttttttatgcgtccgctcggtgggattatcgttggtgcctgggccgatcgcttcgggcgtaaaccggcgatggtgttcactattgctctgatgagcctcggtacgctgatgatcggcatcgcaccgacgtatgaaacggcgggctattggggaactgcaacgctggtgctggcgcgtctaattcagggcgttgcggcaggtggtgaagtcggggcttcaatgtcgctactggtggagtcagctccggcaaatcgtcgcggcttttacagcagttggtcactggcgacccaagggctggcaacgaccttcggtggggttgttgctttaggtctgagcgcatggctaccgttcgccacaggttcagaaaccgtaatggcagaatggggctggcgtgtgccgttttttattggcgtgttattagcacctatcggttgctggttgcgtctgagcctggaaaatgacgtacctgagccagtgcgcaataaaaaagctgctaccagcgaaagcgcgttttctctgctcctgcaacataaggcgactatcgttaatggcgttttactcgctattggtagcacggtcgcaacctatatctccctcttttattacggcacctgggcggcgaagtatctggcgatgcctcaacattattctcatgcagcgatgttactggcgggggtaattacgtttgtgggtgcgctgttggtggggatgctatgtgattcggttgggcgtaaaaagctgattttaatctcccgtgtgatggtgcttctctgtagctggccgtcattctggctgttggtgaattacccaagccctggcatgttgctgacggtggttttcgtgatggtcagctttaccacgcttggcggtgtgccagtgatgttgttgatctctgaactgttgccgaaacggattcgggcattaggtttcgcgctggtttatagcattggcgtagcaatctttggcggttttgcgcaatatttcgccacgcaatccatcgtgttgctggatagtctgacggctccggcgtggtatctggggggaggcacgttgctgtcgatgctggcgttgttgtacgtaaaagaaccggccaaagaattgcagtaa

SEQ ID NO: 3115 - DNA, 705 bp, Escherichia coli
atgttcattctctggtatagtgccagcagtacttttggcaaggattcagacatcgtgatgggcgtaagagcgcaacaaaaagaaaaaacccgccgttcgctggtggaagccgcatttagccaattaagtgctgaacgcagcttcgccagcctgagtttgcgtgaagtggcacgagaagcaggcattgctcccacctctttttatcggcatttccgcgacgtagacgaactgggtctgaccatggttgatgagagcggtttaatgctacgccaactcatgcgtcaggcgcgtcagcgtatcgccaaaggcgggagtgtgatccgcacctcggtctccacatttatggagttcatcggtaataatcctaacgccttccggttattattgcgggaacgctccggcacctccgctgcgtttcgtgccgccgttgcgcgtgaaattcagcacttcattgcggaacttgcggactatctggaactcgaaaaccatatgccgcgtgcgtttactgaagcgcaagccgaagcaatggtgacgattgtcttcagtgcgggggccgaggcgttggatgtcggcgtcgagcaacgccggcaattagaagagcgactggtactgcagctgcgaatgatttcgaaaggggcttattactggtatcgccgtgaacaagagaaaaccacaattattccgggaaatgtgaaggacgagtaa

SEQ ID NO: 3116 - DNA, 360 bp, Escherichia coli
atgaaacaagcaaatcaagatagaggtacgctgctgctagcgttggttgctggcttatcgatcaatggtacttttgcagcgctgtttagctccattgtaccattttctgtattcccgattatttccctggtgttgacagtttactgcctgcatcaacgttatcttaatcgcactatgccggtaggcttgccgggtctggcagctgcttgttttattctcggcgtactgctgtacagcacggtagttcgtgcggaatatccggatatcggctctaacttcttcccggcagtactgtccgtcattatggtgttctggattggcgcgaagatgcgtaaccgtaagcaggaagttgctgagtaa

SEQ ID NO: 3117 - DNA, 1101 bp, Escherichia coli
atgacccccgaacaccttccaacagaacagtatgaagcgcagttagccgaaaaagtggtacgtttgcaaagtatgatggcaccgttttctgacctggttccggaagtgtttcgctcgccggtcagtcattatcggatgcgtgcggagttccgcatctggcacgatggcgatgacctgtaccacatcattttcgatcaacaaaccaaaagtcgtatccgtgtggatagcttccccgccgccagtgaacttatcaaccagttgatgacggcgatgattgcgggtgtgcgtaataatcccattctgcgccacaagttgttccagattgattacctcactacgctaagcaatcaagcggttgtttccttgctgtaccataaaaagctggatgatgagtggcgtcagcaggcggaagccctgcgcgatgcactgcgcgcgcagaatctgaatgtgcatctgattggtcgggcaacgaaaaccaaaatcgcgctggatcaggattacatcgacgaacgtctgccgatcgcggagaaagagatgatctaccgtcaggtagaaaacagctttacccaaccgaacgcggcgatgaatattcagatgctggaatgggcgctggacgtaaccaaaggctcaaaaggcgatttactggagctatactgcggcaacggtaacttttcattagcgctggcacgcaattttgatcgggtattagccaccgaaatcgccaagccgtcagtcgccgccgcgcaatacaacattgccgctaaccatattgataacgtacaaattattcgtatggcggcagaagaatttactcaggcgatgaatggtgtgcgcgagtttaaccgcctgcaaggaatcgacttaaagagttatcagtgcgaaaccatttttgtcgacccaccgcgcagcggtctggacagtgaaaccgagaaaatggtgcaggcgtatccacgtattctgtatatctcctgcaatccggaaacgttatgcaagaatctggaaacattaagccagacgcacaaggtcgaacgtctggctctatttgatcagttcccctacacgcaccatatggagtgcggcgtattactgaccgcgaagtaa

SEQ ID NO: 3118 - DNA, 1845 bp, Escherichia coli
atgattaaaaaagcttcgctgctgacggcgtgttccgtcacggcattttccgcttgggcacaggataccagcccggatactctcgtcgttactgctaaccgttttgaacaaccgcgcagcactgtgcttgcgccaactactgttgtgacgcgtcaggatatcgaccgctggcagtcgacctcggtcaatgatgtgctgcgccgtcttccgggcgtggatatcacccaaaacggcggttcaggtcagctctcatctatttttattcgcggtacaaatgccagtcatgtgttggtgttaattgatggcgtccgcctgaatttggcgggggtgagtggttctgctgatcttagtcagttccctattgcgcttgtccagcgtgttgaatatatccgtgggccgcgctccgctgtttatggttcagatgcaataggcggggtcgtgaatatcatcacgacgcgcgatcaccccggaacggaaatttcagcagggtggggaagcaatagttatcagaactatgatgtctctacacagcaacaactgggggataagacacgggtaacgctgttgggcgattatgcccatactcatggttatgatgttgtcgcctatggtaataccggaacgcaagcgcagccagataacgatggttttttaagtaaaacgctttatggcgcgctggagcataattttactgatgtctggagcggctttgtgcgcggctatggctatgataatcgtaccaattatgacgcatattattctcccggcttgccactggtcgatacccgtaaactctatagccaaagttgggatgccggactgcgctataacggcgaactgattaaatcacaactgatttccagctacagccatagcaaagattacaactacgatccgcattatggtcgttatgattcgtccgcgacgctcgatgagatgaaacagtacaccgtccagtgggcaaacaacatcatcattggccacggtaatattggtgcgggtgttgactggcagaagcagagcacggcaccgggcacagcttatgttgaggatggatatgatcaacgtaataccggcatctatctgactgggctgcaacaagtcggcgattttacttttgaaggcgcaggacgcagcgacgataattctcagtttggtcgtcatggtacctggcaaaccagcgccggttgggagttcatcgaaggttatcgctttattgcttcctacggaacatcttataaggcaccaaatcttgggcaactgtatggcacctacggtaatccgaatctgaatcctgagaaaagcaaacaatgggaaggcgcgtttgaaggcttaactgctggggttaactggcgtatttccggatatcgtaacgatgtcagtgacttgatcgattatgatgatcacaccctgaaatattacaacgaagggaaagcgcggattaagggtgtcgaggcgaccgctaattttgataccggaccactgacgcatactgtgagttatgattatgttgatgcgcgcaatgcaattactgacacgccgttgttacgccgtgctaaacagcaggtgaaataccagctcgactggcagttgtatgacttcgactgggggattacttatcagtatttaggcactcgctatgataaggattactcatcttatccttatcaaaccgttaaaatgggcggtgtgagcttgtgggatcttgcggttgcgtatccggtcacctctcacctgacagttcgtggtaaaatagccaacctgttcgacaaagattatgagacagtctatggctaccaaactgcaggacgggaatacaccttgtctggcagctacaccttctga

SEQ ID NO: 3119 - DNA, 858 bp, Escherichia coli
atggctaccaaactgcaggacgggaatacaccttgtctggcagctacaccttctgaaccacgtcccaccgtgctggtgtttgactccggcgtcggtgggttgtcggtctatgacgagatccggcatctcttaccggatctccattacatttatgctttcgataacgtcgctttcccgtatggcgaaaaaagcgaagtgtttattgttgagcgagtggtggaaattgtcaccgcagtgcaagaacgttatccccttgcgctggctgtggtcgcttgcaacaccgccagtaccgtttcacttcctgcattacgcgaaaagttcgacttcccggttgttggtgtcgtgccggcgattaaacctgctgcacgtctgacggcaaatggcattgtcggattactggcaacccgcggaactgttaaacgttcttatactcatgagctgatcgcgcgtttcgctaatgaatgccagatagaaatgctgggctcggcagagatggttgagttggctgaagcgaagctgcatggcgaagatgtttctctggatgcgctaaaacgtatcctacgcccgtggttaagaatgaaagagccgccagataccgttgtactggggtgtacccatttccctctactacaagaagaactgttacaggtgctgccagagggaacccggctggtggattctggcgcagcgattgctcgccgaacggcctggctgttagaacatgaagccccggatgcaaaatctgccgatgcgaatattgccttttgtatggcaatgacgccagaagctgaacaattattgcccgttttacagcgttacggcttcgaaacgctcgaaaaactggcagttttaggctga

SEQ ID NO: 3120 - DNA, 516 bp, Escherichia coli
atgccgttgttagatagcttcacagtcgatcatacccggatggaagcgcctgcagttcgggtggcaaaaacaatgaacaccccgcatggcgacgcaatcaccgtgttcgatctgcgcttctgcgtgccgaacaaagaagtgatgccagaaagagggatccataccctggagcacctgtttgctggttttatgcgtaaccatcttaacggtaatggcgtagagattatcgatatctcgccaatgggctgccgcaccggtttttatatgagtctgattggtacgccagatgagcagcgtgtcgctgatgcctggaaagcggcaatggaagacgtgctgaaagtgcaggatcagaatcagatcccggaactgaacgtctaccagtgtggcacttaccagatgcactcgttgcaggaagcgcaggatattgcgcgtaacattctggaacgtgacgtgcgcatcaacagcaacgaagaactggcgctgccgaaagagaagttgcaggaactgcacatttag

SEQ ID NO: 3121 - DNA, 1557 bp, Escherichia coli
ttgatcccggacgtatcacaggcgctggcctggctggaaaaacatcctcaggcgttaaaggggatacagcgtgggctggagcgcgaaactttgcgtgttaatgctgatggcacactggcaacaacaggtcatcctgaagcattaggttctgcactgacccataaatggattactaccgattttgcggaagcattgctggaatttattacaccagtggatggtgatattgaacatatgctgacctttatgcgcgatctgcatcgctatacggcgcgcaatatgggcgatgagcggatgtggccgttaagtatgccatgctatatcgcagaaggtcaggacatcgaactggcacagtacggcacttctaacaccggtcgctttaaaacgctgtaccgtgaagggctgaaaaatcgctacggcgcgctgatgcaaaccatttccggcgtgcactataatttctctttgccaacggcattctggcaagcgaagtgcggtgatatctcgggcgctgatgccaaagagaaaatatctgcgggttatttccgtgttatccgtaactactatcgcttcggttgggtcattccttatctgtttggtgcgtctccagcgatttgttcttctttcttgcaaggaaaaccaacgtcgctgccgtttgagaaaaccgagtgcggtatgtattacctgccgtatgcgacctctcttcgtttgagcgatctcggctataccaataaatcgcaaagcaatcttggtatcaccttcaatgatctctacgagtacgtggcgggccttaaacaggcaatcaaaacgccatcggaagagtacgcgaagattggtattgagaaagacggtaagcggctgcaaatcaacagcaacgtgctgcagattgaaaacgaactgtacgcgccgattcgtccaaaacgcgttacccgcagcggcgagtcgccttctgatgcgctgttacgtggcggcattgaatatattgaagtccgctcgctggacatcaacccgttctcgccgattggtgtagatgaacaacaggtgcgattcctcgacctgtttatggtctggtgtgcgctggctgatgcaccggaaatgagcagtagcgaacttgcctgtacacgcgttaactggaaccgggtgatcctcgaaggtcgcaaaccgggcctgacgctgggtatcggctgcgaaactgcgcagttcccgttaccgcaggtgggtaaagatctgttccgcgatctgaaacgcgtcgcgcaaacgctggatagcattaacggcggcgaagcgtatcagaaagtgtgtgatgaactggtcgcctgcttcgataatcctgatctgactttctctgcccgtatcttaaggtctatgattgatactggtattggcggaacaggcaaagcgtttgctgaagcgtaccgtaatctgctgcgtgaagagccgctggaaattctgcgcgaagaggattttgtcgccgagcgcgaggcgtctgaacgccgtcagcaggaaatggaagccgctgataccgaaccgtttgcggtgtggctggaaaagcacgcctga

SEQ ID NO: 3122 - DNA, 429 bp, Escherichia coli
gtgagtgaagcgttatcgcttttctcgttgtttgccagtagttttctcagcgctacactattacccggcaactccgaagtcgtgctggtggcaatgttgctttccggagtgagtcatccctgggttttagttttaacagcaacaatgggtaatagccttggagggttaactaacgttatccttgggcgtttctttccattgcgtaaaacatcgcgctggcaagagaaagctaccggctggctgaaacgctatggtgcagtcacgctattattaagctggatgcccgtggttggcgatttactgtgtctgttagcgggatggatgcgcatctcgtggggaccggtaatcttttttttgtgccttggtaaagcgttacgctatgttgcggttgcagcagctaccgttcagggcatgatgtggtggcactaa

SEQ ID NO: 3123 - DNA, 567 bp, Escherichia coli
atgtacgagcgttatgcaggtttaatttttgatatggatggcaccatcctggataccgagcctacgcaccgtaaagcgtggcgcgaagtattagggcactacggtcttcagtacgatgttcaggcgatgattgcgcttaatggctcgcccacctggcgtattgctcaggcgattattgagctgaatcaggccgatctcgacccgcatgcgttagcgcgtgaaaaaacagaagcagtaagaagtatgctgctggatagtgtcgagccgcttcctcttgttgaagtggtgaaaagctggcatggtcgtcgcccaatggctgtaggaacggggagtgaaagcgccatcgctgaggcattgctggcacacctgggattacgccgttattttgacgccgtcgtcgctgccgatcacgtcaaacaccataaacccgcgccagacacatttttgttgtgcgcgcagcgtatgggcgtgcaaccgacgcagtgtgtggtctttgaagatgccgatttcggtattcaggcggcccgtgcagcaggcatggacgccgtggatgttcgcttgctgtga

SEQ ID NO: 3124 - DNA, 186 bp, Escherichia coli
atgctgattctgactcgtcgagttggtgagaccctcatgattggggatgaggtcaccgtgacagttttaggggtaaagggcaaccaggtacgtattggcgtaaatgccccgaaggaagtttctgttcaccgtgaagagatctaccagcgtatccaggctgaaaaatcccagcagtccagttactaa

SEQ ID NO: 3125 - DNA, 2631 bp, Escherichia coli
atgagcaagagcaccgctgagatccgtcaggcgtttctcgactttttccatagtaagggacatcaggtagttgccagcagctccctggtaccccataacgacccaactttgttgtttaccaacgccgggatgaaccagttcaaggatgtgttccttgggctcgacaagcgtaattattcccgcgctaccacttcccaacgctgcgtgcgtgcgggtggtaaacacaacgacctggaaaacgtcggttacaccgcgcgtcatcataccttcttcgaaatgctgggcaacttcagcttcggcgactatttcaaacacgatgccattcagtttgcatgggaactgctgaccagcgaaaaatggtttgccctgccgaaagagcgtctgtgggttaccgtctatgaaagcgacgacgaagcctacgaaatctgggaaaaagaagtagggatcccgcgcgaacgtattattcgcatcggcgataacaaaggtgcgccatacgcatctgacaacttctggcagatgggtgacactggtccgtgcggcccgtgcaccgaaatcttctacgatcacggcgaccacatttggggcggccctccgggaagtccggaagaagacggcgaccgctacattgagatctggaacatcgtcttcatgcagttcaaccgccaggccgatggcacgatggaaccgctgccgaaaccgtctgtagatactggtatgggtctggagcgtattgctgcggtgctgcaacacgttaactctaactatgacatcgacctgttccgcacgctgatccaggcggtagcgaaagtcactggcgcaaccgatctgagcaataaatcgctgcgcgtaatcgctgaccacattcgttcttgtgcgttcctgatcgcggatggcgtaatgccgtccaacgaaaaccgtggttatgtactgcgtcgtatcattcgtcgcgcagtgcgtcacggcaatatgctcggcgcgaaagaaaccttcttctacaaactggttggtccgctgatcgacgttatgggctctgcgggtgaagacctgaaacgccagcaggcgcaggttgagcaggtgctgaagactgaagaagagcagtttgcccgtactctggagcgcggtctggcgctgctggatgaagagctggcaaaactttctggtgatacgctggatggtgaaactgctttccgcctgtacgacacctacggcttcccggttgacctgacggctgatgtttgtcgtgagcgcaacatcaaagttgacgaagctggttttgaagcagcaatggaagagcagcgtcgtcgtgcgcgcgaagccagcggctttggtgccgattacaacgcaatgatccgtgttgacagtgcatctgaatttaaaggctatgaccatctggaactgaacggcaaagtgaccgcgctgtttgttgatggtaaagcggttgatgccatcaatgcaggccaggaagctgtggtcgtgctggatcaaacgccattctatgcggaatccggcggtcaggttggtgataaaggcgaactgaaaggcgctaacttctccttcgcggtggaagatacgcagaaatacggccaggcgattggccacatcggtaaacttgctgcgggttctctgaaagtgggcgacgctgtgcaggctgatgttgatgaggctcgtcgcgcccgtattcgtctgaatcactccgcaacgcacctgatgcacgctgcgctgcgccaggttctgggtactcatgtatcgcagaaaggttcactggttaacgacaaagtgctgcgcttcgacttatcacacaacgaagcgatgaaaccagaagagattcgtgcggtcgaagacctggtgaacgcacagattcgccgtaacttgccgatcgaaaccaacatcatggatctcgaagcggcgaaagcgaaaggtgcgatggcgctgtttggcgagaagtatgatgagcgcgtacgcgtgctgagcatgggcgatttctccaccgagctgtgtggcggtactcacgccagccgcactggtgatattggtctgttccgcatcatctctgaatcgggtactgctgcaggcgttcgtcgtatcgaagcggtgaccggagaaggcgctatcgccaccgttcatgcagacagcgatcgcttaagcgaagtcgcgcatctgctgaaaggcgatagcaataatctggctgataaagtgcgttcagtactggaacgtacgcgtcagctggaaaaagagttacaacagcttaaagaacaagctgccgcacaggagagcgcaaatctttccagtaaggcaattgatgttaatggtgttaagctgttggttagcgagcttagcggtgttgagccgaaaatgttgcgtaccatggttgacgatttaaaaaatcagctggggtcgacaattatcgtgctggcaacggtagccgaaggtaaggtttctctgattgcaggcgtatctaaggacgtcacagatcgtgtgaaagcaggggaactgattggtatggtcgctcagcaggtgggcggcaagggtggtggacgtcctgacatggcgcaagccggtggtacggatgctgcggccttacctgcagcgttagccagtgtgaaaggctgggtcagcgcgaaattgcaataa

SEQ ID NO: 3126 - DNA, 501 bp, Escherichia coli
atgacagaatcaacatcccgtcgcccggcatatgctcgcctgttggatcgtgcggtacgcattctggcggtgcgcgatcacagtgagcaagaactgcgacgtaaactcgcggcaccgattatgggcaaaaatggcccggaagagattgatgccacggcagaagattacgagcgcgttattgcctggtgctatgaacatggctatctcgatgacagccgatttgtggcgcgctttatcgccagccgtagccgcaaaggttatggacctgcgcgtattcgtcaggaactgaatcagaaaggtatttcccgcgaagcgacagaaaaagcgatgcgtgaatgtgacatcgactggtgcgcactggcgcgcgatcaggcgacgcgaaaatatggcgaacctttgccaactgtcttttcagaaaaagttaagatccagcgttttctgctctatcgtggctatctgatggaagatatccaggatatttggcgaaattttgccgactga

SEQ ID NO: 3127 - DNA, 1062 bp, Escherichia coli
atggctatcgacgaaaacaaacagaaagcgttggcggcagcactgggccagattgagaaacaatttggtaaaggctccatcatgcgcctgggtgaagaccgttccatggatgtggaaaccatctctaccggttcgctttcactggatatcgcgcttggggcaggtggtctgccgatgggccgtatcgtcgaaatctacggaccggaatcttccggtaaaaccacgctgacgttgcaggtgatcgccgcagcgcagcgcgaaggtaaaacctgtgcgtttatcgatgctgaacacgcgctggacccaatctacgcacgtaaactgggcgttgatatcgacaacctgctgtgctcccagccggataccggcgagcaggcactggaaatctgtgacgccctggcacgttctggcgcagtagacgttatcgtcgttgactccgtggcggcactgacgccgaaagcggaaattgaaggcgaaatcggcgactctcacatgggccttgcggcacgtatgatgagccaggcgatgcgtaagctggcgggtaacctgaagcagtccaacacgctgctgatcttcatcaaccagatccgtatgaaaattggtgtgatgttcggtaacccggaaaccactactggtggtaacgcgctgaaattctacgcctctgttcgtctcgatatccgtcgtatcggcgcggtgaaagagggcgaaaacgtggtgggtagcgaaacccgcgtgaaagtggtgaagaacaaaatcgctgcgccgtttaaacaggctgaattccagatcctctacggcgaaggtatcaacttctacggcgagctggttgacctgggcgtgaaagagaagcttatcgagaaagcaggcgcgtggtacagctacaaaggtgagaagatcggtcagggtaaagcgaatgcgactgcctggctgaaagataacccggaaaccgcgaaagagatcgagaagaaagtacgtgagttgctgctgagcaacccgaactcaacgccggatttctctgtagatgacagcgaaggcgtagcagaaactaacgaagatttttaa

SEQ ID NO: 3128 - DNA, 498 bp, Escherichia coli
atgactgacagtgaactgatgcagttaagcgaacaggttgggcaggcgctgaaagcccgtggtgcaaccgtaacaactgctgagtcttgtaccggcggttgggtagcgaaagtgattaccgatattgccggcagttccgcctggtttgaacgcggatttgtcacctacagtaacgaagcaaaagcgcaaatgatcggtgtacgcgaagagacgctggcgcagcatggcgcggtgagcgaacctgtcgtggtggaaatggcgataggcgcactgaaagcggctcgtgctgattacgccgtgtctattagtggtatcgccgggccggatggcggcagtgaagagaagcctgtcggcaccgtctggtttgcttttgccactgcccgtggtgaaggcattacccggcgggaatgcttcagcggtgaccgtgatgcggtgcgtcgtcaggctactgcgtatgcattgcagaccttgtggcaacaatttctacaaaacacttga

SEQ ID NO: 3129 - DNA, 1086 bp, Escherichia coli
atgttcaagcgtcgttatgtaacattgcttcccctttttgtgttgcttgccgcctgtagcagcaagccaaaacctactgagactgaaacgaccaccggaacgccgtctggcggcttcctgcttgagccgcagcacaatgtgatgcagatgggcggtgacttcgccaataacccgaatgcccagcagttcatcgacaaaatggtgaacaaacacggtttcgatcgtcagcagttgcaggaaattctctcccaggcgaaacgtctggattcggtactgcggctgatggataaccaggcaccaaccacatcggtgaaaccgccatcaggtccgaacggcgcatggctgcgttatcgcaaaaaatttattacgccggacaacgtgcagaacggtgtggttttctggaatcagtatgaagatgcgttgaatcgcgcgtggcaggtgtatggtgtaccgccggaaattatcgtcgggattatcggcgttgaaacccgctgggggcgcgtgatggggaaaactcgcatcctcgatgcgctggcaacgctgtcatttaactacccacgccgcgcggagtatttttctggcgagctggaaaccttcctgctgatggcgcgcgacgagcaggacgatccgctcaatctgaaaggttcctttgccggggcgatgggctacggtcagtttatgccgtcgtcttacaaacaatatgcggtagatttcagcggcgacgggcatatcaacctgtgggatccggttgatgcgatcggtagcgtggcgaattatttcaaagcgcacggctgggtgaaaggcgatcaggtcgcggtaatggcaaacggtcaggcgccaggcttgccaaatggcttcaaaaccaggtacagcatttcgcagcttgccgcggcaggtttaacgccacagcagccgctgggcaaccatcaacaagccagcctgctgcgtctggatgttggcaccggctaccagtactggtacggtctgccgaacttctacaccattacccgttataaccacagcacccattacgcaatggcggtctggcagttaggacaagccgtggcgctggcgcgcgtacagtaa

SEQ ID NO: 3130 - DNA, 564 bp, Escherichia coli
atgatagaaaccattactcatggcgcagagtggttcatcgggctgttccagaaaggcggagaagtgtttaccgggatggtaaccggcattcttccgctgttaattagcctgctggttatcatgaacgcattgattaattttatcggtcagcatcgtattgaacgatttgctcaacgttgcgccggtaaccctgtttcccgttatctgctgctaccgtgcattggtacgtttgtcttttgtaacccgatgaccttaagtcttggtcgctttatgccggaaaagtacaaacccagctattacgcggcggcctcttatagctgccactcaatgaatggcctcttccctcatatcaaccctggcgaactgtttgtttatcttggcattgccagcggtctgacgacgctgaatctgccacttggcccgctggcagtgagttatctgctggttggtttggtcaccaacttcttccgcggctgggtgaccgatctgaccaccgccatttttgagaaaaagatgggcattcaacttgaacaaaaagttcacctggcaggagcaacatcatga

SEQ ID NO: 3131 - DNA, 960 bp, Escherichia coli
atgacacgcattcggatcgaaaaaggaacgggtggctggggcggcccgcttgagctggaagccacgccgggcaaaaaaatcgtctatatcaccgccggtacccggcctgcgattgttgacaaactggcacagcttactggctggcaagctatcgacggatttaaagaaggtgaacccgcggaggcggaaattggtgtcgcggtaatcgactgtggcggcacattacgctgcggcatctatccgaaacggcgtattcccaccattaatatccactcgacgggcaagtccggcccgctggcgcagtacattgtggaagatatttatgtctctggcgtaaaagaagaaaacatcactgtagtgggtgatgcgacaccacaaccctcttccgtgggccgtgactatgacaccagcaagaaaatcaccgaacaaagcgatggtttactggcgaaggtgggaatgggtatgggttctgccgttgccgtgctgttccagtctggccgtgacaccatcgacactgtattaaaaaccattctgccgtttatggcgttcgtctcggcgcttatcggaatcattatggcttctggccttggtgactggattgcccacggtcttgctccgctggcgagccatccactgggtctggtcatgctggcgctcatctgctccttcccgctgctttcacctttcctcggcccaggcgcagttatcgcacaggttatcggcgtattgattggcgtgcagattggtctcggcaatattccgccgcatctggctttacctgcactgtttgccatcaacgcgcaggcggcctgcgacttcatcccggtcggtttgtcgctggcggaagcccgtcaggacacggttcgcgtcggtgtcccttctgttctggtgagccgctttttaaccggcgcgccaactgtactgatcgcctggtttgtctccggttttatctatcaatag

SEQ ID NO: 3132 - DNA, 372 bp, Escherichia coli
atgaccgttatttatcagaccaccatcacccgtattggcgcgagtgccactgacgccctcagcgaccagatgctcatcacctttcgtgaaggcgcgcctgcggatctcgaagagtattgcttcattcattgccacggcgagttgaaaggtgcactccatcccggtttgcaattttctctcgggcggcatcgctatccggtgaccgccgttggcagcgtggcggaagacaaccttcgcgaactgggtcatgtcaccctgcgcttcgatggtttaagcgaagcggaatttccgggcactgtccatgtggcaggccctgtacccgacgatatcgcgccgggatcggttttgaagtttgaatctgttaaggagtaa

SEQ ID NO: 3133 - DNA, 780 bp, Escherichia coli
atgaatcaggttgccgttgtcatcggtggtgggcaaaccttaggcgcgttcctgtgccacggtctggctgccgaggggtatcgcgtggcggttgtcgatattcagagcgacaaagccgcaaatgtggcacaagaaattaacgccgaatatggtgaaggaacagcgtacggttttggtgctgacgccaccagcgagcaaagcgttctggcgctttctcgtggggtagatgaaatctttggtcgcgtggatttgctggtctacagcgccggaatagcaaaagcagcctttatcagcgacttccatctcggcgattttgaccgttcgctacaggtgaatctggtgggttatttcctgtgtgcccgtgaattttcgcgtttgatgatccgcgacgggattcagggtcgcattattcagatcaactcgaaatccggcaaagtgggcagcaaacacaactctggctacagcgcagcgaaatttggtggcgtcgggctgactcaatcactggcactggatctggcggagtacggcattacggtgcattcgctgatgctcggtaacctgctgaaatcgcctatgttccagtcactgttgccacaatacgcgaccaagctgggtatcaaaccggagcaagtcgagcagtattacatcgataaagtaccgctcaaacgcggctgcgattatcaggatgtgctgaatatgctgctgttctacgccagtcctaaggcgtcgtactgcactggtcagtcgatcaatgtcaccggcggtcaggtgatgttctga

SEQ ID NO: 3134 - DNA, 360 bp, Escherichia coli
atggtatccgcactcatcaccgtcgccgttatcgcctggtgtgcgcaactggccttaggcggttggcaaatttctcgttttaaccgtgccttcgacacgctatgccagcaagggagggttggcgtgggccgttccagcgggcgctttaaaccacgggtcgtggtcgctattgcgctggacgatcagcagcgcatcgtcgacaccttgtttatgaaaggactgaccgtcttcgcccgaccgcaaaaaattcccgcaattaccggcatgtatgcgggtgatttacagcccgatgtgatctttccccatgatccactatcacagaatgctctatcattggcgcttaaactgaaacgtggataa

SEQ ID NO: 3135 - DNA, 774 bp, Escherichia coli
atgaaacctcgtcagcgtcaggccgccattctggagtatctgcaaaagcagggtaaatgctcggttgaagaattggcgcaatactttgacaccacaggcacaaccattcgcaaagatctggtcattctggaacatgccggaaccgtcattcgtacttatggcggcgtggtgttgaacaaagaggaatccgatccgcctatcgatcataaaacgcttatcaacacccacaaaaaagagctgattgcagaagctgccgttggttttattcatgatggcgactcaataattcttgatgctggcagtaccgtgttgcagatggtgcctctgctatcgcgctttaataacatcacggtgatgaccaacagcctgcacatcgtcaatgcgctatccgaactggataacgaacaaactatcctgatgccaggcggaacatttcgcaaaaaatcggcctcatttcacgggcaactggcagagaatgccttcgagcatttcaccttcgataaattgtttatgggcaccgacggcatcgatctcaatgcgggcgtaaccacctttaacgaggtctataccgtcagtaaggcgatgtgtaatgccgcgcgcgaagtgattttgatggctgactcatcgaagtttggtcgtaaaagccccaacgtggtttgtagtcttgaaagcgtcgataagctgattaccgacgcaggtatcgatccagcgtttcgtcaggcgctggaagaaaaagggatcgacgtgatcataaccggagagagcaatgagtga

SEQ ID NO: 3136 - DNA, 966 bp, Escherichia coli
atgagtgaagcactactgaacgcgggacgtcagacgttaatgctggagttgcaggaagcaagccatttaccggaacgtctgggcgatgatttcgttcgcgccgccaatatcatcctgcactgcgaaggcaaagtggtggtttcgggaattggcaaatcgggccacattggtaagaaaatcgccgcaacgcttgccagcaccggcactcctgccttttttgtccatccggcagaggcattgcacggcgacctggggatgatcgaaagccgcgatgtgatgctgtttatctcttactccggtggcgcgaaggaactggatctgattattccgcgtctggaagataaatctatcgcgctgctggcgatgaccggcaaaccgacgtcaccgctgggcctggcggcgaaagcggtgctggatatctccgtagaacgcgaagcctgtccgatgcaccttgcgccgacctccagcaccgtgaataccctgatgatgggtgacgcgctggcgatggcggtcatgcaggcgcgcggatttaacgaagaagattttgcccgctcccaccctgctggagcactgggcgctcgcttgctgaataaagtgcatcatctgatgcgccgtgatgacgctatcccgcaggtagcgttaaccgccagcgtgatggatgcgatgctggaacttagccgcaccggtttaggtctggtggcagtgtgcgatgatcaacgactggtgaaaggcgtctttaccgacggtgatttacgtcgctggctggttggcggcggcgcactcaccacgccagttaatgaagcgatgacgacaggcggcaccacattacaggcacaaagtcgcgccatcgacgccaaagagatcctgatgaagcgcaaaatcactgccgcaccggtagtggatgaaaacggcaaactcaccggcgcaattaacctgcaggatttctatcaggccgggattatttaa

SEQ ID NO: 3137 - DNA, 1515 bp, Escherichia coli
atgagtttttccgttgatgtgctggcgaatatcgccatcgaattgcagcgtgggattggtcatcaggatcgttttcagcgcctgatcaccacgctgcgtcaggtgctggagtgcgatgcgtctgcgttgctacgttacgactcgcggcagtttattccgcttgccatcgacgggctggcgaaggatgtactcggtagacgctttgcgctggaagggcatccacggctggaagcgattgcccgcgcgggtgatgtggtgcgctttcccgcagacagcgaattgcccgatccttatgacggtttgattccagggcaggagagtctgaaggttcacgcctgcgttggtttgccgttgtttgccgggcaaaacctgatcggtgccttgacgctcgacgggatgcagcccgatcagttcgatgttttcagcgacgaagagttacgcctgattgctgcgctggcggcgggagcgttaagcaatgcgttactgattgaacaactggaaagccagaatatgctgccaggcgaagccgcgccgtttgaagcggtgaaacagacgcagatgatcggtctgtcgccaggcatgacgcaattgaaaaaagagattgagattgtggcggcatccgatctcaacgttttaattagcggtgagacgggaaccggtaaggagctggtggcgaaagcgattcatgaagcctcgccacgggcggtgaatccgctggtctatctcaactgtgccgcactgccggaaagtgtggcggaaagtgagttgttcgggcatgtgaaaggggcgtttactggtgctatcagtaaccgcagcgggaagtttgaaatggcggataacggtacgctgtttctcgatgagatcggcgagttgtcgttggcattgcaggccaagctgctgagggtgttgcagtatggcgatattcaacgcgttggcgatgaccgcagtttgcgggtcgatgtgcgcgtgctggcggcgactaaccgtgacttacgcgaagaggtactggcagggcgatttcgcgctgacttgttccaccgcctgagcgtgtttccactttcagtgccgccgctgcgtgagcggggcgatgatgtcattctgctggcggggtatttctgcgagcagtgtcgtttgcggctggggctctcccgcgtggtattaagtgccggagcgcgaaatttactgcaacactacaatttttcggggaacgttcgtgaactggaacatgctattcatcgggcggtagtgctggcgagagccacccgcagcggcgatgaagtgattcttgaggcgcaacattttgcttttcctgaggtgacgttgccgccgccagaagcggcggcggtgcccgttgttaagcaaaacctgcgtgaagcgacagaagcgttccagcgtgaaaccattcgtcaggcactggcgcaaaatcatcacaactgggccgcctgtgcgcggatgctggaaaccgacgtcgccaacctgcatcggctggcgaaacgtctggggctgaaggattaa

SEQ ID NO: 3138 - DNA, 1440 bp, Escherichia coli
atgtctattgtggtgaaaaataacattcattgggttggtcaacgtgactgggaagtgcgtgattttcacggtacagaatataaaacgctgcgcggcagcagctacaacagctacctcatccacgaagaaaaaaacgtgctgatcgacaccgtcgaccataaattcagccgcgaatttgtgcagaacctgcgtaatgaaatcgatctgacggatatcgattacatcgtaattaaccatgctgaagaggaccacgccggggcgctgaccgaactgatggcacaaattcccgatacgccgatctactgtactgccaacgctatcgactcgataaatggtcatcaccatcatccggagtggaattttaatgtggtgaaaacaggcgacacgctggatatcggcaacggcaaacagctcatttttgtcgaaacgccaatgttgcactggccggacagcatgatgacttacctgacaggcgacgcggtgctgttcagtaacgatgctttcggtcagcactactgcgacgaacatctgttcaacgatgaagtggatcagactgagcttttcgagcagtgccagcgttactacgccaatatcctgacgccgttcagccgcctggtaacgccgaaaattaccgagatcctgggctttaacttgccagtcgatatgatagcgacctctcacggcgtggtatggcgcgataacccgacgcaaattgtcgagctgtacctgaaatgggcggcggattatcaggaagacagaatcaccattttctacgacaccatgtcgaataacacccgcatgatggccgatgctatcgcccagggtattgcggaaaccgacccacgcgtggcggtgaaaattttcaacgtcgcccgaagcgataaaaacgaaatcctgaccaatgtcttccgctcaaaaggcgtgctggtcggcacttctacgatgaataatgtgatgatgccgaaaatcgccgggctggtggaggagatgaccggattacgcttccgtaacaaacgcgccagcgctttcggctctcacggctggagcggcggtgcggtggatcgtctttccacgcgcctgcaggatgcgggtttcgaaatgtcgcttagcctgaaagccaaatggcgaccagaccaggacgctctggagttatgtcgtgaacacggtcgcgaaatcgcccgtcagtgggcgctcgcgccgctgccgcagagcacggtgaatacggtggttgaagaagaaacctctgccgccacgacggctgacctcggcccacggatgcaatgcagcgtctgccagtggatttacgatccggcaaaaggcgagccaatgcaagacgttgcgccaggaacgccgtggagtgaagtcccggataacttcctgtgcccggaatgctctctcggcaaagatgtctttgacgaactggcatcggaggcaaaatga

SEQ ID NO: 3139 - DNA, 1134 bp, Escherichia coli
atgagcaacggcattgtgatcattggttcgggcttcgccgcccgccaactggtgaaaaatattcgcaaacaggacgccagtattccattaaccctgattgccgccgacagcatggatgagtacaacaaacctgacctcagccatgttatcagtcaggggcaacgtgccgacgaccttacccgccagacggcaggtgaatttgccgagcagtttaatctgcgcctgtttccgcacacctgggtaacggatatcgatgccgaagcccatgtggtgaaaagtcagaataatcagtggcaatacgacaagttagtgctggcaaccggtgccagcgcctttgtcccgccagtgcccgggcgtgagttaatgctgacgttaaatagtcagcaagagtatcgcgcctgtgaaacgcaactgcgggatgcccgacgcgtgttgattgtcggcggtggtttgattggtagtgaactggcgatggatttttgtcgggcaggcaaagcggtcacgctaatcgacaacgctgccagtattctggcgtcgttaatgccaccggaagtcagcagccgcttgcagcatcggttgacggagatgggcgttcatctgctgttgaaatctcagttgcagggactagaaaaaacagattctggcattctggcaacgctggaccgccagcgctgcatcgaagtggatgcggtaattgccgccaccggactgcgcccggaaaccgccctggcacgacgcgccgggctgacgattaatcgcggcgtttgcgtcgatagttatctgcaaaccagtaatgccgatatttatgcgctgggcgattgcgcggaaattaacggtcaggtattgccgttcctccagccgattcaacttagcgcgatggtgctggcaaaaaatcttctcggcaataacacgccgctgaaactcccggcgatgctggtgaaaatcaaaacgccggaattaccgctgcatctggcaggcgaaacccagcgtcaggatttacgctggcaaattaataccgaacgccagggaatggtggcgcgcggcgttgacgatgctgaccagcttcgcgcctttgtggtcagtgaggatcggatgaaagaggcatttggattgttgaaaacgttgtcgatgtag

SEQ ID NO: 3140 - DNA, 2253 bp, Escherichia coli
atggcaaaaaacacatcttgcggtgtccaactgcgtattcgtggcaaagtgcagggcgtcggttttcgtccgtttgtctggcaactggcacagcaattaaatcttcacggcgatgtctgtaatgacggcgatggcgtagaagtccggctgctggaagatccggaaacgtttcttgttcaattgcatcagcactgcccgccactggcgcgtattgatagcgtcgagcgtgagccgtttatctggtcacaactgcccactgagttcaccatccgccagagcgcgggtggcgtcatgaatacgcaaattgttcccgatgccgcgacttgccctgcttgtcttgccgaaatgaataccccaggcgaacgacgctggcgttatccgtttatcaactgtactcactgtggtccgcgtttcaccattattcgcgccatgccttacgaccgcccgtttaccgtgatggcggcgtttccgctgtgtccggcttgtgacaaagagtactgtgacccgctcgatcgtcgcttccacgcccagccggtggcctgcccggagtgtggcccccatcttgaatgggtaagtcatggtgaacatgcagaacaagaggcggcattacaggcagctatcgcacagttaaaaatgggcaacattgtcgccatcaaagggattggcggatttcatcttgcctgcgatgcacgtaacagtaacgcggtggcgacacttcgggcgcgcaaacatcgcccggcgaaaccgctggcggtcatgttgccagtggctgacggtttaccagacgctgcgcgccagttgcttaccacgcccgccgcgccgattgtgctggtggataaaaaatatgtacctgagctttgtgatgatatcgcccctgaccttaacgaagtcggggtaatgttgcctgcgaacccgctccagcatttgctgttacaggaactgcaatgcccgctggtgatgacctccggcaacctgagcggtaaaccaccggctatcagcaacgaacaggcgctggcggatttgcagggcattgccgacggattcttgatacataaccgcgacatcgtgcagcggatggatgattcggtggtgcgcgaaagcggcgaaatgctgcgccgttcgcgggggtatgtgccggatgcgctggctttgcctccgggctttaaaaatgttccgcctgtgctgtgtctcggtgcggatctgaaaaacaccttctgcctggtgcgcggcgaacaagcggtgttgagtcagcatctgggcgatttaagtgacgatggcatccagatgcagtggcgcgaagcgttacgcctgatgcaaaacatctacgatttcactccgcaatacgttgtgcatgacgcgcatccgggctatgtctccagccagtgggcgcgtgagatgaatctgccgacgcaaacggtgctgcatcatcatgcccacgcagcggcgtgtctggcagaacacctctggcctctggatggcggagatgtcattgcgttgacgctcgacggtattggtatgggggagaactgcgctttgtggggcggcgagtgcttgcgggtgaactatcgcgaatgccagcacctgggcggcttgcccgcagtggcgcttccggggggcgatttggctgcgaagcagccgtggcgaaacctgctggcgcagtgcctgcgctttgtgccggagtggcagaattactctgaaacggcaagtgtgcaacagcaaaactggagcgtgctggcgcgggctattgagcgtggaattaacgcgccgttggcatcatcgtgtggacgtttgttcgatgccgtagcggcggcgctgggctgtgcgccagccacgttaagttatgaaggtgaagcggcttgtgctctggaggcactcgcagctccgtgccacagagtgacgcatccggtgacgatgccgctggtggacaatcaactggatctcgccaccttctggcagcagtggctgaactggcaggcgccggttaatcaacgcgcgtgggcgtttcatgatgcgctggcgcagggtttggccgcgttgatgcgtgagcaggccacgatgcgtggtatcactacgctggtatttagcggcggagttattcataaccgtttgctgcgtgcacgtctggcgcattatcttgctgattttacgttgttcttcccgcagagtttacctgcgggcgatggcgggttgtctctggggcagggggttattgttgcggcgcgttggttggcaggggaagtccagaacggataa

SEQ ID NO: 3141 - DNA, 528 bp, Escherichia coli
atgaaccgtttcatcattgctgacgcgagtaaatgtattggttgccgtacctgtgaagtagcgtgcgtggtttcccatcaggagaatcaggactgtgcatcgctgaccccggaaacttttttaccgcgaatccatgtcattaaaggtgtgaacatttccacggcgacagtctgccgtcagtgtgaagatgcaccgtgcgctaacgtctgcccgaatggtgctatcagccgtgataaagggtttgttcatgtcatgcaggaacgttgtattggttgcaaaacctgcgttgtggcttgcccgtatggtgcgatggaagtggtggtgcgtccggtgattcgcaacagcggcgcagggctgaatgtacgggctgacaaagccgaagccaataaatgcgacctgtgcaaccatcgtgaagacggcccggcgtgtatggcggcttgcccgacccatgcgctgatttgtgtcgatcgtaataaacttgaacaactgagcgcagaaaaacgccgccgcacggcgctgatgttctaa

SEQ ID NO: 3142 - DNA, 429 bp, Escherichia coli
atgggttcatggggaatggaggctctcgaaagcgacgaagggctggatttgattaattgggtagaggaacaactgcaagatgattcgacctttgatgccgagtcaattgttcaacgcttaagccagcatgaagatttgttcggatttcagggagatgaagaatttctctacgataataatgttatcggtctcgtcgaacttatcattcaaaaagcagccggggaaaaaatcacatcgagtaaaccaattgatcaactcgacagttatcggctcacgtcgattttcagcaaaaaactccagggccgtttacaaacaatcgacgacacacatgagtggataatgctttttgaggggcgagcacgcgaaaaggcaaaagcatatctgattgagattactgataaattaagagtagtaaagacaacagcctga

SEQ ID NO: 3143 - DNA, 420 bp, Escherichia coli
atgactgctaatgctgtacgcgctgttaaagcaacaagagaactggtcaatgcagtcccctttctgggaggcagtgactcagaagatgattatcgtgaagcactggaactggtcgaatatttgattgaagaagatgacaccaatccacttatcgactttctgacgagccgcattgcagaatatgaaaacaacaacgaaaagtttgcagagttcgacaaagccgttgcggcaatgcctgttggtgtggcgttacttcgcacgctgattgatcaacataatctgacctatgcggatttgaagaacgaaatcggctctaaatccctggtcagccagatcttgtctggacaacgatccttgacgatatcccacattaaggcactttcagcccgatttggcgttaagccggaatggtttctttga

SEQ ID NO: 3144 - DNA, 312 bp, Escherichia coli
atgcacatcatttctaaagcgccatttgaagagtctgcgcgtaaatatcctaacgacgctctggctcttcaggcattgtatcgggttattaaggaaacggatttttctacgccagaagaaatgcgaacggcgtttcccaacctcgacaattttaaatatcgcaacaaatggtacgttctggatgtaggtgggaacaacctaagggtgattgcctacataaactttgttaataagcggttctttgtgaagcacataactaatcacgccgagtatgacaaactgacacgttactacagagagaacaaagaatga

SEQ ID NO: 3145 - DNA, 774 bp, Escherichia coli
ttgaacatcaaaacagggatgtgcgcttttttattgagcttagtgctgcctgcacaggccaccagctttaccgaatatctgccaatgagtgacagcgaatacgcgcaaaagcgggcgctgaaacctctcctgaccatgccttatgatgccgatcaaaactggcattttagaaaagtgggcgttgcaggcgtaacgcttgagaagatgccaaatgaagatgattactggcgattaaccgctaaggaccgtgccggtaaatcctggtttgtgcctgtgggtgtgctgcaaaatatggcgggtaatgcgcaattttaccgtgctgacctcgatcgtaatggcattcaggatttggttatctggcgaggtgtttcgggaaacgggctggcgccttcctcgtttttgatcctgatgacctttaatcagcaaggtcgcccgtgtgttttccaggtcgatggtttttacaccgcaaacgaaactggcgttgatgatttgcttgatttacaaggcaatggtcacacgcaattgctggatatgcagtttgattccggttactggataaccagtttgtatcaggtaaaagaggccaaatggcagcgcgttcacggctggtttggcaagttaagctaccccgcactcacgcgttttacctatacctccaaccgtaaactcgtcattaaacctgtcgccggacgtaacccgcaaacgaaagatctggcgctgacacagcgttgtttaataaagggtgatgtgcttgatggggtgaatcagaactga

SEQ ID NO: 3146 - DNA, 468 bp, Escherichia coli
gtgactgacgttttactctgtgttggcaatagcatgatgggcgatgatggcgcaggcccgctactggcggaaaagtgcgctgccgcgccgaaaggtaactgggtagtgattgacggcggtagcgcaccggaaaacgacattgtcgctatccgcgaactgcgcccgacacggctgctgattgtcgacgccacggatatggggctaaaccctggcgagatccgcatcatcgacccggctgacatcgccgagatgtttatgatgactacccataacatgccgctgaactatcttatcgaccagttgaaagaagatattggcgaagtgattttccttggcatccagccggatatcgtcggcttttactacccgatgacccagccgattaaagatgcggtagaaaccgtttatcaacgactggaaggctgggaagggaatggcggcttcgcgcagttagcggcggaagaataa

SEQ ID NO: 3147 - DNA, 411 bp, Escherichia coli
atgagtgaaaaggtggtgttcagtcaactgagccgtaaattcattgatgagaacgatgctacgcccgccgaggcgcagcaggtggtctattacagcctggcgattggtcaccaccttggggttatcgattgcctggaagcggcgcttacctgcccgtgggatgaatatctggcatggattgccactctggaggcgggcagcgaagcccgccgcaaaatggaaggcgtgccgaaatatggtgagatcgtcatcgacattaaccatgtgccgatgctggccaacgcattcgataaagcccgggcagcgcaaacttcgcagcagaaggaatggagtacaatgctgttaagtatgctgcatgatattcatcaggaaaacgccatctatttgatggtgaggagactgcgtgactga

SEQ ID NO: 3148 - DNA, 768 bp, Escherichia coli
atgagcaatttattaggcccccgtgacgccaacggcattccggtcccgatgacggtggatgaatccatcgccagcatgaaggcgtcgttactgaaaaaaatcaaacgttctgcctacgtttatcgcgtggactgcggcggctgtaacggttgcgaaatcgaaattttcgccacgctttcgccgctgttcgatgcagaacgcttcggcattaaagtcgttccgtcaccgcgtcatgcggatattttactgtttaccggcgcggtcacccgtgcaatgcgatcccctgcgctgcgtgcgtggcagtccgcgccggacccgaaaatctgtatctcctacggtgcctgcggtaacagtggcgggatcttccacgatctctactgcgtgtggggcggtacggataaaatcgttccagtggatgtttatatccctggctgcccgccaacgcctgccgccacgctgtacggctttgcgatggcgctcggcctgctggagcagaaaatccacgcccgtgggccgggtgagcaggatgaacaaccggcggagatcctgcatggcgatatggtgcagccgctgcgcgtgaaagtggatcgcgaagcacgccgcctggcgggttatcgttacggtcgccagattgccgatgatttcctgacacagttagggcagggcgaagaacaggttgcacgttggctggaagcggaaaacgatccgcgtctgaacgagattgtcagccatctgaatcatgttgttgaagaggcgcgtatccgatga

SEQ ID NO: 3149 - DNA, 543 bp, Escherichia coli
atgtttacctttatcaaaaaagtcatcaaaaccggcacggcgacttcgtcttatccgctggagccgattgcggttgataaaaacttccgtggtaagccagagcagaacccgcagcagtgcattggctgtgcggcttgcgtcaatgcctgcccgtcaaacgccttaacggttgaaaccgacctcgccactggtgagctggcgtggcagtttgaccttgggcgctgcatcttctgtgggcgctgcgaagaagtctgcccgacagcggcgatcaaactgtcgcaagagtacgaactggcggtgtggaagaaagaagacttcctgcaacagtcccgcttcgcgctgtgcaactgccgcgtctgcaatcgtcctttcgccgtccagaaagagatcgactacgccattgcgctgcttaagcacaacggcgacagccgcgcggaaaaccaccgcgaaagctttgagacttgcccggaatgtaagcgccagaaatgcctggtgccgtccgaccgtattgaactgactcgccatatgaaagaggccatctga

SEQ ID NO: 3150 - DNA, 1710 bp, Escherichia coli
atgtctgaagaaaaattaggtcaacattatctcgccgcgctgaatgaggcatttcctggcgtcgtgctggaccacgcctggcagaccaaagatcagctgaccgtgaccgtaaaggtgaactacctgccggaagtggtggagtttctctactacaagcagggtggctggctgtcggtgttgtttggtaacgacgaacgcaaactgaatggtcattacgccgtttattacgtgctgtcgatggagaagggcaccaagtgttgggtaacggttcgcgtcgaagttgacgccaacaaaccggagtatccttccgtgacgccgcgcgttccggcggcagtgtggggcgagcgtgaagtgcgcgatatgtacggtttgattccggttggtctgccggatgaacgccgtctggtgctgccggatgactggccggatgaactttatcctctgcgtaaagacagcatggattatcgtcagcgtccggcaccgactaccgatgctgaaacctacgagttcatcaacgaactgggcgacaagaaaaacaacgtcgtgccgattggtcccctgcacgtcacttctgacgaaccgggtcacttccgtctgttcgtcgatggtgaaaacattatcgacgccgactaccgcctgttctacgtccatcgcggcatggaaaaactggcggaaacccgtatgggttacaacgaagtgaccttcctctctgaccgtgtgtgcgggatctgcggctttgctcacagcaccgcctataccacgtcggtggaaaacgcgatgggtattcaggtgccagaacgcgcgcagatgatccgcgccattctgctggaggtagaacgcctgcactcgcatctgctcaatctcggcctggcctgtcactttaccggcttcgactccggctttatgcagttcttccgcgtgcgtgaaacctccatgaaaatggcagagatccttaccggtgcacgtaaaacctacggcctgaacctgatcggcgggattcgtcgcgatctgctgaaagacgacatgatccagacccgccagctggcacaacagatgcgtcgtgaagtgcaggagctggtggatgtgctgctgagcacaccgaacatggaacaacgcaccgtcggcattggtcgtctggacccggaaatcgctcgcgacttcagtaacgttggcccgatggttcgtgccagcggtcacgcccgtgatacccgtgccgatcacccgtttgttggttatggcctgctgccaatggaagtccacagcgagcagggctgcgacgttatttcccgtctgaaagtgcgtatcaacgaagtctataccgcgctgaatatgatcgattacggtctggataacctgccgggcggcccgctgatggtggaaggctttacctacattccgcaccgtttcgcgctgggctttgccgaagcgccgcgcggcgacgatatccactggagcatgaccggcgacaaccagaagctgtaccgctggcgctgccgtgcggcgacctacgcgaactggccgaccctgcgttatatgctgcgcggcaacaccgtttccgatgcgccgctgattatcggtagcctggacccttgctactcctgtaccgaccgcatgaccgtggtcgatgtacgtaagaagaagagcaaagtggtgccgtacaaagaacttgagcgctacagcattgagcgtaaaaactcgccgctgaaataa

SEQ ID NO: 3151 - DNA, 924 bp, Escherichia coli
atgagtgttttatatccgttaattcaggcgctggtgctatttgccgttgcgccgctgctctccggtattacccgtgtggcgcgtgcccgtctgcataaccgtcgcgggccgggcgtgttgcaggagtatcgcgacattatcaaactgctgggccgccagagcgttggcccggatgcctccggctgggtgttccgcctgacgccgtatgtgatggtgggcgtcatgctgactatcgccactgcgctgccggtggtgaccgtcggttctccgctgccgcaacttggcgatttgatcaccttactgtatctcttcgccatcgcgcgtttcttctttgccatttctggtctggatactggtagcccgtttaccgctatcggcgcgagccgtgaagcgatgcttggcgtgttggttgaaccgatgctgctgcttggtctgtgggtcgccgcacaggttgccggttccaccaacatcagcaacatcaccgacaccgtttatcactggccactgagccagagcatcccgctggtgctggcgctttgtgcctgtgcgttcgccacctttatcgaaatgggcaaactgccgttcgacctggcggaagccgagcaggagttgcaggaaggtccgctctctgagtatagcggcagcggctttggcgtcatgaaatggggcatcagcctgaaacagctggtggtgttgcagatgttcgtcggggtgtttattccgtggggacaaatggaaaccttcaccgtcggtgggctgctgctggcgctggtgattgccatcgtcaaactggtggttggcgtcctggttatcgcgctgttcgaaaacagcatggcccgtctgcgtcttgatattactccgcgcattacctgggccgggtttggctttgcatttttagcgttcgtctccttgctggcggcgtga

SEQ ID NO: 3152 - DNA, 1827 bp, Escherichia coli
atgagcgcaatttccctgatcaatagcggcgtggcgtggtttgtcgccgccgctgttctggcatttctcttttcttttcaaaaagcgctaagtggctggatagccggaattggcggcgcggtgggtagcctgtatacggcagccgcgggcttcactgtgctgactggcgcggttggcgtgagcggtgcgctgtcgctggtaagctacgatgtgcaaatctctccgcttaacgcgatttggctgattacgctcggtctgtgcggtctgtttgtcagcctctacaacattgactggcatcgccacgcgcaggtgaaatgcaacggcttgcagatcaatatgttgatggctgccgccgtctgtgccgtcatcgccagcaacctcggcatgttcatggtaatggccgaaatcatggccctgtgtgcggtgttcctcaccagcaacagcaaagagggcaaactgtggtttgcgctggggcgtcttggcactctgctgctggcgattgcctgctggctgctgtggcagcgttacggcacgctggatctgcgcctgctggatatgcgtatgcaacagctgccgctcggttccgatatctggctgctcggtgtgattggctttggcctgctggccgggattattccgctgcacggctgggtgccacaggcacatgctaacgcctctgcgccagctgccgcgctgttttccacggtagtcatgaaaattggcctgctgggcattttaactctgtcactgctgggcggtaatgcaccgctgtggtgggggatcgcactgctggtactcggcatgatcaccgcattcgtcggcggtctgtatgcgttgatggaacataatatccaacgtctgctggcttaccacaccctggagaatatcggcattatcctgctggggttgggcgctggcgtaacgggtatcgcgctcgaacaaccggcgctgattgcccttggtctggttggtggtctgtaccatctgcttaaccatagcctgttcaagagcgtactgttccttggggcggggagcgtctggttccgtaccggtcatcgcgatatcgaaaaactcggtggtattggcaagaaaatgccggttatctccatcgccatgttagtcgggctgatggcaatggctgcgctgccgccgctgaacggttttgccggggaatgggttatctatcaatccttcttcaaactgagcaatagtggcgcgtttgttgcccgtcttctcgggccgctgctcgccgtggggctggcaattaccggtgcgctggcggtgatgtgtatggcgaaagtttatggcgttactttcctcggcgcgccgcgtaccaaagaggccgaaaacgccacctgtgcgccgctcctgatgagcgtaagcgtagtggcactggcgatttgctgcgtaattggcggtgttgctgcgccgtggctactgccgatgctctctgctgctgtacctctgccgctggagcctgctaacaccaccgtttctcaaccgatgatcacgttgctgctgattgcctgcccgctgctgccattcatcattatggcgatttgcaaaggcgatcgtttgccgtcgcgttcccgcggcgcggcctgggtgtgcggctacgatcatgaaaaatcaatggtgattaccgctcacggttttgccatgccggtgaaacaggcgtttgcgccggtgctgaaactacgcaaatggttgaatccggtgtcgctggtgccgggctggcagtgcgaggggagtgcgttgctgttccgccggatggcgctggttgaactggcggtgctggtggtgattattgtttcacgaggagcctga

SEQ ID NO: 3153 - DNA, 612 bp, Escherichia coli
gtgaatcgttttgtaattgctgactccacgctctgtatcggctgccacacttgtgaggctgcctgttcagagacgcatcgccagcacggcctgcaatcaatgccgcgcctgcgagtgatgctcaatgaaaaagaatctgcgccgcagctctgtcaccactgtgaagatgcaccctgcgcaacggtctgcccggttaacgccatcactcgtgttgatggtgccgtgcagttgaatgaaagtctgtgcgtaagctgcaaactgtgtggtatcgcctgcccgtttggcgcaattgaattttccggcagccgtccgctggatattccggcaaacgccaataccccgaaagcgccaccggcaccgcctgctccggcgcgtgtcagcacattgcttgactgggtgccaggtattcgcgcgatcgccgtcaaatgtgacctttgtagctttgatgaacaaggtccggcctgcgtgcggatgtgcccgactaaagccctgcatctggtggataacaccgatatcgcccgcgtcagcaaacgtaagcgtgagctgacttttaacacggactttggcgatctcaccttgtttcagcaggctcaaagtggagaggctaaatga

SEQ ID NO: 3154 - DNA, 462 bp, Escherichia coli
atgactatttgggaaataagcgagaaagccgattacatcgcacagcggcatcgtcgcctacaggaccagtggcacatctactgcaattcgctggttcaggggatcacgttatcgaaagcgcgcctgcatcacgccatgagctgcgcgccggacaaagaactctgtttcgtcctttttgaacattttcgcatttacgtcaccctggcggatggctttaacagccacaccatcgagtattacgtcgaaacaaaagatggcgaagacaaacagcggattgcgcaggcgcagttgagcattgacggcatgattgatggcaaggtcaacatccgcgatcgcgaacaagttctggaacactatctcgaaaaaatcgctggcgtttacgacagcttatataccgccattgaaaacaatgtgccggtgaatttaagccaactggtaaagggacaaagcccggtagcatga

SEQ ID NO: 3155 - DNA, 351 bp, Escherichia coli
atgcacgaaataaccctctgccaacgggcactggaattgatcgaacagcaggccgcaaaacacggcgcaaaacgcgtaactggggtctggctcaaaattggcgcattttcttgtgtcgaaaccagctctcttgccttttgttttgatctggtttgccgcggcagcgtggcggaaggttgtaaactgcacctcgaagaacaagaggccgaatgctggtgtgaaacatgccaacagtatgtgacgctactgacccagcgcgtccgccgctgtccactgtgtcatggtgacatgctacagattgtggcagacgacggtttacagattcggcggatagaaatagaccaggagtga

SEQ ID NO: 3156 - DNA, 873 bp, Escherichia coli
atgtgtacaacatgcggttgcggtgaaggcaacctctatattgagggtgatgaacataaccctcattccgcgtttcgtagcgcgccatttgccccggcggcacgcccgaagatgaaaatcaccggcattaaagcgcctgaatttacccccagccagactgaagaaggcgacctgcattacggtcatggcgaagcgggcactcacgcgccgggcatgagccagcgtcggatgctggaagtcgaaattgacgtgctggacaaaaataaccgtctggctgaacgcaaccgcgcgcgctttgctgcccgcaagcaactggtgctcaacctggtttccagccctggttccggtaaaaccaccctgctgacggaaaccttaatgcgcctgaaagacagcgttccgtgcgcggttattgaaggcgaccagcaaaccgtgaacgatgccgcgcgcattcgcgctaccggcacaccagcgattcaggtgaacaccggtaaaggctgccatcttgacgcacagatgattgccgacgccgcgccgcgcctgccactggacgataacggtattctgtttatcgaaaacgtcggtaacctcgtttgcccggccagcttcgatctcggtgaaaaacacaaagtggcggtgctttccgttaccgaaggtgaagacaaaccgctgaaatatccgcacatgtttgccgccgcctcgctgatgctgctcaacaaagttgacttgctgccgtatctcaatttcgacgttgagaagtgcatcgcctgcgcccgtgaagtcaatccagaaattgaaatcatccttatttccgccaccagcggcgaagggatggaccagtggctgaactggctggagacacagcgatgtgcatag

SEQ ID NO: 3157 - DNA, 273 bp, Escherichia coli
atgtgcataggcgttcccggccagatccgcactattgacggcaaccaggcgaaagtcgacgtctgcggcattcagcgcgatgtcgatttaacgttagtcggcagctgcgatgaaaacggtcagccacgcgtgggccagtgggtactggttcacgttggctttgccatgagcgtaattaatgaagccgaagcacgcgacactctcgacgccttacaaaacatgtttgacgttgagccagatgtcggcgcgctgttgtatggcgaggaaaaataa

SEQ ID NO: 3158 - DNA, 1122 bp, Escherichia coli
atgcgttttgttgatgaatatcgcgcgccggaacaggtaatgcagttaattgagcatctgcgcgaacgtgcttcacatctctcttacaccgccgaacgccctctacggattatggaagtgtgtggcggtcatacccacgccatttttaaattcggcctcgaccagttgctaccggaaaacgttgagtttatccacggtccgggttgcccggtgtgcgtactgccaatgggtagaatcgacacctgcgtggagattgccagccatccggaagtcatcttctgtacctttggcgatgccatgcgcgtaccagggaaacaggggtcgctgttgcaggcaaaagcacgcggtgccgatgtgcgcatcgtttactcgccaatggatgcgttgaaactggcgcaggagaatccaacccgtaaagtggtattcttcggcttaggttttgaaaccaccatgccgaccaccgccatcactctgcaacaggcgaaagcccgcgatgtgcagaatttttacttcttctgccagcacattacgcttatcccgacgctgcgcagtttgctggaacagccagataacggtatcgacgcgttcctcgcgccgggccacgtcagtatggttatcggcactgatgcctataattttatcgccagcgattttcatcgtccgctggtggtcgctggtttcgaaccccttgatctacttcaaggcgtggtgatgctggtggagcagaaaatagcggcccacagcaaggtagagaatcagtatcgtcgggtggtaccggatgccggtaacctgctggcgcaacaggcgattgccgatgtgttctgtgtcaacggcgacagtgaatggcgcggcttaggcgtgattgaatcttctggcgtgcacctgacgccggattatcaacgattcgatgccgaaacacatttccgcccggcaccgcagcaggtctgcgatgacccgcgtgcgcgttgtggcgaagtcttgacgggcaaatgtaagccgcatcaatgcccgctgtttggtaacacctgtaatcctcaaaccgcgtttggtgcgctgatggtttcctccgaaggagcgtgcgccgcgtggtatcagtatcgtcagcaggagagtgaagcgtga

SEQ ID NO: 3159 - DNA, 1011 bp, Escherichia coli
gtgaataatatccaactcgcccacggtagcggcggccaggcgatgcagcaattaatcaacagcctgtttatggaagcctttgccaacccgtggctggcagagcaggaagatcaggcccgtcttgatttggcacagctggtagcggaaggcgaccgtctggcgttctccaccgacagttacgtcattgacccgctgttctttcctggcggtaatatcggcaagctggcgatttgcggcaccgccaatgacgttgcggtcagtggcgcaattccgcgctatctctcctgtggctttatcctcgaagaaggattgccgatggagacactgaaagccgtagtgaccagcatggcagaaaccgcccgtgcggcaggcattgccatcgttactggcgataccaaagtggtacagcgcggcgcggcagataaactgtttatcaacaccgctggcatgggcgcaattccggcgaatattcactggggcgcacagacgctaaccgcaggcgatgtattgctggttagcggtacactcggcgaccacggggcgactatccttaacctgcgtgagcaactagggctggatggagaactggtcagcgactgcgcggtgctgacgccgcttattcagacgctgcgtgacattcccggcgtgaaagcgctgcgtgatgccacccgtggtggtgtaaacgcggtggttcatgagttcgcggcagcctgcggttgtggtattgaactttcagaagcggcactgccggttaaacctgctgtgcgcggcgtttgcgaactgctgggactggacgcccttaactttgccaacgaaggcaaactggtgatcgccgttgaacgcaacgcagcagagcaagtgctggcggcgttacattcccatccattgggaaaagatgcggcgctgattggcgaagtagtagaacgtaaaggtgttcgtcttgccggtctgtatggcgtgaaacgaaccctcgatctaccgcacgccgaaccgcttccgcgtatatgctaa

SEQ ID NO: 3160 - DNA, 2079 bp, Escherichia coli
atgtcatatacaccgatgagtgatctcggacagcaagggttgttcgacatcactcggacactattgcagcagcccgatctggcctcgctgtgtgaggctctttcgcaactggtaaagcgttctgcgctcgccgacaacgcggcgattgtgttgtggcaagcgcagactcaacgtgcgtcttattacgcatcgcgtgaaaaagacacccccattaaatatgaagacgaaactgttctggcacacggtccggtacgcagcattttgtcgcgccctgatacgctgcattgcagttacgaagaattttgtgaaacctggccgcagctggccacaggtgggctataccccaaatttggtcactattgcctgatgccactggcggcggaagggcatatttttggtggctgtgaatttattcgttatgacgatcgcccctggagcgaaaaagagttcaatcgtctgcaaacatttacgcagatcgtttctgtcgtcaccgaacaaatccagagccgcgtcgttaacaatgtcgactatgagttgttatgccgggaacgcgataacttccgcatcctggtcgccatcactaacgcggtgctttcccgcctggatatggacgaactggtcagcgaagtcgccaaagaaatccattactatttcgacattgacgatatcagcatcgtcttacgcagccaccgtaaaaacaaactcaacatctactccactcactatcttgataaacagcatcccgctcacgaacagagcgaagtcgatgaagccggaaccctcaccgaacgcgtcttcaaaagtaaagagatgctgttgattaatctccacgagcgggacgatttagccccctatgaacgcatgttgttcaacacctggggcaaccagattcaaaccttgtgcctgttaccgctgatgtctggcgacactatgctgggcgtgctaaaactggcgcaatgcgaagagaaagtctttaccactaccaatctgaatttactgcgccagattgccgaacgtgtggcaatcgctgtcgataacgccctcgcctatcaggaaattcatcgtctgaaagaacggctggttgatgaaaacctcgccctgaccgagcagctcaacaatgttgatagtgaatttggcgagattattggccgcagcgaagccatgtacagcgtacttaaacaagtggaaatggtggcgcaaagtgacagtaccgttctgatcctcggtgaaactggtacaggtaaagagctgattgcccgcgcgatccataatctcagtgggcgtaataatcgccgtatggtcaaaatgaactgcgcggcgatgcctgccggattgctggagagcgatctatttggtcatgagcgtggggcttttaccggtgccagcgctcagcgcattggtcgttttgaactggcggataaaagctcactattcctcgatgaagtgggcgatatgccgctggagttacagccgaagttgctgcgtgtattacaggaacaggagtttgaacgtctcggcagcaacaaaatcattcagacggacgtacgtttaattgccgcgactaaccgcgatctgaaaaaaatggtcgccgaccgagagttccgtagcgatctctattaccgcctgaacgtattcccgatccacctgccgccactacgcgagcgtccggaagatattccgctgctggcgaaagcctttaccttcaaaattgcccgtcgtctggggcgcaatatcgacagcattcctgccgagacgctgcgcatcctgagcaacatggaatggccgggcaacgtgcgtgagctggaaaacgtcattgagcgcgcggtattgctaacacgcggcaacgtgctgcagctgtcattgccagatattgctttaccagaacctgaaacgccgcctgccgcaacggttgtcgcccaggagggcgaagatgaatatcagttgattgttcgcgtgctgaaagaaacaaacggcgtggttgccgggcctaaaggcgctgcgcaacgtctggggctgaaacgcacgactctgctgtcacggatgaagcgactgggaattgataaatcggcattgatttaa

SEQ ID NO: 3161 - DNA, 429 bp, Escherichia coli
atggcagtttcagcaagaaatcaattaaccggaacagttagcacagtagcaatgggcgctgtgaatgatgaagtagaactgacgctggcaggtggtgcaaagctggtggcaattgtgactcacagcagccagcaagcgctgggtctggcgaaagggaaagaagcgattgccctgattaaagccccgtgggtcacgctggcaacggaagactgtggactgaaattctctgctcgcaaccagtttgctggcagcgtgtcgacaatcaccgaaggcgcagtgaacgccactgtccatatcaaaacggatgcgggttttgaaattgtggcagtggtaacaaatgaaagtcaggatgaaatgaaactcaccactggctcgcgcgttattgcattgatcaaagcatcagccatcctgattgccaccaaagcgtaa

SEQ ID NO: 3162 - DNA, 345 bp, Escherichia coli
atgtccggcaagcgtatctctcgtgaaaaactgacgattaaaaaaatgatcgatctttatcaagcgaaatgcccgcaggcgtcagcagagccggagcattacgaggcgttgtttgcttacgcgcaaaagcggctggataaatgtgtgttcggtgaagagaaaccagcctgtaagcagtgtccggtgcactgttaccagcctgcaaagcgtgaagagatgaaacagattatgcgttgggccgggccgagaatgctgtggcgtcatccgatcttaaccgtgcgtcatctcatcgatgacaagcgtccggtgccggagttgccagaaaaatatcgtccaaagaaataa

SEQ ID NO: 3163 - DNA, 2562 bp, Escherichia coli
atgagtacaatagaaaatttcgacgcccatacgcccatgatgcagcagtatctcaagctgaaagcccagcatcccgagatcctgctgttttaccggatgggcgacttttatgaactgttttatgacgacgcaaaacgggcgtcgcaactgctggatatttcactgaccaaacgcggtgcttcagcgggagagccaatcccgatggcggggattccctaccatgcggtggaaaactacctcgccaaactggtgaatcagggcgaatcggttgctatttgtgaacagattggcgatccggcgaccagcaaagggccggtcgagcgcaaagttgtccgtatcgttacgccgggcaccatcagcgatgaagcactgttacaggagcgccaggacaatctgctggcggctatctggcaggacagtaaaggtttcggctacgcaacgctggatatcagttccggtcgttttcgcctgagcgaaccggcagaccgcgaaacgatggcggcagaactgcaacgtacgaatccagcggaattactgtatgcggaagatttcgccgagatgtcgctgattgaaggtcgccgcggcctgcgtcgtcgcccgctgtgggagtttgaaatcgacaccgctcgccagcaattgaacctgcaatttggcacccgagatctggtcggttttggtgtggagaacgcaccacgcggactttgtgctgccggttgtctgttgcagtatgcgaaagatacccaacgcacgaccctgccgcatattcgttctatcactatggaacgtcagcaggacagcatcattatggatgccgcgacgcgtcgtaacctggaaattactcagaacctggccggcggtgcggaaaatacgctggcttcagtgctcgactgcactgtaacgccgatgggcagccgtatgctgaaacgctggctgcatatgccagtgcgcgatacccgcgtcttgcttgagcgccagcaaactattggcgcattgcaggatttcaccgctgagctacagccggtactgcgtcaggtcggcgacctggaacgtattctggcgcgtctggcgttgcgtaccgctcgcccgcgcgatctggcccgtatgcgtcatgccttccagcaacttccagaactgcgcgcgcaactggaaggtgtcgatagcgccccggtacaagcactgcgtgagaagatgggcgagtttgccgaactgcgcgacctgctggagcgagcaatcatcgacacgccgccggtgctggtacgcgacggtggtgttattgcgactggttataacgaagaactggatgaatggcgcgcgctggctgacggcgcgaccgattatctggagcgtctggaagtccgcgagcgtgaacgtaccggcctggacacgctgaaagttggctttaatgcggtgcacggctactacattcaaatcagccgtgggcaaagccatctggcaccaatcaactacatgcgtcgccagacgctgaaaaacgccgagcgctacatcattccagagctaaaagagtacgaagataaagttctcacctcaaaaggcaaagcactggctctggaaaaacaactttatgaagagctgttcgacctgctgttgccgcatctggaagcgttgcaacagagcgcgagcgcgctggcggaactcgacgtgctggtgaacctggcggagcgggcctataccctgaactacacctgcccgacctttattgataaacctggcattcgcattaccgaaggtcgccatccggtagttgaacaagtactgaatgagccgtttatcgctaacccgctgaacctgtcgccgcagcatcgcatgttgatcattaccggtccgaacatgggaggtaaaagtacctatatgcgccagaccgcgttgattgcgctgatggcgtatatcggcagctacgtaccggcgcaaaaagtcgagattggcccgattgaccgtatctttacccgcgtaggtgccgcggatgatctggcttccgggcgttcaacctttatggtggagatgaccgaaaccgccaatattttacataacgccaccgaatatagtctggtgttgatggatgagatcgggcgtggaacgtctacttacgatggtctgtcgctggcgtgggcatgtgcggaaaatctggcaaataagatcaaagcgttgacgctgtttgctacccactatttcgagctgacccagttaccggagaaaatggaaggcgtcgccaacgtgcatctcgatgcactggagcacggcgacaccattgcctttatgcatagcgtgcaggatggcgcagcgagcaaaagctacggcctggcggttgcagctctggcgggtgtgccaaaagaggttattaagcgcgcacggcaaaaactgcgtgagctggaaagcatttcgccgaacgccgctgctacgcaagtggatggtacacaaatgtctttgctgtccgtaccggaagaaacttcgcctgcggtcgaggcactggaaaacctcgacccggattcattgactccgcgtcaggcgctggagtggatttatcgcttgaagagtctggtgtaa

SEQ ID NO: 3164 - DNA, 657 bp, Escherichia coli
atgccatctacacgctaccaaaaaatcaacgcccatcactatcgccatatatggaccgttggtgatattcatggtgactatcaattattacaatcccgcttacatcaactctctttttgccctgaaaccgacttacttatttcggtaggcgataacatcgatcgtgggcccgagagtcttaacgtgctgcgcctgttaaaccagccctggtttatctccgtcaaaggcaaccacgaagcgatggcgcttgaggcattcgaaactggcgatggaaatatgtggcttgccagcggtggtgactggtttttcgatttaaatgattcagagcaacaagaggcaatagatctgttgctgaaattccatcaccttccacatattattgaaatcactaacgacaacataaaatatgtcatcgcacatgcagattatccggggaaggagtatcagtttggcaaagaaatagcggagagcgaattactctggcctgttgatcgtgtgcagaaatcacttaatagcgaattacaaaaaataaacggcgccgacttctttatatttggtcatatgatgtttgataacattcagtcgttcgctaaccagatttatattgataccggatcgccgaacagcgggcggctgtcattttataaaataaagtag

SEQ ID NO: 3165 - DNA, 768 bp, Escherichia coli
ttgatacccgtagagcgtcgccaaatcatccttgagatggtagctgaaaaaggcattgtcagtattgctgaactaacggacagaatgaatgtgtcacatatgaccattcgtcgggatttacaaaaactggagcagcagggagccgttgtgctggtgtccggaggcgtccagtctccgggacgcgtggcgcatgaaccttctcatcaggtaaaaactgcgctggcaatgacgcaaaaagcggctattggcaagctggcggcaagtcttgttcagccgggaagttgtatctatctggatgcgggaacgaccacgctagcgatagcacagcatctgattcacatggagtcactgactgtggtcacaaacgatttcgttattgcggactacttgctcgacaacagtaattgcacaattattcacactggcggtgcagtgtgtcgggaaaaccgttcctgtgtcggggaagccgctgcgaccatgctgcgcagcctgatgattgatcaggcttttatttctgcatcgtcatggagtgtgcgggggatctctacgccagcagaagataaagtcacggtgaaacgggcgattgccagtgccagccgccagcgagttttggtctgtgatgcgacgaaatatggacaggtggcgacatggctggcgttaccattaagcgagtttgatcagatcattactgacgatggtctgccggagagtgccagccgcgcgctggcgaagctggatctctctttgctggtagcgaaaaatgaataa

SEQ ID NO: 3166 - DNA, 909 bp, Escherichia coli
atgaaaacgggatcggagtttcatgtcggtatcgttggcttagggtcaatgggaatgggagcagcactgtcatgtgtccgcgcaggtctttctacctggggcgcagacctgaacagcaatgcctgcgctacgttgaaagaggctggtgcttgcggggtttctgataacgccgcgacgtttgccgaaaaactggacgctctgctggtgctggtggtcaatgcgacccaggttaaacaggtgctgtttggtgaaaaaggcgttgcacaacatctgaaacccggtacggcagtaatggtttcttccactatcgccagtgctgatgcgcaagaaattgctaccgctctggctggattcggtctggaaatgctggatgcgccggtttctggtggtgcggtaaaagccgctaacggtgaaatgactgtcatggcctccggtagcgatattgcctttgaacgactggcacccgtgctggaagccgttgccggaaaagtttatcgcatcggtgcagaaccgggactgggttcgaccgtaaaaattatccaccagttgttagcgggcgtacatattgctgccggcgccgaagcgatggcgcttgcagcccgtgcggggatcccgctggatgtgatgtatgacgtcgtgaccaatgccgccggaaattcatggatgttcgaaaaccggatgcgtcatgtggtggatggcgattacaccccgcattcagccgtcgatatttttgttaaggatcttggtctggttgccgataccgccaaagccctgcacttcccgctgccattggcctcaacagcattgaatatgttcaccagcgccagtaacgcgggttacgggaaagaagacgatagcgcagttatcaagattttctctggcatcactctaccgggagcgaaatcatga

SEQ ID NO: 3167 - DNA, 1263 bp, Escherichia coli
atgatcaagattggcgttatcgccgatgattttaccggcgcgacggatatcgccagttttctggtggaaaacggtctaccaacggtacaaattaacggtgttccaacaggtaaaatgccggaagcaatcgacgcactggtgatcagcctgaaaacgcgctcctgtccggtggttgaagccacacagcaatcgctggcggctctgagctggttgcaacagcaaggttgcaaacagatctatttcaaatactgctctactttcgacagtacggcgaaagggaatatcggcccggttaccgatgcattaatggatgctctcgacacgccgtttacggtcttctctccggccctgccagtcaacggacgtacggtttatcaggggtatttgttcgtaatgaatcaactgctggccgaatccggaatgcgccatcacccggtaaatcccatgaccgacagctatcttccccgtctggttgaagcgcaatccacagggcgctgcggcgtcgtttcagcacatgttttcgaacaaggtgtgaaagccgttcgtcaggagctggctcgcttacagcaagagggctatcgctacgcggtgcttgatgcgctgaccgaacaccatctggaaattcagggagaagccttgcgcgatgccccactggtaacgggcggttctggtctggcgattggcctggcccggcagtgggcgcaagaaaacggtaaccaggctcgcgaagcagggcgtccgctcgctgggcgcggcgtagtgctctccggttcatgctctcaaatgaccaaccgccaggtggcacattaccgtcaaattgcaccagcccgtgaggttgatgtggcacgctgcctctcaaccgaaactctggccgcttatgcacacgagctggcagagtgggttctgggccaggaaagtgtacttgctccacttgtttttgccaccgccagcactgacgcattggcagcaattcaacagcaatacggtgcacaaaaagccagtcaggcagtagaaactctgttttctcaactagcggcgcggttagcagcggaaggcgtgacacgctttattgtcgcaggcggtgagacctccggcgtagtcacacagagcctgggcataaaaggttttcatattggcccaaccatttcccccggcgtgccgtgggtaaacgcactggataagcctgtctcactcgcccttaaatctggcaacttcggtgatgaagcctttttttcacgagcccaaagagagtttttatcatga

SEQ ID NO: 3168 - DNA, 639 bp, Escherichia coli
atgagcgatttcgcaaaagtagagcagtctttgcgagaggagatgacgcggattgccagttcattctttcagcgcggatatgcaaccggttcggctggcaatctgtcgctgcttttacctgacgggaatttactggcgacaccgacaggttcatgcctgggcaatctcgatccgcagcggctttccaaagtcaccgcggatggcgaatggttaagtggtgacaaaccctcgaaagaggtgctctttcatctggcgctgtatcgcaacaatccgcgctgtaaagcggtagtgcatttgcacagtacgtggtcgacggcgctttcctgcctggaagggctggacagcaataacgttattcggccgttcacaccatacgtggtgatgcggatgggtaatgtcccgctggtgccctattaccgaccgggcgataaacgcatcgcacaggatctggcggaactggcagcagacaatcaggcttttttactggcaaatcatggcccagtggtttgcggtgaaagcctgcaagaagccgccaacaatatagaagagctggaggaaacggcaaagctgatttttattctcggtgaccgcccgatccgttatctgaccgcaggtgaaattgcggaattaaggagttaa

SEQ ID NO: 3169 - DNA, 777 bp, Escherichia coli
atgcctcgttttgcagctaatttatccatgatgttcaccgaagtgccttttattgaacgcttcgccgcagcgcgaaaagccgggttcgatgctgtggagtttctgtttccctatgactactccccccagcaaatccagcagcaactggtgcaaaaccatctgacactggcgctgttcaataccgctcccggagatattaatgcgggagaatggggattatccgcccttcccggacgtgagcacgaagcacgcgcagacatcgacctggcactggaatatgcattggcgctcaattgtgaacaagtccatgtgatggcaggcgtcgtgcccgctggcgaagatgctgaacggtaccgggcagtatttattgataatctccgctacgctgccgaccactttgcgccacacggcaaacgaatattggttgaagcactcagccccggcgttaagcctcattatctcttctccagccagtatcaggcactggctattgttgaagaggttgcgcgagataacgtgtttattcaactagatactttccatgcgcaaaaagtagatggcaacctgacacatttaatccgcgactacgccgggaaatatgcgcacgtacaaattgccggactacctgatcgacatgaaccggacgatggagaaatcaactatccgtggctgttccgcctgttcgatgaagtgggatatcagggctggatcggttgtgaatacaaacctcgtggcctcaccgaagaagggcttggctggtttgacgcctggcgctaa

SEQ ID NO: 3170 - DNA, 1365 bp, Escherichia coli
atgtccacaattacattgttatgcattgcgttagctggcgtaatcatgctgttgctactggtcatcaaggcaaaggtacaaccattcgttgctctgctcctcgtcagcctgttagtcgcacttgcggcgggtataccggcgggcgaagtgggtaaagtgatgatcgccgggatgggcggtgtgcttggttccgtcactattattattggtctgggcgctatgctggggcgtatgatcgaacactctggtggtgcagagtcactggctaattatttcagtcgcaagttaggtgacaaacgaactatcgctgcgctgactctggcagcgttcttcctcggtattcccgtcttctttgatgtcggctttattattcttgcgccaatcatttacggttttgccaaggttgccaaaatatcaccactcaaatttggcctgcctgtcgctgggatcatgctcactgttcacgtggcggtaccgccgcatccaggccctgtcgccgcagcggggttactccacgcagacatcggctggctaaccatcatcggtattgcgatttctattcccgtagggattgttggctactttgcagcgaaaataatcaataagcgccaatatgcgatgtcggtcgaggtactggaacagatgcaactggctccggccagtgaggaaggcgcgacaaaattaagcgataaaataaatccaccgggcgtcgcgctggtcacctcgctaattgttattcctatcgcgattatcatggcgggtacggtttctgcaacactgatgccgccttcgcatcccctgcttggtacgctacagttgatcggctcaccaatggtagctctaatgattgcgctggtgctggcattctggttattggctttacgtcgcggctggagcttacaacacaccagcgacattatgggctctgcccttcccactgcggcggtagtgattttggttactggtgctggaggggtatttggcaaagtgctggtggaatcgggcgtcggtaaagcccttgccaacatgttacaaatgattgacctgcctctgttaccagccgcatttattatttcactggcgctgcgtgcatcgcaggggtcagcaaccgtagcaatcctgacaaccggcgggttactctcagaagcggtgatgggattaaatccgattcagtgcgtattggtgacgctggcagcctgctttggtgggcttggcgcgtcacatattaatgactcagggttctggattgtgaccaaatatctggggttgtcggtagcagacggtctgaaaacctggacagtgttaacgaccattctcggttttaccggattcttaattacctggtgcgtatggctcgtcatctaa

SEQ ID NO: 3171 - DNA, 1044 bp, Escherichia coli
atgcaaggcattaaaaaatatacaattctagcctcttctcttatatctggtagtgtttttgctcaaacggaaatttcgactgcaaattcgtctacagttaatgcaagttatgttgaaccttcagcggaaaaaataatatcgccaagcgataaactcaataacctttttgaaagaaatatgtctcagccttatattttacaaaaaattggcgagagaacttattatgttcaacgctatttttattccactacgttttatgtcggagacaaaggggttttgctgtttgatgctccggagggtcgcggtaaatatttattacaggcaattcgtgatgtgactccattacccgtaacagcgctggtttattctcattaccatgtggatcacattggcgatagtccattttggaacgatgaggcgaagaaagaaggcgtgaatctgcgtattattgccagtaaagccactgctgaaaaaatgcaatttatgaacagtcgcttacccgtcgccactcaggttttaagtaaaaaagatgaccagtttaaatttgaaaagcagaccattgaattacaccgatttgttaaagcaggacataccgacgaccattctgtatggttgctaaaacaggaaaaagtagctcacagcccggatctcctgaatcctgaccaactgccgatgatgggcttcgccgtatcggatacgttggtttaccatgacagtaatttgcgtcaggttgaaatgcttgactggaaatattttattggcgggcatggtaatattggttcacacgatgatttcaaatttcaacgccagtttcttaatgatcttagggatacgacaattaaagtcagaaaagaagaaagttttggtaaatttatgaataaaacggcaaataatcatgctgattttgcgcgagcccagcgcgaagcaattattaagaaagtaactgaagtattacgtccgaaatatggccatatgtatggctacgacgcatctatgcctgctaatatcgaaatggcaataagattggtcggttcttattactaa

SEQ ID NO: 3172 - DNA, 552 bp, Escherichia coli
atgcaaaacatagctgtggtttattattcaggatatggtcacactaaactggttgctgaaaaagtggcacaaggcgcccatgcagatttaatttcgattgataacgaaggaaatatcactgagcaggagtgggaaaaactggacgcagccgatgccattatcttcggtgctcccacctatatgggcggtgcgccatggcaattcaagaaatttgctgatgccagttccaaagcgtggtttacacgtaaatggcaggataaagtcttcgggggtttcaccaacagcgccagcctgaatggcgataaacaagttacgctgatctatctgcaaacgctggcttcacagcatggcggtctgtgggtgagtttaggtcaggctcctgccaatgtgcttgcgtcaaccagggaagatgtaaacaatctgggcggttcagtcggtttgctggtgcaatctccagccgatgcgggtgcagaccaaatccctacgggcgatctggatacagccgtgaaatatggtgaacgcgtggcgacaattactgtgcgcttaaaatga

SEQ ID NO: 3173 - DNA, 993 bp, Escherichia coli
atgagtcagaatacgctgaaagttcatgatttaaatgaagatgcggaatttgatgagaacggagttgaggtttttgacgaaaaggccttagtagaagaggaacccagtgataacgatttggccgaagaggaactgttatcgcagggagccacacagcgtgtgctggacgcgactcagctttaccttggtgagattggttattcaccactgttaacggccgaagaagaagtttattttgcgcgtcgcgcactgcgtggagatgtcgcctctcgccgccggatgatcgagagtaacttgcgtctggtggtaaaaattgcccgccgttatggcaatcgtggtctggcgttgctggacctgatcgaagagggcaacctggggctgatccgcgcggtagagaagtttgacccggaacgtggtttccgcttctcaacatacgcaacctggtggattcgccagacgatcgaacgggcgattatgaaccaaacccgtactattcgtttgccgattcacatcgtaaaggagctgaacgtttacctgcgaaccgcacgtgagttgtcccataagctggaccacgaaccaagtgcggaagagatcgcagagcaactggataagccagttgatgacgtcagccgtatgcttcgtcttaacgagcgcattacctcggtagacaccccgctgggtggtgattccgaaaaagcgttgctggacatcctggccgatgaaaaagagaatggtccggaagataccacgcaagatgacgatatgaagcagagcatcgtcaaatggctgttcgagctgaacgccaaacagcgtgaagtactggcacgtcgattcggtttgctggggtacgaagcggcaacactggaagatgtaggtcgtgaaattggcctcacccgtgaacgtgttcgccagattcaggttgaaggcctgcgccgtttgcgcgaaatcctgcaaacgcaggggctgaatatcgaagcgctgttccgcgagtaa

SEQ ID NO: 3174 - DNA, 1140 bp, Escherichia coli
atgagcgcgggaagcccaaaattcaccgttcgccgcattgcggcattgtcactggtttcgctatggctggcaggctgttctgacacttcaaatccaccggcaccggtcagctccgttaatggcaatgcgcccgcaaataccaattctggtatgttgattacgccgccgccgaaaatgggaacgacgtctacagcacagcaaccgcaaattcagccggtacagcagccacaaattcaggctactcaacaaccgcaaatccagccagtgcagccagtagctcagcagccggtacagatggaaaacggacgaatcgtctacaaccgtcagtatgggaacattccgaaaggcagttatagcggcagtacatacaccgtgaaaaaaggcgacacgcttttctatatcgcctggattactggcaacgatttccgtgaccttgctcagcgcaacaatattcaggcaccatacgcgctgaacgtcggtcagaccttacaggtgggtaatgcttccggtacgccaatcacaggcggaaatgccattacccaggccgacgcagcagagcaaggagttgtgatcaagcctgcacaaaattccaccgttgctgttgcgtcgcaaccgacaattacgtattctgagtcttcgggtgaacagagtgctaacaaaatgttgccgaacaacaagccaactgcgaccacggtcacagcgcctgtaacggtaccaacagcaagcacaaccgagccgactgtcagcagtacatcaaccagtacgcctatctccacctggcgctggccgactgagggcaaagtgatcgaaacctttggcgcttctgaggggggcaacaaggggattgatatcgcaggcagcaaaggacaggcaattatcgcgaccgcagatggccgcgttgtttatgccggtaacgcgctgcgcggctacggtaatctgattatcatcaaacataatgatgattacctgagtgcctacgcccataacgacacaatgctggtccgggaacaacaagaagtgaaggcggggcaaaaaatagcaaccatgggtagcaccggaaccagttcaacacgcttgcattttgaaattcgttacaaggggaaatccgtaaacccgctgcgttatttgccgcagcgataa

SEQ ID NO: 3175 - DNA, 627 bp, Escherichia coli
atggtaagcagacgcgtacaagcacttctggatcaattacgtgcgcaaggtattcaggatgagctggtgctgaatgcacttgccgccgtgccgcgtgaaaaattcgttgatgaagcgtttgaacaaaaagcctgggacaatatcgccttgccgataggtcaggggcagacaatttcgcagccgtatatggtggcgcgaatgaccgaattactcgagctgacgccgcagtcgcgggtgctggaaattggcactggttcgggatatcaaactgcaatcctggcgcatcttgtccaacatgtttgctcggttgaacggattaaaggcttgcagtggcaggcgcgtcgccgcctgaaaaatcttgatttacataatgtttcaacccgtcatggcgatggatggcaaggttggcaggcacgcgcgccgtttgacgctatcattgttacggcggcaccgcctgaaattccaactgcgctaatgacgcagctggacgaaggcgggattctcgtcttacccgtaggggaggagcaccagtatttgaaacgggtgcgtcgtcggggaggcgaatttattatcgataccgtggaggccgtgcgctttgtccctttagtgaagggtgagctggcttaa

SEQ ID NO: 3176 - DNA, 762 bp, Escherichia coli
atgcgcatattgctgagtaatgatgacggggtacatgcacccggtatacaaacgctggcgaaagccttgcgtgagtttgctgacgttcaggtggtcgcccccgatcgtaaccgcagcggcgcttctaattctctgacactggaatcctccctgcgcacgtttacctttgaaaatggtgatattgctgtgcaaatgggaaccccgaccgattgcgtctatcttggcgtaaatgctctgatgcgcccgcgcccggacattgttgtgtccggaattaacgccgggccgaatctgggggatgatgttatttattctggtacggtagcggccgcgatggaaggccgtcatttaggttttccggcgcttgccgtctcgcttgacgggcataaacattacgacactgccgcggcggtaacctgctcaattttgcgcgcactgtgtaaagagccgctgcgcaccgggcgtattcttaatattaacgttccggatttacccttggatcaaatcaaaggtattcgcgtgacgcgctgcggtacacgacatccggcagatcaggtgatcccgcagcaagatccgcgcggcaatacgctgtactggattggcccgccgggcggtaaatgtgatgccggtccggggaccgattttgctgcggtagatgagggctatgtttccatcacgccgctgcatgtggatttaactgcgcatagcgcgcaagatgtggtttcagactggttaaacagcgtgggagttggcacgcaatggtaa

SEQ ID NO: 3177 - DNA, 1050 bp, Escherichia coli
atgattgagtttgataatctcacttacctccacggtaaaccgcaaggcaccgggctgctgaaagccaatccggaagactttgtggtggtggaagatttgggctttgagcctgatggtgaaggtgagcatattctggttagaatcctcaaaaacggctgcaatacccgttttgtggcggatgcactggcgaaattcctgaaaattcatgcccgtgaagtcagcttcgctgggcaaaaagataaacatgctgttacggaacagtggttatgcgctcgcgtgccgggcaaagagatgcccgatctgagcgcctttcaactggaaggctgccaggtgctggagtatgcgcggcacaagcgcaagctgcgtttaggggcgctgaaaggtaacgcctttaccctggtactacgcgaagtgagcaatcgcgatgacgttgaacaacgtctgatcgatatttgcgtaaaaggtgtaccgaactacttcggtgcccaacgttttgggattggcggtagcaacttgcagggtgcgctgcgctgggcgcaaaccaatactccggtgcgcgatcgcaataaacggagtttttggttgtcggcagcccgcagtgcgttgtttaatcagattgttgctgaacgcctcaaaaaagcagacgttaatcaagttgttgacggcgatgcgctacaattagccggacgtggtagctggtttgtcgcaaccaccgaagaactggcggaattacagcgtcgcgtcaacgataaagtgctgatgataaccgccgcattgccgggcagtggcgagtggggaactcagcgtgaagcgctggcattcgaacaagcagctgtcgccgaagaaactgaattacaaaccttactggtgcgcgaaaaagttgaagccgcgcgcagagcgatgctgctgtatccgcaacaattaagctggaactggtgggatgatgtcaccgtagaaatccgtttctggcttccggcgggaagttttgcaaccagcgttgtcagggaacttatcaacacaacaggtgattatgcgcatattgctgagtaa

SEQ ID NO: 3178 - DNA, 480 bp, Escherichia coli
atgcgaattggacacggttttgacgtacacgcctttggcggtgaaggcccaattatcattggtggcgtacgcattccttacgaaaaagggctgctggcgcattctgatggcgacgtggcgctccatgcgttgaccgatgcattgcttggcgcggcggcgctgggagatataggcaagctgttcccggataccgatccggcatttaaaggtgccgacagccgcgagctgttgcgcgaagcctggcgtcgtattcaggcgaaaggttatgccctcggcaacgtcgatgtcactatcatcgctcaggcaccgaagatgttgccgcacattccacaaatgcgcgtgtttattgccgaagatctcggctgccatatggatgatgttaacgtgaaagccactactacggaaaaactgggatttaccggacgtggggaagggattgcctgtgaagcggtggcgctactcattaaggcaacaaaatga

SEQ ID NO: 3179 - DNA, 711 bp, Escherichia coli
atggcaaccactcatttggatgtttgcgccgtggttccggcggccggatttggccgccgaatgcaaacggaatgtcctaagcaatatctctcaatcggtaatcaaaccattcttgaacactcggtgcatgcgctgctggcgcatcccagggtgaaacgtgtcgtcattgccataagtcctggcgatagccgctttgcacaacttcctctggcgaatcatccacgaatcacggttgttgatggtggtgaagagcgtgccgattccgtgctggcaggtctgaaagccgctggcgacgcgcagtgggtattggtgcatgacgccgctcgtccttgtctgcatcaggatgacctcgcgcgattgttggcgttgagcgaaaccagccgcacgggagggatcctcgctgcgccggtgcgcgatacgatgaaacgtgccgaaccgggcaaaaatgccattgctcataccgttgatcgcaacggcttatggcacgcgctgacgccgcaatttttccctcgtgagctgttacatgactgcctgacgcgcgctctaaatgaaggcgctaccattaccgatgaggcctcggcgctggaatattgcggttttcatccgcaacttgttgaaggccgcgcggataacatcaaggtaacgcgcccggaggatttggcgctggccgaattttacctcacccgaaccatccatcaggagaatacataa

SEQ ID NO: 3180 - DNA, 312 bp, Escherichia coli
atgggtaaactaacgctgctgttgctggctattctggtctggctacagtattcgctgtggttcggtaagaacggtatacatgactatactcgcgtcaataatgatgtggcggcacagcaagctacaaacgcgaaacttaaagcgcgaaacgatcagctttttgccgaaattgacgatctcaatggcggccaggaggcgctcgaagagcgtgcgcgtaatgaactcagcatgaccaggccgggcgaaacgttttatcgtctggtgcctgacgcgtcaaagcgcgcacagtctgcggggcaaaacaatcgataa

SEQ ID NO: 3181 - DNA, 324 bp, Escherichia coli
atgcgtaacagccacaacattacattaacaaataacgacagccttactgaggttgaagacaccacatggtcgctgccaggcgctgtggttggttttttatcgtggctgtgcgcgttggcaattccgatgttgatttatggctctaacacgctgctcttttttatctacacctggcctttctttctggcgctgatgcccgtcgcagtggtggtggggattgcactgcattcattgatggacggaaagctacgctacagtattgttttcactctggcgacggttggcattatgtttggtgcgctgtttatgtggctactgggttaa

SEQ ID NO: 3182 - DNA, 606 bp, Escherichia coli
atggcgctgcatgacgaaaacgtcgtctggcatagccacccagtaactccgcaacaacgcgaacagcaccacggtcatcgtggtgttgtgctgtggtttaccggcctctctggttccggtaaatcaaccgtcgcgggggcgctggaggaggcgttacataaacttggcgtcagtacgtatctgctggatggcgacaacgttcgccacggattatgcagcgatctcggttttagcgatgccgaccgtaaagagaatatccgtcgcgtcggtgaagtggcgaatttgatggttgaagccggactggtggtgctgaccgcatttatctcgccacaccgcgccgaacgccagatggttcgcgaacgcgtaggagaagggcgctttatcgaagtgtttgtcgatacgccgctggcgatttgcgaagcccgcgatccaaaaggtttatataagaaagcgcgtgccggtgaactgcgcaactttacgggaatagattccgtttacgaagcgcctgaatcggcagaaattcatctcaatggtgaacaattagtaacaaatttggtacagcaattattagatctgttgagacagaacgatattatcagatcctga

SEQ ID NO: 3183 - DNA, 1428 bp, Escherichia coli
atgaacaccgcacttgcacaacaaatcgccaatgaaggcggcgtcgaagcctggatgattgcgcaacaacataaaagcctgctgcgttttctgacctgtggtagtgtcgatgacggcaaaagtaccctgattggtcgcctgctacacgatacccgccaaatctacgaagatcagctctcatcgctgcataacgacagtaagcgtcacggcacccagggcgaaaagctggatctggcactgctggtggacggcctgcaagctgagcgcgaacagggcatcactattgatgtggcctaccgctatttctctaccgagaagcgtaaatttattatcgccgacaccccagggcacgagcagtacacccgcaatatggcgactggagcatcgacatgtgaactggcgatcttactgatcgatgcccgtaaaggcgtgctcgatcaaacccgtcgtcacagttttatctccacactgttggggatcaaacatctggtcgtggcgatcaacaaaatggatctggtggattacagtgaagagacgttcacccgtattcgtgaagattatctgacttttgccgggcagctgccgggtaatctggatatccgctttgtgccgctctccgcactggaaggcgacaacgtggcttcgcaaagtgaaagtatgccgtggtacagcggtccgacactgctggaagtgctggaaaccgtggagatccagcgagtggtggatgctcagccaatgcgcttcccggtgcagtacgttaaccgtccgaatctcgattttcgtggctacgccggaacgctggcatccggtcgcgtggaagtcgggcaacgtgtcaaagtgctgccctctggtgtggaatcaaacgtcgcgcggatcgtgacctttgatggcgatcgcgaagaagcctttgccggagaagcgatcaccctggtgctgacggatgagatcgacatcagccgtggcgatctgctgctggcggcagacgaagcgttaccggctgtgcagagcgcgtcggtggatgtggtatggatggcggaacagccgctttccccgggccagagttacgacatcaaaattgccggtaagaagacgcgtgctcgtgttgatggcattcgttatcaggttgatatcaataaccttacccaacgcgaagttgaaaacctgccgctgaacggcatcggcctggtagatctcacctttgacgagccactggtgttagatcgttatcagcaaaacccggttaccggtgggctgatttttatcgatcgcctgagtaatgtgaccgtaggtgccggtatggtgcacgaaccagttagccaggcaactgctgcgccatctgaattcagtgcattcgaactggaattgaatgccctggttcgccgccatttcccgcattggggtgcgcgcgatttactgggagataaataa

SEQ ID NO: 3184 - DNA, 909 bp, Escherichia coli
atggatcaaaaacgacttacccacctgcggcaactggaggcggaaagcatccacattattcgcgaggtggctgcagaattctcaaatccggtgatgctctactctatcggtaaagattccagcgtcatgctgcatctggcgcgcaaggcgttttatccaggtacgctgcctttcccgttgctgcatgtcgataccggctggaaattccgcgagatgtatgagttccgcgatcgtacggcgaaagcctacggctgcgagctgctggtgcataaaaacccggaaggcgtggcgatggggattaatccattcgtacacggcagcgcgaaacataccgatattatgaaaactgaaggcctgaaacaggcgctgaacaaatacggttttgatgccgccttcggtggtgcgcgccgtgacgaagagaaatcccgcgctaaagagcgaatctactctttccgtgaccgcttccatcgctgggatccgaaaaatcagcgcccggagctgtggcacaactacaacgggcaaattaacaaaggcgaaagcatccgcgtcttcccgctctctaactggaccgagcaggatatctggcaatacatctggctggaaaatatcgacattgttccgctgtatcttgctgcggaacgtccggttctggaacgcgacggtatgttgatgatgattgatgacaaccgtatcgacctgcaaccgggcgaagtgattaaaaaacggatggtgcgtttccgcacactgggctgttggccgctgaccggcgcggtggagtcaaatgcgcaaacactgccggagatcatcgaagagatgctggtttccaccaccagtgaacgtcagggccgcgtaattgaccgcgaccaggcggggtctatggagctgaaaaaacgtcaggggtatttttaa

SEQ ID NO: 3185 - DNA, 1038 bp, Escherichia coli
atgttttccgcattgcgccaccgtaccgctgccctggcgctcggcgtatgctttattctccccgtacacgcctcgtcacctaaacctggcgattttgctaatacccaggcacgacatattgctactttctttccgggacgcatgaccggaactcctgcagaaatgttatctgccgattatattcgtcaacagtttcagcaaatgggttatcgcagtgatattcggacatttaatagtcggtatatttataccgcccgcgataatcgcaagagctggcataacgtgacgggaagtacggtgattgccgctcatgaaggcaaagcgccgcagcagatcatcattatggcgcatctggatacttacgccccgctgagcgatgctgacgccgatgccaatctcggcgggctaacgttacaaggaatggatgataacgccgcaggtttaggtgtcatgctggaactggctgaacgcctgaaaaatacgcctaccgagtatggtattcgatttgtggcgaccagcggcgaagaggaaggaaaattaggcgctgagaatttactcaagcggatgagtgacaccgaaaagaaaaatacgctgctggtgattaatctcgataacttaattgttggcgataagctgtatttcaacagtggcgtaaaaacacctgaagcagtaaggaaattaacgcgcgaccgggcgctggcaattgcccgcagccatggaattgccgccaccacaaatccaggtttgaataaaaactatccgaaaggcaccgggtgttgtaatgacgcagaaatattcgacaaagccggtattgctgtactttcggtggaagcgactaactggaatcttggcaataaggatggttatcagcaacgcgcaaaaacagccgcattccctgcgggaaatagctggcatgacgtaagactggataatcaacagcatattgataaggcacttcctggaagaatagaacgtcgctgccgtgatgttatgcggataatgctaccgttggtgaaggagctggcgaaggcatcttaa

SEQ ID NO: 3186 - DNA, 153 bp, Escherichia coli
atgctgacaaaatatgcccttgtggcaatcatcgtactgtgttgtacagtactgggattcacgttgatggtaggcgactcgttgtgtgagttgagtatcagagaacgtggtatggagtttaaggcagttctcgcttacgaatcgaagaagtag

SEQ ID NO: 3187 - DNA, 735 bp, Escherichia coli
atgcccaaactcgatctaaacgccctgaacgaactgccgaaggtggatcgcattctggcgctggcggaaactaacgccgaactggaaaaactggacgctgcaggccgcgttgcctgggcgctggataatctgcccggtgaatatgtactttcttccagctttggcattcaggcggcggtgagcctgcatctggtgaatcagattcacccggatatcccggtgatcctgaccgatacgggttatctgttcccggaaacctaccgctttattgacgagttaacggataaactcaagctcaacctgaaagtgtaccgtgctaccgaaagcgccgcctggcaggaagcacgctacggcaaactgtgggagcagggcgttgaaggcattgaaaagtacaatgacatcaacaaagtcgaaccgatgaaccgggcgctgaaagaactgaatgcgcaaacctggtttgctggcctgcgccgtgaacaatccggcagccgcgccaatttaccggtgctggcaattcagcgtggcgtatttaaagtgctgccgattatcgactgggataaccgaactatttatcagtacctgcaaaaacatggcctgaaatatcacccattatgggatgaaggatatttatcggtgggcgatacccatacaacccgtaaatgggaacccggcatggcggaagaagaaacgcgtttctttggcttaaaaagggaatgtggattacacgaagggtaa

SEQ ID NO: 3188 - DNA, 1713 bp, Escherichia coli
atgagcgaaaaacatccagggcctttagtggtcgaaggaaaactgacagacgccgagcgcatgaagcttgaaagcaactacctgcgcggcaccattgcggaagatttaaacgacggtctgaccggcggctttaagggcgataacttcctgctgatccgcttccacggcatgtatcagcaggatgaccgcgacattcgcgccgaacgtgctgaacagaagctggagccgcgccacgcgatgctgcttcgctgtcgtctgccgggtggggtgattaccactaaacagtggcaggcgatcgacaaatttgccggtgaaaacaccatctatggcagcattcgcctgaccaaccgccagacattccagttccacggcattctgaaaaagaacgtcaaaccggtgcatcagatgctgcactcggtcggtcttgatgcgctggcgaccgccaacgacatgaaccgtaacgtactctgcacctcgaacccttacgagtcgcagctgcatgcggaagcatatgaatgggcgaagaaaatttctgaacatctgctgcctcgtacccgcgcgtatgcggagatctggctcgatcaggaaaaagtcgccactactgatgaagagccgatccttggtcagacctacctgccgcgtaagttcaaaaccacggtagtgatcccgccgcagaacgatatcgatctgcacgccaacgacatgaacttcgtggcgatcgccgaaaacggcaagctggtgggctttaacctgctggtgggcggtgggctttccattgaacacggcaacaagaaaacctacgcccgcacggcgagtgagtttggctatctgccgctggagcatacgctggcggtggcggaagccgtcgtgacaactcagcgtgactggggtaaccgaaccgatcgtaaaaatgccaaaaccaaatacacgctggagcgcgtgggggttgagacgtttaaagcggaagttgaacgtcgcgcggggatcaaattcgagccgattcgcccgtatgagtttaccggacgcggagatcgtattggctgggttaagggcattgatgataactggcacctgacgctgtttatcgaaaatggtcgcattcttgattatccgggacgtccgctgaaaaccggcttgctggagatcgcgaagatccacaaaggtgatttccgcattacggcgaaccagaatctgatcatcgccggcgtgccggaaagcgagaaagcgaagatcgagaagatcgccaaagaaagcgggttaatgaatgccgtcacgccgcagcgtgaaaactcaatggcctgcgtgtcattcccgacttgcccgctggcgatggcggaagcggagcgtttcctgccgtcttttatcgacaacatcgataatttaatggcgaaacatggtgtcagcgatgagcatatcgtgatgcgtgtaacaggctgcccgaacggttgtggtcgcgcgatgctggcggaagtgggtctggtggggaaagcgccgggtcgctacaacctgcatcttggcggcaaccgcattgggacacgtatccctcggatgtataaagaaaacatcaccgagccggaaatcctggcgtcgcttgatgaactgatagggcgctgggcgaaagagcgcgaagcgggtgaaggcttcggcgactttacggtgcgtgcgggcatcattcgcccggtgctcgatccggcgcgcgatttgtgggattaa

SEQ ID NO: 3189 - DNA, 1800 bp, Escherichia coli
atgacgacacaggtcccaccttccgcgttgcttccgttgaacccggagcaactggcacgccttcaggcggccacgaccgatttaactcctacccagcttgcctgggtttctggctatttctggggcgtgctcaaccagcagcctgctgcgcttgcagcgacgccagcgcccgccgcagaaatgccgggtataactattatctccgcctcgcaaactggcaatgcgcgtcgggttgctgaagcattacgcgatgatttattagcggcaaaactgaacgttaagctggtgaacgcgggcgactataaattcaaacaaatcgccagcgaaaaactgcttatcgtggtgacgtcaacgcaaggggaaggggaaccgccggaagaagccgtcgcgctgcataagttcctgttctccaaaaaagcgccaaagctggaaaacaccgcgtttgccgtgtttagcctcggcgatagctcttatgaatttttctgccagtccgggaaagattttgacagtaagctggcggaactgggcggtgaacgcctgctagaccgtgtcgatgccgatgttgaataccaggctgctgccagcgagtggcgcgcccgcgtggttgatgcgcttaaatcgcgtgcgcctgtcgcggcaccttcgcaatccgtcgctactggcgcggtaaatgaaatccacaccagcccgtatagcaaagacgcgccgctggcggccagcctttcggttaaccagaaaattaccgggcgtaactctgaaaaagacgttcgtcacattgaaattgacttaggtgactctggcctgcgttaccagccgggtgacgcgctgggcgtctggtatcaaaacgatccggcactggtgaaagaacttgtcgaactgctgtggctgaaaggcgatgaacctgtcaccgtcgagggcaaaacgttgcctctgaacgaagcgctacagtggcacttcgaactgaccgtcaacaccgccaacattgttgagaactatgccacgcttacccgcagcgaaacgctgctgccgctggtgggcgataaagcgaagttacagcattacgccgcgacgacgccgattgtcgacatggtgcgtttctctccggcgcaactggatgccgaagcgctgattaatctgctgcgcccgctgaccccgcgcctgtattccatcgcctcctcgcaggcggaagtcgagaacgaagtgcacgttaccgttggtgtggtgcgttacgacgtggaaggccgcgcccgtgccggtggtgcctccagcttcctcgcggatcgtgtggaagaagagggtgaagtccgcgtctttatcgaacataacgacaacttccgcctgccaaccaatccggaaaccccggtgatcatgattggccctggcaccggcatcgcgccgttccgtgcctttatgcagcagcgtgctgccgacgaagcgccgggtaaaaactggctattctttggcaacccacactttacggaagatttcctctaccaggtggaatggcagcgttacgtcaaagaaggcgtgctgacgcgcatcgatctcgcctggtcgcgcgatcaaaaagaaaaaatttacgtacaagacaaactgcgcgaacagggcgcagagctgtggcgctggatcaatgacggtgcccacatttatgtctgcggcgacgctaatcgcatggcgaaagacgttgagcaggcatttctggaagtgattgccgaatttggtggcatggacaccgaagcggcggatgaatttttaagtgagctgcgcgtagagcgccgttatcagcgagatgtctactaa

SEQ ID NO: 3190 - DNA, 366 bp, Escherichia coli
atgatgtccaccacgttatttaaagatttcaccttcgaagccgctcaccgcttgccgcacgtcccacaagggcataaatgtggtcgcctgcacgggcattcctttatggtgcgactggaaattaccggggaagtcgatccgcatacgggctggattatcgatttcgctgaactgaaagcggcgtttaaaccaacttatgagcgcctcgatcaccattatctcaatgatattccaggtctggaaaacccaaccagcgaagttttagcaaaatggatttgggatcaggttaaacccgttgtgccgctgttaagtgcggtgatggtaaaagaaacctgcaccgcaggttgtatctatcgcggcgaatga

SEQ ID NO: 3191 - DNA, 1272 bp, Escherichia coli
atggaagacgactgcgacattattattatcggtgccggtattgctggcaccgcttgcgcgttacgctgcacgcgagcgggtttatccgttttgttactggaacgagcggagattcccggcagcaaaaatctttccggcgggcggctatacacccatgcgctcgcggaactcctcccgcaatttcacctgaccgcgcctcttgaacgacgcatcactcacgaaagtctttctctgttaacgccagatggcgcaacgacgttttccagcttactgcccggcggtgaatcctggagtgtattacgcgcacgattcgatccgtggctggttgccgaagccgaaaaagaaggtgtcgaatgcatccccggtgcgacggtagatgcactgtatgaagaaaacggcagggtgtgtggtgtcatttgtggtgacgatattcttcgcgcccgttatgtggtgctggcagaaggtgccaacagcgtcctggcggaacgccacgggttagtgactcgtcctgctggcgaagcgatggcattggggatcaaagaagcgctggcgctggaaccatccgctattgaagaacgttttcatctggagaataacgaaggcgcagcgttgctgttcagcggcggaatctgtgatgacttacccggcggcgcatttctttatactaatcaacaaacgctctcgttagggattgtttgcccgctctcctcccttacgcaaagtcgtgttccggcaagcgagctgctggctcgctttaaaacgcatccggcagtgcgcccgcttatcaaaaacacggaatcactggagtatggtgcgcatctggtgccagaaggtggcctgcgcagtatgccggtgcaatacgccggtaacggctggctgctggtgggcgatgcgttgcgcagttgcgtcaataccggaatttccgtgcgcggtatggatatggcgctaactggcgcgcaggcggcggcacaaacgctgataagcgcctgccagcaccgcgagccgcaaaatctgtttccgctttatcatcacaacgtagagcgcagcctgctgtgggatgttctacagcgttatcagcatgttccggcgcttttgcaacgccctggctggtatcgggtgtggcctgggttaatgcaggatatttcccgtgatttatgggatcaggggaatacacctgttccaccgctgcgccaattgctctggcgtcatttacgtcgtcacggcttgtggcatctgacgggcgatgttatcaggagtctgcgatgtctgtag

SEQ ID NO: 3192 - DNA, 261 bp, Escherichia coli
atgtctgtagcccgtaatctctggcgcgctgccgatgcgccgcacattgttccagctgactccgttgagcgccagacggcacaacggttgattaacgcctgtccggctggtcttttttcgctcacacctgaaggtgacttacgcgttgattatcacggctgcctggagtgtggcacctgccgtttgctgtgcgacgaatcaacactacaacagtggcgctatccgccttccggattcggcatcacctaccgctttggataa

SEQ ID NO: 3193 - DNA, 576 bp, Escherichia coli
atgcccctcttacacctgctccgccagaatccggtgattgctgccgttaaagataatgccagcctgcaactggcaatcgactctgaatgccagtttatttccgtgttgtacggcaatatctgcaccattagtaatatcgttaaaaagattaagaacgccgggaaatatgcttttattcatgttgatttgctggaaggcgcgtcaaataaagaagtggtgattcagtttttgaaactggtaaccgaggcggacggaattatcagtaccaaagcctcaatgctgaaagcagcaagagcggaaggttttttctgtattcatcgactgtttattgttgattcgatttcgtttcacaacattgataagcaagttgcgcaatcgaatccggattgtattgagatcctgccaggctgcatgcctaaagtgctgggctgggtgacggagaaaatccgccaaccgctgattgctggcgggctggtgtgcgatgaagaagatgcgcgtaatgcgattaacgcgggtgttgtggcgctttccaccacgaatactggggtctggacgttagcgaaaaaattgctttga

SEQ ID NO: 3194 - DNA, 861 bp, Escherichia coli
atgaatatcgcaattgtgacaataaatcaggagaatgccgcaatagcaagctggctggcggcacaggatttcagcggttgtaccctggcacactggcagattgaacctcagcccgtagtggcggaacaggtgctggatgcgctggtggaacagtggcagcgaacgccagcggacgttgttctctttccgccgggaacgtttggtgatgaactgtcgacccggctggcctggcgtttacatggtgcaagcatctgccaggtgacttcgttagatattccaaccgtaagcgtgcgcaaatcccactggggaaatgcgctaacggcgacgctgcaaacagaaaaacgcccgctatgcctttcgctggcacgtcaggcgggagcagataaaaacgccacgttgccctctgggatgcagcaactgaacattgtccccggcgcgcttccagactggcttatcagcgtcgaaaacctgaaaaatgttacccgtgacccattaaccgaggccagacgtgtgctggtggtgggacagggcggagaggcagataaccaggaaatcgctatgctggcagaaaagatgggagccgaagtgggctacagtcgggcacgagtgatgaacggtggcgttgatgccgaaaaagtgattggtatttccggacatctgctggcacctgaggtgtgtattgttgttggcgcttccggcgcagcagcgttaatggcgggcgtacgcaatagcaagtttgtggtggcgattaatcatgacgccagtgcagcggtattttcacaggcagatgttggcgtggttgatgactggaaagcggtgctggaggcactggtgacaaacattcacgcagattgccaataa

SEQ ID NO: 3195 - DNA, 780 bp, Escherichia coli
atgaacattctgttagcgtttaaagccgagccggatgccggaatgctggcggaaaaagagtggcaggcggcggctcagggtaatagcggaccggatgtttcgctactgcgaagtttactcggtgctgatgaacaggctgccgccgcgctgctgttggcgcagagaaaaaacggtacgtcgatgtctttaaccgcgttgagcatgggggatgaacgggcgttgcactggctgcgctatctcatggctcttgggtttgaggaagctgtagtgctggagacggcggcagatctgcgctttgcgtcggaatttgtcgctcgccatattgccgaatggcagcgtcagaatccgctggatctgataattatcggctgccaaagcagcgaagggcagaatggacaaacgccatttttgctggcggaaatgctgggctggccctgtttcacccaggtggagcgtttcactctcgacgcgccgtttatcaccctcgaacagcgtactgaacatgggttgcgctgttgccgggttcgcttgcctgcggtgattgccgtgcgccagtgtggtgaagtggccttgccagtaccgggaatgcgccagcgaatggctgcggggaaagcagaaattatccgtaaaactgttgctgccgaattgccagcgatgcagtgtctgcaactggcaagagcagagcaacgacgcggagcgacgctgattgatgggcaaacggtagcagaaaaagcgcaaaagctatggcagaactatttacgccaaaggatgcagccatga

SEQ ID NO: 3196 - DNA, 1410 bp, Escherichia coli
atgacggggcgttgccttttcggcttctcaggcgagaagccgttcttattaccggacaatgaaggggtaaagatgaacacttcaccggtgcgaatggatgatttaccgcttaaccgttttcactgtcgaattgctgcgctcactttcggcgcacacctgaccgacggttatgtcctcggcgttattggttacgccattattcagcttacgcccgccatgcaactgacgccgtttatggcgggaatgatcggcggctcggcgttacttggtttgtttcttggcagcctggttttggggtggatctccgaccatatcgggcggcaaaaaatcttcaccttcagttttatgctgattacgctcgcttcgttcttgcaattttttgccaccacgccagagcatcttattggattgcgcattttgatcggcattggtctgggaggcgattactcagtcggtcacaccttgctggctgaattttccccgcgccgccatcgcggtattttgctgggcgcattcagtgtggtgtggaccgtaggctatgtgctggcaagtattgccggacatcactttatttccgaaagcccggaggcctggcgctggctgctggcatcagcggcgttaccagccttgctgattacgctgctacgttggggcacgccggaatcgccacgctggctactgcgccaggggcgttttgcagaagctcacgctatcgttcatcgctattttggcccgcatgttttactgggcgatgaagtggcaacggcgacccataaacacatcaaaaccttgttctcttcgcgctactggcggcgcacggcgtttaacagcgtcttctttgtctgcctcgtaatcccatggtttgtgatttatacctggctgccaactatcgcccaaactattggtctggaagatgcgttgaccgctagcctgatgcttaatgcgttgttaattgtgggcgcgctgctgggattagttctgacgcacctgctggcacatcgcaaatttttgctgggaagttttttgctgctggcggcaacgctggtcgtgatggcctgtttgccttccggcagttcattaaccctgctgctttttgttctcttcagcaccaccatttcggcagtcagtaatctggtgggcattttgcctgcggaaagttttcctactgacattcgctcgctgggcgtcggttttgccaccgccatgagtcgacttggcgcggcggtaagtactggcctgctgccgtgggtgctggcgcagtggggaatgcaagtcaccttattgctcctggcggcagtgttgttggttggttttgttgtgacctggctatgggcaccagaaaccaaagcactcccgctggtggcggcgggaaatgtaggaggtgcgaatgaacattctgttagcgtttaa

SEQ ID NO: 3197 - DNA, 1455 bp, Escherichia coli
atgtctttatctcgcgtagcgattgtcgaccagctaaaggaaattgttggtgcagatcgcgtaattaccgatgaaacagtattaaagaagaacagtattgaccgttttcgtaaatttccggatattcatggcatttatactttgccaattccggcagcggtcgtaaaactcggttccacagaacaagtatcccgtgtgctgaattttatgaatgcgcacaaaattaacggtgtgccacgtaccggtgcttccgccaccgaaggtgggctggaaaccgttgtggaaaactcggtggtgctcgacggctccgccatgaatcaaatcattaatattgatattgagaatatgcaggccacggcgcaatgtggcgttccgctggaggtgctggaaaacgcgttgcgtgaaaaaggttacaccacggggcattctccgcagtcaaagccgctggcgcagatgggcggcctggtggcgacccgcagtattgggcagttttccacactctacggcgcaatcgaggatatggtcgttggtctggaagcggtgctggcagatggcaccgtcacacgcattaaaaacgtgccacgtcgcgcggctggcccggacattcgtcatatcatcatcggcaacgaaggtgcactgtgctatatcactgaagtcacagtgaaaatcttcaaatttacgccggaaaacaatctcttctatggctatgtgctggaagacatgaaaaccggcttcaacatcctgcgtgaaatcatggtggaagggtatcgtccgtcgattgctcgtttgtatgatgctgaagatggcacccaacacttcacccattttgccgacggcaaatgcgtgctgatctttatggctgaaggtaaccctcgcattgcgaaggcgacgggtgaagggattgctgaaatcgtggcgcgctacccgcagtgccagcgcgtggacagcaagctgatcgaaacctggtttaacaacctgaactggggaccggataaagtagctgccgaacgtgtgcagatcctcaaaaccggcaacatgggctttaccactgaagtgtccggctgctggagctgcattcacgaaatctacgaaagcgttattaaccgtattcgtaccgagttcccgcacgccgacgacatcaccatgctgggcggtcactcctctcatagctatcagaacggcaccaacatgtacttcgtctacgactacaacgtcgttgactgtaagccggaagaggaaatcgacaaataccacaatccgctcaacaaaatcatctgcgaagaaaccattcgtctcggcggttcgatggtgcaccaccacggtatcggtaaacatcgcgttcactggagcaaactggaacacggcagcgcgtgggcgttgctggaagggctgaaaaagcagttcgatcctaatggcattatgaacacgggtactatctatccgattgaaaaataa

SEQ ID NO: 3198 - DNA, 786 bp, Escherichia coli
atgtcaatcgaatctctcaatgcgttctcaatggattttttctccctgaaaggtaaaacagcaattgttaccggcgggaatagcggtttaggccaggcatttgccatggcgttggccaaagctggcgcaaatgtctttattcctagtttcgtcaaagataacggcgaaacaaaggaaatgattgaaaaacagggtgtcgaagttgattttatgcaggtggatatcaccgcagaaggcgcgccgcagaagattatcgctgcctgctgtgagcgcttcggtaccgtcgatattctggttaacaatgccggtatttgtaagctgaataaggtgctggactttggtcgtgccgactgggacccgatgattgacgtgaacctgaccgccgcattcgagttaagctacgaagcggcaaaaattatgatcccgcagaaaagcggtaaaatcattaatatctgttcattgttctcttacttaggtggtcaatggtcacctgcttattctgccactaaacatgctcttgccggattcaccaaagcctattgcgatgaattaggccaatataatattcaggtgaatggtattgctcctggttattatgcaaccgatattacgctggcgacccgtagtaatccagaaactaaccagcgtgttcttgatcatattccggcaaaccgttggggtgatactcaggatttaatgggtgcagccgtattcctcgcaagtccggcatcgaattatgtcaacggacatttattagtggttgatggcggttatttagtgcgctaa

SEQ ID NO: 3199 - DNA, 1278 bp, Escherichia coli
atgcaacacaactcatatcgccgttggataaccctcgcgataattagttttagcggcggcgttagtttcgacctggcttatttacgttatatttatcaaattcccatggcaaaatttatgggattcagcaataccgagataggtttaataatgagtacctttggtattgcggccattattttctatgcccctagcggcgttattgccgataaattttcacatcgcaaaatgattacttccgcgatgatcattaccggattactgggtctgttaatggcaacatatccaccgctgtgggtaatgctctgtattcaggtcgcctttgcgataacgacgattttaatgctgtggtcggtgtcgattaaagccgcatcgttgctgggcgatcatagcgagcaagggaaaattatgggctggatggaagggctgcgcggcgtcggtgtaatgtcgctggcggtgtttaccatgtgggtcttttctcgctttgcaccggatgacagcgccagcctgaaaacggtcattatcatctacagtgtggtttacattctgctgggcattttgtgttggttttttgttagcgataacaacaacctgcgcaataccaataacgaagaaaaacagtcattccagcttagcgacatcctggccgttttgcgcatcagcaccacctggtattgcagcatggtgatttttggtgtcttcaccatctacgccattctgagttactccaccaactatctgaccgaaatgtacggcatgtcgctggtggctgcgagctacatggggattgtgatcaacaaaatcttccgcgcgctgtgcggcccacttggcggcattatcaccacctacagtaaagtgaaatcccctacccgcgtggtccaaatcctttccatcatcggtttgctggcgttgacagccctgctcgtcacgaactctaacccgcaatcggtcgcgatggggattggcctgattttattactgggattcacctgttacgcctcacgcgggctgtactgggcctgtcctggcgaagcgagaacaccgtcttacattatgggcaccacggtaggtatttgttcggtgattggatttctgccggatgtcttcgtttacccgattatcggctactggcaagacaccctgcccgctgcagaagcctaccgcaacatgtggctaatgggcatggcggcgcttggcatggtgatcatctttacctttttgctgttccaaaaaattcgtactgctgatagcgcccccgcaatggctagcagcaagtaa

SEQ ID NO: 3200 - DNA, 1479 bp, Escherichia coli
atgtcgaaaaaatacatcatagggattgatggcggaagtcagagcacaaaagtggtgatgtacgatctggaaggtaatgtggtttgcgaaggcaaaggcttattgcagccgatgcacacgccagatgccgataccgcagaacatcctgacgacgatttatgggcatcattatgctttgccggccacgatttgatgagccagtttgccgggaataaagaagatattgtcggcattggcctgggctcaatccgttgctgccgtgcgttattgaaagccgatggtacgccagccgcgccgttgattagctggcaggatgcacgcgttacacgcccttacgaacacactaatcctgacgtggcctatgtcacctctttttcgggttatctgacgcatcgcttaaccggcgagtttaaagacaatattgccaactattttggtcagtggccggtggattataagagctgggcatggagcgaagatgccgcggtaatggagaagtttaatatcccccgccagatgctttttgacgtgcaaatgccgggcaccattcttgggcatatcacaccacaagctgcgctggcgacacatttcccggctgggctgccggttgtttgtaccaccagtgataaaccggtagaagctctgggagccgggttgctggatgatgaaacagcggtaatttctcttggcacttacatcgcgttgatgatgaacggcaaagcactgccgaaagatccggtggcgtactggccgattatgtcttctattccgcaaacattgctgtatgaaggttacggtatccgcaaaggcatgtggacagtgagctggctgcgcgacatgttaggcgagtcgttaattcaggatgccaaagcacaggatctttcaccggaagatttactcaataaaaaagcgtcttgtgtgccgccaggctgtaatggtctgatgacagtgctggactggctgaccaatccgtgggaaccgtacaaacgcggaattatgatcggctttgattccagtatggattacgcatggatatatcgttcgatactggaaagcgtggcgctgacgctgaagaataattacgacaatatgtgtcatgaaatgaatcactttgcaaagcatgtgatcattactggcggcggttcgaacagcgatctgcttatgcagatttttgccgacgtattcaaccttcctgcacgacgtaatgccattaatggctgtgcaagccttggggcggcgattaatacggcggtagggcttggtctgtatccggattacgcaacggctgtcgacaaaatggttcgcgtgaaagatatcttcataccgattgagagcaatgccaaacgctacgacgcaatgaataaaggcattttcaaagacctaaccaaacacaccgatgtaattctgaaaaaatcgtatgaagtgatgcatggtgagttagggaatgcggattcaatccagagctggtcgaatgcctaa

SEQ ID NO: 3201 - DNA, 921 bp, Escherichia coli
atgagcgcaagagtatgggtactcggtgatgcggttgttgatttattacccgaaagccaggggagactactacagtgtcctggcggggcgcctgctaatgttgcagtcggtatcgcaaggctgggggggaaaagtgcctttattggcaaagttggcgatgatcctttcggtcgctttatgtatcagacactgagtacagaaaatgttgatacacgttatatgtctcttgatcctcaacaacgcacctcaattgtggctgtaggacttgatgagcaaggagaaagaaactttacctttatggtacgcccaagtgccgatctttttttacaacctggtgaccttcctgcatttgggccgggtgaatggctccatctttgttccattgcgctcagtgcagaaccttcccgaagtaccgcatttctggctatggagaaaatacgtcaggctggcggaaacatcagttttgatcccaatatccgcagcgatctctggcagagtgaagcgctattaaggaaataccttgatcgcgcactttcgctggcgaatatcgctaaattgtccgaagaagagttgctattcatcagtggcgaaagccaggttcagcaaggcgcatattcattagtacaacgttattcgttgactttattgcttattacacaaggaaaaaatggcgtacttgtgtattttcaggggcagtttatccactatcccgccaaacctgtttctgtcgtcgatacgaccggggcaggagatgcttttgtcgctggattacttgccggtctggctgattctggaataccaacaaataccagacagcttgaacgaatcattgcacaagctcagatttgtggtgctctggcgaccacggctaaaggcgcgatgaccgccttaccccgacaacacgatctcccttcacaatag

SEQ ID NO: 3202 - DNA, 1518 bp, Escherichia coli
atgtataaaaaaacaactttggcagtgttaattgctttgctgaccggtgctacaacggtacatgcgcaaacggatattagcagtatcgaatctcgactggcggcgttggaacaacgtttaaaaaatgcggaatcccgcgcccaggcggcagaagcaagggccaaaacagctgaattacaggttcagaaactggctgaaacacaacaacaaaatcagctaacaactcaagaagtagcacagagaacagttcagctcgaacagaaatccgcagaaaacagtggttttgagtttcatggctatgcccgttccgggttactgatgaatgatgccgcttccagtagcaaaagtgggccgtatctgactcccgcaggtgaaactggtggagctgttggccgtctgggaaatgaagccgatacctatgtcgagttaaatgtagaacataaacaaacactggataacggtgcgaccacacgctttaaagcaatgttggctgacggacaaagagattacaacgactggactggcagctccagtaacctgaatatccgacaggcttttgccgaactgggcgcattaccaagttttaccggagcattcaaagacagtactgtctgggctggtaaacgctttgatcgcgacaattttgatattcactggttagactccgatgtcgtatttttagcgggaacgggcggcggtatctatgacgtaaaatggaacgatacattccgcagtaacttttctctctacggacgtaatttcggcgatcttgatgatatcgacaataacgttcagaactacatcctcaccatgaatcattatgcaggccccttccagttgatggttagcggattacgggcaaaagataatgatgatcgaaaagatgccaatggtgatctcattcaaactgatgctgcaaatactggcgtacatgcgttagttggtctgcacaatgacactttctatggcctgcgtgaagggacggcaaaaacagcactgctatatggccatggcctgggtgcggaagtcaaagggattggctccgatggcgctctgctgtctgaggcgaatacctggcgcttcgcatcttacggcacaacacctctgggaagcggttggtatgttgcgccagcaattctcgcacaaagcagtaaagatcgttacgtcaaaggcgatagctacgaatgggtgaccttcaatacacgtctgatcaaagaggtaacacagaattttgctctggcctttgagggtagctatcaatatatggatctgaagccaaaggggtatcaaaaccacaacgccgtaaacggcagcttctataaactcacctttgctccaactctaaaagctaacgatatcaataatttctttagccgtccggagcttcgcctgtttgccacctggatggactggagcagcaaacttgatgattttgccagcaatgacgctttcggcagcagtggtttcaatactggcggagagtggaattttggtgtccaaatggaaacctggttttaa

SEQ ID NO: 3203 - DNA, 1371 bp, Escherichia coli
atggatttcgataaaatcgcccaatcgttgcttcctttattaggtggtaaggagaacatcgccagtgcagcacattgcgccactcgcctacggctggtactggttgacgacacacttgccgatcaacatgccattggccagattgatggagtgaaaggttgttttcgtaattcagggcaaatgcaaatcatctttggcaccggcgtggttaataaagtctatgctgcctttattcaggttgcaggtattagcgaatccagtaaagcagataccgctcgactcgccgctcaaaaactcaatccttttcagcgaatagcacggctactttctaatatttttgtccccatcattccagccattgttgcttctggtttattaatggggctcctgggaatggtgaaaacatatggctgggtgaatgccgataatgcgatttatatcctgctggatatgtgcagttcagccgcatttattattctccccatccttattggctttactgctgctcgtgaatttggtggaaatccttatcttggcgcgacattaggagggattctgactcacccggcactcacaaatgcctggggcgttgctgcgggatttcagacaatgaacttcttcggttttgaaatcgccatgattggctatcagggaacggttttccccgtgcttctggcagtatggtttatgagcatagtggaaaaacagttacgcaggtttatccctgatgctctggatctcattctgacgccatttctgactgtcgtcatttctggctttatcgctcttttgattattggtccggcaggacgagcgttaggtgacggtatctctttcgttctcagcacgctgattgcacacgcaggctggttagcagggttgttattcggcgggctatattcagcgattgttattacgggtattcatcatagcttccacgcaattgaagcaggacttttaggtaaccctgcaatcggtgttaatttcctgctgcctatttgggcaatggcaaacgttgcgcaaggcggtgcatgtctggcggtatggtttaaaaccaaagatacaaaaattaaagcaatcaccctaccctcggccttttccgcaatgttagggattactgaagccgctatttttggtatcaaccttcgttttgttaaaccttttattgcggccttaattggtggcgctgccggcggtgcctgggttgtctctgttcacgtttatatgactgccgttggtctgaccgcaatacccggcatggcaatcgttcagccaacatcgttggttaattatattattggaatggtgattgctttcgctgtcgcttttagcctctctttattactcaaatacaaaacggacgaggagtaa

SEQ ID NO: 3204 - DNA, 1404 bp, Escherichia coli
atgccttcacaaatgcccgcgattttacaggcagtgatgaaaggtcagtccaaagcactggcagatgcccactatccttgttggcatctcgctccagtcaccggactaatgaacgatccaaatggcttttgttggtctggaggccgctatcatctgttttatcaatggaatccactggcttgtgatcataagtacaaatgttgggggcactggagttcgacggatttattgcactggcagcatgaaccattagcgctaatgcccgataaagagtacgaccgtaatggttgttactcaggaagcgcggttaataatcagggcgttctcacactttgctataccggtaatgttaagtttgatgatggcagcagaacggcatggcaatgcctggccaccgaaaataaccagggcgggtttgataaactaggccctgtcataccgttacctgatggttacaccggacatgttcgtgatccaaaagtctggaagcacaacagccaatggtacatggtgcttggcgcgcaagataaagagaaacgggggaaagtgctgctgtattcctctgtcgatctgaatacctggtcttttcatggagaaattgctggtaacggtctgaatgaaatagataacgcaggatacatgtgggaatgtcctgatcttttcgcccttgatggtgaatacattctcctctgttgcccccagggaatggtgcgcgaacatgagcgctatctgaatacttatccctgcgcctggctacatggacagtttgattacgagacaggcaaatttacgcatggcgctttctcagagctggatgcgggatttgaattctatgcaccacagacgatggaagccccggacgggcgacgattgctggtcggctggatgggggttcctgatggcgaagagatgttgcagccaaccagaaagcatcattggcagcatcaaatgacctgttttcgcgaactctcattccagcagggaaaattgtttcagatgccaatcagggaactcgcgcaactgcgtgaagctgaacacttctggcaaggaaaagcggatcatgcgccgcatgtcgcaattgaacgcctggaaatggacatcattccgtcgggtgagctgtatctgaattttggcaatgctctggcactgcatcttaatgacgatggtattcaactacagaggagaagccttgcagggcaagagaaactaactcgttactggcgaggaagcgtaacgtcactgaagattctctgtgacagttccagcgtagagatattcatcaataatggtgaaggtgtaatgagtaatcgttattttccccatcatccagcatcgctgatattacagggtgagtctgacgtcacgttacactactggtcgctacgcgcctgcatggtagaatga

SEQ ID NO: 3205 - DNA, 1008 bp, Escherichia coli
gtgagaaaaaccaaacgcgttactattaaagacattgctgaactggcgggagtgtcgaaagcaaccgccagtctggttctcaatggtcgtggcaaagagttacgtgttgcgcaggaaacgcgtgagcgtgtgctgagtattgcccaacagcagcattatcagcccagcattcatgcccgctcattacgggacaaccgcagtcataccattggtcttgtcgttcctgaaatcactaactacggatttgcagtattttcccatgaactggaaacattgtgtcgggaagcgggcgtccaactcctcatatcctgtactgatgaaaatccttcacaggaaacaatggtggtgaacaatatgattgcccgccaggttgatgggttaatcgtcgcatccagtatgctgcatgataatgactatcaaaaacttagcgagcaattacctgttgtgttgttcgatcgccacatgaacggcagtacattgccattggtcattactgactctgtttctcccaccgccgctctggtggcagatattgcaaggagtcacccggatgaattctattttctgggcggacaaccccgtttgtcaccgactcgcgatcgactggaaggatttacacaaggcttgcagcaagccggagtaacgctacaacctgaatggattattcacggtaattatcatccgagctcaggatatgaaatgtttgccgcgctatgcgctcgtttaggacgtccccctaaagccttattcactgccgcttgtggattactggaaggcgttctgcgctatatgagccaatataatttactcgacagtaaaatacacctggcgagttttgatgatcattacttgtatgattcactttcggtaagaatcgacacaatacaacaggataatcgccaacttgcttttcactgctttgaacttatttcgcaactgattgaaggtgaaacgccatccccattacagcgttatcttcctgccagtctacaaaaacgctaccgataa

SEQ ID NO: 3206 - DNA, 672 bp, Escherichia coli
atgcagtacccgattaacgagatgttccagaccctgcaaggtgagggttactttaccggcgtccccgccatttttattcgtttacagggatgtccggttggctgtgcctggtgcgacaccaaacacacctgggaaaagcttgaggatcgggaagtctcccttttcagcattctggcgaagaccaaagagagtgataagtggggggcggcgagcagtgaagatttgctggctgtcattggccgtcagggatacaccgcgcgtcacgtggtgattacgggtggtgagccttgcattcatgatttgctgccactgactgacctgctcgaaaagaacggttttagctgccagatcgaaaccagtggtactcatgaggtacgctgcacaccgaatacctgggttaccgtatcgccaaagctgaacatgcgcggcggctatgaagtattgtcgcaagccctggagcgagctaacgaaatcaaacacccagttggacgcgtacgtgatatcgaagcactggacgaattgctggcgacgctgaccgatgataaaccgcgagtcattgcacttcagccaattagccagaaggaagatgctacgcgtttatgtatcgatacctgcattgcgcgcaactggcgtttgtcgatgcagacacataaatatttgaatattgcctga

SEQ ID NO: 3207 - DNA, 603 bp, Escherichia coli
atgtttagaatattcatcgcgtttatatttattttcaatttatcaggttgcggttataacgatattcaaacctatgatgaacaggttaatgcctcctggtcagaagtattaaatcaatatcaacgtcgcaccgatcttattcctaatcttgtcgctagtattaaaggttactccagccatgaacaagaggtactagaagccgtaacattggcacgtagtcaggctaatcgcgccagtagcgatcttcagaaaactccgggagatgaacaaaaattacaagcctggcaacaggcgcaggcgcaggtgactcgcactctcgggcagttaacgattattagtgagcgttaccctcagttaaaggctcaagagctctatcaaaacttaatggtacagctcgaaggaagtgaaaatagaattgccgttgcgcgaggaagatatattaaagccattgaacaatataatgtcactatccgcaaattccccgctgtattaaccgcaaaggtcatggattacacaccaaagaaaaattatttgccggatgatgtcaccgcagtaagtaaagccccaacaatagattttagccagaatgctaatgctcattaa

SEQ ID NO: 3208 - DNA, 894 bp, Escherichia coli
atgcgaaattttatcttccttatggctttcttctgttcatctgtgtttgctacacaaattccagtacctgaatcacccaggtatgtgaatgacttaaccggcacattaacaaacagcgaagtaaacaccctgaccaaccagattaaagccctgacgcaaaaaaaccacgcacagttggtcgtgttagtggttgatacaacaggcgatgaaaccatcgagcagtacgcaacgcgggtattcgatagctggaaaccgggtgataaagaccgtgatgatggcgttctactgttagtcgcctggcaggatcataccgtgcgtattgaaatcggttacgggctggaaggtattattacggatgcacagtccgggaaaattattcgcaacagtattattccggcatttaaaaaaggcgacctggctggtggtttacaaaaggggatcaacgatattgaaagtcgcctgacggggaataattcagcaacgataacaccgaccgatcaccctttgccctttagcggttggtgggctttattagtctgggcgataatactgacgtttatttctgccagaggatatatcaaaacgttgggagtaatttgcttcgcagccattgtactggcctttgttttacctatagcaggtttcagcggaagctggggagtactcacaacattactctgcttcgccacaccgtttctggcagttgccatcgcttttacccccttcggcaaaaaggttcgggattcgatgcgtgatgccaaccagccatcacgccatacaagaagcaattcttcctcccactattcatcatcgtcatcctcttcattcgacaatgacaattttagcggtggtggcggttcatctggtggcggtggcgcttccgggcgctggtaa

SEQ ID NO: 3209 - DNA, 1149 bp, Escherichia coli
atgcgtatttttctcttacttctgatgctatgcggttttcaggtattcgctgaacgattgccttcagtgactgacttaaccgggacattaacgacagaagaacaaagtgctttaaatcaacaattacagactctcgagcagcaaaaccacttccaggtggccgtgttggttacgccgaccacagggggcaaaaacattaaacttgcagcctcgcagagatacggggtatatcactggaaacccgttggagagaagcgatatggcgaaggtatcttaattctcgtcgtttggccggaagggctggcgtcaatgaagattggacatggactggaacagatgttgccgccggaacaagctgcgcaaattgttcgttaccatatgcagccagaattcgaaaaaaacaatctctttgctggattaacgggcggaattgaaagcatcgcacagtttacccatatcaaagcgaaccttagccctttggatgctttagccaatcatctgtttgctaatccgcaactttcgctgccatgccttgcctggacagtgctgatgatcgttgccatcattgtcctctggcgatttaccagccgtccaggacctggcatatggatgatatcaatgattacacctacggtctggtttttcttctttcaggatgatgtcatcattcggcgggtatcgctcgtttgttttagtttatttttcgcagcaacctgctggcagcgtatcgcggtaatttttcatatgtatcgcgtatttcctatgatgctggccccaaaaaataaaaacgctaaagtgaaaaaacaaaagacgactcagcaggtttctcaatccgaacgaaactcattgtttgtcgtgctgctgataattgttgtgggatggtgcctggtattcgccagtaataaagatatagcattcatctcaacaattattgggctaattgatcattttatcggcccaataaccattgctggcatcgttctgctgatcattgtggccaaatttactggcaatcttaaactgggatcaggacataaaagcaacaggaaaacggggaatcgtaatgctcattctcgctcttcgtcgaaaaattctttccgcggtggcggcggttcttcaggaggcggcggttcatccgaccgttggtga

SEQ ID NO: 3210 - DNA, 882 bp, Escherichia coli
gtgatcgttatgcgtataatcctttttctactcactttatggtgccttcctgtgcttgcccagcaaattgctgtgccggagctgcgccaacaggtgaccgatattactggtaccttaagcacgtctgaacaacaatcactaacacaacagctgcaggatattacacaaaaaacacgggcacaggtcgctgtattaatagtgccatccaccggagacgattctattgaacaatatgctacaagagtttttgacaattggcgtttaggagatgccaaacgtaatgatgggatactgatcattgttgcctggtcggatcgcactgtccgcatccaggtaggttatgggctggaagaaaaggtaaccgacgctctggctggagatatcatccgtagcaacatgatacccgcatttaaacaacaaaaattagctaagggattagagttagctataatcgctttgaataaccgactcacttcacaacaccaatattcggttaatccttcagaaagtgaatcagcatcttccagcgatcattactactttgctattttttgggtatttgcagtgatgttcttccctttctggttttttcatcaaggcagtaatttttgtcgcgcatgtaaaagcagtgtctgtatttcagcaatctatcttttagatttattcctgttctccgataaaactttttccattgctgtatttttcttcttttttactttcaccaccattatggtctttacctgtttatgtgtacttcagaaaagagcatcaggtaaaagttatcattcagataacagcggttccggtggaggatcaagtggcggcggatttagcggcgggggcggttcttctggcggtggcggcgcatccggccgctggtaa

SEQ ID NO: 3211 - DNA, 1299 bp, Escherichia coli
atgtccaaaatcgtaaaaatcatcggtcgtgaaatcatcgactcccgtggtaacccgactgttgaagccgaagtacatctggagggtggtttcgtcggtatggcagctgctccgtcaggtgcttctactggttcccgtgaagctctggaactgcgcgatggcgacaaatcccgtttcctgggtaaaggcgtaaccaaagctgttgctgcggtaaacggcccgatcgctcaggcgctgattggcaaagatgctaaagatcaggctggcattgacaagatcatgatcgacctggacggcaccgaaaacaaatccaaattcggcgcgaacgcaatcctggctgtatctctggctaacgccaaagctgctgcagctgctaaaggtatgccgctgtacgagcacatcgctgaactgaacggcactccgggcaaatactctatgccggttccgatgatgaacatcatcaacggtggtgagcacgctgacaacaacgttgatatccaggaattcatgattcagccggttggcgcgaaaactgtgaaagaagccatccgcatgggttctgaagttttccatcacctggcaaaagttctgaaagcgaaaggcatgaacactgctgttggtgacgaaggtggctatgcgccgaacctgggttccaacgctgaagctctggctgttatcgctgaagctgttaaagctgctggttatgaactgggcaaagacatcactctggcgatggactgcgcagcttctgaattctacaaagacggtaaatacgttctggctggcgaaggcaacaaagcattcacctctgaagaattcactcacttcctggaagaactgaccaaacagtatccgatcgtttccatcgaagacggtctggacgaatctgactgggatggtttcgcataccagaccaaagttctgggcgacaaaatccagctggttggtgacgacttgttcgtaaccaacaccaagatcctgaaagaaggtatcgaaaaaggtatcgctaactccatcctgatcaaattcaaccagatcggttctctgaccgaaactctggctgcaatcaagatggcgaaagacgctggctacactgcagttatctctcaccgttcaggcgaaactgaagacgctaccatcgctgacctggctgttggtactgctgcaggccagatcaaaacgggttctatgagccgttctgaccgtgttgctaaatacaaccagctgattcgtatcgaagaagctctgggcgaaaaagcaccgtacaacggtcgtaaagagatcaaaggccaggcataa

SEQ ID NO: 3212 - DNA, 1638 bp, Escherichia coli
atgacaacgaactatatttttgtgaccggcggggtcgtatcctctctgggtaaaggcattgccgcagcctccctcgcagccattcttgaagcccgtggcctcaatgtgaccatcatgaaactggatccgtacatcaacgtcgatccaggtactatgagcccaatccaacacggggaagtgttcgttactgaagacggcgctgaaaccgacctggacctggggcactacgagcgtttcattcgtaccaaaatgagccgccgcaacaacttcaccacggggcgtatctactctgacgttctgcgtaaagaacgccgcggtgactatctcggcgcaaccgtacaggttattccgcacatcactaacgctatcaaagagcgcgtgctggaaggcggcgaaggtcatgacgtagtactggtcgaaatcggcggtactgtaggtgatatcgaatccctgccgttcctcgaagcgattcgccagatggctgttgaaattggccgtgagcacaccctgtttatgcacctgacgctggtgccgtacatggcagcgtctggtgaagtcaaaaccaaaccgactcagcactctgtaaaagagctgctttcaatcggtatccagcctgatatcctgatttgtcgttcagatcgcgccgttccggcgaacgaacgtgcgaagattgcattgttctgtaatgttccggaaaaagcggttatttctctgaaagacgtcgattccatctataaaattccgggcctgttgaaatctcaggggctggacgattatatttgtaaacgattcagcttaaactgcccggaagcgaatctgtccgaatgggaacaggttatcttcgaagaagcgaatccggtaagtgaagtcaccattggtatggtcggcaaatacattgagctgccggatgcatacaaatccgtgatcgaagcactgaaacacggtgggctgaagaatcgtgtcagcgtcaacatcaaactgatcgattcacaagatgttgaaacgcgcggcgttgaaatccttaaaggtctggacgcaatcctcgtacctggcggtttcggctatcgtggcgtagaaggcatgattacgaccgcgcgttttgcgcgtgagaacaatattccttatctgggcatttgcctgggtatgcaggtggcgttaattgattacgctcgccatgttgccaacatggagaacgccaactctacggaatttgtgccagactgtaagtacccggttgtggcgctgattaccgagtggcgcgatgaaaacggcaacgttgaagttcgtagcgagaagagcgatctcggcggtaccatgcgtctcggcgcacagcagtgccagttggttgacgatagcctggttcgccagctgtacaatgcgccgacaattgttgagcgtcatcgtcaccgttacgaagtcaacaacatgctgttgaaacagattgaagatgcaggtctgcgcgttgcgggccgttccggggatgatcagttggtcgagatcatcgaagttccgaatcatccgtggttcgtggcttgccagttccatccggagtttacttctactccacgtgatggtcacccgctgtttgcaggctttgtgaaagccgccagcgagttccagaaacgtcaggcgaagtaa

SEQ ID NO: 3213 - DNA, 792 bp, Escherichia coli
atgaatcaaatcgaccgtttgctcaccatcatgcagcgcctgcgcgacccggaaaacggctgcccgtgggataaagagcagacatttgccaccattgcgccttacacccttgaagaaacctacgaggtgctggacgccatcgcccgtgaagattttgacgatctgcgcggtgaactgggcgatctgctgttccaggtggtgttttacgcacaaatggctcaggaagaagggcgctttgactttaatgatatttgcgctgctattagcgataaattagagcgtcgccatccgcatgtttttgctgacagttctgccgaaaatagtagtgaagtgcttgcccgttgggagcaaatcaaaaccgaagagcgcgcgcagaaagcgcagcattcggcgctggacgatattcctcgtagtttaccggctttaatgcgtgcgcaaaaaatccagaaacgttgcgccaacgttggtttcgactggacgacgcttggtccggtagtcgataaagtctacgaagagatcgacgaggtgatgtacgaggcgcggcaggctgttgtcgaccaggctaaactggaggaggaaatgggtgacctgctgtttgccacggtcaatctggctcgtcatttagggacaaaagcggaaatcgcattgcaaaaagcgaacgaaaaattcgagcgtcgttttcgcgaagtggagcgtattgttgccgcgcgtggactggaaatgacaggtgttgacctcgaaacaatggaagaagtctggcaacaggtaaaacggcaggaaattgatctctaa

SEQ ID NO: 3214 - DNA, 336 bp, Escherichia coli
atggtaagccgatacgtacccgatacgggcgatctgatttgggttgattttgacccgacaaaaggtagcgagcaagccggacatcgtccggctgttgtcctgagtccgttcatgtacaacaacaaaacaggtatgtgtctgtgtgttccttgtacaacgcaatcaaaaggatatccgttcgaagttgttctatccggtcaggaacgtgatggcgtagcgttagctgatcaggtaaaaagtatcgcctggcgagcaagaggagcaacgaagaaaggaacagttgccccagaggaattacaactcattaaagccaaaattaacgtgctgattgggtag

SEQ ID NO: 3215 - DNA, 249 bp, Escherichia coli
atgatccacagtagcgtaaagcgttggggaaattcaccggcggtgcggatcccggctacgttaatgcaggcgctcaatctgaatattgatgatgaagtgaagattgacttggtggatggcaaattaattattgagccagtgcgtaaagagcccgtatttacgcttgctgaactggtcaacgacatcacgccggaaaacctccacgagaatatcgactggggggagccgaaagataaggaagtctggtaa

SEQ ID NO: 3216 - DNA, 2235 bp, Escherichia coli
atggttgcggtaagaagtgcacatatcaataaggctggtgaatttgatccggaaaaatggatcgcaagtctgggtattaccagccagaagtcgtgtgagtgcttagccgaaacctgggcgtattgtctgcaacagacgcaggggcatccggatgccagtctgttattgtggcgtggtgttgagatggtggagatcctctcgacattaagtatggacattgacacgctgcgggcggcgctgctgttccctctggctgatgccaacgtagtcagcgaagatgtgctgcgtgagagcgtcggtaagtcggtcgttaaccttattcacggcgtgcgtgatatggcggcgatccgccagctgaaagcgacacacactgattctgtttcctccgaacaggtcgataacgttcgccggatgttattggcgatggtcgatgattttcgctgcgtggtcatcaaactggcggagcgtattgctcacctgcgcgaagtaaaagatgcgccggaagatgaacgcgtactggcggcaaaagagtgcaccaatatctacgcgccgttggcgaaccgtcttgggattgggcaactgaaatgggagctggaagattactgcttccgttatctccacccgaccgaatacaaacgcatcgcaaaactgctgcatgaacgccgtctcgaccgcgaacactatatcgaagagtttgtcggccatctgcgcgctgagatgaaagctgaaggcgttaaagctgaagtgtatggccgtccgaaacacatctacagtatctggcgcaaaatgcagaaaaagaacctcgccttcgatgagctgtttgatgtgcgtgcggtacgtattgtcgccgagcgtttacaggattgttatgccgcactggggatagtgcacactcactatcgccacctgccggatgagtttgacgattacgtcgctaacccgaaaccaaacggttatcagtctattcataccgtggttctggggccgggtggcaaaaccgttgagatccaaatccgcaccaaacagatgcatgaagatgcagagttgggtgttgctgcgcactggaaatataaagagggcgcggctgctggcggcgcacgttcgggacatgaagaccggattgcctggctgcgtaaactgattgcgtggcaggaagagatggctgattccggcgaaatgctcgacgaagtacgtagtcaggtctttgacgaccgagtgtacgtctttacgccgaaaggtgatgtcgttgatttgcctgcgggatcaacgccgctggacttcgcttaccacatccacagtgatgtcggacaccgctgcatcggggcaaaaattggcgggcgcattgtgccgttcacctaccagctgcagatgggcgaccagattgaaattatcacccagaaacagccgaaccccagccgtgactggttaaacccaaacctcggttacgtcacaaccagccgtgggcgttcgaaaattcacgcctggttccgtaaacaggaccgtgacaaaaacattctggctgggcggcaaatccttgacgacgagctggaacatctggggatcagcctgaaagaagcagaaaaacatctgctgccgcgttacaacttcaatgatgtcgacgagttgctggcggcgattggtggcggggatatccgtcttaatcagatggtgaacttcctgcaatcgcaatttaataagccgagtgccgaagagcaggacgccgccgcgctgaaacagcttcagcaaaaaagctacacgccgcaaaaccgcagtaaagataacggtcgtgtggtggtagaaggggtcggtaacctgatgcaccacatcgcgcgctgctgccagccgattcctggagatgagattgtcggcttcattacccaggggcgcggtatttcagtacaccgcgccgattgcgaacaattggcggaactgcgctcccatgcgccagaacgcattgttgacgcggtatggggcgagagctactccgccggatattcgctggtggtccgcgtggtggctaatgatcgtagtgggttgttacgtgatatcacgaccattctcgccaacgagaaggtgaacgtacttggcgttgccagccgtagcgacaccaaacagcaactggcgaccatcgacatgaccattgagatttacaacctgcaagtgctgggtcgcgtgctgggtaaactcaaccaggtaccggatgttatcgacgcgcgtcggttgcacgggagttag

SEQ ID NO: 3217 - DNA, 1302 bp, Escherichia coli
atggcgcaattctactctgcaaaacgacgcacgacgacgcgtcagatcataaccgtttcagtcaacgacctcgactcttttggtcagggtgtggcgcgacataacggcaaaacattatttatccccggattattgccgcaggaaaacgcggaagttactgttactgaagataaaaaacagtatgcccgcgctaaagtcgtacgccggttaagcgatagcccggaacgcgaaacgccacgctgtcctcattttggcgtatgcggcggctgtcagcaacaacacgccagtgtggatttacagcagcgaagcaaaagtgcggcactcgcccgattaatgaaacacgaagtctctgaagtgatcgccgatgttccctggggctatcgccgtcgcgcgcgtttaagtctgaactacttaccgaaaacacagcaacttcagatggggtttcgcaaagcgggctccagtgacattgtcgacgtgaaacaatgccccattttagtgccccaacttgaagcattgctgcccaaagtcagggcatgcctgggcagcttacaagctatgcgccatcttggtcatgttgaactggtacaggcaaccagcggcacgctaatgattttgcgccataccgcaccgctaagttcggcagatcgcgaaaaactggaatgcttttcgcattctgaaggcctggatctgtatctcgcccccgatagtgagatactcgaaaccgtctctggtgagatgccctggtatgactcaaatgggttgcgcttaacttttagcccgcgcgattttattcaggtcaatgcgggtgtgaaccagaaaatggtagcgcgtgcgttggaatggctggatgtggaacctgaagattgcgtactggatctgttctgcggtatgggcaactttacactgccattggcgacacaagctgccagtgtggtgggtgtagaaggtgttccggcgctggtggaaaaaggccagcagaatgcgcgtcttaatggcttacagaatgtgacgttttatcacgaaaatcttgaagaagatgtcacaaagcagccgtgggcgaaaaacggcttcgataaagtgttgttggacccggcgcgagcaggtgccgcaggtgttatgcagcaaattataaaactggaacctattcgtatagtttatgtatcctgtaaccctgcaacgctggctcgggatagcgaagcgttattaaaagcaggatataccattgcgcgactggcgatgctggatatgttcccacacacgggacatctggaatcgatggtacttttctcgcgcgttaaatag

SEQ ID NO: 3218 - DNA, 2757 bp, Escherichia coli
atgaccaactacagcctgcgcgcacgcatgatgattctgatcctggcaccgaccgtccttattggtttattgctgagtatctttttcgtcgtgcatcgctataacgacttgcagcgtcaactggaagatgccggtgccagcattattgagccgcttgcagtttctactgaatatggcatgagtctgcaaaatcgcgaatctatcggtcagttaataagcgtactgcatcgtcgccattctgatattgttcgcgcgatttcggtttatgatgaaaataaccgactctttgtcacctccaattttcatcttgatccctcatcaatgcagctcggcagcaacgtgccgtttcctcgccagctcactgtcactcgtgacggcgatataatgatcctccgcacgccgattatttctgaaagttactcccccgacgaatcgcccagtagcgatgccaaaaatagtcaaaatatgctgggatatattgcgctggagctggatcttaaatcggttcgcttgcagcaatataaagagatctttatttccagcgtgatgatgctgttttgtatcggtattgcgcttatttttggctggcgcttaatgcgcgatgtaaccggtccgattcgcaacatggtgaataccgtcgaccgcatccgtcgcgggcaactcgacagccgggtggaaggatttatgctcggcgagctggatatgctgaaaaacggtatcaactcgatggcaatgtcgctggcggcttatcacgaagagatgcaacacaatatcgaccaggcgacgtccgatctgcgtgagacgctggagcaaatggagattcagaacgttgagttggatctggcgaaaaagcgcgcccaggaagcggcgcgtattaaatccgagtttctggcaaatatgtcacacgagctgcgtacaccactgaatggtgttattggctttacccgcctgacgctgaaaacagaattaacaccaacgcagcgcgatcacctgaatacgattgaacgttcggcaaataatttgctggcaattattaatgatgttctcgacttctcgaaactggaagccggtaagctgattctggaaagtattccattcccactacgcagcacgctggatgaagtcgttaccctgctggcacattcttctcacgataaagggctggaactgacgctcaatattaaaagcgacgtgcctgataacgtgatcggcgacccactacgattacagcaaatcatcactaacctggtagggaatgcaattaaattcaccgagaatggcaacatcgatattctggtagaaaaacgtgcgctgagtaataccaaagtgcagattgaagtgcagattcgggataccggcattggtattcctgaacgcgatcaatcgcgcttattccaggccttcagacaggctgatgccagtatttcccgccgtcatggtggcaccgggctggggctggtgattacacaaaaactggttaatgaaatgggcggcgatatttcgttccatagcctgccgaatcgtggttcaactttctggttccacattaatctcgatctgaacccgaacattattatcgaagggccatccacccagtgcctcgctggtaagcgcctggcctatgtcgaaccaaactccgcagcagcacaatgcacgctggatattttaagtgaaacgccgctggaagtggtttatagcccaacgttctccgcgctgcctcccgcgcattacgacatgatgttattaggcatagcggtgaccttccgcgagccgctaacaatgcaacatgagcgattagcgaaagcagtatcgatgaccgatttcctgatgctggcacttccttgccatgcacaagtcaatgctgaaaaacttaagcaagatggtatcggcgcgtgtctgctgaaaccattaacacctacgcgcctgttgcctgccctgacggaattttgtcatcacaaacaaaacacgcttttgcctgtaaccgatgaaagtaagctggcaatgacagtcatggcggttgatgacaaccccgctaacctgaaacttatcggcgcattgctggaagatatggtgcaacatgtggaactttgcgatagcgggcatcaggcggttgaacgggcgaaacagatgccgttcgatttaatcttaatggatattcaaatgccggacatggacggcattcgggcatgtgagctcatccaccagctcccgcatcagcagcaaacgccggttatcgcggtaacggcgcatgcgatggccgggcaaaaagagaaactgcttggcgcggggatgagtgattatctggccaaaccgatcgaagaagagcgattgcataatttgctgttgcgctacaagcctggcagcggtatttcctctcgcgtcgtgacgcccgaagtcaacgaaattgtggtcaacccgaatgcgaccctcgactggcaactggcactacgccaggcagcaggaaaaaccgatttagcgcgcgatatgctgcaaatgttactcgatttcctgcctgaagttcgcaacaaagttgaggaacagctggttggagaaaacccggaaggcctggttgatttgattcataaactgcatggcagttgcggctatagcggtgtaccgcgtatgaagaatctctgccaactgatcgaacaacagctacgtagcggtactaaagaagaagatttagagccggagctgctggaactgttggacgagatggataatgtagcgcgcgaagccagcaaaattctcgggtaa

SEQ ID NO: 3219 - DNA, 1341 bp, Escherichia coli
atgagttctcaatttacgacgcctgttgttactgaaatgcaggtcatcccggtggcgggtcatgacagtatgctgatgaatctgagtggtgcacatgcaccgttcttcacgcgtaatattgtgattatcaaagataattccggtcacactggcgtaggggaaattcccggcggcgagaaaatccgtaaaacgctggaagatgcgattccgctggtggtgggtaaaacgctgggtgaatacaaaaacgttctgacgctggtgcgtaatacttttgccgatcgtgatgccggtgggcgcggtttgcagacatttgatttgcgtaccactattcatgtagttaccgggatagaagcggcaatgctggatctgctggggcagcatctgggggtaaacgtggcatcgctgctgggcgatggtcaacagcgtagcgaagtcgaaatgctcggttatctgttcttcgtcggtaatcgcaaagctacaccgctgccgtatcaaagccagccggatgactcatgcgactggtatcgcctgcgtcatgaagaagcgatgacgccggatgcggtggtgcgcctggcggaagcggcgtatgaaaaatatggcttcaacgatttcaaactgaaaggcggtgtactggccggggaagaagaagccgaatctattgtggcactggcgcaacgtttcccgcaggcgcgtattacgctcgatcctaacggtgcctggtcgctgaacgaagcgattaaaatcggtacatacctgaaaggttcgctggcttatgcagaagatccgtgtggtgcggagcaaggtttctccgggcgtgaagtgatggcagagttccgtcgcgcaactggcctgccgaccgcaaccaatatgatcgccaccgactggcggcagatgggccatacgctctcgttgcaatccgttgatatcccgcttgcggatccgcatttctggacgatgcaaggttcggtacgtgtggcgcaaatgtgtcatgaatttggcctgacctggggttcacactccaacaaccacttcgatatttccctggcgatgtttacccatgttgccgctgccgcaccgggtaaaatcaccgcgattgatacgcactggatctggcaggaaggtaatcagcgcctgaccaaagaaccgttagagatcaaaggcggtctggttcaggtgccagaaaaaccggggctgggtgtagaaatcgatatggatcaagtgatgaaagcgcacgagctgtatcagaaacacgggcttggcgcgcgtgacgatgcgatgggaatgcagtacctgatccccggctggacgttcgataacaagcgtccgtgcatggtgcgttaa

SEQ ID NO: 3220 - DNA, 1341 bp, Escherichia coli
atgacgacacaatccagtcctgttattactgatatgaaagtcattccggtcgccggacatgacagcatgttgcttaatattggtggtgcacataacgcatatttcacccgcaatattgtggtactcaccgataacgccgggcataccggcattggtgaagcgccgggcggagaggtgatttatcaaacactggtcgaggctattccgatggtgctgggccaggaagttgcgcgcctgaataaagtggttcagcaggtgcataaaggtaatcaggcagccgattttgataccttcggcaaaggtgcctggacttttgaattgcgcgttaatgccgtggcggcgctggaagccgctttgcttgacctgttaggtcaggcgctgaatgttccggtctgcgaactgttagggccaggcaagcaacgtgatgctattaccgttctcggttatctgttttatatcggtgatcggaccaaaaccgatcttccttatctggaaaatacgccgggcaaccatgagtggtatcagttgcggcatcagaaagcgatgaacagcgaagccgttgtgcgtctggcggaagcctcacaggatcgctatggctttaaagatttcaaacttaagggtggcgtgttacctggcgagcaagaaatcgacactgttcgtgcattgaagaaacgcttccctgatgcgcggattaccgttgatcccaatggtgcctggctgcttgatgaagccatttctctgtgcaaagggctgaatgatgttcttacctatgcggaagacccgtgcggcgctgagcagggtttctccggtcgtgaagtgatggcggagtttcgacgggcgaccggcttgcccgtcgcgaccaacatgatcgccaccaactggcgcgaaatgggtcatgcggtgatgctcaatgcggtagatattccacttgccgatccgcacttctggacgctttccggtgcagtccgcgtggcgcaactttgcgacgactgggggctgacctggggctgccattctaataaccactttgatatctctctggcgatgtttacccatgtgggcgcggcggcaccgggtaatcctaccgctatcgatacccactggatttggcaggagggcgattgtcgtctgaccaaaaatccgctggagattaaaaacggaaaaattgccgttcctgatgcgcccggtctgggcgtggaactggactgggaacaggtacaaaaggcacatgaggcctataaacgtctgcctggcggtgcgcgtaacgacgcaggcccgatgcagtacctgatccccggctggacctttgaccgtaaacgtcccgttttcggccgtcattga

SEQ ID NO: 3221 - DNA, 1353 bp, Escherichia coli
atgagttctttaagtcaggctgcgagcagtgtggaaaaacgcacgaatgctcgttactggatagtggtgatgttgtttatcgtcacatccttcaactacggcgaccgcgctacgctttctattgccggttcggaaatggccaaagatatcggccttgatcccgtgggaatgggctatgtgttctctgccttctcatgggcgtatgttatcgggcagatccctggtggctggttgctggatcgttttggttcaaaacgcgtctacttctggtcgatctttatctggtcgatgtttaccttgctgcaaggcttcgtcgatatctttagtggattcggcattatcgttgccctgtttacactgcgcttcctggtcgggcttgctgaagcgccctctttccctggcaacagccgcattgttgcggcctggtttccggcgcaggaaaggggaacggcggtgtcgatttttaactccgcccaatacttcgcaacggttatcttcgcgccgattatgggctggttgactcatgaagtgggctggtcacacgtcttcttctttatgggcggtctgggcattgtcatcagctttatctggttgaaagtcatccacgagccaaatcaacatccgggcgtaaatcagaaagagctggagtacatcgccgcgggtggcgcgctgatcaatatggatcagcaaaacaccaaagttaaagtgccgttcagcgtgaagtgggggcagatcaaacagctgctcgggtcacggatgatgatcggcgtttatatcggtcagtactgtatcaacgccctgacttacttttttattacctggttcccggtttatctggtgcaggcgcgcgggatgtcgattctgaaagcaggctttgtggcttctgttccggcggtttgcggttttatcggcggtgtgttgggggggattatttccgactggctgatgcgtcgcacaggttcactgaacattgcgcgtaaaacaccgatcgtgatgggcatgttgttgtcgatggtgatggtgttctgcaactacgtcaacgttgagtggatgatcatcggctttatggcgctggccttcttcggtaaggggatcggggcgctgggttgggctgtaatggctgatactgcgccaaaagagatcagcggtctttccggtggcctgttcaacatgtttggtaacatttctggcatcgtcacgccaatcgcaattggttatatcgttggcacgactggctcctttaatggggcgctgatttatgttggtgttcatgccttaatcgcggtactcagctacctggtgctggtgggcgatatcaagcgtattgagctgaaacctgtcgtggggcaataa

SEQ ID NO: 3222 - DNA, 450 bp, Escherichia coli
atggcggaaattggtatttttgtcggcaccatgtacgggaattcactgttagtggccgaagaagcggaagcgattctgaccgcgcagggccacaaagcaacggtatttgaagatcctgaattaagcgactggctgccttatcaggataagtatgttctggtggttacgtccacgaccgggcagggcgaccttcctgatagcattgtgccgctctttcagggaatcaaagatagtctgggcttccagccgaatctgcgttatggcgtgattgcgctcggcgacagtagttatgtgaatttctgcaatggcggcaaacagttcgatgcattgttgcaggaacagagcgctcagcgggttggcgaaatgctgttgattgacgccagtgagaacccggaaccggaaacggaatcaaatccgtgggtcgaacattggggcacgatgttgtcctga

SEQ ID NO: 3223 - DNA, 783 bp, Escherichia coli
atgctggaaatactctatcaggatgaatggctggttgcggtaaataaaccctccggctggctggttcaccgcagctggctggatcgcgacgagaaagtagtggtcatgcaaaccgtgcgtgaccagataggccagcatgtttttactgctcatcgtctggaccgaccaacttctggtgtgttgttgatgggattatccagcgaagccggacggctgctggcacaacagtttgaacagcaccaaatccagaaacgttaccatgcgattgtgcgtggctggttgatggaagaagcggtgctggattatccactggtggaagaactggacaaaatcgctgataaatttgcccgcgaagataaaggcccgcagccagcagtgacgcattatcgcggtctggcgaccgtagaaatgccggtagcgaccggacgttacccgaccacgcgctacggcctggtggaactggagccgaaaaccggacgcaagcaccagctccgtcgccatcttgcccatttgcggcacccgattattggcgacagcaaacatggtgatttacgccagaatcgcagcggtgctgagcattttggccttcagcggttaatgctgcatgccagtcagttgtcattgacgcatccttttactggcgagccactggctattcacgcgggcctggacgacacctggatgcaggcattatcacaatttggctggcgcggtctgcttcctgaaaatgaaagggttgagttcagtgcaccatcgggtcaggatggagagataagttcctaa

SEQ ID NO: 3224 - DNA, 330 bp, Escherichia coli
atgaccactcatgaccgcgttcgtctccagttgcaggcgcttgaagcgttactgcgtgaacatcagcactggcgaaacgatgaacccctgccgcatcaatttaacagtactcaaccgttctttatggacaccatggaaccactggagtggttgcagtgggtgctgatcccgcgaatgcacgatttgttagataacaaccagccgttaccgggcgcttttgctgttgcgccctattatgaaatggcgctggcgactgatcatccgcaacgcgcgcttattctggctgagctggagaaactggatgctctttttgcggatgatgcgagctaa

SEQ ID NO: 3225 - DNA, 546 bp, Escherichia coli
gtggacgatttgaccgcacaagccctgaaagattttactgcacgctactgcgatgcgtggcatgaagagcataaaagctggccgttaagtgaggaactgtacggcgttccttcaccgtgcattatttcaactaccgaagatgccgtatactggcaaccccagccgtttaccggggaacaaaatgtaaacgcggttgaacgcgcttttgatattgtgatacaacccacgattcataccttttatacgactcagtttgccggggatatgcacgcgcagtttggcgatatcaaactgacattgctgcaaacctggagtgaagacgacttccgtcgggtgcaggaaaatctgattggtcatctggtgactcagaaaaggctaaaactgccgcccacgctatttatcgcgacgctggaagaagagttagaggtcatctcggtgtgtaatctctccggtgaagtgtgcaaagagacgctgggaacacgtaaacggacgcatttagcctcaaatcttgcggaattccttaatcaacttaagcctcttctgtaa

SEQ ID NO: 3226 - DNA, 849 bp, Escherichia coli
atgtcttcttatgcaaaccatcaggcacttgcgggcctgacacttggaaaatcaaccgattaccgggatacctatgacgccagcctactgcaaggcgtaccacgcagcctgaatcgcgacccgctgggtctgaaagcggataacctgccttttcacggtacggatatctggacgctgtatgaactttcctggctgaatgcgaaaggtttgccgcaggtcgctgtcggtcatgttgaacttgattacaccagcgtaaatctgattgagtcgaagagttttaagctctatctcaacagttttaaccagacgcgttttaataactgggatgaggtgcgccagacgctggagcgcgacttaagcacttgcgcccagggtaaggttagcgtggcgttatatcgtcttgatgaactggaaggccagccgataggtcatttcaatggcacctgcattgatgaccaggatatcactatcgataactatgaattcactactgactatctggagaatgccaccagcggtgaaaaagtagtggaagagacgcttgtcagccacctgctgaaatcaaattgcctgatcacccatcaaccagattggggatcgatccaaattcagtatcgtggacgccaaattgacagagaaaaactgctgcgttacctggtttctttccgtcatcacaacgagttccacgaacagtgcgtggaacgcatctttaatgacctgttacgcttctgccagccagagaaattgagcgtttacgcacgttatacccgtcgtggcggtctggacattaacccgtggcgcagtaatagcgattttgtcccatcgaccacaagactggttcggcaataa

SEQ ID NO: 3227 - DNA, 1365 bp, Escherichia coli
ttgattacacatattagcccgcttggctccatggatatgttgtcgcagctggaagtggatatgcttaaacgcaccgccagcagcgacctctatcaactgtttcgcaactgttcacttgccgtactgaactccggtagtttgaccgataacagcaaagaattgctgtctcgttttgaaaatttcgatattaacgtcctgcgccgtgaacgcggcgtaaagctggaactgataaatcccccggaagaggcttttgtcgatgggcgaattattcgcgctttgcaggccaacttgttcgcggttctgcgtgacattctcttcgtttatgggcaaattcataacaccgttcgttttcccaacctgaatctcgacaactccgtccacatcactaacctggtcttttccatcttgcgtaacgctcgcgcgctgcatgtcggtgaagcgccaaatatggtggtctgctggggcggtcactcaattaacgaaaacgagtatttgtatgcccgtcgcgtcgggaatcagctgggcctgcgtgagctgaatatctgcaccggctgtggtccgggagcgatggaagcgccgatgaaaggtgctgcggtcggacacgcgcagcagcgttacaaagacagtcgctttattggtatgacagagccgtcgattatcgccgctgaaccgcctaacccgctggtcaacgaattgatcatcatgccagatatcgaaaaacgtctggaagcgtttgtccgtatcgctcacggtatcattatcttccctggcggtgtgggtacagcagaagagttgctgtatttgctgggaattttaatgaacccggccaacaaagatcaggttttaccattgatcctcaccggcccgaaagagagcgccgactacttccgcgtactggacgagtttgtcgtgcatacgctgggtgaaaacgcgcgccgccattaccgcatcatcattgatgacgccgctgaagtcgctcgtcagatgaaaaaatcgatgccgctggtgaaagaaaatcgccgcgacactggtgacgcttacagctttaactggtcaatgcgcattgcgccagatttgcaaatgccgtttgagccgtctcacgagaatatggctaatctgaagctttacccggatcaacccgttgaagtgctggctgccgacctgcgccgtgcgttctccggtattgtggcgggtaatgtaaaagaagtcggtattcgcgccattgaagagtttggtccttacaaaatcaacggcgataaagagattatgcgtcgtatggacgacctgctacagggttttgttgcccagcatcgtatgaagttgccaggctcagcctacatcccttgctacgaaatctgcacgtaa

SEQ ID NO: 3228 - DNA, 1290 bp, Escherichia coli
atggaaacgactcaaaccagcacgattgcgtcgaaagactctcgtagtgcctggcgcaagacagacaccatgtggatgctgggcctttacggcacggcaatcggcgcgggcgtgctgttcctgccaatcaacgctggtgttggcggtatgatcccgctgatcatcatggctatccttgcgttcccgatgacgttttttgctcaccgcggcctgactcgcttcgtactgtctggtaaaaacccgggcgaagacatcaccgaggttgtagaagaacactttggtattggcgcaggtaaactgattaccctgctctacttcttcgctatctacccgatcctgctggtttatagcgtggcaatcaccaatacagttgaaagcttcatgtctcaccagctgggtatgacgccaccgccgcgtgcgattctgtcgctgatcctgatcgtgggtatgatgaccatcgttcgcttcggtgagcaaatgatcgttaaagcgatgagtattctggtattcccgtttgttggcgtactgatgctgctggctctgtacttgatcccgcagtggaacggcgcagcactggaaacgctgtctctggacactgcatctgcaaccggaaacggtctgtggatgaccctgtggctggcaattccggtaatggtgttctcgttcaaccactctccgatcatctcttctttcgccgttgcgaagcgtgaagagtacggcgatatggcagaacagaaatgctcgaagatcctggcattcgcacacatcatgatggtgctgaccgtaatgttcttcgtcttcagctgcgtactgagcctgactccggcagacctggctgcggctaaagagcagaacatctcgattctgtcttacctggctaaccactttaacgcgccgatcatcgcgtggatggctccgattatcgcgattatcgctatcaccaaatccttcctcggccactacctgggcgcacgtgaaggcttcaacggtatggtgattaaatctctgcgtggtaaaggtaagtctatcgaaatcaacaagctgaaccgtatcactgcgctgttcatgctggtaacgacctggattgttgccaccctgaacccgagcatcctgggtatgattgaaaccctgggcggcccaatcatcgcgatgatcctgttcctgatgccgatgtacgcaattcagaaagtaccggcaatgcgtaagtacagcggtcacatcagcaacgtattcgttgtcgtgatgggtctgattgcaatctccgcaatcttctactctctgttcagctaa

SEQ ID NO: 3229 - DNA, 1368 bp, Escherichia coli
atgattagcgtattcgatattttcaaaatcggcattggcccttccagttctcataccgttggaccaatgaaagcgggtaaacaatttaccgacgatctgattgcccgtaacctgcttaaagacgtgacccgcgtggtggttgacgtgtacggatcgctctctctgaccggtaaaggccaccacacagatatcgccataattatgggtctggcgggtaacctgccggataccgtggatatcgattccatccctggttttattcaggatgtgaatactcatggtcgcctgatgctggcaaacggtcagcatgaagtggagttcccggttgatcagtgcatgaacttccatgccgacaacctttctctgcatgaaaacggtatgcgcattaccgcgctggcgggcgataaagtcgtttacagccagacttactactctattggcggtggctttatcgttgatgaagagcattttggtcagcaggatagcgcaccggttgaagttccttatccgtatagttccgctgccgatctgcaaaaacattgtcaggaaaccgggctgtcactctctggcctgatgatgaaaaacgagctggcgctgcacagcaaagaagagctggaacagcacctggcgaacgtctgggaagtcatgcgtggcggtattgagcgcggtatttctaccgaaggcgtgttacctggcaaactgcgcgttccacgccgtgctgcagcactacgccggatgctggtcagccaggataaaaccaccactgacccgatggcggttgttgactggatcaacatgtttgcactggcagttaacgaagagaatgctgctggcggtcgcgtggtgactgcgccgactaacggtgcgtgcgggattattccggccgtgctggcgtactacgacaagtttatccgcgaagtgaacgctaactcactggctcgttacctgctggtagccagcgccattggttctctttataagatgaacgcctcgatttctggtgccgaagtcggctgccagggtgaagtcggcgtggcgtgctcaatggcggcagctggtctggcagaactgttaggcgcaagcccggcgcaggtatgcatcgcggcggaaatcgccatggagcacaacctcggtctgacgtgtgacccggtcgccgggcaggtacaggtgccgtgcatcgagcgtaacgccattgcggcagtgaaagcagtaaacgctgcacgtatggcgctgcgccgtaccagcgagccacgcgtctgcctcgacaaagttatcgaaaccatgtacgaaacaggtaaagatatgaacgccaagtaccgtgaaacgtctcgcggcggcctggcaatgaagatcgttgcctgcgattaa

SEQ ID NO: 3230 - DNA, 846 bp, Escherichia coli
ttgcgaggcctcttcccgatttctcatccagccatagcctgttctggcatcgaatgttacccttatcgcctgatctttaagggggttatcgtggctgttcatttgcttattgtcgatgcactgaatcttattcgtcgcattcatgccgttcagggttcaccctgtgtcgaaacctgccagcacgcgctcgatcagctcattatgcacagccagccaacccacgcggtcgccgtttttgatgatgaaaaccgcagtagcggctggcgtcatcagcgtttaccagattacaaagcgggtcgaccgccaatgccggaagagttgcacaacgagatgcctgcattacgcgccgcctttgagcaacgcggcgtcccgtgctggtccgccagcggcaacgaagccgatgacttagccgccacgctggcggtcaaagtgacacaggccgggcatcaggcaacgattgtttcgacagataaaggctactgtcagttactttcaccgacattacgtattcgtgattacttccagaaacgttggctggatgcgccatttatcgataaagaatttggcgttcaaccgcagcagttgcccgattactgggggcttgcggggatcagcagttcaaaggtaccgggtgttgcagggatcggaccaaaaagcgccacacagctactggtcgagtttcagagtctggaagggatatatgagaatctggatgcggttgccgaaaagtggcgcaaaaaattagaaaaccataaagagatggcgtttctgtgccgcgatattgcccgcttacaaaccgatttgcatatcgacggcaatttacagcaattgcggttggtaaggtaa

SEQ ID NO: 3231 - DNA, 1149 bp, Escherichia coli
atggctaacagaatgattctgaacgaaacggcatggtttggtcgaggtgctgttggagctttaaccgatgaagtgaaacgccgtggttatcagaaggcgctgatcgtcaccgataaaacgctggtgcaatgcggcgtggtggcgaaagtgatcgataagatggatgccgcaggactggcatgggcgatttacgacggcgtagtacctaacccaacaattactgtcgtcaaagaagggctcgatgtattccagaatagcggcgcggattacctgatcgctattggtggtggttctccacaggatacgtgtaaagcgattggcattatcagcaacaacccggagtttgccgatgtgcgtagcctggaagggctttccccgaccaataaacccagtgtaccgattctggcaatccccaccacagcaggcactgcggcagaagtgaccattaactacgtgatcactgacgaagagaaacggcgcaagtttgtttgcgttgatccgcatgatatcccgcaggtggcgtttattgacgctgacatgatggatggtatgcctccagcgctgaaagccgcgacgggtgtcgatgcgctcactcatgctattgaggggtatattacccgtggcgcgtgggcgctaaccgatgcgctgcacattaaagcgattgaaatcattgctggggcgctgcgaggatcggttgttggtgataaggatgccggagaagaaatggcgctcgggcagtatgttgcgggtatgggattctcgaatgttgggttagggttggtgcatggtatggcgcatccactgggcgcgttttacaacacgccacacggtgttgcaaatgccatcctgttaccgcatgtcatgcgctataacgctgactttaccggtgagaagtaccgcgatatcgcgcgcgttatgggcgtgaaagtggaaggtatgagcccggaagaggcgcgtaatgccgctgttgaagcggtgtttgcactcaaccgtgatgtcggtattccgccacatttacgtgatgttggtgtacgcaaggaagacattccggcactggcgcaggcggcactggatgatgtttgtaccggtggcaacccgcgtgaagcaacgcttgaggatattgtagagctttaccataccgcctggtaa

SEQ ID NO: 3232 - DNA, 648 bp, Escherichia coli
atggaacgaaataaacttgctcgtcagattattgacacttgcctggaaatgactcgcctggggctgaaccaggggacagcgggtaacgtcagtgtacgttatcaggatgggatgctgattacgcctacaggtattccatatgaaaaactgacggagtcgcatattgtctttattgatggcaacggcaaacatgaggaaggaaaactcccctcaagcgagtggcgtttccatatggcggcctatcaaagcagaccggatgccaacgcggttgttcacaatcatgccgttcattgtacggcagtttccattcttaaccgaccgatccccgctattcactacatgattgcggcggctggcggtaattctattccttgcgcgccttatgcgacctttggaacacgcgaactttctgaacatgttgcgctggctctcaaaaatcgtaaggcaactttgttacaacatcatgggcttatcgcttgtgaggcgaatctggagaaagcgttatggctggcgcatgaagttgaagtgctggcacaactttacctgacgaccctggcgattacggacccggtgccagtgctgagcgatgaagagattgccgtagtgctggagaaattcaaaacctacgggttacggattgaagagtaa

SEQ ID NO: 3233 - DNA, 1317 bp, Escherichia coli
atgggaaacacatcaatacaaacgcagagttaccgtgcggtagataaagatgcagggcaaagcagaagttacattattccattcgcgctgctgtgctcactgttttttctttgggcggtagccaataaccttaacgacattttattgcctcaattccagcaggcttttacgctgacaaatttccaggctggcctgatccaatcggccttttactttggttatttcattatcccaatccctgccgggatattgatgaaaaaactcagttataaagcagggattattaccggattgtttttatatgccttcggcgctgcattattctggcccgccgcagaaataatgaactacaccttgtttttagttggcctatttattattgcagccggattaggttgtctggaaactgccgcaaacccttttgttacggtattagggccggaaagcagtggtcacttccgcttaaatcttgcgcaaacatttaactcatttggcgcaattatcgcggttgtctttgggcaaagtcttattttgtctaacgtgccacatcaatcgcaagacgttctcgataaaatgtctccagagcaattgagtgcgtataaacacagcctggtattatcggtacagacaccttatatgatcatcgtggctatcgtgttactggtcgccctgctgatcatgctgacgaaattcccggcattgcagagtgataatcacagtgacgccaaacaaggatcgttctccgcatcgctttctcgcctggcgcgtattcgccactggcgctgggcagtattagcgcaattctgctacgttggcgcacaaacggcctgctggagctatttaattcgctacgctgtagaagaaattccaggtatgacagcaggctttgccgctaactatttaaccggaaccatggtgtgcttctttattggtcgtttcaccggtacctggctcatcagtcgcttcgcaccacacaaagtcctggcagcctacgcattaatcgctatggcactgtgcctgatctcagctttcgctggcggtcatgtgggtttaatagccctgactttatgcagtgcctttatgtcgattcagtacccaacaatcttctcgctgggcattaagaatctcggccaggacaccaaatacggttcgtccttcatcgttatgaccattattggcggcggtattgtcactccggtcatggggtttgtcagtgacgcagcgggcaacatccccactgccgaactgatcccggcactctgcttcgcagtcatctttatctttgcccgtttccgttctcaaacggcaactaactga

SEQ ID NO: 3234 - DNA, 1776 bp, Escherichia coli
atgaaaaaaatcagcttaccgaaaattggtatccgcccggttattgacggtcgtcgcatgggtgttcgtgagtcgcttgaagaacaaacaatgaatatggcgaaagccacggctgcactgctgaccgagaaactgcgccatgcctgtggagctgccgtcgaatgtgtcatttccgatacctgtatcgcgggtatggctgaagccgctgcttgcgaagaaaaattcagcagtcagaatgtaggcctcaccattacggtaaccccttgctggtgctatggcagtgaaaccattgatatggatccaacccgcccgaaagccatttggggctttaacggcactgaacgtcccggcgctgtttacctggcagcggctctggcagctcacagccagaaaggcatcccggcattctccatttacggtcatgacgttcaggatgccgatgacacatcgattcctgccgatgttgaagaaaaactgctgcgctttgcccgcgccggtttagcagtcgccagcatgaaaggtaaaagctatctgtcgctgggcggcgtttcgatgggtatcgccggttccatcgttgatcacaacttctttgaatcctggctgggaatgaaagtccaggcggtggatatgaccgaactgcgtcgccgtatcgatcagaagatttacgacgaagccgaactggaaatggcgctggcctgggctgataaaaacttccgctatggcgaagatgaaaataacaaacagtatcaacgcaatgccgagcaaagccgcgcagttctgcgcgaaagtttactgatggcgatgtgtatccgcgacatgatgcaaggcaacagcaaactggccgatattggtcgcgtggaagaatcacttggctacaacgccatcgctgcaggcttccaggggcaacgtcactggaccgatcaatatcccaatggcgataccgctgaagcgatcctcaacagttcatttgactggaatggcgtgcgcaaaccgtttgtcgtggcgaccgaaaacgacagtcttaacggcgtggcaatgttaatgggccaccagctcaccggcaccgctcaggtatttgccgatgtccgtacctactggtcaccagaagcaattgagcgtgtaacggggcataaactggacgggctggcagaacacggcatcatccatttgatcaactccggttctgctgcgctggacggctcctgtaaacaacgcgacagcgaaggtaaaccgacgatgaagccgcactgggaaatctctcagcaagaggctgacgcttgcctcgccgctaccgaatggtgcccggcgatccacgaatacttccgtggcggcggttactcttcccgcttccttaccgaaggcggcgtcccgttcaccatgactcgtgtcaacatcatcaaaggcctgggaccggtactgcaaatcgcggaaggctggagcgtggaattgccgaaggatgtgcatgacatcctcaacaaacgcaccaactcaacctggccaaccacctggtttgcaccgcgcctcaccggtaaagggccgtttacggatgtgtactcggtaatggcgaactggggcgctaaccacggggttctgaccatcggccacgttggcgcagactttatcactcttgcctccatgctgcgtatcccggtatgtatgcacaacgttgaagagaccaaagtgtatcgtccttctgcctgggccgcgcacggcatggatattgaaggccaggattaccgcgcttgccagaactacggcccgttgtacaagcgttaa

SEQ ID NO: 3235 - DNA, 1419 bp, Escherichia coli
atgaaacaagaagttatcctggtactcgactgtggcgcgaccaatgtcagggccatcgcggttaatcggcagggaaaaattgttgcccgcgcctcaacgcctaatgccagcgatatcgcgatggaaaacaacacctggcaccagtggtctttagacgccattttgcaacgctttgctgattgctgtcggcaaatcaatagtgaactgactgattgccacatccgcggtatcgccgtcaccacctttggtgtggatggcgctctggtagataagcaaggcaatctgctctatccgatcattagctggaaatgtccgcgaacagccgcggtaatggacaatattgaacggttgatctccgcacagcagttgcaggctatttctggagtcggagcctttagtttcaatacgttatataagttggtgtggttgaaagaaaatcatccacaactgctggaacgcgcgcacgcctggctctttatttcgtcgctgattaaccaccgtttaaccggcgaattcactactgatattacgatggccggaaccagccagatgctggatatccagcaacgcgatttcagtccgcaaattttacaagccaccggtattccacgccgactcttccctcgtctggtggaagcgggtgaacagattggtacgctacagaacagcgccgcagcaatgctcggcttacccgttggcataccggtgatttccgcaggtcacgatacccagttcgccctttttggcgctggtgccgaacaaaatgaacccgtgctctcttccggtacatgggaaattttaatggtccgcagcgcccaggttgatacttcgctgttaagtcagtacgccggttctacctgcgaactggatagccaggcagggttgtataacccaggtatgcaatggctggcatccggcgtgctggaatgggtgagaaaactgttctggacggctgaaactccctggcaaatattgattgaagaagctcgcctgatcgcgcctggcgcagatggagtgaaaatgcagtgtgatttattgtcgtgccagaacgctggctggcaaggcgtaacgcttaataccacgcgggggcatttctatcgcgcggcgctggaagggttaaccacgcaattacagcgcaatctacagatgctggaaaaaatcgggcactttaaagcctctgaattattgttagtcggcggaggaagtcgcaacacattgtggaatcagattaaagccaatatgcttgatattccggtaaaagttctcgacgatgccgaaacgaccgtcgcaggagctgcgctgtttggttggtatggcgtaggggaatttaacagcccggaagaagcccgtgcacagattcattatcagtaccgttatttctacccgcaaactgaacctgaatttatagaggaggtgtga

SEQ ID NO: 3236 - DNA, 423 bp, Escherichia coli
atgctgaaaacaatttcgccgttaatttctcccgaactattgaaagtgctggcagagatggggcatggagatgaaattattttttccgatgctcactttcccgcccattcgatgggaccgcaggtgatccgcgctgatggcctgttggtgagcgacttgctccaggcgattatcccgttatttgagctggacagttatgcaccaccgctggtgatgatggcggcggtagaaggtgacactctcgatcctgaagtagaacgacgttatcgtaatgcgctttcactacaagccccctgtcctgacatcatccgcatcaatcgttttgcgttttatgaacgggcgcaaaaagcctttgcgatcgttatcacaggcgaacgagcgaagtacgggaatattcttttaaaaaaaggggtaacaccgtaa

SEQ ID NO: 3237 - DNA, 732 bp, Escherichia coli
atgaaagcggcacgccagcaagcgatagtcgacctgctgctgaaccataccagcctgaccacggaagctctctctgaacagctaaaggtcagtaaagaaaccattcgtcgcgatctcaatgaattacagacgcagggtaaaattctgcgcaatcatgggcgcgctaaatatatccaccgtcaaaatcaagacagtggcgatccctttcacatccggctgaaaagccattatgcgcataaagcagatatcgcgcgcgaggcgctcgcgtggattgaagaagggatggtgatagccttagacgccagttcaacctgctggtatctggcacgccagttgcctgacatcaacatccaggtcttcaccaatagccatccgatttgccatgaactcggtaaacgcgaacgcattaaactgatcagttccggcggcacacttgagcgcaaatatggctgttacgtcaatccctcgctgatttcccaacttaaatcgctggaaatcgatctgtttattttttcttgtgaagggatcgatagcagcggcgcactgtgggactccaatgccatcaacgctgattacaaatcaatgttattaaaacgtgccgcgcaatcgttgttattgattgataaaagtaaatttaatcgttcaggggaagcccgcatcgggcatctggatgaggtaacgcacattatttctgatgagcgccaggttacaacttctttggtaacagcctga

SEQ ID NO: 3238 - DNA, 1101 bp, Escherichia coli
atgaataaggttgtattgctgtgccgtccgggctttgaaaaagagtgcgccgcagaaattaccgataaagccggccagcgggaaattttcggttttgcccgcgtgaaagagaatgcgggttatgtcatttatgaatgttatcaacctgatgatggcgataagttaatccgtgagctgccgttcagttcattaatttttgcccgccagtggtttgtagtgggggaactcctgcagcatttgccgccagaagatcgtattacccccattgtcggcatgttacagggcgtagtagagaagggcggtgaactgcgtgttgaagttgccgataccaacgaaagcaaagagttgctgaaattctgccgtaaattcaccgtgccgctacgcgctgccttgcgtgatgcgggggtgctggcgaactatgaaacgccgaagcgtccggttgtgcatgtattctttattgcaccaggctgttgctatactggttactcatacagcagcaataattcgccgttctatatgggcattccgcgcctgaaatttccggcagatgcgccgagtcgttccacgctcaaactggaagaggcatttcatgtgtttattcccgcggatgagtgggatgaacgcctggcgaacgggatgtgggcggtggatttaggtgcttgcccaggcggctggacctaccaactggtgaagcgcaacatgtgggtttattccgtcgacaacggcccgatggcgcaaagtctgatggataccgggcaggtgacgtggctgcgggaagacggtttcaaattccgtccgacacgcagcaatatctcctggatggtatgcgatatggttgaaaaaccggcgaaagttgcggcattaatggcgcagtggctggttaatggctggtgccgtgaaactatcttcaatctcaaactgccgatgaaaaaacgctacgaagaagtgtcacacaatctggcgtatattcaggcacagcttgatgaacatggcataaatgctcagattcaggcgcggcagttgtatcacgatcgcgaagaagtgacggtgcacgtccgccgtatctgggctgcggtgggtggtcgtcgcgacgagcgataa

SEQ ID NO: 3239 - DNA, 396 bp, Escherichia coli
atgaccagccgttttatgctgattttcgccgccattagcggcttcatttttgtagctctgggcgcttttggcgcgcatgtgttaagtaaaaccatgggggccgttgagatgggctggatccagaccggcctcgaataccaggcgtttcatacgctggcgatcttaggtctggcggtggcaatgcagcgtcgcatcagtatctggttttactggagtagcgttttcctcgcgttaggcacggtgctgttcagcggcagcctttattgcctggcgctgtcccatctgcgtttgtgggcgtttgtcacaccggttggcggcgtgagcttccttgcgggctgggcgttaatgttagttggtgctatccgtttaaagcgcaagggcgtaagtcatgaataa

SEQ ID NO: 3240 - DNA, 918 bp, Escherichia coli
atgtctaaacgattaccaccgctaaatgccttacgagtttttgatgccgcagcacgccatttaagtttcactcgcgcagcagaagagctttttgtgacccaggccgcagtaagtcatcaaatcaagtctcttgaggattttctggggctaaaactgttccgccgccgtaatcgttcactcctgctgaccgaggaagggcaaagctatttcctcgatatcaaagagatattttcgcaattaaccgaagcgacgcgtaaactccaggcccgtagcgctaagggggcgttgacggtcagtttactccccagtttcgcgattcattggttggttccgcgactttccagctttaattcagcttatccgggaattgacgttcgaatccaggcggttgatcgtcaggaagataagctggcggatgatgttgatgtggcgatattttatggtcggggcaactggccggggctacgggtggaaaaactgtacgccgaatatttattgccggtgtgctcgccgctactgctgactggcgaaaaacccttgaagaccccggaagatctggctaaacatacgttattacatgatgcgtcacgccgtgactggcagacatatacccgacagttggggttaaatcatatcaacgttcagcaagggccaatttttagccatagcgccatggtgctgcaagcggctatccacgggcagggagtggcgctggcaaataacgtgatggcgcaatctgaaatcgaggccggacgtcttgtttgcccgtttaatgatgttctggtcagtaaaaacgctttttatctggtttgtcatgacagccaggcagaactgggtaaaatagccgcctttcgccaatggatcctggcgaaagccgctgctgaacaagaaaaattccgctttcgttatgaacaataa

SEQ ID NO: 3241 - DNA, 228 bp, Escherichia coli
atgaaaaagactgccgcaattatttctgcctgtatgctgacttttgccctgagcgcctgttccggttcgaactatgtgatgcacaccaatgacggacgtaccatcgtctctgacggcaaaccacagactgataacgataccggtatgatttcgtataaagacgctaatggcaacaaacagcagatcaaccgtactgacgtgaaagagatggtcgaactggatcagtaa

SEQ ID NO: 3242 - DNA, 1206 bp, Escherichia coli
atgaacgtttttaatcccgcgcagtttcgcgcccagtttcccgcgctacaggatgcgggcgtctatctcgacagcgccgcgaccgcgcttaaacctgaagccgtggttgaagccacccgacagttttatagcctgagcgccggaaacgtccatcgcagccagtttgccgaagcccaacgcctgaccgcgcgttacgaagctgcgcgggaaaaagtggcacaattactgaatgcatcggatgacaaaaatatcgtctggacgcgcggcaccactgaatccatcaacatggtggcgcaatgctatgcccgtccgcgtctgcaaccgggcgatgaaattattgtcagtgtggcagaacaccacgccaacctcgtcccctggctgatggtcgcccaacaaacgggggccaaagtggtgaaattgccgcttaatgcgcagcgactgccggatgtcgatttgttgccagaactgattactccccgtagtcggattctggcgttgggccagatgtcgaacgtcactggcggttgcccggatctggcgagagcgattacttttgctcattcagccgggatggtggttatggttgatggtgctcagggggcggtgcatttccccgcggatgttcagcaactggatattgatttctatgctttttcaggtcacaaactgtatggcccgacaggcatcggcgtgctgtatggcaaaccagaactgctggaagcgatgtcgccctggctgggcggcggcaaaatggttcacgaagtgagttttgacggcttcacgactcaatctgcgccgtggaaactggaagcaggaacgccaaatgtcgctggtgtcataggattaagcgcggcgctggaatggctgacagattacgatatcaaccaggccgaaagctggagccgtagcttagcaacgcttgcagaagaagcgctggcgaaacgtccaggcttttgttcattccgctgccaggattccagcctgctggcctttgattttgctggagttcatcacagcgatatggtgacactgctggcggagtacggtattgccctgcgcgccgggcagcattgcgctcagccgctactggcagaattaggcgtaaccggcacactgcgcgcctcatttgcgccatataatacaaagagtgatgtggatgcgctggtgaatgccgttgaccgcgcgctggaattattggtggattaa

SEQ ID NO: 3243 - DNA, 444 bp, Escherichia coli
atgacaaacccgcaattcgccggacatccgttcggcacaaccgtaaccgcagaaacgttacgcaataccttcgcaccgttgacgcaatgggaagataaatatcgccagttgatcatgctggggaaacagcttccggctttgccagaggagttaaaagcgcaggctaaagagattgccggatgcgaaaaccgcgtctggctgggatataccgtggctgaaaacggcaagatgcatttctttggcgacagcgaagggcgcattgtgcgcggcctgttggcggtgttgttgactgccgttgaggggaaaaccgccgccgaattgcaggcacagtcgccgctggcattgtttgatgagctgggattacgtgcgcaacttagcgcctcacgcagccaagggttgaatgcgttaagcgaggcgattatcgctgcggcgaagcaggtttaa

SEQ ID NO: 3244 - DNA, 807 bp, Escherichia coli
atgtctgtggtaattagtgatgcatggcgtcagcgttttggtggcacagcgcgtctgtatggtgaaaaagcattgcaactgtttgctgacgcgcatatttgtgtggttggtatcggtggtgtcggttcctgggcggcggaagcgctagcgcgcacggggattggcgcaatcacgcttatcgatatggatgatgtgtgcgtcaccaataccaatcggcaaattcacgctctgcgcgataacgtcgggctggcaaaagcggaagtaatggcggagcgtattcgccagattaacccggagtgccgtgtaacggtggtggatgacttcgtgacgccggataacgtagcgcaatatatgaatgccggttattcgtacgtgattgatgctattgatagtgtacggcccaaagcggcgctgattgcttattgtcggcgcaataaaatcccgctggtcacgaccggtggcgctggtgggcagattgacccgacgcagattcaggttaccgatctggcgaaaacgattcaggacccgttggcggcgaagttgcgcgagcgcctgaaaagcgattttggcgtagtgaaaaacagtaaaggtaagctcggcgtggattgcgtgttctctaccgaagcgctggtgtacccgcagtcagacggcaccgtctgtgcgatgaaagccacggcggaagggccaaagcggatggattgtgcctcaggatttggcgcggcgacgatggtgaccgccacttttggctttgttgcggtttctcatgcgctgaagaagatgatggcgaaagcggcgcgtcaggggtaa

SEQ ID NO: 3245 - DNA, 1098 bp, Escherichia coli
atgaaaggacgttgggtaaagtaccttcttatgggcacggttgtggcaatgcttgccgcctgctcttccaaaccaaccgatcgcggacagcaatataaagacgggaaatttacccagcctttctctctggtgaaccagccagatgccgttggcgcgccgattaatgccggtgattttgccgagcaaattaaccatatccgtaattcgtcaccgcgtctgtatggcaaccagagtaatgtttataacgcggtgcaagagtggctgcgcgcaggcggtgatacccgcaatatgcgccagttcggcattgatgcctggcagatggaaggtgtcgacaactatggtaacgtgcagtttacaggctattacacgccggtaattcaggcgcgccatacccgtcagggcgagttccagtatccgatttatcgtatgccgccaaaacgtggtcgtctgccgtctcgtgcggagatctacgcaggagcgctgagtgataaatatattctcgcttacagtaactccctgatggataacttcattatggatgtgcagggtagcgggtatatcgactttggtgatggcagtccgcttaactttttcagctatgcagggaaaaacggtcatgcctatcgcagcattggtaaggtgttgatcgaccgtggcgaagtgaaaaaagaagatatgtcgatgcaggcgattcgtcactggggcgaaacacacagtgaagcggaggttcgcgagctgctggaacagaacccgtctttcgtcttctttaaaccgcaatcttttgcaccggtgaaaggggcaagtgcggtgccgctggttggccgtgcttctgttgcctccgatcgttcaattattccgccaggtactaccttgctggcagaagtgccgctgctggataataacggcaaatttaacggtcagtacgaattgcgtctgatggtggcgctggatgtcggtggcgcaatcaaaggccaacacttcgatatctatcaagggatcgggccggaagccggacaccgcgcaggttggtacaaccactatggacgtgtctgggtgctgaaaaccgccccgggcgcaggtaacgtctttagcggctga

SEQ ID NO: 3246 - DNA, 1491 bp, Escherichia coli
atgcgtcagggcattagcaatacccttgattatcggcagcagttaagaaagaaccaggacgcattttgggagcaaatggtaaacaatgaagttgccgccaaaaaagcattgtctcctgcggctatcctggcgctggaaaaagagtacgccaacaaaaagctggcggcttacatcttcccaggcagaaatttatcgttaacagtagacgctgacccacaggcggaaattagcagcaaagaaacgctggctgagaatctgacatcattaacactttccaatggtgccagggttattctggcaaaatccgcgggcgaagagcaaaagctacaaattattgccgtatctaataaaggcgatttaagtttccctgcgcagcaaaaatcacttatcgcgctggctaataaagcagtaagcggaagcggcgttggtgaactctcctcttccagcctgaaacgctggagtgcggaaaactcggtaaccatgagcagtaaagtcagtggcatgaatacgttgctctccgttagcgcgcggactaataaccctgaacctggtttccagttgattaaccagcgaatcaaccacagcacgattaacgacaatatttgggcatcgctacaaaatgctcaaattcaggcgttgaaaacgctcgaccagcgtccagcggagaaattcgcccagcagatgtatgagacgcgctatgccgatgaccgcacgaaattaccgcaagaaaatcagattgcacagtttactgccgcagatgcgctggctgccgatcgccagttgttttcatctccagcggatatcacgtttgtcattgtcggtaatgtcgcagaagacaaactcgtggcgttaattacgcgttacttaggatctatcaaacactctgattcgccattagccgcaggtaaaccattaactcgcgcgacggacaacgcatcggttactgtaaaagaacaaaatgaaccagtggcacaggtttcacagtggaagcgttataattcccggacacctgttaatctggcgacgcgtatggcgctcgatgcttttaacgtcgcactggcaaaagatctacgcattaatattcgtgaacaggcatctggggcatacagcgtttcttctcgcctctcggttgatcctcaggccaaagatatcagtcatttgctggcttttacttgtcaaccagaacgacatgatgaactgttaacgttagcgaatgaagtgatggttaagcgtctggccaaagggatcagtgagcaagaactgaacgaataccagcaaaacgttcagcgcagcctcgatatccaacagcgtagcgttcaacaattagcgaacaccattgtaaatagtcttattcaatatgacgatcctgcagcatggattgagcaggagcaattgttgaaacaaatgacggtagagaatgttaacactgctgttaaacaatatctttctcatccggtgaatacgtataccggagtattattgccaaaataa

SEQ ID NO: 3247 - DNA, 1158 bp, Escherichia coli
atgcacgttacagccaagccctccagttttcaatgtaatctcaaatgtgattactgtttttaccttgaaaaagagtcgcagtttactcatgaaaaatggatggatgacagcactctgaaagagttcatcaaacaatatatcgcagcgtctggcaatcaggtctattttacctggcaaggcggtgaacccactctggctggcctggattttttccgtaaagttattcactatcaacaacgctatgcaggccaaaaacgaatttttaatgcattacaaacgaatggcattttattgaataatgaatggtgtgcctttctcaaagaacatgagtttctggttggtatctcgatcgatggaccccaagaactacatgaccgctacagacgcagtaattcaggtaacggtacttttgcaaaagtgatagcagccatcgagcgtctgaaatcatatcaaatagagtttaatacgttaaccgtcattaataacattaatgtccattaccctcttgaggtttatcattttttaaaatctatcggcagtaaacatatgcaatttatcgaattgctcgaaaccgggacgccgaatattgatttcagtggtcatagtgagaacacattccgtatcattgatttttctgtgcctcccacggcttatggcaagtttatgtcaaccatttttatgcaatgggttaaaaacgatgtgggtgaaattttcatccgtcagtttgaaagctttgtcagccgttttttggggaatgggcataccagttgtattttccaggagtcctgcaaggataatctggttgttgaaagtaatggagacatttacgaatgcgaccattttgtctatccacagtacaaaattggaaacattaataaatcggaactcaaaacgatgaacagtgtacaactgacagcgcaaaaaaaacggatttcagcgaaatgtcagcaatgtgtatataaacctatctgcaatggtggttgccctaagcatcgtattactaaagtaaacaatgagactgtttcctatttttgcgaaggttataaaatccttttttcaaccatggtaccttatatgaacgccatggtagagttagctaagaacagagtaccgctttaccacattatggatgttgcaaaacaaatggagaataattaa

SEQ ID NO: 3248 - DNA, 1683 bp, Escherichia coli
atgaagtctgcattaaagaaaagtgtcgtaagtacctcgatatctttgatactggcatctggtatggctgcatttgctgctcatgcggcagatgatgtaaagctgaaagcaaccaaaacaaacgttgctttctcagactttacgccgactgaatacagtaccaaaggaaagccaaatattatcgtactgaccatggatgatcttggttatggacaacttccttttgataagggatcttttgacccaaaaacaatggaaaatcgtgaagttgtcgatacctacaaaatagggatagataaagccattgaagctgcgcaaaaatcaacgccgacgctcctttcattaatggatgaaggcgtacgttttactaacggctatgtggcgcacggtgtttccggcccgtcccgcgccgcaataatgaccggtcgagcgcccgcccgctttggtgtctattccaatactgatgctcaggatggtattccgctaacagaaactttcttgcctgaattattccagaatcatggttattacactgcagcagtaggtaaatggcacttgtcaaaaatcagtaatgtgccagtgccggaagataaacaaacgcgtgactatcatgacaacttcactaccttttctgcggaagaatggcaaccgcaaaaccgtggctttgattactttatgggattccatgctgcgggaacggcatattacaactccccttcactgttcaaaaaccgtgaacgcgtccccgcaaaaggttatatcagcgatcagttaaccgatgaggcaattggcgttgttgatcgtgccaaaacacttgaccagccttttatgctttacctggcttataatgctccgcatctgccaaatgataatcctgctccggagcaatatcagaagcaatttaataccggcagtcaaacagcagataattactacgcttccgtttattctgttgatcagggtgtaaaacgcattctcgaacaactgaagaaaaacggacagtatgacaatacaattattctctttacctccgataatggtgcagttatcgatggtcctctgccgctgaacggggcgcaaaaaggctataagagtcagacctatcctggcggtactcacaccccaatgtttatgtggtggaaaagaaaacttcaacccggtaattatgacaagctgatttccgcaatggatttctacccgacagctcttgatgcagccgatatcagcattccaaaagaccttaagctggatggcgtttccttgctgccctggttgcaaaataagaaacagggcgagccacataaaaatctgacctggataacatcttattctcactggtttgatgaggaaaacattccattctgggataattaccacaaatttgtccgccatcagtcagacgattacccgcataaccccaacaccgaggacttaagccaattctcttatacggtgagaaataacgattattcgctcgtctatacagtagaaaataatcagttaggtctatacaaactgacggatctacagcaaaaagataaccttgccgccgccaatccgcaggtcgttaaagagatgcaaggcgtggtaagagagtttatcgataacagccagccaccgcttagcgaggtaaatcaggagaagtttaacaatatcaagaaagcattaagcgaagcgaaataa

SEQ ID NO: 3249 - DNA, 762 bp, Escherichia coli
atgtcgctcgtttgttctgttatatttattcatcatgccttcaacgctaacattttagataaagattacgccttctctgacggcgagatcctaatggtagataacgctgttcgtacgcattttgaaccttatgagcggcatttcaaagaaatcggatttaatgaaaataccattaaaaaatatctacaatgcactaacatccagacagtgacgatgcctgttcctgcgaagtttttacgtgcttcaaatgtaccgactggattgcttaatgaaatgattgcttatctcaactcggaagaacgcaatcatcataatttttcagagcttttgcttttttcttgcctgtctatttttgccgcatgcaaaggtttcattacactattaactaacggtgtgctatccgtttccgggaaagtaagaaatattgtcaacatgaagctggcgcacccatggaagctgaaagatatttgtgactgcctgtacatcagtgaaagcctgttgaagaaaaaactaaagcaagagcaaacgacattctcacagattcttttagatgccagaatgcagcacgcaaaaaatttgatacgcgtagaaggttcagtcaataaaattgccgaacaatgtggttatgccagtacatcttattttatttatgcgtttcgcaaacatttcggcaacagtccgaagagagtttctaaggagtaccgttgtcaaaggcacacgggtatgaacacggacaacacgatgaatgctttagctatttga

SEQ ID NO: 3250 - DNA, 198 bp, Escherichia coli
atgcatgcgaccacagtgaaaaacaaaatcacgcaaagagacaactataaagaaatcatgtctgtaattgtggttgtcttgttactgacacttacgttgatagccattttttcggcaattgatcagctgggcatttcagaaatgggtcgcatggcaagagatcttacacatttcattatcaatagtttgctagactga

SEQ ID NO: 3251 - DNA, 2280 bp, Escherichia coli
atgaagaaaaaaattgaatcctaccagggagctgccggtggttggggtgctgttaaatccgtagcgaatgcagtacgtaagcagatggatatacgccaggatgttattgccatgtttgacatgaataagccagagggctttgactgtccgggatgtgcatggccagatcctaagcacagtgcgtcattcgacatttgtgaaaacggcgcaaaagcaatcgcctgggaagtcacggataagcaggtaaatgcctctttctttgctgagaatacggttcaatcattacttacctggggagatcacgagcttgaggctgcgggacgtctcactcagcctttgaaatatgatgacgtcagcgactgttacaagccattaagctggcaacaagctttcgacgaaattggcgctcgccttcaaagctatagtgatcccaatcaggttgaattctatacttcggggcgcacttccaatgaagctgcctttctttatcagctttttgcccgtgaatacgggagcaataactttcccgactgctccaacatgtgccatgaaccgaccagtgtgggattggcagcgagtatcggtgtgggtaaagggaccgtgttgctggaagactttgagaaatgcgatttagtcatttgcattgggcataaccctggtacaaaccaccctcgcatgctgacttcgttgcgcgctttagtgaaacggggagcgaaaatgatcgccatcaatcctctacaggaacgtggcctggagcgatttaccgcaccgcaaaacccgtttgaaatgctgacgaactctgagactcagttggccagtgcctactataacgtgcgcattggtggcgatatggcattgctcaaggggatgatgcgcctgttaattgagcgcgatgatgctgcaagcgccgcaggtcggccctcattgctggatgacgaatttattcaaacgcataccgtcggctttgacgagctacgccgtgacgtgctcaattccgagtggaaagatatcgaacgtatttctggactaagtcagacacaaatcgccgaacttgctgatgcatatgccgctgccgaacgaaccattatctgttacggaatggggatcactcagcacgaacatggtacccagaacgtacagcaactggtcaatctgctgttgatgaaaggtaacattggcaagcctggtacgggtatctgcccactacgaggtcactctaatgtacagggcgaccgaaccgtcggtatcaccgagaaaccgtctgcagagtttctggatcgcctgtgtgagcgctatggcttcaccccacctcatgcacctggacatgctgcaatcgccagcatgcaagctatatgtacggggcaagctcgagcattgatctgcatggggggcaactttgcactggcaatgccagatcgggaagcgagcgctgtaccgttaacgcaattagatctggcggtacacgtagccactaagcttaaccgctctcatctgctgaccgcacggcatagctatattctgccggttctgggacgtagcgagattgacatgcaaaaaagcggtgcgcaggcggtaaccgttgaagattcaatgtcgatgattcatgcctcgcgtggtgtgttaaaacccgccggtgtaatgctgaaatcagagtgtgcagtggtcgcgggaatcgcgcaagctgcactaccccagagcgtggtagcctgggagtatctggtggaagattatgatcgcattcgcaatgacattgaagctgtgctgccagagtttgccgactataaccagcgcatccgtcatcctggtggttttcacctgataaacgcagcagctgaaaggcgctggatgacgtcgtcaggtaaggctaatttcattaccagtaaagggctgttagaagatccctcttcagcgtttaacagtaagctggtcatggcgacagtacgcagtcacgatcagtacaacacgacgatttatggtatggatgatcgctatcgaggggtattcggtcaacgagatgtggtctttatgagtgctaaacaagctaaaatttgccgtgtaaaaaacggcgaaagagttaatcttattgcactcacgccagacggtaaacgtagctcacgccgcatggatagattaaaagtggtcatttaccctatggctgaccgctcactggtgacctattttccagaatcgaatcacatgctaacacttgataaccacgatccattaagtggcattcctggctataaaagtattccggttgaattagaaccatcaaattaa

SEQ ID NO: 3252 - DNA, 915 bp, Escherichia coli
atgggtaaaacattcagtataaaggtcctgttcggtatttatcttctattaatggcaggcaaagtttttgccttcagttgtaatgtcgatggcgggtcaagtattggagcaggtacaacctctgtttatgttaatctcgatcctgtaatacaaccgggccagaatctggttgtagacttgtctcagcatataagttgctggaatgattacggcggctggtacgacactgatcatataaacctggtacaaggatcagctttcgcaggctccctacagtcatataaaggatcactgtactggaataatgtgacctaccctttcccgttgacgacaaataccaacgtattggatattggtgataagacaccgatgccattaccgttaaaactctatattaccccagtcggagcggctggtggagttgtcataaaagcaggggaagttattgcccgtattcatatgtataaaattgccacgttaggaagcggaaatccgcgtaattttacgtggaatattatttcaaataacagtgttgttatgccaacaggcggttgcaccgttgatagtcgtaatgtcaccgtgaatctcccggactttcctggaagcgcagaaataccccttggtgtatattgctctagcgaacaaaagctctcattttatctttcgggtgccaccactgacagtgcccgacaagtgtttgctaacacagcaccagatgcaacaaaagcatcgggcgtgggtgtctctctgatgcgtaatggaaaaacactggcaacaggagaaaatgtctccctggggacagtaaataaaagcaaagtacctctgggtttaagcgcaacctatggacaaacaggaaacaaggttgcagccggagccgtccagtcagtcattggtgtcacttttatctatgaataa

SEQ ID NO: 3253 - DNA, 504 bp, Escherichia coli
atgaaaagacttcacaagaggttcctgttagctacgttttgcacattattcacagcaactctccaggccgccgatgtcactatcactgttaatggtcgggtagtcgctaaaccatgcactattcaaaccaaagaagctaacgttaatctcggggatctttatacacgcaatctgcaacaacctggttctgcatctggctggcacaatattactttgtcattaaccgattgtccgattgaaacaagtgcagtgacggcaatcgtgacaggttcaactgacaatacgggttattacaaaaatgaaggtactgccgaaaatattcagatagagctaagggatgaccaggatgcgacgttaaaaaatggcgatagcaaaacggttattgttgatgtgatcactcgtaatgcacagtttccacttaaggcaagagctatcacggtgaatggaaacgcaagccagggtacgatcgaggcgctaatcaatgtgatctatacctggcaataa

SEQ ID NO: 3254 - DNA, 531 bp, Escherichia coli
atgaaatacaataacattattttcctcagtttatgtctggggttaaccacctattctgctttatccgcagatagtgttattaaaattagcgggcgcgtcctcgattatggctgcacagtctcatcggattcgcttaattttaccgtagatctccaaaaaaacagtgccagacaatttccaacgaccggtagcacaagtccagtcgtcccttttcagattacattaagtgaatgcagcaaagggacaacgggagttcgggttgcatttaacggtattgaggatgcagaaaataatactctgttgaaactagatgaaggaagcaatacggcctccggtttgggtatagaaatactggacggaaatatgcgtccggtgaaattgaatgaccttcatgccgggatgcagtggatcccattggtaccagaacagaacaatattttgccttactccgctcgtttgaagtcaactcagaagtccgtcaatccaggactggtgagcgcttcggcaacctttacccttgaatttcaataa

SEQ ID NO: 3255 - DNA, 2652 bp, Escherichia coli
atgacagcctttcgtgccgcatttaaggcatatcgtatgcatcaggtgttaatactgcctcgctttgcacggcttacctttgcccttggcttagcaactgcggtttttcccgttgacgcagagtattattttaatccacggtttttaagcaatgaccttgctgaatctgtcgatttatctgcctttactaagggacgcgaggccccacctggtacatatcgggtcgacatttatttgaacgacgaatttatggctagtcgggatattacttttattgcagatgataataacgcagatctcatcccatgcctgagtacagaccttcttgtcagtcttggcataaaaaaatcagcattattagacagcaaggaacattcggcagaaaaacatgtgccggacaacagcgcatgcacaccacttcaggatcgtttggctgacgcatcatctgagtttgatgctggtcagcaacatctgtcactctccgttccgcaaatatatgtcggcagaatggctcgcggctatgtttctcctgatctgtgggaagaaggaataaatgccgggctactaaactatagttttaatggtaattctattaataaccgtagtaaccataatgcaggaaaatccaactatgcatatttgaatttacagagtggcatcaacattggtagttggcgactgcgcgataactcaacgtggagttataacagtgggagtagcaattcatctgacagcaataaatggcagcatatcaatacgtcggctgaacgtgacattattccgttacgctcacggttaacagtgggtgatagttataccgatggcgatatttttgacagtgtgaactttcgtggccttaaaataaattcaacagaagcgatgttgcccgatagccaacatggtttcgctccggtgattcatggtattgctcgtggcaccgcacaagtgagtgtaaaacagaatggatacgatgtttatcagactactgtcccacccggcccttttactattgatgatatcaactctgcggccaatggtggtgatctgcaagtaaccataaaagaggcagacggcagtattcagacattatatgttccttattcgtctgttccggttctccaacgtgctggatatacgcgttatgcacttgccatgggggaatatcgtagtggaaataacctgcaaagcacccccaagttcgtacaagcaagcttgatgcatggtctgaaaggaaactggacaccttatggcggaatgcaaattgcagaagattatcaggccttcaaccttggtattggtaaagatttaggactttttggtgccttttctttcgatattacacaggccaatacgacacttgcagatgacacccgtcacagcggacaatcggttaaatccgtctacagcaaatccttctaccagacgggaaccaatatccaggtcgcaggatatcgctattctacgcaaggtttttataacttatccgacagtgcatacagtcgaatgagtggttacaccgtcaagcctcctaccggagacaccagtgagcaggcactatttattgattattttaatctgttctacagtaagcgtggtcaggaacaaataagcatctctcagcagcttggaaattacggtacgacatttttcagtgccagtcgccaaagttactggaacacgtcacgcagcgaccagcaaatatcatttggattaaatgtgccgtttggtgatattacgacttcgctgaattacagctattccaataatatatggcaaaacgatcgggatcatttactcgcttttacgcttaatgttccctttagtcattggatgcgtacagatagtcagtcggcatttcataattcaaacgccagttacagtatgtcaaacgatttgaaaggcggcatgaccaacctatcaggggtttatggcactctactgccggataataacctgaattatagtgttcaggtcggtaacacccacgggagtaatacatcgtctggcaccagtggttacagttctcttaattatcgtggagcttacggtaatacgaatgtcggttacagtcggagtggtgacagcagccagatttattacggaatgagtggtggcattattgctcatgctgatggcatcacctttggacagccgctgggcgacacaatggttctggttaaggctcctggcgctgataatgtcaaaatagagaaccagaccggtattcataccgactggcgtggctatgccatattaccatttgcgacagaatatagagaaaatcgtgtcgctcttaacgcgaattcccttgcagataatgttgaactggatgaaaccgtggtcactgtcatcccaactcacggtgctattgccagagcaacatttaatgtacaaatcggcgggaaagtattaatgacgttgaagtacggtaataagagcgttccattcggtgcaattgtcacacatggagagaataaaaatggcagcattgtcgcggaaaatggtcaggtttatctgactggacttccacagtcagggaaattacaggtttcatggggcaatgataaaaactcaaactgtattgtcgagtacaagcttcctgaagtttctcctggtaccttactgaaccagcagacagcaatctgtcgctaa

SEQ ID NO: 3256 - DNA, 711 bp, Escherichia coli
atgcaaactacgcgtaccccctactctgtttcctttatggcgacagtgttacttttattgctctttgcttgccatagcaccattgccaacgcagctgtcgcacttggtgcgacgcgggtaatttatccggcaaaccagaaacaggttttattgcctgtcacgaataatgatcctgccagtgtctatctcattcagtcatggatagaaaatgcgggtgaccagaaagatacccagtttgtcattaccccaccgcttttttccatgcaaggtaaaaaagagaatacgcttcggataatcaacgccactaatcatcagttaccaggcgaccgtgaaagcctgttctgggttaatgttaaagctatccctgctatggaaaaagaccagaagaatgagaatacattacagctggcaattattagccgcataaaaatgttttatcgccccacgcatctggcaatggcacctgaagaagcgcctgcaatgcttcggtttcgtcgcagcggtagcaaactcactcttattaatccaacgccctacttcattaccgtaacaaatatgaaagcaggaaatagcaatctcccaaacaccatggtgccgccaaaaggtgaagtatcggtggatatcccgcatgctgtaaccggggatatcagttttcagacaatcaatgattacggtgcattaactccgcgtattaaggcaaccatgcagtaa

SEQ ID NO: 3257 - DNA, 564 bp, Escherichia coli
atgaaactcaaacatgtcggtatgattgtcgtttctgtgttggcgatgtcgtctgctgcggtaagcgcagccgagggtgatgaatcagtaacgaccactgttaatggcggtgttattcattttaaaggtgaagtggtaaatgccgcttgtgcgattgattcagaatcaatgaaccaaacggttgagctgggtcaggtccgttcttctcgtctggctaaagcgggtgacctcagctccgccgttggcttcaatatcaagctgaatgattgtgataccaatgtttccagtaatgcagctgttgcattcctgggtactactgtcaccagtaatgacgatacattagcgctgcagagttcagcggcaggctctgcccaaaatgtcggtatccaaattttggaccgtacaggggaggtattagtacttgatggtgctacttttagcgctaaaactgacttgattgatggcacgaatatactgccgttccaggctcgttatattgctctcgggcagtcagtagctggtactgcaaacgctgatgcgaccttcaaagttcaatatctataa

SEQ ID NO: 3258 - DNA, 123 bp, Escherichia coli
atgaaagcactactaattactgcattattcatggaattcatttcggtaaatactgcatctgctgctgaggagattcatcatgcagatagcaaagtcgacgatcaggtcctcatagctgagtaa

SEQ ID NO: 3259 - DNA, 609 bp, Escherichia coli
atgcttaaagaaaacttcaacgaactgcaaatctttcttgtggtggcaagagagcgaagttttaccaaagcagcgagcaaactcggcgtctctcagtctgcacttagccatgcaatgaaggcactggaggaaaggttaaatatccgtctcttaacccgaactacccgtagcgtggcccccacggaagcaggggagagaattattgcctgtcttgagccacgtatagatgagcttgagcgcgagctggaatcacttatccaactgaatggcgcgccatccgggaatattcgtttatcagccggggaacatgctgcacgcagtctggtctggccgaagttaaaatcgttcctcagagaatatcccgaaatcaatgtcgaactggtggtggataacggttttgtcgatattgttgacggtcgttttgatgccgggatccggctgggtgaaagtgtggataaggatatgattgcagtgcgaattgggccggatatgcggatggccatggtgggatcgccggcgtattttgctgcaaaccctgcgcctttgctgcaaaccctgcgcctgaaacgcctcacgaactacaaaatcatcgctgcatcaataacgtaa

SEQ ID NO: 3260 - DNA, 453 bp, Escherichia coli
gtggataaacctgcgaatcgtattgaagatatccacggtatggctgatttcatcagccagtatcctggtgttgatagcacccgtattggtttgttggggatttgcgggggaggagggtattcacttgctaccgccgagacggacaaacgattcaaatcgattgcaaccattagcatgtttaattcaggacttgtacggcgcaatggtatgcaggattcacagttggatactattcaacaacgtcttaagcaggcttcagatgcacgagctcaggaagtcgccggtagcgaagtgctttactccggtgatgccaacctgactgatgaacagatcgctaaattaccttttgcgttatatcgccagggctacgagtactactggaaaacccacgcacacccaaacatattcagaagcgtgagggatatagtgccatcaaagcgctggctgctgtaa

SEQ ID NO: 3261 - DNA, 201 bp, Escherichia coli
atgaaccgccaacgactggattctcccttggtttatgttggtgcgcataatgtatattatgttaaattgcctgtgaaggtcctttacttcaccattcacatccacacacagataaatcaatacgttgtgatttctgacttccctcccgtttcggtagaaaaattcaacctctgttcagtgatggcacaccatagaccatga

SEQ ID NO: 3262 - DNA, 1323 bp, Escherichia coli
atgcctaaactagtcacttggatgaacaaccagcgggtaggcgagttaacgaagttagccaacggcgcgcacacctttaagtatgcacctgagtggttagccagccgttatgccagaccgttgtcactttcgctgccattgcagaggaggaatatcacctctgatgccgtatttaacttcttcgataacctgttacccgatagcccgattgtacgtgaccggatcgttaaacgttatcatgctaaatccagacaaccgtttgatttattgtcagaaatagggcgagacagcgttggtgccgtgacgttaatccccgaagatgaaaccgtaacgtgtccgataatggcatgggaaaagcttactgaagccagacttgaagaagtattaacggcttataaagcagatatcccgttaggcatgattagagaagaaaatgactttcgcatctcggttgctggcgcacaggagaagactgcgctgctcagaataggcaatgactggtgcattccgaagggaataacgccaacgacgcacattatcaaattgccgattggcgaaatcagacagcccaatgcgacgctcgatcttagccaaagcgttgataatgagtattactgtttgctgctggcgaaagaactcgggttgaatgttccggacgcagaaatcattaaagcgggaagggtgcgcgcgttagcggtcgaacgttttgacaggcgttggaatactgagcgaacagttttacttcgcttgccacaggaggatatgtgccagacattcggtttaccttcatcggtgaaatatgaatcagatggaggccccggtatcgcgcaaattatggcttttttaatggggtccagcgaggcgctgaaagatcgctatgattttatgaagtttcaggtcttccagtggttgattggcgcaacagatggccatgcaaaaaacttctccgtatttattcaggctggcggcagttatcggctcacaccattttatgacatcatttcggcatttccggtccttggcggtacgggaatacacatcagcgatctcaaactggcaatggggcttaacgcatccaaaggcaaaaaaacggcaatcgataaaatttatccgcaacattttctggcgacagcaaaggtgctgaaattcccggaagtgcagatgcatgaaatcctgagtgactttgccagaatgattccggcagcactggataacgtgaagaattcattaccgacagattttccggagaacgtggtgacggcagttgaaaccaatgtgttgaggttgcacggtcggttaagccgagaatacggtattaagtaa

SEQ ID NO: 3263 - DNA, 267 bp, Escherichia coli
atgatgagctttcagaagatctatagcccaatgcaattggcgaatgcaatgaaactggttcgccagcaaaacggctggacgcagagcgagttggcgaaaaaaatcggcattaagcaggcgacaatttccaatttcgaaaacaatcctaacaatacctcgctcacgacattttttaagattttacagtcgcttgaactctcaatgacgctatgcgacgcaaaaaatgcctcgccagaagcaacagaacagcaagatctggagtggtga

SEQ ID NO: 3264 - DNA, 759 bp, Escherichia coli
atgtctgactggaacccctctttatatctacactttgccgctgaacgatcgcgtccggcggtggagctgcttgccagggtgtcgctggagaatatcgaatacattgccgatcttggctgtggcccaggtaacagcaccgcccttctacaccaacgttggcctgctgccaggataacgggcatcgactcatctccggcgatgattgctgaagcgcgcagtgctttgccagactgcctgtttgtggaagcagatatccgcaactggcaaccggaacaggcactcgatctgatttttgctaatgcctcgctgcaatggctgcccgaccactacgaattgtttcctcatttggtttcgttactcagtccgctgggcgtgctggcagtacagatgccagataactggctggagccgacccatgtgctcatgcgcgaagttgcctgggaacaaaactacccggatcgcgggcgtgagccgctggctggcgttcatgcttactacgatattctgagtgaagccggatgtgaggtcgatatctggcgaaccacttactatcaccagatgccgtcgcaccaggcgattatcgattgggtgaccgccactggattacgtccgtggttacaggatctgaccgagagcgaacagcagcattttcttacgcgctaccatcagatgctggaagagcaatatcccctccaggagaacggacagatattgctggcatttccgcgtctgtttattgttgcccgccgtacggagtaa

SEQ ID NO: 3265 - DNA, 915 bp, Escherichia coli
atgattgttcgtccacaacaacactggctgcgccgtatttttgtctggcacggttcagtattatccaagatatcctcgcgcttactactcaattttctcttttcgatcgctgttattttcatgctgccctggtacacgcatttgggcattaaattcaccctcgcaccgttcagcattctcggtgtcgccatcgccatttttcttggttttcgtaataatgccgggtacgcccgttacgttgaagcgcgaaaactttgggggcagttgatgattgcctcacggtcgttactgcgcgaggtaaaaacgacattgccagattcggcaagtgtaagggagtttgcccggctgcaaatcgccttcgctcactgtttacgcatgacattacgcaaacaaccacaggcggaagtgctggctcaatatctcaagacggaagatcttcagcgtgtactggcttcgaactctccagctaaccgtatcttgttaataatgggggagtggttggcggttcagcgccgcaatgggcagctttcagatatcctgtttattagcctcaacgatcggcttaatgatatttcagcagttctggcaggctgcgagcgcattgcctacacgccaattccctttgcctacaccctgattttgcatcgtaccgtttatctgttttgtatcatgctgccgttcgcgctggtcgtggatctgcattacatgacgccttttatctctgtgctgatttcctacacttttatttcgctggattgtctggcggaagaactggaagatcccttcggtactgaaaacaatgatttaccgctggatgccatctgcaacgctattgaaattgacctgttacagatgaacgatgaagcagaaattccagcgaaaattcttcccgatcgccattaccagctgacgtga

SEQ ID NO: 3266 - DNA, 1452 bp, Escherichia coli
gtgaaaacactaaatcgtcgcgattttcccggtgcacagtatccagaacgtatcattcagtttggtgaaggtaacttcctgcgcgcctttgttgactggcaaatcgatctcctgaatgagcacaccgatctgaattctggcgtggtcgttgttcgtccgattgaaacttcattcccgccgtcactgagcacgcaggatggtctgtataccaccattatccgtggcctgaatgagaagggtgaagcggtcagcgacgcgcgtctgattcgctcggttaatcgtgaaatcagcgtctacagtgaatacgatgaattcctgaaactggctcacaacccggaaatgcgctttgttttctctaacaccaccgaagcgggtatcagctaccatgcgggcgataaattcgatgacgcgccagcggtaagttatccggcaaaactgacccgtctgctgttcgaacgttttagccatttcaacggtgcgctggataaaggttggatcatcatcccgtgtgagttgattgactataatggcgacgcgttgcgtgaactggtgctgcgctatgcgcaagagtgggcactgccagaagcatttattcaatggctggatcaggctaacagcttctgttctacgctggtggaccgtatcgttaccggttatccgcgtgatgaagtggctaaactggaagaagaactgggctaccacgatggtttcctcgacaccgctgaacacttttacctgtttgtgattcaggggccgaaatccttagcgactgaacttcgtctggacaaatatccgctcaacgtgctgatcgttgacgatattaaaccgtataaagaacgcaaagtggcaattctcaacggtgcgcacaccgcgctggtgccggtggcgttccaggcagggctggataccgtaggtgaagcgatgaacgatgctgaaatttgcgcattcgttgaaaaagccatctacgaagaaattattccggtactggatttgccacgcgatgagctggagtctttcgccagtgcagtcaccggacgtttccgtaacccgtacattaagcatcagctgctggctatcgcgcttaacggcatgaccaagttccgcacccgtatcctgccgcagctgctggcagggcagaaggcaaacggcacacttccggcgcgccttactttcgcattagcagcattgattgcgttttatcgcggtgagcgtaatggagaaacatatccggtacaggacgatgcccactggctggaacgttatcagcaactctggagccagcatcgtgaccgtgttatcggcacccaggaactggttgctattgtgttggctgaaaaagaccactgggagcaggacctgacgcaagtgcctggtctggtcgagcaggttgctaatgacctggatgcgattctcgaaaaaggaatgcgcgaagctgtacgtccgttgtgctaa

SEQ ID NO: 3267 - DNA, 1419 bp, Escherichia coli
atgcatgtacagcccatttcaactttccgtttgttccaggaaggtcatctgctacgtaatagcatcgctatttttgtgctaaccacgctgttctattttattggtgcagagttacggctggttcacgaactttctcttttctggccgctgaatggcgtaatggcgggggtgtttgcccgctatgtctggcttaatcgactgcattactatgcgatcagttatgtggcgatgctggtttatgatgccataaccaccgaatgggggctggtttcactggctatcaatttctccaatatgatgtttattgttaccgtcgccttactggtcgcgcgggataagcgtctgggaaaaaataagtatgagccagtaagtgccttacggctatttaattactgtctgcttgccgcattattatgcgctattgtcggggcgattggttcggtcagtattgatagtctggatttctggcctttgcttgccgactggtttagtgagcaattctcaacgggcgtgttgatcgtgccttgtatgctgacgttggcaattcctggagtactgccgcgctttaaagcagagcagatgatgcctgctatcgcgcttattgtgtcggttattgcctcggtagtcattggcggagcggggagtctggcgtttccgctccctgcattaatctggtgtgcagtgcgctatacgccgcaggtaacatgtctgttgacctttgtcaccggtgcggtggaagtcgtactggtggcaaattcggtgattgatatctcggtcggttcgccgttctccattccgcaaatgttctccgcacgtctcggtattgccacgatggcgatatgcccaattatggtttcctttagcgtggcagcgatcaattcgctaatgaagcaagttgcgctgcgagccgactttgattttctgactcaggtttactcacggtccggtctttatgaggcgctgaaaagtccatcgctgaaacagacacaacatctgacggtcatgctgcttgatatcgactatttcaaaagcattaacgataactatggacatgaatgtggcgataaagtgttaagcgtgtttgcccagcatattcagaagattgtcggtgataaggggctggtggcgcgaatgggcggcgaagaatttgctgttgcagtgccgtcggtgaatcctgtcgatggcctgctaatggcggaaaaaatccgtaaaggcgtagaactgcaaccgttcacctggcaacaaaaaacgctttatctcacggtaagtattggcgtcggtagtggttgcgcatcgtaccgaacgctgaccgatgactttaataaattgatggtcgaagccgatacgtgtctgtatcgctcgaagaaagatgggcgcaaccgtaccagcactatgcgttacggtgaggaagttgtctga

SEQ ID NO: 3268 - DNA, 360 bp, Escherichia coli
atgcagtctctcgatccactcttcgcgcgtttatcccgttcaaaatttcgctctcgctttcgtttgggtgtgaaagagcgtcagtattgtctggagaaaggcgcgccagtcattgaacaacatgcggcggattttgtcgctaaacgtcttgctccggcattaccggctaacgacggtaagcaaacccccatgcgcgggcatccggtttttatcgctcaacacgccaccgcgacctgttgtcgcggttgtctggctaagtggcataacattcctcagggggaagcgttaagtgaggagcaacaacgttatattgtgacggtaatctaccactggctggttatacagatgaatcagccatga

SEQ ID NO: 3269 - DNA, 927 bp, Escherichia coli
gtggcagtcgccatggataatgcaattttagaaaacatcttgcggcaagtgcggccgctcattggtcagggtaaagtcgcggattatattccggcgctggctacggtagacggttcccgattggggattgctatctgtaccgttgacggacagctttttcaggccggagacgcgcaagaacgcttttccattcagtctatttccaaagtgctgagtctcgttgtcgccatgcgtcattactccgaagaggaaatctggcaacgcgtcggcaaagatccgtctggatcaccgttcaattctttagtgcaactggaaatggagcagggtattccgcgtaatccgtttattaatgccggtgcgctggtggtctgcgatatgttgcaagggcgattaagcgctcctcggcaacgtatgctggaagtcgtgcgcggcttaagtggtgtgtctgatatttcctacgatacggtggtagcgcgttccgaatttgaacattccgcgcgaaatgcggctatcgcctggctgatgaagtcgtttggcaatttccatcatgacgtgacaaccgttctgcaaaactactttcattactgcgctctgaaaatgagctgtgtagagctggcccggacgtttgtctttctggcgaatcaggggaaagctattcatattgatgaacctgtggtgacgccactgcaggcgcggcaaattaacgcgctgatggcgaccagcggtatgtaccagaacgcgggggagtttgcctggcgggtgggactaccggcaaaatctggcgttggtggcggtattgtggcgattgttccgcatgaaatggccatcgcagtctggagtccggaactggatgatgccggtaactcgcttgcgggcattgccgtccttgaacaattgacgaaacaattagggcgttcagtttattaa

SEQ ID NO: 3270 - DNA, 1389 bp, Escherichia coli
atgaccattactccggcaactcatgcaatttcgataaatcctgccaccggtgaacaactttctgtgctgccgtgggctggtgttgacgatatcgaaaacgcgcttcagctggcagcagcaggctttcgcgactggcgcgagacaaatatagattatcgtgctgaaaaactgcgtgatatcggtaaggctctgcgcgcccgtagcgaagaaatggcgcaaatgatcacccgtgaaatgggcaaaccaatcaaccaggcgcgcgctgaagtggcgaaatcggcgaatttgtgtgactggtatgcagaacatggtccggcaatgctgaaggcagaacctacgctggtggaaaatcagcaggcggttattgagtatcgaccgttggggacgattctggcgattatgccgtggaattttccgttatggcaggtgatgcgtggcgctgttcccatcattcttgctggtaacggctacttacttaaacatgcgccgaatgtgatgggctgtgcacagctcattgcccaggtgtttaaagatgcgggtatcccacaaggcgtatatggctggctgaatgccgacaacgacggtgtcagtcagatgattaaagactcgcgcattgctgctgtcacagtgaccggaagtgttcgtgctggagcggctattggcgcacaggctggagcggcactgaaaaaatgcgtactggaactgggtggttcggatccgtttattgtgcttaacgatgccgatctggaactggcggtgaaagcggcggtagccggacgttatcagaataccggacaggtttgtgcagcggcaaaacgctttatcatcgaagagggaattgcttcggcatttaccgaacgttttgtggcagctgcggcagccttgaaaatgggcgatccccgtgatgaagagaacgctctcggaccaatggctcgttttgatttacgtgatgagctgcatcatcaggtggaaaaaacactggcgcagggtgcgcgtttgttactgggaggggaaaagattgctggggcaggtaactactatccgccaacggttctggcgaatgttaccccagaaatgaccgcgtttcgggaagaaatgtttggccccgttgcggcaatcaccattgcgaaagatgcagaacatgcgctggaactggctaatgatagtgagttcggcctttcagcgaccattttcaccaccgacgaaacacaggccagacagatggcggcacgtctggaatgcggtggggtgtttatcaatggttattgtgccagcgatgcgcgagtcgcctttggtggcgttaagaagagtggctttggtcgtgagctttcccatttcggcttacacgaattctgtaatatccagacggtgtggaaagaccggatctga

SEQ ID NO: 3271 - DNA, 882 bp, Escherichia coli
atggatctgacccaactggagatgttcaacgcggttgccgaagctggcagcattacccaggctgcagcaaaagtgcatcgcgtgccgtcgaatctcactacccgtctacgccagctggaaacagaactgggggttgatctgtttattcgcgagaatcagcgtttacgtctctcgcctgccgggcataactttttacgctatagccaacaaattctcacgttagtggatgaagcgcggagcgttgtcgctggcgatgagccgcaaggtttattttctctgggatcgctggaaagcaccgctgcagtgcgcattccggccacgctggcggaatttaaccgtcgttatcccaaaattcagttttcactttccaccggcccttccggcactatgctggaaggtgtgctggagggaaaactgaatgcggcgtttattgatggacccattaaccatactgccatcgacgggataccggtataccgcgaggaactaatgatcgtcacgccacaaggacatgcgccagtaacccgtgccagtcaggtgaatggcagtaacatttatgccttccgcgccaattgttcgtatcgtcgccacttcgaaagctggtttcatgctgacggtgccgctccgggaactattcacgagatggagtcttatcacgggatgttggcctgtgtggtcgcaggagcaggcattgcgcttattccacgctcaatgctggaaagtatgccggggcatcaccaggttgaagcgtggccgttagctgagcaatggcgttggttaacaacctggctggtctggcgtcgtggtgcgaaaacgcgtccgcttgaggcatttattcaactgctggatgcgcctgactcggcaaaacagggttaccaatga

SEQ ID NO: 3272 - DNA, 1191 bp, Escherichia coli
atgacaacaaacactgtttcccgcaaagtagcgtggctacgggtcgttacgctggcagtcgccgcctttatcttcaataccaccgaatttgtccctgttggcctgctctctgacattgcgcatagttttcacatgcaaaccgctcaggtcggcatcatgttgacaatttatgcatgggtagtggcgctaatgtcattgccttttatgttaatgaccagccaggttgaacgccgcaaattactgatctgcctgtttgtggtgtttattgccagccacgtactgtcgtttttatcgtggagttttaccgttctggtgatcagtcgcattggtgtggcttttgcacatgcgattttctggtcgattacggcgtctctggcgatccgtatggctccagccgggaagcgagcacaggcattgagtttaattgccaccggtacagcactggcaatggtattaggtttacctctcgggcgcattgtggggcagtattttggctggcgaatgaccttcttcgcgattggtatcggggcgcttattacccttttgtgcctgattaagttacttcccttgctgcccagtgagcattccggttcattgaaaagcctcccgctattgttccgccgcccggcattgatgagcatttatttgttaactgtggtggttgtcaccgcccattacacggcatacagctatatcgagccttttgtacaaaacattgcgggattcagcgccaactttgccacggcattactgttattactcggtggtgcgggcattattggcagcgtgattttcggtaaactgggtaatcagtatgcgtctgcgttggtgagtacagcgattgcgctattgctggtgtgcctggcactgctgctacctgcggcgaacagtgaaatacacctcggggtgctgagtattttctgggggatcgcgatgatgatcatcgggcttggtatgcaggttaaagtgctggcgctggcaccagatgccaccgacgtcgcgatggcgctattctccgggatatttaatattggaatcggcgcgggtgcgttggtaggtaatcaggtgagtctgcactggtcaatgtcgatgattggttatgtgggcgcggtgcctgcttttgctgcgttaatatggtcaatcatcatttttcgccgctggccagtgacactcgaagaacagacgcaatag

SEQ ID NO: 3273 - DNA, 666 bp, Escherichia coli
atgttagatttgtttaaagcaataggcctggggctggtggtgttactgccgttagctaacccattaacaactgtcgcgttatttcttggcctggcaggcaacatgaacagtgccgaacgtaatcgtcagtcgttgatggcctcggtgtacgtatttgccatcatgatggtggcgtattacgccgggcaactggtgatggatacatttggcatttcgattcccggtctgcgaattgcaggcggcttaatcgtcgcgtttatcggttttcggatgctctttccgcaacagaaagcgattgattcaccggaagcgaaaagcaagtcggaagagctggaagatgaacccagtgccaatattgcttttgtaccactggcaatgccaagtaccgccggtccgggaaccattgcgatgattattagctcggcctccacagtgcgtcagagttcaaccttcgctgattgggtactgatggttgcgccgccgctgatctttttcctggtggcggttattttgtggggaagtctacgcagctctggcgcaattatgcggctggtgggcaaggggggtattgaagcgatctcccgtctgatgggattcctgctggtatgtatgggcgtgcagtttattattaacggcatcctggaaatcattaaaacgtatcattaa

SEQ ID NO: 3274 - DNA, 435 bp, Escherichia coli
gtgaaaaataccagcgatctgttcaatgaaattattccattgggtcgcttaatccatatggttaatcagaagaaagatcgcctgcttaacgagtatctgtctccgctggatattaccgcggcacagtttaaggtgctctgctctatccgctgcgcggcgtgtattactccggttgaactgaaaaaagtgttgtcggtcgacctgggggcactgacccgtatgctggatcgcctggtctgtaaaggctgggtggaaaggttgccgaacccgaatgataagcgcggcgtactggtaaaacttaccaccagcggcgcggcaatatgtgaacaatgccatcaattagttggccaggacctgcatcaagaattaacaaaaaacctgacggcggacgaagtggcaacacttgagcatttgcttaagaaagtcctgccgtaa

SEQ ID NO: 3275 - DNA, 384 bp, Escherichia coli
atgtccagacgcaatactgacgctattaccattcatagcattttggactggatcgaggacaacctggaatcgccactgtcactggagaaagtgtcagagcgttcgggttactccaaatggcacctgcaacggatgtttaaaaaagaaaccggtcattcattaggtcaatacatccgtagccgtaagatgacggaaatcgcgcaaaagctgaaggaaagtaacgagccgatactctatctggcagaacgatatggcttcgagtcccaacaaactctgacccgaaccttcaaaaattactttgatgttccgccgcataaataccggatgaccaatatgcagggtgaatcgcgctttttacatccattaaatcattacaacaactag

SEQ ID NO: 3276 - DNA, 219 bp, Escherichia coli
atgaaaccacttttatccgcaatagcaactgcgcttattctcttttctgcgcagggcgttgcggaacaaaccacgcagccggttgttacttcctgtggcaatgtcgtggttgttcccacatcgcaggaacaaccaccgtttgatttaaatcacatgggtactggcagtgataagtcggatgcgctcggcgtgccctattacaatcaacacgctatgtag

SEQ ID NO: 3277 - DNA, 1440 bp, Escherichia coli
atgtcaggatttaaagaagattttttatggggcggtgcggtagccgcacatcaattggaaggtggctggaatgaaggaggaaaaggcatcagtatcgctgatgtaatgactgctggcgctcacggggtgccgcgtgaagtgacagaaggcgttatcgacggacttaattatcccaatcatgaagcaattgatttttatcatcgctataaaacagatattcagttatttgccggaatgggattcaaatgctttcgaacttccattgcctggacacgtatctttccgcaaggtgacgaacaggagccgaatgaagagggtttacaattttatgatgatctcttcgatgaatgcctgaagcagggaatggaacctgtggtgacgctttcgcattttgagatgccttatcatctggtgacaaaatatggtggctggcgaaaccgtaaactgatcgacttttttatccacttcgcatcaacggtctttacgcgctataaagaaaaagtaaagtactggatgacgtttaacgaaatcaataatcaggtgaatttcagcgaaagcctgtgtccatttactaattccggtatcttgtatttgccagaggaagatctcaatgagcgcgaacaaataatgtaccaggcggtacattatgagttagttgccagtgccctggcggtacagactggaaaactgatcaatcctgaatttaatatcggctgtatgattgctatgtgccccatctatcctctgacgtgtgcacccaacgatatgatgatggccacgaaagcgatgcatcgtcgttactggtttactgatgttcatgctcgtggatattatccgcaacatatgctgaattactttgcaaggaaaggattcaacctcgatatcacaccagatgataacgcgattcttgccagaggttgtgtcgactttatcggctttagctactacatgtcttttacgacgcaattttcgccagataatccgcaactggattatgttgaaccacgagatttggtcagcaacccttatatcgatacatccgaatggggatggcaaattgatccggcagggctacgttattcactcaactggttctgggatcatttccaattgccgctgtttattgtcgaaaatggatttggtgcggttgaccagagacaagctgacggcacggtgaacgatcactatcgcattgattacttttcctcccatattcgggaaatgaaaaaagccgtagttgaagatggtgttgacttaattggctacaccccgtggggttgcattgacctggtttctgccggaacaggagaaatgaaaaaacgctacggaatgatttatgtcgataaagacaacgaagggaagggaacgctggaacggatacgtaaagcatcgttttactggtatcgggatctcatcgccaacaatggcgaaaatatatga

SEQ ID NO: 3278 - DNA, 1674 bp, Escherichia coli
atgaatataaagacgcttaacgtcagccttttgtctttttctattattacagcattgtttccattgaacgcgatggcaacaaaattaaccatagagcagcgccttgaattgcttgaaaatgaattgtcgcaaaataaacaagagctgaaagcaacacagaatgaactgggagtatataaatcccgactttcgaccttacaaaaaagcatcacggaaaacaaatataaatcagcctcgcttgctgaaatatcagcgacatctcccgtcgctgataacatcaaaaatgaaaacggtgaacagaactcggttaccgcagcgcatactataaatggatcgcagcaagttgccgttattgaaagtaaaggcgataaaaccactatcgaaagcgtgaccctgaaagatatcagtaaatatataaaggatgatattggattcagctatcaggggtacttccgctcaggctggggcaccggtaatcacggctcaccacaaacttatgcagcgggttctctgggacgttttggtaacgagatgagtggttggtttgacctgaccttaaatcagcgtgtttataatcaggacggtagaacggcaaatgcggtcgttacctatgatggaaacgtaggtcagcagtataacgatgcctggtttggtgacagtgctaatgaaaatatcatgcagttcagtgatatttatctgacaacgcgaggttttttacccttcgcacgagaggcagacttctgggtcggcaaacataaactcccgcaatatgagatccaaatgctggactggaaaaccttaaccacggatgttgccgcaggtgtggggattgaaaactgggcgcttggtgtagggctgtttgatatgtccttaagccgagatgatgtcgatgtttactctcgtgattttacgcgtaccagtcagatgaataccaattctgtggatgttcgttatcgcaatatcccgttatgggatgatgcgacgttgtcattaatggctaaatattccgcacctaataaaacggatcaacaacaagataatgaaaatgacgacagttattttgaaatgaaagatagctggatgctgacttctgttttacggcaaaacttgcaacgcgatacgtttaatgaatttacgttacaggttgccaataattcctatgccagcagttttgccagtttctcagatgccagtaatacgatggcgcatggtcgctattactatggtgaccataccaatgggatcgcctggcgtttaatctctcagggcgagatgtatctgactgacaatattattatggctaacgcgcttgtctattctcatggcgaagatgtttatagttatgaaagtggcgctcatagtgattttgacagtattcgcaccgtaataagaccggcctggatctggaatacatggaatcagacggggcttgaattaggctggtttaagcaacagaacaaaactcagcagggggtaacgctaaatgaatcggcttataaaacgacactctggcatgcattgaaagtgggtgaaagtattttaggttcacgaccagaaattcgcttctacgggacgtatatcaatattctggataacgaattatcgaattttaagtttaatgagaacagcaaagacgagtttatggccggcatccaggcggaagtctggtggtaa

SEQ ID NO: 3279 - DNA, 312 bp, Escherichia coli
atgtttgcagatgaagaacttgttatggagttactggtcaacgcggggcaggcacgttctgacgcgatggaagccatacgttgtgccgggcaaaaagactggcagggcgcaactcatctaatggccagttctgaatctgcctgtcttcaggcacataagattcagaccgcattaattagtcaggatgaaggctgtggcaaaataaaagttaatttaattctggttcatgcacaggatcatttgatgaatgcaatattatgccaggatttagccagggaaattatttcattaagaaaagaactctatgcctga

SEQ ID NO: 3280 - DNA, 1323 bp, Escherichia coli
atgggattaatggcatcattcgaacgtggaatggaacgttttcttgttccagttgctatcaagttaaactcacaaaaacatgttgcagcggtgagagatggattcgtttttacgtttccaattatcatggcaagctcattaattatattaattaactttgccatattatcgcccgacggttttattgccggattactgcatctgaacagcattttccccaaccttgaaaaagcacaagctatttttactccggtaatgaatggttctgtaaataccatgtcaattatgattgctttcctggtcgccaggaatgtggcgattagctatgagcaagatgatcttttatgcggattaacggcaataggagcattttttattgtttataccccataccagatgatagatgggcaggcattcctgacgaccaaatatctcggcgcgcaggggttgtttgttgctgttatcgttgcattgatcaccagtgaaatattttgtcgcttagctcgaaaccccaaaatcaccataacgatgccggcagctgtacctcctgcggtagcgcgttcatttaaagttttattgccaatattttttgtcatggtgttcttttccgcacttaattattgcctgacattgatatccccggcaggattaaatgatctcatttacacattaatccagacgccgctcaaacatatgggaacgaatatctttgcggtaattatcctgggagctgtgggtaatttcctgtgggtgctggggatccacggacctaataccacgtcggcaattcgagaaactgttttttctgaggctaatctggagaatctctcctgggccgctcaacacggcactacctggggcgcgccatatccgattacctggacttctattaatgatgcattcgccaactgcggcggttcaggtatgacgttgggattattgttggctattttcatcgcttctaagcgtgcggaataccgtgatctggcaaaagtgtcatttatccccggtattttcaatatcaatgaaccgataatgttcggccttcctattgtacttaaccccatcatgatggtgccgtttattatggttcccattgttaactgtgccattggttacttctttgtttcgatggaaattattccaccggttgcttatgccgtgccctggactacgcccggacctttaattgctttcctcggaaccgggggaaactggctggctttactggttggttttttatgtttaggtgtggcgacaatgatctatttaccttttgttattgccgccaacaaggtcaataacatgacaactaacggataa

SEQ ID NO: 3281 - DNA, 312 bp, Escherichia coli
atgaaaaagatattgttagtttgcgctgcgggcatgtcaaccagtatgctggttaaacgtatgattgatcatgctaccgctatttcacttgaagttaatatttccgcattggcgattgcagaggctaaagggaaaattaaaaataacgaagttgacgttgttttacttggtccgcaagttcgctttcagaaaccagagattgaagccgttgcacaggggaaaatgcctgtagccgttatcgagatgaaagactatggcacaatgaacggacaggcagttcttgaatttgcgatgaaactactgcaagagtaa

SEQ ID NO: 3282 - DNA, 699 bp, Escherichia coli
gtgatttttcaaaagattgcccgcttacttaaatccgagatcaatggcaattcatggcatgttggtgatttgttgccgtcagaagcggaactcgctgttcgttataatgtttcgcgtaataccctgcgtaaggcattatccctgctggaaggcgaaggaattattcacagaaagcatggttcaggaacatacattcaaaaaaagaattttgttgcacacattgatcacatgaacagtttcagtgaaattgcacataaaagcggcaaagaggcaggaagtcagattatgaaatttgaagtgcaggatgcttctcctactattgcgactgagctgaatttagtgactggtgagcaggtttattacataaagagactgcgattcattgaggataatgcagcacaattagaagaaacgtggatgtcagtggcacgttttcctgatttaaccgtatcgcatatgcaaaaatccaaattttcgtatattgagaacgaatgcgggatcaaaatcattggcacctttgaaactttctccccgacttttcctaccccagaaatcgccagtattttacggatcagcccacgggatcccatacttaaaattcagacccaggctgtggatagtaactctattccgctggattattcgttactttacagcaatattttcgagttccaggtaaagtactttttcccgcgataa

SEQ ID NO: 3283 - DNA, 900 bp, Escherichia coli
atgtcgcgaaaagatggggtgttggcgctactggtagtggttgtatgggggctaaattttgtggtcatcaaagtggggcttcataacatgccaccgctgatgctggccggtttgcgctttatgctggtcgctttcccggccatcttttttgtcgcacgaccgaaagtaccactgaatttgctgctggggtatggattaaccatcagttttgcgcagtttgcttttctgttctgcgccattaactttggtatgcctgctggactggcttcgctggtgttacaggcacaggcgttttttactatcgtgcttggcgcgtttactttcggtgagcgactgcatggcaaacaattggcggggatcgccttagcgatttttggcgtactggtgttaatcgaagatagtctgaacggtcagcatgtggcgatgctcggctttatgttgaccctggcggcagcatttagttgggcgtgtggcaacatcttcaataaaaagatcatgtcgcacgcaacgcgtccggcggtgatgtcgctggtaatctggagcgcattaatcccaatcattcccttctttgttgcctcgctgattctcgatggttccgcaaccatgattcacagtctggttactatcgatatgaccaccatcttgtctctgatgtatctggcatttgtggcgacaattgttggttatgggatctgggggacgttactgggacgctatgaaacctggcgggttgcaccgttatcgttactggtgcctgtagttggactggcaagtgcggcactattgttggatgaacgcttaacgggtctgcaatttttcggtgcggtgctcattatgaccgggctgtatatcaatgtatttggcttgcggtggcgtaaagcggtaaaggtcagaggctaa

SEQ ID NO: 3284 - DNA, 1188 bp, Escherichia coli
atgaacttatccttacgacgctctaccagcgcccttcttgcctcgtcgttgttattaaccatcggacgcggcgctacgctgccgtttatgaccatttacttgagtcgccagtacagcctgagtgtcgatctaatcggttatgcgatgacaattgcgctcactattggcgtcgtttttagcctcggttttggtatcctggcggataagttcgacaagaaacgctatatgttactggcaattaccgccttcgccagcggttttattgccattcctttagtgaataacgtgacgctggtggtgctcttttttgccctcattaactgcgcctattccgtttttgctaccgtgttgaaagcctggtttgccgacaatctttcgtccaccagcaaaacgaaaatcttctcaatcaactacaccatgctaaacattggctggaccatcggtccgccgctcggcacgctgttggtgatgcagagcatcaatctgcccttttggctggcagctatctgttccgcgtttcccatgcttttcattcaaatttgggtaaagcgcagcgagaaaatcatcgccacggaaacaggcagtgcctggtcgccgaaagttttattacaagataaagcactgttgtggtttacctgctctggttttctggcttcctttgttagtggcgcatttgcttcatgcatttcacaatatgtgatggtgattgctgatggggattttgccgaaaaggtggtcgcggttgttcttccggtgaatgctgccatggtggttacgttgcaatattccgtgggccgccgccttaacccggctaacatccgcacgctgatgacagcaggcaccctctgtttcgtcattgggctggtcggttttattttttccggcaacagcctgctattgtggggtatgtcagctgcggtatttactgtcggtgaaatcatttatgcgccgggcgagtatatgttgattgaccatattgcgccgccaggaatgaaagccagctatttttccgcccagtctttaggctggcttggtgctgcgattaacccattagtgagtggcatagtacttaccagtctgccgcctttctcgctgtttatcatcttagcgttggtgatcgttgttgcgtgggtgctgatgttaaaaggaattcgtgcaagaccgtgggggcagcccgcgctttgttga

SEQ ID NO: 3285 - DNA, 891 bp, Escherichia coli
atgatcaagaagacaacggaaattgatgccatcttgttaaatctcaataaggctatcgatgcccactaccagtggctggtaagtatgtttcacagcgtggtcgcgagagatgccagtaagccagaaataacggataaccattcttatggactgtgccagtttggtcggtggattgatcatctggggccactcgataacgatgaattaccttacgttcggctaatggattctgcccatcaacatatgcataactgtggtcgggaattaatgttggctattgttgaaaatcactggcaggacgcgcatttcgacgcttttcaggaagggttgctttcttttactgcggcattaaccgattacaaaatttatttgctgacgatccgtagcagtatggatgttctgacgggattgccgggtcgtcgggttcttgatgaatccttcgatcatcagttacgcaatgctgaacctctgaatctttatttaatgttgttggatatagaccgatttaaactggttaatgatacctacgggcatttaatcggcgatgtggtattacgcaccctcgcaacttacttagccagttggacgcgcgattacgaaacggtttatcgctacgggggcgaagaatttatcattattgtcaaagcgactaatgatgaagaagcatgtcgtgcaggtgtcagaatttgccagttagtcgataaccatgccatcacacattctgaagggcatatcaacattaccgtgactgctggtgtgagtcgtgcatttcctgaagagcctctggatgtggtcattggaagagcggacagggcaatgtatgagggtaagcaaaccggaaggaatcgctgcatgtttattgacgaacaaaatgtgattaaccgagtttaa

SEQ ID NO: 3286 - DNA, 2046 bp, Escherichia coli
atgacaacaatgaatcctttccttgtgcaaagcacactgccgtatctggctccccattttgatcaaattgccaaccatcactatcgcccggcattcgatgagggaatacagcaaaagcgggcagaaatagctgccatcgcgcttaacccgcaaacacctgatttcaacaatactattctggcactggaacaaagcggagaattacttacccgcgttaccagcgtcttttttgcgatgactgcggcgcataccaatgatgaattacagcgtcttgatgaacagttttccgctgaactggcggaacttgcgaatgatatctatctgaacggggaattattcgcgcgggtagatgctgtctggcaacgccgtgaatccctggggcttgatagtgaatccatccgcctggtggaggtgattcatcaacgttttgtccttgccggagccaaacttgagcaagctgataaagcaaaattaaaagtactgaatacagaagctgcgaccctgaccagccagtttaaccagcggttactggcagcaaataaatccggcggtctggttgtgaacgatgtcgcgcagctggcaggaatgagtgaacaagagattgcgcaggcggcagaggcggctcgcgagaaaggtctggataacaactggctgattccgctgctgaataccacccagcaaccagcgcttgctgaactgcgcgatcgcgcgacgcgtgaaaaactgtttactgcgggctggacgcgagcggaaaaaaatgatgccaatgatacccgcgctatcattcaacgtctggtggagatccgcgcgcagcaggcgaaactgcttggttttcctcattatgccgcatggaaaatcgccgatcagatggcaaaaacgccagaagcagcgctcaactttatgcgggaaattgttccagcggcgcgtcaacgtgcgagcgatgaattagcctccatacaggcggttatcgataagcagcagggcgggtttagcgcgcagccgtgggactgggcattttatgccgagcaggtaagacgtgagaaattcgatctcgatgaatcgcagctcaagccatattttgaattaaacacggtgttgaatgaaggtgtattctggaccgcgaatcagctcttcggtattaagtttgtcgaacgttttgatattcctgtctaccatcctgacgttcgagtgtgggaaatttttgatcataatggcgtggggctggcgttattttacggtgatttcttcgcccgtgattcaaaaagcggcggtgcatggatgggcaattttgttgagcaatcaacgctgaatgaaacgcacccggtaatttataacgtctgcaattatcagaaacccgctgccggtgagcctgcgttgttactctgggatgatgtaataaccttattccatgaatttggtcatacgctgcacggcctttttgcccgccagcgttatgccacgctttccggcaccaacacgccgcgtgattttgtcgaatttccgtcgcaaatcaacgaacactgggcaacacatccgcaggtattcgctcgctacgcccggcattatcagagcagggccgcaatgcctgacgaacttcaacagaaaatgcgtaatgccagtctgttcaataaagggtatgagatgagcgaactgcttagcgccgcacttctcgatatgcgctggcattgcctggaagaaaacgaagcaatgcaggatgtcgatgatttcgaattgcgggcgctggtggcggaaaatatggatcttcctgctataccgccacgctatcgcagcagttatttcgcccatatttttggtggcggatatgccgcaggttattacgcttatctgtggacgcaaatgttggccgatgatggttaccagtggtttgttgagcagggcggattaacgcgtgaaaatgggcggcgttttcgcgaggcgattctttccagaggtaacagcgaagatctggaacgcctgtatcgacaatggcgcggtaaggcacctcagattatgccgatgctgcaacatcgtggcttgaacgtataa

SEQ ID NO: 3287 - DNA, 747 bp, Escherichia coli
atgatcgttttagtaactggagcaacggcaggttttggtgaatgcattactcgtcgttttattcaacaagggcataaagttatcgccactggccgtcgccaggagcggttacaggagttaaaagacgaactgggagataatctgtatatcgcccaactggacgttcgcaaccgcgccgctattgaagagatgctggcatcgctccctgccgagtggagcaatattgatatcctggtaaacaatgccggcctggcgttgggcatggagcctgcgcataaagccagcattgaagactgggaaacgatgattgataccaacaacaaaggcctggtatatatgacgcgcgccgtcttaccgggtatggttgaacgtaatcatggtcatattattaacattggctcaacggctggtagctggccgtatgccggtggtaacgtttacggtgcgacgaaagcgtttgttcgtcaatttagcctgaatctgcgtacggacctgcatggtacggcggtgcgcgtcaccgacatcgaaccgggtctggtgggtggcaccgagttttccaatgtccgctttaaaggcgatgacggtaaagcggaaaaaacctatcaaaataccgttgcattgacaccagaagatgtcagcgaagccgtctggtgggtgtcaacgctgcctgctcacgtcaatatcaataccctggaaatgatgccggttacccaaagctatgccggactgaatgtccaccgtcagtaa

SEQ ID NO: 3288 - DNA, 687 bp, Escherichia coli
atgaccgtcgaaacgcaacttaatcccacacagcctgtcaatcagcagatttatcgtattcttcgccgcgacattgtccattgcctgattgcaccaggcacaccgttgtcggaaaaagaagtttctgttcgtttcaatgtgtcacgccagccggttcgtgaagcctttattaaactggcggaaaacggtctgattcaaattcgtccgcagcgtggcagctacgtcaacaaaatttccatggcccaggtgcgcaacggcagttttatccgtcaggccattgagtgcgcggtggcgcgtcgggcggcgagcatgattaccgaaagccagtgctaccaactggaacaaaatcttcaccagcaacgcattgccattgagcgcaagcaactggatgatttttttgaacttgatgacaacttccatcaactcctgacgcagattgccgactgtcaactggcgtgggataccattgagaacctgaaagcgaccattgatcgcgtgcgctatatgagtttcgaccacgtttctccaccagaaatgctgttacgccagcatcttgatattttctctgccctgcaaaaacgtgatggcgatgcggtagaacgtgcaatgacgcaacatttgcaggaaatcagcgaatccgtgcgccagatccgccaggaaaacagcgactggtttagcgaagagtaa

SEQ ID NO: 3289 - DNA, 204 bp, Escherichia coli
atgacgacctacgatcgtaaccgtaacgcaatcaccactggcagccgtgttatggttagcggcaccggtcacactggcaagatcctgtcgattgatactgaaggtctgaccgctgagcaaatccgccgcggaaaaaccgtagttgttgaaggttgtgaagagaaactggcaccactggacctgattcgtctcggcatgaactaa

SEQ ID NO: 3290 - DNA, 1461 bp, Escherichia coli
atgggaaatcatttgttatcagcaaaagcgacgctccctgtttatgatcgtaataacctggccccaagaattgttcatttaggctttggtgcatttcaccgtgcgcatcagggcgtgtatgccgatattcttgctacggaacatttcagtgactggggatattatgaggtcaacttaatcggcggcgaacagcaaattgccgatttacaacagcaagataatctttataccgttgcggaaatgtcggctgatgcgtggacggctcgcgtcgttggcgtcgttaaaaaagccttacacgtacaaatagatggcttagaaaccgtgttggctgcgatgtgtgaaccgcaaatcgcgattgtctctctgacaatcaccgaaaaagggtatttccactctccggcgaccggacagttaatgcttgatcacccgatggtcgttgccgacgtgcaaaatccccaccaaccgaaaactgcaacagggatgattgttgaggcgctggctcgccgtaaagcggcaggacttcccgcatttaccgtcatgtcatgtgacaacatgccagaaaacggtcatgttatgcgtgacgttgtcacttcctatgcgcaagccattgatgtaaaactggcacaatggatcgaagataacgtgactttcccatcaacaatggtggaccgtattgtgcccgcagtgacagaggatacgctggcgaaaatcgaacaacttaccggtgtgcgcgatccggcaggcgttgcctgtgaacctttccgcaagtgggtaattgaagataactttgttgccggacgtccggaatgggaaaaagcgggagccgaactggttagtgatgtgctgccttatgaagagatgaagttgcgcatgctcaatggcagtcattcattcctggcgtatctggggtatcttgccggatatcagcacattaatgactgcatggaagatgaacattatcgtcatgcagcgtatgccttaatgttgcaggaacaagcgccgacgctgaaagtgcagggcgttgatttgcaagattacgctaaccgattaattgaacgctatagcaacccggcgttacgtcatcgaacctggcagattgcgatggatggcagccagaaattgccacagcggatgttggattctgttcgctggcatctggcgcatgacagcaagttcgatctgctggcgctgggcgtcgcgggttggatgcgttatgtcggtggtgttgatgaacagggaaatccgatagaaatcagtgatccactgttacctgttattcagaaggcagtacaaagtagtgctgaagggacagcgcgcgtccagtcattgctggcaattaaggcgatctttggtgatgatttaccaggcaatagtttgtttacgacaaaagtaacggaagcgtacttgtctttattagcgcatggcgcgaaagcgaccgtggcgaaatattccgtgaagtaa

SEQ ID NO: 3291 - DNA, 1368 bp, Escherichia coli
atgacaatagaaaaacacgaaagaagtactaaggatttggtgaaagcagcagtatcgggatggttgggcactgcgcttgaatttatggacttccagttatattcgctcggcgcagcgttagtgtttcatgaaatattttttcctgaatcatcaacggcaatggcgttaattctggcaatgggaacctatggtgcaggttatgtggcacgtattgtcggagcatttattttcggcaaaatgggcgacagaatagggcgtaaaaaagtgctctttattaccatcaccatgatggggatctgtaccaccttaattggtgtgttaccgacctatgcacagattggtgtttttgcacccatcttgctggtgacgcttcgtattattcaggggttgggtgcaggtgcggaaatttccggtgccggtacgatgctggcggaatatgcgccaaaaggtaagcgcggaattatctcctcatttgtggctatgggaactaactgcggaaccttgagcgcaacagcaatctgggcctttatgttcttcattctcagtaaagaggaactgctggcgtggggatggcgtatacctttcctggcgagcgttgtcgtgatggtctttgctatctggttgcgtatgaatctgaaagaaagcccggtctttgagaaggttaacgacagcaaccaaccgacagcaaaacctgcacctgctggtagcatgttccagagcaaatccttctggctggcaacagggctgcgttttggtcaggctggtaactcaggtttaattcagactttccttgcaggctatttagtgcagacgttattgtttaacaaagcaattccaacagatgcattgatgatcagttcgattctcggctttatgaccattccgttccttggttggttatccgataaaattggtcgccggatcccgtatattattatgaatacctctgcgattgtgctggcatggccaatgctttctatcatcgtagataaaagctatgccccgagcaccattatggttgcactgattgtgattcataactgtgcggtgcttggattatttgctctggaaaacattaccatggcagaaatgttcggctgtaaaaaccgctttacccgaatggctatttctaaagaaattggtggtcttatcgcttccggttttggtcctatcctggcggggattttctgcaccatgacggaatcctggtatccgatcgccattatgatcatggcatattctgtgattggtttaatctctgcgctgaaaatgccagaagtgaaagaccgtgatttaagtgcgctggaagacgccgcagaagatcaaccacatgttgtaagagctgcgcaaccgtccagaagtctgtaa

SEQ ID NO: 3292 - DNA, 1020 bp, Escherichia coli
atgaaaagcattttaattgaaaaaccgaatcaactgtcgattatcgaacgtgaaatacccaccccgtcagcgggtgaagtacgagtaaaagttaaacttgccggaatttgtggttcagatagccatatttaccgtgggcataatccttttgcgaaatatccgcgcgtcattggtcatgaattctttggcgtcattgatgcagtgggtgacggcgtggaaagcgccagagtcggtgaacgcgttgctgtcgatccggtggtcagctgtgggcattgctatccgtgctctataggtaagccgaacgtttgtacgacacttgctgtattaggtgtgcacgctgacggtggtttcagtgaatatgccgtggttccggcaaaaaatgcgtggaaaattcctgaagcagtggccgatcaatatgcggtgatgatcgaaccttttaccattgcggctaacgttaccggtcatggtcaaccgactgaaaatgataccgttctggtttacggtgccggcccaatcggcctgacgatcgttcaggtattaaaaggcgtctataacgttaaaaatgtgattgttgccgatcgcattgatgaacgactggaaaaagcgaaagagagcggggcagactgggcgattaataacagccagacaccgcttggcgagagtttcgctgaaaaaggcatcaagccgactttaattatcgatgccgcttgtcatccttcaatcttgaaagaggccgtaacgctggcttctccagcggcacgtattgtattgatgggcttctccagtgaaccgtctgaagtgattcagcaaggaattaccggaaaagaactctctattttctcttcacgcttaaatgcaaataaattcccggtcgttatcgactggttaagtaaagggttaattaaaccagaaaaactaattacccatacatttgatttccagcatgttgcggatgccattagtttatttgaacaggatcaaaaacattgctgcaaagtcttactcactttttctgaataa

SEQ ID NO: 3293 - DNA, 1215 bp, Escherichia coli
atgaagatcgtaaaggctgaagtttttgttacctgtccggggcgtaatttcgtcacattaaaaatcaccactgaggacggtattacgggccttggggatgccaccctaaatggacgtgagctttccgtggcctcttatttgcaggatcacctttgtccgcagcttattggtcgcgatgcacaccgtatcgaagatatctggcagtttttctataaaggtgcttactggcgtcgcggtccggttacgatgtcggccatttcagcggttgatatggcgctgtgggatattaaagccaaagctgccaacatgccgctttaccagttactcggcggcgcgtctcgtgaaggggtgatggtttattgccataccaccggtcacagtattgatgaagctctggatgattatgcccgtcatcaggagctgggattcaaagccatccgcgtgcagtgcggaatccctggtatgaaaaccacctacggcatgtcgaaaggtaaaggtctggcttatgaacccgcaaccaaaggacagtggccggaagagcagctgtggtcgacggagaaatacctcgatttcatgccgaaattgtttgacgcggtacgtaacaagtttggttttgatgaacatctgctgcatgacatgcaccatcgcttaacgcctattgaagcggcgcgctttggtaagagcattgaagattatcgcatgttctggatggaagacccgacgcctgcggaaaaccaggaatgcttccgtctcattcgccaacataccgtcacacccatcgcggtgggtgaagtcttcaacagcatttgggactgcaaacaactgattgaagagcaactcatcgattatatccgcaccacgctgacccatgcaggcggaattaccggtatgcgtcggattgccgattttgcttcgctgtatcaggtacgtactggctcacacggtccttccgatttgtcaccagtctgcatggctgcggcgctgcactttgatctgtgggtccccaatttcggtgtccaggaatacatgggttattccgaacaaatgctcgaagtcttcccgcacaactggactttcgataacggctatatgcatccgggagaaaaaccgggtcttggcatcgaattcgatgaaaagctggcggcgaaatatccctatgaacctgcttatctgccagtcgcacgtctggaagatggcacgctgtggaactggtaa

SEQ ID NO: 3294 - DNA, 327 bp, Escherichia coli
atgattaaaacaacgttactattttttgctactgcgctgtgtgaaattattggatgctttttgccctggctgtggttgaagcgaaacgccagtatctggctgttgcttccggcggggatttcactggcgctgtttgtctggttgttaacgttgcatcctgcggcgagtgggcgtgtttacgcggcttatggtggcgtttatgtctgcacggcgttgatttggctgcgcgttgtggatggcgtgaaactgactctttatgactggacgggggcgttaattgcgctttgcggcatgttgatcattgttgcgggctgggggcgcacgtag

SEQ ID NO: 3295 - DNA, 342 bp, Escherichia coli
atgaaaatcactctcagcaaacgaatcggcctgctcgcttttctgctgccttgcgcactggcattgagcacaactgttcatgccgaaactaacaaactggtgattgagtctggcgacagtgcacaaagccgccagcgcgccgctatggaaaaagagcaatggaatgacacgcgtaatctgcgccagaaagtgaataaacgcactgaaaaagagtgggataaagccgacgctgcttttgataaccgcgataaatgtgagcaaagcgccaacatcaatgcctactgggagccaaatactttgcgctgcctggaccgtcgaactggccgcgttattatcccctaa

SEQ ID NO: 3296 - DNA, 561 bp, Escherichia coli
atgccaagcgcccacagtgttaagctacgcccgctggagcgtgaagatttacgctatgtacatcaactcgacaataacgccagtgtgatgcgttactggtttgaggaaccctacgaagcctttgttgaactctctgatctgtatgataagcatattcacgatcagagcgaacggcgctttgtggtggaatgtgacggcgaaaaagccggtctggtggagctggtggaaattaaccatgttcatcgccgcgcagaatttcagataattatctccccggagtatcaggggaaaggtctggcaacccgtgccgccaaattagcaatggactatggcttcaccgttctcaatctctataagctgtatctgatcgttgataaagagaatgaaaaagcgattcacatttaccgcaagcttggctttacggttgaaggtgaattgatgcatgagttctttattaatggtcaatatcgtaatgccattcgcatgtgtatattccagcatcagtatctggctgagcacaaaacaccgggtcagactctcctgaagccgaccgcacaatag

SEQ ID NO: 3297 - DNA, 747 bp, Escherichia coli
atgattgagaatcatctctactctcaggtgactgttgtgaaatacaaattactgccatgcttactcgcgatattactcacaggatgtgaccgcacagaggtaacactttcatttaccccggagatggccagtttctctaatgaattcgattttgatccgctgcgtggtcccgtaaaagatttcactcagacattaatggatgagcaaggtgaagtgacgaaacgtgtttcggggactttgtcggaagaaggctgttttgattctctcgaattactggatctggaaaataataccgtggttgccctggtactggacgccaattattaccgtgatgccgagacgctggagaaaagagttcgtttgcagggaaaatgccagctagcagaattaccttctgccggggtgagttgggaaaccgatgataatggtttcgtgattaaagccagcagcaaacagatgcagatggaatatcgctatgatgatcaggggtatccgctgggtaaaaccacgaaaagtaacgataaaacattatctgtcagcgccacgccatcaacggacccgatcaaaaaattagattacacagcggttactttactgaataatcaacgggttggaaatgtaaaacagagctgtgaatatgacaatcacgccaatccggtggactgtcagctaatcattgttgatgaaggagtaaaacccgccgtcgaacgggtttacaccatcaaaaatacgatcgattattattaa

SEQ ID NO: 3298 - DNA, 306 bp, Escherichia coli
atgaaactctcaacctgctgtgccgcgcttctgctcgccctcgcctcacccgcggtactcgccgcgccgggatcctgtgagcgcatacagagcgatatatcacagcgcattatcaataatggcgtacccgaaagcagcttcacgttaagtattgtacccaatgaccaggttgatcagcctgattcccaggtcgtcgggcattgcgctaatgatacgcataaaattctctacacccgtaccaccagcggtaacgtctctgctcccgcgcagtctacccaggataacgcgcctgctgaaccgcagtaa

SEQ ID NO: 3299 - DNA, 2427 bp, Escherichia coli
atgtccaaaaatgaacaaatggtgggcatcagccgcagaacactcgttaaatctaccgcgataggttctctggcgctggctgcaggcggtttttctttgccgtttaccctgcgcagtgcagaagcagcggtacaacaggccaacgaaaaagtggtctggggtgcctgttccgtcaactgtggtagccgctgtgcacttcgtctgcatgttaaagataatgaagtgacctgggtggaaactgacaacaccggcagcgacgagtatggcaaccatcaggtacgcgcctgtttgcgcggtcgctccatccgtcggcgtattaatcatcccgatcgcctgaattacccaatgaaacgcgtgggcaaacgcggcgaaggcaaattcgaacggattagctgggatgaagccctagatactatcgccagtagcctgaaaaaaaccgtcaaacaatatggcaatgaggctgtatatattcagtactcttcggggattgttggcggcaatatgacccgctcttctccatcagcctcggcggtcaaacgcctgatgaactgctacggcggttcactaaatcagtatggctcctacagcactgcgcaaatttcctgtgccatgccctacacctacggcagtaatgatggcaacagcaccacggatattgaaaacagcaagctggtcgtgatgtttggtaacaacccggctgaaacccgcatgagcggcggtggcatcacttatcttcttgaaaaagcacgcgagaaatcgaacgcaaaaatgattgttatcgatccgcgatataccgatacggctgctggtcgtgaagatgaatggcttcctattcgcccgggcaccgatgccgcgctggttgcgggtattgcctgggtattgattaacgaaaatctcgttgatcaaccttttctcgataaatactgcgtcggctatgacgaaaaaaccttacccgcagatgcaccaaaaaatggtcactataaagcctatattcttggtgaaggtgatgataaaacagcgaaaacgccgcagtgggcttcgcaaattaccggtatcccggtggaccgtatcatcaagctggcgcgtgaaattggcacagcaaaacccgcttatatctgccagggctgggggccgcaacgccaggcaaacggtgagctgacggcacgcgctattgctatgttgcctattttgacgggcaatgtcggcatcagcggcggaaatagtggcgcgcgtgaatcgacctataccattaccatagaacgcctgccggtgctggataatccggtcaaaacgtcaatctcctgcttcagctggacggatgctatcgatcatggcccgcaaatgacggcaatccgcgacggcgtccggggcaaagataaactggatgtgcccattaagttcatctggaactacgcgggaaataccctggttaatcagcattctgacatcaacaaaacgcatgaaattctgcaggacgaatcgaaatgcgaaatgattgtggtcatcgaaaactttatgacctcatcggcaaaatatgccgacattctgctgccagacctgatgaccgttgagcaggaagatattattcctaacgattacgccggtaacatgggatatctcattttccttcagccagtcaccagcgaaaaattcgaacgcaaaccgatttactggatcctgagtgaagtcgcgaaacgtcttggacctgacgtctatcaaaagttcactgaaggtcgcactcaggaacaatggttacaacatctgtacgccaaaatgcttgccaaagatccggcgttaccgtcttacgacgaactgaaaaaaatgggtatctataagcgtaaagatcccaatggtcattttgtcgcctacaaagcatttcgtgacgaccccgaggcaaatccacttaaaacgccttccggtaagattgaaatttattccagcaagctggcggaaattgcccgtacctgggaactggaaaaagatgaagtgataagcccactgccggtttatgcctcaacctttgaaggctgggactcccctgaacgtagtacctttccactgcaactgtttggtttccattacaaatcccgtactcactcgacctacggcaacattgatgtcctgaaggctgcctgccgtcaggaggtgtggatcaaccctatagacgcacataaacgtgggattgccaacggcgatatggtgcgggtgtataaccatcgtggcgaagttcggctaccagccaaagtgacaccacgcattctccctggagttagtgctatgggccagggagcctggcacgaggccaatatgtctggcgataaaatcgaccatggcggctgtgtgaatacgctaaccactctgcgcccttcaccactggcgaagggaaacccgcagcacactaatctggtcgagatcgaaaaaatataa

SEQ ID NO: 3300 - DNA, 2397 bp, Escherichia coli
atgaaggctgaaatcagccgtagaagtctgatgaaaacctccgcacttggcagtcttgcgctggcaagcagtgctttcactctgccattttcccaaatggtccgagcggcagagacaccggtagaagagaaagcggtctggagttcctgcaccgttaactgcgggagccgctgtctgttacgtttgcatgtgaaagatgacaccgtgtactgggtggagtctgatacgacaggagacgacgtttacggtaatcatcaggttcgggcatgtttacgcgggcgctctatccgccgacggatgaatcatcctgacaggttgaaatatcccatgaagcgcgtcggcaagcgcggtgaaggtaaatttgaacggataagttgggatgaagccctggataccatcagtgataatcttcggcggatcctgaaagattacggcaatgaggctgtacatgtcctgtacggaacaggcgtagatggcggaaacatcaccaactcgaacgtcccgtaccgtctgatgaactcttgcggtggttttctcagtcgctatggcagctacagtaccgcacagatcagtgccgcgatgagttatatgttcggtgccaatgatggcaacagcccggatgatatcgccaatacgaaactggtcgttatgttcggaaataacccggcagaaacccggatgagcggcggtggtgtcacttactacgtcgagcaagcccgcgaacgttcaaatgcaagcatgatcgtcatcgatccacgttataacgacactgctgccgggcgtgaagatgaatggctgcccattcgccctggcaccgatggcgcactggcctgtgcgattgcctgggtactgattactgaaaacatggtcgatcagccatttctcgacaaatattgtgttggttacgatgaaaaaacgctgcccgccaacgcaccacgtaacgcgcattataaagcctatattctgggcgaagggcctgacggcatagctaaaacgccggaatgggcagcaaaaatcaccagcatcccggcagaaaaaattatccagttggcacgagagatcggttcagcaaaaccggcttatatttgtcagggttgggggccacaacgacattccaacggcgagcaaacatcccgcgctattgccatgctttccgttctcaccggtaacgtcggcataaacggcggcaactcaggtgtacgcgaaggtagctgggatctgggagtagaatggttcccgatgctcgagaatcctgttaaaacgcagatttccgtctttacatggacagatgccatcgaccacggtacggaaatgaccgcgacccgtgatggtgttcgtggaaaagaaaaactggatgtccccatcaagtttttatggtgctacgccagtaacacattgatcaatcaacatggcgacatcaatcacacccatgaggtgcttcaggatgacagcaagtgcgagatgattgttggcattgaccacttcatgactgcctcggctaagtattgcgatatcctgttgcccgacctgatgccaacagagcaagaagaccttatctctcatgaatctgcagggaatatgggctatgtgatcctcgcccaacccgcaacctcagcaaaatttgaacgcaaacccatctactggattctgagtgaagtcgccaaacgcttaggaccagacgtttatcaaacctttactgaaggtcgcagtcagcatgaatggatcaaatatctccatgcgaaaacgaaggaacgtaaccctgagatgcccgactacgaggagatgaaaacgaccgggatctttaagaaaaaatgcccggaagaacactacgtcgctttccgcgcattccgtgaagatccacaggcaaacccgttgaaaacaccttcggggaaaatcgaaatttattctgaacgactggcgacgattgcggatacctgggaattgaaaaaagatgaaattattcatccccttccagcttatacgccaggttttgatggctgggacgatcccctgcggaaaacctatccactgcagttaacgggcttccactacaaagcgcgtacccactccagctacggcaatattgatgtgttacagcaggcctgcccacaagaggtgtggatcaaccctattgatgctcaggcacgcggtatccgtcatggcgataccgtgcgggtatttaacactaatggagaaatgctgattgccgcaaaagtgactccgcgtattctgcctggcgttaccgccatcgggcaaggtgcgtggcttaaagcggatatgtttggtgaccgggtcgatcacggcggcagtatcaatattctgacctctcaccgcccttcaccgctggcaaagggaaacccgtcgcacagcaatcttgtccagatcgaaaaggtttaa

SEQ ID NO: 3301 - DNA, 618 bp, Escherichia coli
atgaccacacaatatggattttttatcgattccagccgctgtactggctgtaaaacctgcgaactggcgtgcaaagattttaaagatcttggcccggaagtcagtttccgccgtatttatgaatatgctggcggcgactggcaggaagataatggcgtctggcaccagaacgtgttcgcttattatctctccatctcctgtaaccattgcgatgaccccgcatgtacaaaagtctgccccagcggcgcaatgcataagcgtgaagatggctttgtggtggttgatgaagatgtttgtatcggctgccgctactgccacatggcttgtccgtacggcgcaccacagtacaatgctgaaaaagggcacatgacgaagtgcgatggttgttattcgcgcgtcgccgaggggaaacaacccatatgtgtcgaatcctgcccgctgcgtgcacttgaattcggtccaattgaagagctgcgccagaagcacggcactctggctgccgttgcgccactgccgcgcgcgcatttcacaaaacccaatatcgttatcaaacctaacggcaacagccgcccgaccggcgataccactggttatctggctaatccggaggaagtgtaa

SEQ ID NO: 3302 - DNA, 855 bp, Escherichia coli
atgggaaatggatggcatgaatggccactggttatctttaccgtattgggtcaatgcgtagtaggcgcgctgattgttagcggaattggctggttcgccgccaaaaatgacgcagaccgtcagcgtattgtccgtggcatgtttttcctctggctgttgatgggcatcgggtttattgcctctgtcatgcacctggggtcgccactgcgggcgtttaactcgctgaatcgaatcggagattctggtctgagtaacgagattgctgccggttccatattttttgccgttggcggattatggtggctggtggcagtcatcggtaaaatgccgcaagcgttggggaaactctggttacttgtcagcatggcgctcggcgtcattttcgtctggatgatgacctgcgtgtatcaaatcgacacagtgccaacctggcataacggttacactacgctggctttcttcctgacagtattgttgagcggtccaatacttgctgccgcaattctgcgggcagcccgcgttacatttaataccacaccatttgccatcattagcgttctggcgctgatcgcttgtgccggggtgattgtgctgcaaggtttgtctctggcgtctattcactcatccgtacaacaagccagcgcactggtaccagattacgcctccttacaggtctggcgtgtggtattgttatgcgcaggtctaggatgctggctttgtccgctcattcgtcgccgtgaacctcacgttgccggacttgttctggggttaatcctcattcttggcggtgaaatgatcgggcgtgtgctcttttatggcctgcacatgacggtaggaatggctattgcaggttaa

SEQ ID NO: 3303 - DNA, 615 bp, Escherichia coli
atgacccatttttcacagcaagataatttttctgtcgcggcgcgcgtgttgggcgcgctgttttattacgctccagagagtgcggaagccgcacctctggttgcggtactcaccaatgacagctgggaaactcagtggcctctaccagaagcgtcattagcgccgctggtgactgcttttcagacacagagtgaagagactcacgcccaggcctggcagcgtttgtttgtcggcccgtgggcactgccgtcaccgccgtggggatcggtctggctggatcgcgaatctgtgctgtttggcgattcaacattggcacttcgtcagtggatgcgcgagaaaggcattcagttcgaaatgaagcaaaacgaaccggaagatcattttggttcactgctgctgatggctgcgtggttggcggagaatggtcgccagacagaatgcgaagaattgctggcatggcacctttttccgtggtcaacacgttttcttgacgtttttatcgaaaaagcagaacaccctttctaccgtgcactgggtgaactcgctcgcttaacgctggcgcaatggcaatcacaactgttgattcctgtcgcggttaaaccgctgtttcgatag

SEQ ID NO: 3304 - DNA, 1257 bp, Escherichia coli
atgttccgccgtctgcttatcgcaacaatcgtcggtattcttgcggcctttgccgttgccgggtttcgtcatgcgatgctgctactggagtggctgttcctcaataatgactccggcagtctggtcaatgcagcgacaaatctttccccgtggcgacggctgctaaccccggcgctcggcggactggcggcgggtttgttgctgatgggctggcagaaatttacccagcaacgccctcatgcgccgaccgattacatggaagcgttgcaaaccgatggtcagtttgattacgcagcaagcctggttaaatcgcttgcctctctactggtagtaaccagcggcagtgcaattggtcgcgaaggtgcgatgattcttttagctgcccttgcagcctcgtgttttgcccaacgttttacgccacgccaggagtggaaattatggatcgcctgtggagctgcggcgggaatggctgcggcctatcgcgccccgcttgctggcagtttatttatagccgaagtgctgtttggcactatgatgttggcctctctcggcccggtgattatttccgccgtcgtggcgttgctgattagcaatcttattaatcatagcgacgcattactctacagcgtacaactctcagtgacggttcaggctcgtgactatgcgctgattatcagtacaggtgtgctggcaggtctgtgcggaccactgttgttaacgttaatgaacgcctgtcatcgtggatttgtgagtctcaagcttgcgccgccctggcaactggcactgggcgggttgatcgtgggtctgctttccctgttcacacctgcagtgtggggcaacggctatagcaccgtacaatcctttttaaccgctccgccactgttaatgatcattgccgggatcttcctctgtaaactgtgtgccgtgctggcgagtagtggttctggcgcgcccggtggtgtctttacaccgacgctatttatcggtcttgccattggcatgttgtatggtcgtagcctgggattatggttacctgatggcgaagaaattacgcttttactcggattgacagggatggcgacactgttggcggcgaccacgcacgcgccgattatgtcgacgttgatgatatgtgaaatgaccggggagtatcagctactccccggtttattgattgcctgcgtaattgcgtcggtaatttcgcggacgttacaccgtgactctatctaccgccagcacactgcgaagcatagctaa

SEQ ID NO: 3305 - DNA, 696 bp, Escherichia coli
atgctgaagcgtttctttattaccggtacagacacttctgtagggaaaacggtggtttcccgcgcattgctacaagcgttagcctcccagggaaaaacggttgcgggatataaacccgtagcgaaggggagcaaagagacacccgaagggctgcgtaataaagatgccctggtgttgcagagtgtttcaaccatcgaactgccttatgaagcagttaatcctatcgcgttaagcgaagaagaaagtagcgtggcgcacagttgcccaatcaattacaccctcatttcaaacggcctggcaaacctgaccgataaagtcgatcatgtcgtggtagaagggactggcggctggcgcagtctgatgaatgatttgcgtccgctctctgaatgggtggtgcaggaacaactgccggtgttgatggttgtcggtattcaggaaggttgcattaaccatgcactgctaacagctcaggcgattgccaacgacgggctgccgctcattggctgggtggctaaccgaatcaacccaggactggcgcattatgcggaaatcattgatgtgctcggtaaaaaacttccggcaccgctcattggtgaactgccttatctgccgcgcgccgaacagcgtgaactggggcaatacatccgcttagctatgcttcgcagtgtgctggcggtagatagagtcacggtgtaa

SEQ ID NO: 3306 - DNA, 1221 bp, Escherichia coli
gtggttgctgaaaatcagcctgggcacattgatcaaataaagcagaccaacgcgggcgcggtttatcgcctgattgatcagcttggtccagtctcgcgtatcgatctttcccgtctggcgcaactggctcctgccagtatcactaaaattgtccgtgagatgctcgaagcacacctggtgcaagagctggaaatcaaagaagcggggaaccgtggccgtccggcagtggggctggtggttgaaactgaagcctggcactatctttctctgcgcattagtcgcggggagattttccttgctttgcgcgatctgagcagcaaactggtagtggaagagtcgcaggaactggcgttaaaagatgactcgccattgctggatcgtatcatttcccatatcgatcagttttttatccgccaccagaaaaaacttgagcgtctgacttcgattgccataaccttgccgggaattattgatacggaaaatggtattgtacatcgcatgccgttctacgaggatgtaaaagagatgccgctcggcgaggcgctggagcagcataccggcgtaccggtttatattcagcatgatatcagcgcatggacgatggctgaggccttgtttggtgcctcacgcggggcgcgcgatgtgattcaggtggttatcgatcacaacgtgggggctggcgtcattaccgatggtcatctgctacacgcaggcagcagtagcctcgtggaaataggccacacacaggtcgacccgtatgggaaacgctgttattgcgggaatcacggttgcctcgaaaccatcgccagtgtggacagtattcttgagctggcacagctgcgtctcaatcaatccatgagctcgatgttacatggacaaccgttaaccgtggactcattgtgtcaggcggcattgcgcggcgatctactggcaaaagacatcattaccggggtaggcgcgcatgtcggtcgcattcttgccatcatggtgaatttatttaacccacaaaaaatactgattggctcaccgttaagtaaagcggcagatatcctcttcccagtcatctcggacagcatccgtcagcaggcccttcctgcgtatagtcagcacattagcgttgagagtactcagttttctaaccagggcacgatggcaggcgctgcgctggtaaaagacgcgatgtataacggttctttgttgattcgtctgttgcagggttaa

SEQ ID NO: 3307 - DNA, 894 bp, Escherichia coli
atgaatattgaacttcgtcatctgcgttactttgtcgctgttgcagaagagctgcatttcgggcgtgccgctgcccgcctgaatatttcgcaaccacctctaagtcagcagattcaggcgctggagcaacaaattggtgcccgactgctggcacggaccaatcgcagtgtattgctgacggaagcaggaaaacagtttcttgtagatagtcggcaaatcctgtctatggtggatgatgctgccgctcgcgctgaaaggctgcatcagggcgaagcgggggagttgcgcattggttttacttcgtccgctccttttattcgggcggtgtccgatacgttatcgctgtttcgccgtgattatcccgatgtccatttacaaacccgcgaaatgaacactcgcgagcaaatcgctccgctcattgaaggaacgctggatatgggattgctgcgtaacacagcgttaccggagacgcttgaacacgcagtcatcgtccatgaaccgcttatggcgatgatcccgcacgatcatcccctggcaaataacccgagtgtaacgctggctgaactggcgaaagaaccctttgtcttttttgatccgcacgtcggaacagggctgtatgacgatattctcgggctgatgagacgttacaatttgacgcccgtcatcactcaggaggtgggtgaggcaatgaccatcatcggtctggtttccgccggtctgggtgtttcaattttgcctgcgtcatttaaacgtgttcagctcaacgaaatgcgctgggtgccgattgctgaagaggatgcggtttctgaaatgtggttggtctggccgaaacatcatgaacaaagtccggctgcgcgtaactttcgtattcatctgctgaatgctctcaggtga

SEQ ID NO: 3308 - DNA, 1254 bp, Escherichia coli
gtgagccgtactacaactgttgatggcgctccggcaagcgacactgacaagcaaagcatttctcagccaaatcaatttattaaacgcggtacgccgcaatttatgcgcgtcaccctggcgcttttctctgccggactggcaaccttcgcacttctctattgtgtgcaacctatccttccggtgctttcgcaggagtttggcttaacacccgcgaacagtagtatttcactgtccatttcaacggcgatgttggctatcggtttgctgtttactggcccgctatccgatgccattggtcgcaaaccagtgatggtcacggcgctactgttggcctccatttgtacgttactttcgacaatgatgaccagctggcacggcattttgattatgcgcgccttgattgggctttcgttaagtggggtggcagccgttggcatgacttatcttagcgaggaaatccaccccagtttcgtggccttttcaatggggttgtatatcagcggcaactcaattggcggcatgagcggacgcttaattagcggtgtcttcacggactttttcaactggcgaattgctctggcggcaatcggttgtttcgcgctggcctcggcgttgatgttctggaaaatcctccctgaatcacgccattttcgcccgacttcgctgcgtcctaagacgttattcatcaactttcgtctgcactggcgtgaccggggattaccgttattgttcgcagaaggctttttgctgatggggtcgttcgtcacgctgtttaattacatcggctataggttgatgctttccccctggcatgtcagtcaggccgtggttggcttattatcgctggcttatttgaccggtacatggagctcacccaaagccggaaccatgaccacccgctatggacgcggtccggtgatgttgttttcgacgggggttatgctgtttggtttactgatgaccttattcagctcgctgtggctgatctttgccggaatgttactcttctcagccggattcttcgcagcccactccgttgccagcagctggatcggcccccgcgcaaaacgcgctaaaggccaggcctcctcgctgtatctgttcagttactatctggggtcgagtattgccgggacgctgggtggtgttttctggcataactatggctggaacggcgtcggcgcatttattgctctgatgctggtcattgctctgctggtcgggacgcgtttgcatcatcgtctgcacgcctga

SEQ ID NO: 3309 - DNA, 309 bp, Escherichia coli
atgaaaaaagtattagctctggttgttgccgctgctatgggtctgtcttctgctgcctttgctgcagagactgcgaccacacctgctccgactgcgacgaccaccaaagcagcgcctgcgaaaaccacacatcataaaaaacagcataaagcagcacctgcccagaaagcgcaggcggctaaaaagcatcataaaaatgccaaagctgaacagaaagcccctgaacaaaaagcgcaggcggcgaagaaacacgccaagaaacacagccatcagcaaccggcaaaacctgctgcacaacccgcagcgtaa

SEQ ID NO: 3310 - DNA, 822 bp, Escherichia coli
atgcgtacaaccattgctgtagtgttgggtgcaattagtttgacgtctgcttttgtgtttgcagataaaccagacgttgccaaatcggcaaacgatgaggtcagcaccctgttttttggtcatgatgatcgtgtgccagtgaatgacacgacccaatcaccgtgggatgcggttggccaactggaaacggccagcggcaatttatgtacggcgacactgattgcacccaatctggcattaacggcaggacactgtttattgacgccgccaaagggtaaagccgataaagcggtagcgctgcgtttcgtgtcaaataaaggtctttggcgctatgagatccacgacatagaaggccgcgttgatccgacactgggaaagcggttaaaagcagatggggatggctggattgtacctcccgcagctgcgccctgggacttcggtttgattgtgctacgtaatcccccttctggcattacaccgttgccgttatttgagggagataaagccgcgcttaccgccgcattaaaagcggctggtcgtaaagtgactcaggcgggctaccctgaagatcatctcgatacgttgtacagtcatcaaaactgtgaagtgactggctgggcgcaaacgtcggtgatgtcgcatcagtgcgataccttgccgggtgacagcggttcgcctctgatgttgcataccgatgacggctggcaattaattggggtgcaaagctcggctcctgccgcgaaagatcgctggcgcgccgataaccgggccatttctgttaccggttttcgcgacaagctggatcaactgtcgcaaaaataa

SEQ ID NO: 3311 - DNA, 330 bp, Escherichia coli
atggcgcagtttgaatgggttcacgccgcctggctggcattggcaatcgtgctggaaatcgttgctaacgtctttttgaaattttctgacggctttcgtcgcaaaatatttggcttgctctctctggcggcggtgctggctgcctttagtgcgctttctcaggccgttaaagggatcgacttgtctgtcgcttatgcattgtggggcgggtttggtattgccgccacgttagccgcaggttggatcttgtttggtcaaaggttaaatcgtaaaggctggattggcctggtgctgctgttggctggaatgatcatggtgaaacttgcctga

SEQ ID NO: 3312 - DNA, 366 bp, Escherichia coli
atgtatatttattggattttattaggtctggctattgctacggaaattaccggtacgctgtcaatgaaatgggcgagcgtcagtgagggaaatggcggctttattttaatgctggtgatgatttctctgtcgtatatatttctctctttcgccgttaaaaaaatcgccttaggcgtggcttatgcgctgtgggaaggtattggtattttatttattaccttgtttagcgttttgttattcgacgaaagtttatcgctgatgaaaattgccgggttaaccaccctggtggccgggattgtgttgatcaagtcaggtacccgtaaagcgcgtaaacctgaactggaggtgaaccatggcgcagtttga

SEQ ID NO: 3313 - DNA, 1035 bp, Escherichia coli
atggcaaagccgatcatcacgctcaatggcctaaaaatcgtcattatgttgggaatgctggtcattattctctgcggtatccgttttgccgccgagatcatcgtgccgtttattctcgcattatttattgctgttattcttaacccgctggtgcaacacatggtccgctggcgtgtgccgcgtgtactggcggtgtcgattttgatgaccatcatcgtgatggcgatggtgttgctgttagcttatctgggttccgcgctcaatgagttgacgcggacgttaccgcaatatcgcaactctattatgacgccgctgcaagcgattgaaccgttgttgcaacgcgtagggattgatgtctcagttgaccagctggcgcattacattgatccgaacgcggcgatgacgttgctcaccaacttattgacgcagttatctaatgccatgtcatcaatctttttattgctgctgacggtgctgtttatgttgctcgaagtgccacaattacccggaaaatttcagcaaatgatggcgcgtccggttgaagggatggcggcgattcagcgtgcgattgacagtgtgtctcattatctggtgctgaaaacagccatcagcatcatcaccggcctggtcgcctgggcgatgctcgccgcactcgatgttcgcttcgcttttgtctggggattgctggcctttgcgcttaattacatcccgaatattggttcagttctcgcggcaatcccccctatcgctcaggtactggtgtttaatggcttctacgaagcgttgctggtgctggcgggatatctgctgattaatctggtcttcggcaatattctggagccgcgcatcatggggcgtgggctggggctttccacattggtggtatttttgtcgttgattttttggggatggttgttaggaccggtgggtatgctactttccgtgccgttgacaattattgccaaaattgcgcttgaacaaacagcgggaggtcaaagcatcgccgttctgttaagcgatctcaataaagagtga

SEQ ID NO: 3314 - DNA, 1389 bp, Escherichia coli
atgtctggaggattagttacagctgcatacattgttgccgcgatcctgtttatcttcagtctggccggtctttcgaaacatgaaacgtctcgccagggtaacaacttcggtatcgccgggatggcgattgcgttaatcgcaaccatttttggaccggatacgggtaatgttggctggatcttgctggctatggtcattggtggggcaattggtatccggctggcgaaaaaagttgaaatgaccgaaatgccagaactggtggcgatcctgcatagcttcgtgggtctggcggcagtgctggttggctttaacagctatctgcatcatgacgcgggaatggcaccgattctggtcaatattcacctgacggaagtgttcctcggtatcttcatcggggcggtaacgtttacaggttcggtggtggcgttcggcaaactgtgtggcaagatttcttctaaaccgttgatgctgccaaaccgtcacaaaatgaacctggcggctctgatcgtttccttcctgctgctgattgtatttgttcgcacggatagcgtcggcctgcaagtgctggcattgctgataatgaccgccattgcgctggtattcggctggcatttagtcgcctccatcggtggtgcagatatgccagtggtggtgtcgatgctgaactcgtactccggctgggcggctgcggctgcgggctttatgctcagcaacgacctgctgattgtgaccggtgcgctggtcggttcttcgggggctatcctttcttacattatgtgtaaggcgatgaaccgttcctttatcagcgttattgcgggtggtttcggcaccgacggctcttctactggtgatgatcaggaagtgggcgagcaccgcgaaatcactgcagaagagacagcggaactgctgaaaaactcccattcagtgatcattactccggggtacggcatggcagttgcgcaggcgcaatatcctgtcgctgaaattactgagaaattgcgcgctcgtggtattaatgtgcgtttcggtatccacccggttgcggggcgtttgcctggacatatgaacgtattgctggctgaagcaaaagtaccgtatgacatcgtgctggaaatggacgagatcaacgatgactttgctgataccgataccgtactggtgattggtgctaacgacacggttaatccggcggcgcaggatgatccgaagagtccgattgctggtatgcctgtgctggaagtgtggaaagcgcagaacgtgattgtctttaaacgttcgatgaacactggctatgctggtgtgcaaaacccgctgttcttcaaggaaaacacccacatgctgtttggtgacgccaaagccagcgtggatgcaatcctgaaggctctgtaa

SEQ ID NO: 3315 - DNA, 1533 bp, Escherichia coli
atgcgaattggcataccaagagaacggttaaccaatgaaacccgtgttgcagcaacgccaaaaacagtggaacagctgctgaaactgggttttaccgtcgcggtagagagcggcgcgggtcaactggcaagttttgacgataaagcgtttgtgcaagcgggcgctgaaattgtagaagggaatagcgtctggcagtcagagatcattctgaaggtcaatgcgccgttagatgatgaaattgcgttactgaatcctgggacaacgctggtgagttttatctggcctgcgcagaatccggaattaatgcaaaaacttgcggaacgtaacgtgaccgtgatggcgatggactctgtgccgcgtatctcacgcgcacaatcgctggacgcactaagctcgatggcgaatatcgccggttatcgcgccattgttgaagctgcacatgaatttgggcgcttctttaccggacaaatcactgcggccgggaaagtgccaccggcaaaagtgatggtgattggtgccggtgtcgcaggtctggccgccattggcgcagcaaacagtctcggcgcgattgtgcgtgcattcgacacccgcccggaagtgaaagaacaagttcaaagtatgggcgcagaattcctcgagctggattttaaagaggaagcgggcagcggcgatggctatgccaaagtgatgtcggacgcgttcatcaaagcggaaatggaactctttgccgcccaggcaaaagaggtcgatatcattgtcaccaccgcgcttattccaggcaaaccagcgccgaagctaattacccgtgaaatggttgactccatgaaggcgggcagtgtgattgtcgacctggcagcccaaaacggcggcaactgtgaatacaccgtgccgggtgaaatcttcactacggaaaatggtgtcaaagtaattggttacaccgatcttccgggccgtctgccgacgcaatcctcacagctttacggcactaacctcgttaatctgctgaaactgttgtgcaaagagaaagacggcaacatcactgttgattttgatgatgtggtgattcgtggcgtgaccgtgatccgtgcgggcgaaattacctggccggcaccgccgattcaggtatcagctcagccgcaggcggcacaaaaagcggcaccggaagtgaaaactgaggaaaaatgtgcctgctcaccgtggcgtaaatacgcgttgatggcgttggcaatcatccttttcggctggatggcaagcgttgcgccaaaagagttccttggacacttcactgtgttcgcgctggcctgcgttgtcggttattacgtggtgtggaatgtatcgcacgcgctgcatacaccgttgatgtcggtcaccaacgcgatttcagggattattgttgtcggagcactgttgcagattggccagggcggctgggttagcttccttagttttatcgcggtgcttatagccagcattaatattttcggtggcttcaccgtgactcagcgcatgctgaaaatgttccgcaaaaattaa

SEQ ID NO: 3316 - DNA, 945 bp, Escherichia coli
atgaagcttaagaacaccctcttggcgtcggcactgctttctgctacggcattctccgttaacgcagcaacagaactgacaccggagcaagcggcagcggttaaaccttttgaccgtgtagtggttaccggtcgttttaatgctattggcgaagcggtgaaagccgtttctcgtcgcgcagataaagaaggtgccgcctctttttatgttgtcgacacttctgattttggtaacagcggtaactggcgtgtggtcgctgacctctataaagccgatgctgaaaaagcagaagaaacaagtaatcgcgtaattaacggtgttgtcgaactgccgaaagatcaggctgttctgattgaaccgtttgacacggtcaccgtccagggcttctatcgtagccagccagaagtcaatgatgccatcaccaaagcggcaaaagcgaaaggtgcctactctttctacattgttcgtcaaatcgatgccaaccagggcggtaaccagcgtattactgcattcatctataaaaaagatgctaagaaacgtatcgtccagagcccggatgtaatcccggcagattccgaagcaggacgtgcagctctggctgccggtggcgaagccgcgaagaaagttgagatcccgggtgttgcgactaccgcatcaccaagttctgaagtcggtcgcttctttgaaacccagtcatcaaaaggcgggcgttacaccgtcacgctcccggacggcactaaagtcgaagaactgaacaaagcgacagcagcgatgatggtcccgttcgacagcatcaaattctctggcaactacggcaacatgaccgaagtctcctatcaggttgcgaaacgtgccgcgaagaaaggtgctaagtattaccacatcacccgccagtggcaggaacgtggtaataacctgaccgtcagcgcagatctgtataaataa

SEQ ID NO: 3317 - DNA, 1383 bp, Escherichia coli
atggaaaagaaactgggactgagcgcactcaccgcgctggtattaagctcaatgctgggcgcgggtgttttcagtctgccgcaaaatatggcggcagttgccagcccggcagcactgctcatcggctggggtattactggcgctggcattttattgctggcctttgccatgctgatcctcacgcgcattcgccccgaacttgacggcggtatctttacctatgcccgcgaagggtttggcgagctaatcggcttttgttccgcatggggatactggctgtgcgcggtcatcgccaacgtctcctatctggtgatcgttttttccgcgttaagcttttttacggacacgccggaattgcgcctgtttggcgatggtaatacctggcaatcgatcgtcggtgcatcggctttattgtggattgttcactttttgatcctgcgcggggtgcaaaccgctgccagcattaaccttgtggcgacactggcaaaattgttgccgttgggtctgtttgttgtgctggcgataatgatgttcaaactggataccttcaagctcgacttcaccggacttgcacttggcgtacccgtgtgggaacaggtgaaaaacaccatgctgatcaccctgtgggttttcattggtgtggaaggtgccgtggttgtttctgcgcgtgcgcgtaataagcgtgatgttggcaaagcgacactgctggcggttctctccgctctgggcgtttatttgctggtaacgctgctttcgctgggcgtggtggcacgtcctgaactggctgaaattcgtaacccgtcaatggccggtctgatggtggaaatgatgggaccgtggggcgaaatcatcatcgctgccggtttgatcgtttccgtttgcggcgcgtacttaagctggaccatcatggcagcagaagttccgttccttgcagccactcataaagcattcccgcgcatttttgcgcgccagaacgcacaagctgcgccatccgcttcactgtggctgaccaacatctgcgtgcaaatttgtctggtgctcatctggctgaccggttccgattacaacacattgctgaccatcgcctcagaaatgattctggtgccctatttcctggtcggcgcgttcttgctgaaaatcgcaacccgtccactgcataaggcggtaggtgtcggtgcctgcatttatggcttatggttactgtacgcctctggtccaatgcacttgctgttatccgttgttctgtatgcgccggggctgctggttttcctgtacgcgcgtaaaacgcatacacatgataatgtactgaaccgtcaggaaatggtgctgattggcatgctgttaattgcctcagttccggcgacctggatgctggtgggataa

SEQ ID NO: 3318 - DNA, 723 bp, Escherichia coli
atgggtaaaacccagcccttgccaatattaattactggcggaggtcgccgcatcggcctcgccctcgcatggcatttcattaatcaaaagcaaccggtgattgtcagctatcggacgcactatcccgccattgatggactgattaaagcaggtgtgcagtgtattcaggctgatttttcgaccaacgacggtgtgatggcgtttgccgatgaagtactaaaaagcacccatggtctgcgtgctattttgcataacgccagcgcgtggatggcggaaaaaccgggtgcgccactgaccgacgtactggcttgcatgatgcagatccacgttaataccccatacctgctcaaccatgctctggaaagattactgcgtgggcacggacacgccgccagcgatatcattcactttaccgattatgtggtggagcgcagtagcgacaaacatattgcctatgctgcaagcaaagcggcactggataatatgacccgctcgtttgcccgcaagctggcaccggaagtgaaagtgaattctattgcgccatcgctgatcctgtttaatgaacatgatgatgccgaatatcgacaacaggcgctgaataaatcactgatgaaaaccgcgcctggcgagaaagaagtgatcgacctggtcgattacttacttaccagctgctttgtcaccggacgcagtctcccacttgatggcggtcgtcatctgcgttaa

SEQ ID NO: 3319 - DNA, 336 bp, Escherichia coli
atggggctggtaatcaaagccgcgctcggtgcgctggtagtgctgttgattggtgttttagcaaaaacgaaaaattattatatcgccgggctgattccacttttcccgacctttgcgcttatcgcgcattatattgttgccagcgaacgcggcattgaagccttacgcgcaaccatcatttttagtatgtggtcgattattccctattttgtttacctggcgtccctatggtatttcaccggaatgatgcgcttgcccgctgcttttgttggctctgttgcgtgctggggaataagcgcatgggtgttgattatatgctggattaagctgcattaa

SEQ ID NO: 3320 - DNA, 720 bp, Escherichia coli
atgaacactatcgtatttgtggaagatgatgcggaagtcggtgcactgattgccgcatacctggcaaaacatgatatgcaggttaccgtagagccgcgcggcgaccgggccgaagaaactattctgcgagaaaatccggatttggtgttactcgacatcatgctaccaggcaaggacggcatgaccatttgtcgtgatttacgcgcaaagtggtccggaccgattgttcttctaacctctctcgatagcgatatgaaccacatcctggcactggaaatgggcgcctgcgactatattctcaaaacgacgccccctgctgttttgctagcgcgtttacgtttgcatttgcgtcagaatgagcaagccacagtgaccaaaggtattcaggaaacgtctctgactccctacaaagccctgcatttcggcacgttgaccatcgatcccatcaaccgcgtagtctccctggctaacactgaaatctcgctctcgacagctgatttcgaattattgtgggaattagctacccatgccgggcaaatcatggaccgcgatgcattgctgaaaaatttacgcggcgtcagttatgacggactggatcgtagcgtggacgtggctatttcgcggttaagaaaaaaactgctcgataacgccgcagaaccttatcgtattaaaaccgtgcgtaacaaaggctatctttttgcgcctcatgcgtgggaataa

SEQ ID NO: 3321 - DNA, 1302 bp, Escherichia coli
atgaaaaaactgtttatccagttttacctgttattgtttgtctgcttccttgtgatgtctctgctggtcgggctggtgtacaaatttaccgccgaacgcgcaggcaaacagtcgctggatgatttgatgaacagttcgctgtatctgatgcgcagcgaattgcgtgagatccccccacacgactggggtaagacgctgaaagagatggatttaaatctctctttcgatctgcgtgtcgagccactgagtaaataccatcttgatgatatttccatgcaccggctgcgtggcggcgaaattgtcgctctggacgatcagtacacttttttgcaacgtatcccgcgcagccactacgtgctggcagttggtcctgttccttatctttattacctccatcagatgcgattgctggatatcgccctgatcgcttttattgccatttccctcgcctttccggtgtttatctggatgcgtccgcactggcaggatatgttaaaactggaagcagcggcgcaacgatttggcgatgggcatctcagtgagcgtatccactttgatgaaggttcgagctttgaacgacttggcgtcgcatttaaccagatggcggacaatatcaacgccttgattgccagcaaaaaacagcttattgacggtatcgctcacgaactgcgaacaccgttagtgcgcctgcgttatcgactggagatgagcgataacctgagcgccgccgaatcccaggcgttgaatcgcgatatcagtcaacttgaagctttaattgaagagctgctgacttatgcccgactcgaccgcccacaaaatgagcttcatcttagcgaaccagacctgccgttgtggctgtcaacgcatctggcagatattcaggcagtaacgcccgataaaacggtacggataaaaacgctcgcgcaaggccattatgcggcgttggatatgcgcttaatggagcgcgtgctggataatttgctcaataacgccctgcgctactgtcactcaacggttgaaatcagcctgctactgtcggggaatagagcgacattaattgttgaggatgatggcccagggattgccccagaaaaccgcgaacatatctttgaaccttttgttcgcctcgatcccagccgggatcgctcaaccggcggctgcgggctggggctggccattgtccactctatagcactggcaatgggcggtacggttaattgtgacaccagcgaactgggtggtgcccgcttctcgttcagctggccgttatggcataacatcccgcaatttacctctgcctga

SEQ ID NO: 3322 - DNA, 930 bp, Escherichia coli
atggcgcgttacgatctcgtagaccgactcaacactacttttcgccagatggaacaagagctggctgcatttgccgctcatcttgagcaacacaagctattggttgcccgcgtgttctctttgccggaggtaaaaaaagaggatgagcataatccgcttaatcgtattgagataaaacaacatctcggcaacgacgcgcaatcgctggcgttgcgtcattttcgccatttatttattcaacaacagtccgaaaatcgcagcagcaaggccgctgtccgtctgcctggcgtgttgtgttaccaggtcgataacttttcgcaagcagcgttagtcagtcatattcagcacatcaataaactcaagaccacgttcgagcatatcgtcacggttgaatcagaactcccctccgcggcacgttttgaatgggtgcatcgtcatttgccggggctgattacccttaatgcttaccgcacgctcaccgttctgcacgaccccgccactttacgttttggctgggctaataaacatatcattaaaaatttgcatcgtgatgaagtcctggcacagctggaaaaaagcctgaaatcaccacgcagtgtcgcaccgtggacgcgcgaggagtggcaaagaaaactggagcgagaatatcaggatatcgctgccctaccacagaacgcgaagttaaaaatcaaacgtccggtgaaggtgcagccgattgcccgcgtctggtacaaaggagatcaaaaacaagtacaacacgcctgccctacgccgctgattgcactgattaatagggataatggcgcgggcgtgccggacgttggtgagttgttaaattacgatgccgacaatgtgctgcaccgttataaaccacaggcgcagccgcttcgtttgatcattccacggctgcacctgtatgttgcagattaa

SEQ ID NO: 3323 - DNA, 1404 bp, Escherichia coli
atgaatacagtacgcagcgaaaaagattcgatgggagcgattgatgtcccggcagataagctgtggggcgcacaaactcagcgctcgctggagcatttccgcatttcgacggagaaaatgcccacctcactgattcatgcgctggcgctaaccaagcgcgcagcggcaaaagttaatgaagatttaggcttgttgtctgaagagaaagcgagcgccattcggcaggcggcggatgaagtactggcaggacagcatgacgacgaattcccgctggctatctggcagaccggctccggcacgcaaagtaacatgaacatgaatgaagtgctggctaaccgggccagtgaattactcggcggcgtgcgcgggatggaacgtaaagttcaccctaacgacgacgtgaacaaaagccaaagttccaacgatgtctttccgacggcgatgcacgttgcggcactactggcgctgcgcaagcaactcattccacaacttaaaaccctgacccagacgctgagtgaaaaatcccgcgcatttgccgatatcgtcaaaatcggtcgtacccacttgcaggacgcgacgccgttaacgctggggcaggagatttccggctgggtagcgatgctggagcataatctcaaacatatcgaatacagcctgcctcacgtagcggaactggctctgggcggtacagcggtgggtactggactaaatacccatccggaatatgcgcgtcgcgtagcagatgaactggcagtcattacctgtgcaccgtttgttaccgcgccgaacaaatttgaagcgctggcgacctgtgatgccctggttcaggcgcacggcgcattgaaagggttggctgcgtcactgatgaaaattgccaatgatgtccgctggctggcctctggcccgcgctgcggaattggtgaaatctcaatcccggaaaatgagccgggtagctcaatcatgccggggaaagtgaacccgacacagtgtgaagcattaaccatgctctgctgtcaggtgatggggaacgacgtggcgatcaacatgggtggcgcttccggtaactttgaactgaacgtcttccgtccgatggtgatccataacttcctgcaatcggtgcgcttgctggcagatggcatggaaagtttcaacaaacactgcgcagtgggcattgaaccgaatcgtgagcgaatcaatcaattactcaatgaatcgctgatgctggtgactgcgcttaacacccacattggttatgacaaagccgccgagatcgccaaaaaagcgcataaagaagggctgaccttaaaagctgcggcccttgcgctggggtatcttagcgaagccgagtttgaccgctgggtacggccagaacagatggtcggcagtatgaaagtcgggggttaa

SEQ ID NO: 3324 - DNA, 1647 bp, Escherichia coli
atgtcaaacaaaccctttcattatcaggctccttttccactcaaaaaagatgatactgagtattacctgctaaccagcgaacacgttagcgtatctgaatttgaagggcaggagattttgaaagtcgcacccgaagcgttaactctgttggcgcgtcaggcgtttcatgatgcgtcatttatgctgcgtccggctcaccaacaacaggtggccgacattctgcgtgacccggaggccagcgaaaatgataaatatgtggcgctgcaattcctgcgtaactccgacatcgcggcaaaaggcgttctgccaacctgtcaggataccggcaccgcgattattgttggtaaaaaagggcagcgtgtatggaccggtggcggtgatgaagcagcgctggcgcgcggtgtttataacacttatatcgaggataatctgcgctactcgcaaaacgcgccgctggatatgtataaagaggtgaataccggcaccaacttgccagcgcagatcgatctttatgccgttgatggcgacgagtacaaattcctctgtatcgccaaaggtggcggttcggcaaacaagacgtatctctatcaggaaaccaaagcgttactgacgccgggaaaactgaaaaattacctggttgagaagatgcgcacgctgggtacggcggcctgtcctccatatcatattgcgttcgttattggtggaacttctgcagaaacgaatcttaaaacggtgaaactcgcttccgctaaatactatgatgaactgccaacggaagggaatgagcacggtcaggcgttccgcgatgtggaactggaaaaagaattgctgatcgaagcgcaaaatcttggtctgggtgcgcagtttggtggtaaatacttcgctcatgacatccgcgtgattcgcctgccacgtcacggcgcatcctgcccggtcggtatgggcgtctcctgttctgctgaccgtaatatcaaagcgaagatcaaccgtcaggggatttggatcgaaaaactggaacataatccaggcaaatatatcccggaagagctgcgcaaagcaggagaaggcgaagccgtgcgcgttgaccttaaccgtccgatgaaagagatcctcgcacagttgtcgcagtatcccgtttctacacgcttatcgcttaacggcacgattatcgtcggtcgtgatattgctcacgccaaactgaaagagcggatggataacggtgaagggctgccgcagtacattaaagatcatccgatttactacgcgggtccggccaaaacgccggaaggttatgcctccggttctcttggcccaacgaccgccggacggatggattcttatgtcgatcaactgcaagcgcagggcggaagtatgatcatgctggcgaaaggcaaccgcagccagcaggtgacggatgcctgtaaaaaacacggcggcttctacctcggcagtatcggtggtccggcagctgtattggcgcagggaagtattaagagcctggaatgtgttgaatatccggaactgggaatggaagccatctggaaaattgaagtggaagatttcccggcgtttatccttgtggatgataaaggaaatgacttcttccagcagatacaactcacacaatgcacccgctgtgtgaaataa

SEQ ID NO: 3325 - DNA, 1176 bp, Escherichia coli
atgcaaaaactcattaactcagtgcaaaactatgcctggggcagcaaaacggcgttgactgaactttatggtatggaaaatccgtccagccagccgatggccgagttgtggatgggcgcgcatccaaagagcagttcacgtgtgcacgatgccgcaggagatatcgtttcactgcgtgatgtgattgagagtgataaagcgactcttttgggagatgccgttgccaaacgctttggcgagttgcctttcctgttcaaagtattatgcgcagcccagccgctctccattcaggttcatccaaacaaacgcaattctgaaatcggttttgccaaagaaaatgctgcaggtattccgatggatgccgctgagcgtaactataaagatcctaatcacaagcctgagctggttttcgccctgacccctttcctcgcgatgaacgcgtttcgtgagttttccgagattgtctccctgctccagccagtcgcaggtgcacatccggcgattgctcactttttacaacagcctgatgccgaacgtttaagcgaactgttcgccagcctgttgaatatgcagggtgaagaaaaatcccgcgcgctggcgattttaaaatcggccctcgacagccagcagggtgaaccatggcaaacgattcgtttaatttctgaattttacccggaagacagcggtctgttctccccgctgttgctgaatgtggtgaaattgaatcctggcgaagcgatgttcctgttcgctgaaacaccgcacgcttacctgcaaggcgtggcgctggaagtgatggcgaactccgataacgtgctgcgtgcaggtctgacgcctaaatatattgatattccggaactggttgccaacgtgaagttcgaagccaaaccggctaaccagttgttgacccagccggtgaaacaaggtgcagaactggacttcccgattcctgtggatgattttgccttctcgttgcatgaccttagtgataaagaaaccaccatcagccagcagagtgccgccattttgttctgcgtcgaaggcgatgcaacgctgtgtaaaggttctcagcagttacagcttaaaccgggtgaatcagcgtttattgccgccaacgaatcaccggtgactgtcagaggccacggccgtttagcgcgtgtttacaacaagctgtaa

SEQ ID NO: 3326 - DNA, 1509 bp, Escherichia coli
atgaataaatcgctggtagcggtaggcgtcattgttgcgctaggcgtagtctggacaggcggcgcatggtatacaggcaagaagattgaaacccatctcgaagacatggtcgcgcaggcgaacgcgcaactcaaactgacagctcctgaatccaacctggaagtcagttatcaaaactatcatcgcggcgtattcagcagccagttgcaactgttggtgaaacccattgccggaaaagtaaatccgtggattaaaagcggtcagagcgtcatcttcaacgaatcggttgatcatggtcccttcccgcttgcccagcttaaaaaactgaacctgatcccgtcgatggcatcaattcaaaccacgctggttaataacgaagtaagcaaaccactgtttgatatggcaaaaggtgaaacgccttttgagattaactcccgcattggttacagcggagattccagttccgacatttcgctcaagccactgaattacgagcaaaaggatgaaaaagtcgcctttagcggcggcgagttccagttaaatgcagacagagacggcaaagctatctccctttccggggaggcgcaaagtggtcggatagacgcggttaacgaatacaaccagaaagtgcagttaacctttaataatctgaaaaccgacggttccagcacgctggcaagttttggtgagcgcgtaggaaaccaaaaactgtcgctggaaaaaatgaccatttcagtggagggcaaagaactggcactgctggaaggcatggagatcagcggtaaatcggatctggtcaatgacggtaaaacggtcaatagccaactggattactcgctaaacagcctgaaggtacagaatcaggatctgggcagtggcaagctgactttaaaagtcggccaaattgatggcgaagcctggcatcagtttagccagcaatataacgcgcaaactcaggcgctgctggcacagccagaaattgccaacaatcccgaactttatcaggagaaagtgacggaagccttctttagcgctctgccgctgatgctgaaaggcgatccggtgattactatcgcgccgctaagctggaaaaacagtcagggtgaaagtgcgctgaatctgtcgctgttcctgaaagatccggcaacgactaaagaagcgccgcaaacgctggcgcaggaagtggaccggtcggttaaatctctggatgcgaaactgaccattccggtggatatggcaactgagttaatgactcaggtagcgaagctggaaggttatcaggaagatcaagcgaaaaaactggcgaaacagcaagttgaaggtgcatcagcaatggggcagatgttccgtctgaccaccttgcaggacaataccatcaccaccagcctgcaatatgctaacggtcagataacgttaaacgggcagaaaatgccactggaagatttcgtgggtatgtttgcgatgccggcattaaacgttccggctgtacccgctattccgcagcagtaa

SEQ ID NO: 3327 - DNA, 1266 bp, Escherichia coli
atgagaaaaatagtggccatggccgttatttgcctgacggctgcctctggccttacctctgcttacgcggcgcaactggctgacgatgaagcgggactacgcatcagactgaaaaatgaattacgcagggctgataagcccagtgctggcgcggggagagatatttacgcatgggtacagggaggattgctcgatttcaatagtggttattattccaatattattggcgttgaaggcggggcgtattatgtttataaattaggtgctcgtgctgatatgagcacccggtggtatcttgatggtgataaaagttttggctttaccctgggggcagtaaaaataaaacccagtgaaagtagtctgcttaaattaggtcgcttcgggacggattatagttatggtagcttaccttatcgtattccgttaatggctggcagttcgcaacgtacattaccgacagtttctgaaggagcattaggttattgggctttaacgccaaatattgacctgtggggaatgtggcgttcacgagtatttttatggaccgattcaacaaccggtattcgtgatgaaggggtgtataacagccagacgggaaaatacgataaacatcgcgcacgttcttttttagccgccagttggcatgatgataccagtcgctattctctgggggcatcggtacagaaagatgtttccaatcagatacaaagtattctcgagaaaagcataccgctcgacccgaattatacgttgaaaggggagttgctcggcttttacgcgcaactcgaaggtttaagtcgtaataccagccagcccaatgaaacggcgttggttagtggacaattgacctggattgcgccgtggggaagcgtatttggcagtggtggttatttgcgccatgcaatgaatggtgccgtggtggacaccgacattggctatcccttttcattaagtcttgatcgtaaccgtgaaggaatgcagtcctggcaattgggcgttaactatcgtttaactccgcaatttacgctgacatttgcaccgattgtgactcgcggctatgaatccagtaaacgagatgtgcggattgaaggcgcgggtatcttagggggtatgaactatcgggtcagcgaagggccgttacaagggatgaatttctttcttgctgccgataaagggcgggaaaagcgcgatggcagtgcgctgggcgatcgcctgaattactgggatgtgaaaatgagtattcagtatgactttatgctgaagtaa

SEQ ID NO: 3328 - DNA, 1374 bp, Escherichia coli
atgaatcaacaactctcctggcgcaccatcgtcggctacagcctcggtgacgtcgccaataacttcgccttcgcaatgggggcgctcttcctgttgagttactacaccgacgtcgctggcgtcggtgccgctgcggcgggcaccatgctgttactggtgcgggtattcgatgccttcgccgatgtctttgccggacgagtggtggacagtgtgaatacccgatggggaaaattccgcccgtttttactcttcggtactgcgccgttaatgatcttcagcgtgctggtattctgggtgccgaccgactggagccatagcagcaaagttgtgtatgcatatttgacctacatgggactcgggctttgctacagcctggtgaatattccttatggttcacttgctaccgcgatgacccaacaaccacaatcccgcgcccgtctgggcgcggctcgcgggattgccgcttcattgacctttgtctgcctggcatttctgataggaccgagcattaagaactccagcccggaagagatggtgtcggtatatcatttctggacaattgtgctggcgattgccggaatggtgctttacttcatctgcttcaaatcgacgcgtgagaatgtggtacgtatcgtggcgcagccgtcattgaagatcagtctgcaaaccctgaaacggaatcgcccgctgtttatgttgtgcatcggtgcgctgtgtgtgctgatttcgaccttcgcggtcagcgcctcgtcgttgttctacgtgcgctatgtgttaaatgataccgggctgttcactgtgctggtactggtgcaaaacctggtcggtactgtggcatcggcaccgctggtgccggggatggtcgcgaggatcggtaaaaagaataccttcctgattggcgctttgctgggaacctgcggttatctgctgttcttctgggtttccgtctggtcactgccggtggcgttggttgcgttggccatcgcatcaattggccagggcgttaccatgaccgtgatgtgggcactggaagctgataccgtagaatacggtgaatacctgactggcgtgcgaattgaagggctcacctattcactattctcatttacccgtaaatgcggtcaggcaatcggaggttcaattcctgcctttattttgggattaagcggatatatcgccaatcaggcgcaaacgccggaagttattatgggcatccgcacatcaattgccttagtaccttgcggatttatgctactggcattcgtcattatctggttttatccgctcacggataaaaaattcaaagaaatcgttgttgaaattgataatcgtaaaaaagtgcagcagcaattaatcaacgatatcactagttaa

SEQ ID NO: 3329 - DNA, 1812 bp, Escherichia coli
atgttacgtcctgtagaaaccccaacccgtgaaatcaaaaaactcgacggcctgtgggcattcagtctggatcgcgaaaactgtggaattgatcagcgttggtgggaaagtgcgttacaagaaagccgggcaattgctgtgccgggcagttttaacgatcagttcgccgatgcagatattcgtaattatgtgggcaacgtctggtatcagcgcgaagtctttataccgaaaggttgggcgggccagcgtattgtactgcgtttcgatgcggtcactcattacggcaaagtgtgggtaaataatcaggaagtgatggagcatcagggcggctatacgccatttgaagccgatgtcactccgtatgttattgccgggaaaagtgtacgtatcactgtttgtgtgaacaacgaactgaactggcagactatcccgccgggaatggtgattaccgacgaaaacggcaagaaaaagcagtcttactttcatgatttctttaactacgccgggatccatcgcagcgtaatgctctacaccacgccgaatacctgggtggacgatatcaccgtggtgacgcatgtcgcgcaagactgtaaccacgcatctgttgactggcaggtgggggcaaatggtgatgtcagcgttgaactgcgtgatgcggatcaacaggtggttgcaactggacaaggcaccagcgggactttgcaagtagtgaatccgcacctctggcaaccgggtgaaggttatctctatgaactgtgcgtcacagccaaaagccagacagagtgtgatatctacctgctgcgcgtcggtatccggtcagtggcagtgaagggcgaacagttcctgatcaaccacaaaccgttctactttactggctttggtcgtcatgaagatgcggatttgcgcggcaaaggattcgataacgtgctgatggtgcacgatcacgcactaatggactggattggggccaactcctaccgtacctcgcattacccttacgctgaagagatgctcgactgggcagatgaacatggaatcgtggtgattgatgaaactgcagctgtcggctttaacctctctttaggcattggtttcgaagcgggcaacaagccgaaagaactgtacagcgaagaggcagtcaacggggaaacccagcaggcgcacttacaggcgattaaagagctgattgcgcgtgacaaaaaccacccaagcgtggtgatgtggagtattgccaacgaaccggatacccgtccgcaaggtgcacgggaatattttgcgccactggcggaagcaacgcgtaaactcgacccgacgcgtccgatcacctgtgtcaatgtaatgttctgcgacgctcacaccgataccatcagcgatctctttgatgtgctgtgcctgaaccgttattacggttggtatgtccaaagcggcgatttggaaacggcagagaaggttctggaaaaagaacttctggcctggcaggagaaactgcatcagccgattatcatcaccgaatacggtgtggatacgttagccggcctgcactcaatgtacaccgacatgtggagtgaagagtatcagtgtgcatggctggatatgtatcaccgcgtctttgatcgcgtcagcgctgtcgtcggtgagcaggtatggaatttcgccgattttgcgacctcgcaaggcatattgcgcgttggcggtaacaagaaagggatcttcacccgcgaccgcaaaccgaagtcggcggcttttctgctgcaaaaacgctggaccggcatgaacttcggtgaaaaaccgcagcagggaggcaaacaatga

SEQ ID NO: 3330 - DNA, 579 bp, Escherichia coli
atgcagactgaagcacaaccgacacggacccggatcctcaatgctgccagagagattttttcagaaaatggatttcacagtgcctcgatgaaagccatctgtaaatcctgcgccattagtcccgggacgctctatcaccatttcatctccaaagaagccttgattcaggcgattatcttacaggaccaggagagggcgctggcccgtttccgggaaccgattgaagggattcatttcgttgactatatggtcgagtctattgtctctctcacccatgaggcctttgggcaacgggcgctggtggtcgaaattatggcggaagggatgcgtaacccacaggtcgccgccatgcttaaaaataagcatatgacgatcacggaatttgttgctcagcggatgcgtgatgcccagcaaaaaggcgagataagcccagatatcaacacggcaatgacttcacgtttactgctggatctgacctacggtgtactggccgatatcgaagcggaagatctggcgcgtgaagcgtcgtttgctcagggattacgcgcgatgattggcggtatattaaccgcatcctga

SEQ ID NO: 3331 - DNA, 768 bp, Escherichia coli
gtgtttaattctgacaacctgagactcgacggaaaatgcgccatcattacaggtgcgggtgcaggtattggtaaagaaatcgccattacattcgcgacagctggcgcatctgtggtggtcagtgatattaacgccgatgcagctaatcatgttgtagatgaaattcaacaactgggtggtcaggcatttgcctgccgctgcgatattacttccgaacaggaactctctgcactggcagactttgccgtcagtaagttgggtaaagttgatatcctggttaacaacgccggtggcggtgggcctaaaccgtttgatatgccaatggcagattttcgtcgcgcttatgaactgaatgtattttcttttttccatctgtcacaacttgttgcgccagaaatggaaaaaaatggcggtggcgttattctgaccattacttctatggcggcagaaaataaaaatataaatatgacctcctatgcatcatctaaagctgcggccagtcatctggtcagaaatatggcgtttgacctgggtgaaaaaaatattcgggtgaatggcattgcaccgggggcaatattaaccgatgccctgaaatccgttattacaccagaaattgaacagaaaatgttgcaacacacaccaatcagacgtctgggccaaccgcaagatattgctaacgcggcgctgttcctttgctcgcctgcagccagctgggtaagcggacaaattctcaccgtctccggtggtggggtacaggaactcaattaa

SEQ ID NO: 3332 - DNA, 1029 bp, Escherichia coli
atggctaccgccaaaaaaataaccattcatgatgttgcgctggctgcgggcgtgtcggtaagtaccgtttcgctggtgcttagtggcaaagggcgaatctctaccgccacaggagaacgcgttaacgccgccattgaagagctgggatttgtgcgcaatcgccaggcgtcggcgctgcgcggcgggcaaagcggcgtcattggtttgatcgtccgtgatttatctgcgccgttttacgccgaattgacggccggattgacggaagctctggaagcgcagggacggatggtttttttgcttcacggcggtaaagacggcgagcagctggcacagcggttttcactattactgaatcagggtgtcgatggtgtggtaattgccggggctgcaggaagcagcgatgacctgcgacggatagcagaagaaaaagctatcccggtgattttcgcttcccgtgccagttatcttgatgatgttgatacggttcgcccggacaacatgcaggctgcacagttgttgacggagcatctcattcgcaatgggcatcagcgtatcgcctggctgggagggcaaagttcctcattaacccgggcagaaagggtggggggctattgtgcgactctactaaaatttggcctgccgtttcacagcgattgggtgctggagtgcacttccagccagaagcaagccgcggaagctatcacggcgcttttacgtcataacccgaccatcagcgccgtggtttgctataacgaaactattgcgatgggggcatggtttggtttgctgaaagcaggaaggcaaagcggggaaagcggagtcgatcgttactttgagcaacaggtttcgctggcggcatttaccgatgcaacgccaaccacacttgatgatatacccgttacctgggccagcacgccagcgcgggaacttggtaccacacttgcggatcgcatgatgcaaaaaatcacccatgaagagacgcattcacgcaatcttattattcccgcccggctcattgcggcgaaataa

SEQ ID NO: 3333 - DNA, 1593 bp, Escherichia coli
atgacggcgaaaacagcaccgaaagtcacgctgtgggagttcttccagcagttaggcaaaaccttcatgttacccgtggcattattgtcgttctgcggcattatgctcggcattggtagttctcttagcagccatgatgtcatcaccctgatcccggtcctgggcaaccccgtgttgcaggctatctttacctggatgagtaagattggctcgtttgcttttagtttcttgccagtcatgttctgtatcgccatcccgctgggtctggcacgcgaaaacaaaggcgtagcggcattcgctggcttcgtcggttatgcggtaatgaacctcgcggtaaacttctggttgaccaataaaggcattctgccaaccacggacgccgcggttctgaaagccaataacatccagagcattcttgggatccagtcgatcgacaccgggatcctcggtgcggtgatcgccggtattatcgtctggatgctgcatgagcgattccataatatccgcctgccagatgcgctggcattcttcggcggtacgcgcttcgtaccaatcatctcctcgctggtgatgggtcttgtcggcctggtgattccattagtctggccaattttcgccatgggtattagcggcttaggccatatgatcaacagcgcgggtgatttcggaccgatgctgtttggtaccggtgaacgtctgctgttgccgtttggtctgcatcacattctggtggcattaattcgctttaccgacgcaggcggcacgcaggaagtctgcggtcaaaccgtcagcggtgcactgaccatcttccaggcgcaattgagttgcccgaccactcacggtttttctgaaagcgccacgcgtttcctttcgcaaggcaaaatgcctgcgtttctcggcggtctgccaggtgcagcgttagctatgtatcactgcgcgcgcccggaaaatcgccataaaattaaaggtctgctgatttctggcctgatcgcctgtgtcgttggcggcacgaccgaaccgctggaattccttttcctgttcgtagcgccagttctgtatgtcatccacgcgctgtcaaccggcctcggcttcactgtcatgtctgtgctcggcgtcaccatcggtaataccgacggcaatatcatcgactttgtggtgttcggtattttgcatggtctgtcaaccaagtggtacatggtgccagtagtggcggcaatctggtttgtcgtttactacatcatcttccgtttcgctatcacccgcttcaatctcaaaaccccggggcgcgatagtgaagttgccagttcaatcgaaaaagccgttgccggtgcgccgggtaaatcaggttacaacgttccggcaatcctcgaagccttaggcggtgccgacaatattgtcagcctcgataactgcattacgcgtctgcgtttgtctgtaaaagatatgtcgcttgttaatgtgcaggcactgaaggacaatcgggcaattggcgtagtacaacttaatcaacataacctgcaggttgttatcgggccacaagttcagtcagtaaaagatgaaatggccggtctgatgcatactgtccaggcataa

SEQ ID NO: 3334 - DNA, 1173 bp, Escherichia coli
atgttcgatttttcaaaggtcgtggatcgtcatggcacatggtgtacgcagtgggattatgtcgctgaccgtttcggcactgctgacctgttaccgttcacgatttcagacatggattttgccactgccccctgcattatcgaggcgctgaatcagcgcctgatacacggcgtgtttggctacagccgctggaaaaacgatgagtttctcgcggctattgcccactggttttccacccagcattacaccgccatcgatcctcagtcggtggtgtatggcccttctgttatctatatggtttcagaactgattcgtcagtggtctgaaacaggtgaaggcgtggtgatccacacacccgcctatgacgcattttacaaggccattgaaggtaaccagcgcacagtaatgcccgttgctttagagaagcagcctgacggctggttttgcgatatgggcaagctggaagccgtgttggcgaaaccagaatgcaaaattctgctcctgtgtagcccacagaatcctaccgggaaagtgtggacgtgcgatgagctggagatcatggctgacctgtgcgagcgtcatggtgtgcgggttatttccgatgaaatccatatggatatggtttggggcgagcagccgcatattccctggagtaatgtggcgcgcggagactgggcgttgctaacgtcgggatcaaaaagtttcaatattcccgccctgaccggtgcttacgggattatagaaaatagcagtagccgcgatgcctatttatcggcactgaaaggacgtgatgggctttcttccccttcggtactggcgttaactgctcatatcgccgtctatcagcaaggcgcgccatggctggatgccttacgcgtctatctgaaagataacctgacgtatatcgcagataaaatgaacgctgcgtttcctgaactcaactggcagatcccgcaatccacttatctggcctggcttgatctacgtccgttgaatattgacgacaacgcgttgcaaaaagcgcttatcgagcaagaaaagatcgcgatcatgccgggatatacctacggtgaagaaggtcgtggttttatccgactcaatgccggctgcccacgttcgaaactggaaaaaggtgtggctggattaattaacgccatccgcgctgttggttaa

SEQ ID NO: 3335 - DNA, 1002 bp, Escherichia coli
atgattgataccaccctgccattaactgatatccatcgccaccttgatggcaacattcgtccccagaccattcttgaacttggccgccagtataatatctcgcttcctgcacaatccctggaaacactgattccccacgttcaggtcattgccaacgaacccgatctggtgagctttctgactaaacttgactggggcgttaaagttctcgcctctcttgatgcctgccgccgcgtggcatttgaaaacattgaagatgcagcccgtaacggcctgcactatgtcgagctgcgtttttcaccaggctacatggcaatggcacatcagctgcctgtagcgggtgttgtcgaagcggtgatcgatggcgtacgtgaaggttgccgcacctttggtgtgcaggcgaagcttatcggtattatgagccggaccttcggcgaagccgcctgtcagcaagagctggaggcctttttagcccaccgtgaccagattaccgcacttgatttagccggtgatgaacttggtttcccgggaagtctgttcctttctcatttcaaccgcgcgcgtgatgcgggctggcatattaccgtccatgcaggcgaagctgccggaccggaaagcatctggcaggcgattcgtgaactgggggcggagcgtattggacatggcgtaaaagccattgaagatcgggcgctgatggattttctcgccgagcaacaaattggtattgaatcctgtctgacctccaatattcagaccagcaccgtggcggatctggctgcacatccgctgaaaacgttccttgagcatggcattcgtgccagcattaacactgacgatccaggcgtgcagggagtggatatcattcacgaatataccgttgccgcgccagctgctgggttatcccgcgagcaaatccgccaggcacagattaatggtctggaaatggctttcctcagcgcagaggaaaaacgcgcactgcgagaaaaagtcgccgcgaagtaa

SEQ ID NO: 3336 - DNA, 1041 bp, Escherichia coli
atgagcgacaacatccgtgttgggttgattgggtatggttatgcgagcaaaaccttccatgcgcccctgattgcgggcacgcccgggctggagctggcggtaatctccagcagcgatgaaacaaaagtaaaagctgactggccaacggttacggttgtctctgagccgaagcatctgtttaacgatcccaacatagacctgattgtcattcctacacccaacgatacccattttccgttagccaaagcggcgcttgaggcgggtaaacatgtggtcgttgataaaccctttaccgtgacactgtcacaagcacgagagctggaagcgctggcaaaaagcctggggcgagtgctgtctgtattccataaccgtcgctgggatagcgatttcctgacgctaaaaggtttgctcgcggaaggcgtgctgggtgaaattgcttactttgagtcccattttgaccgcttccgcccgcaggtgcgcgatcgttggcgtgaacagggcggcccaggcagcggtatctggtacgatttagcaccgcaccttctggatcaggccattacgttatttggtttaccggttagcatgacggtagatttggcacagttacggcccggagcgcagtcgaccgattatttccacgctatcttgtcctatccgcagcggcgagtgattttacacggcaccatgctggcagcagccgagtcagcacggtatatcgtgcatggatcccgaggcagttatgtgaaatatggcctcgatccacaggaagaacgtctgaaaaatggcgagcgtctgccgcaggaagactggggctacgatatgcgcgatggcgtacttacccgcgtggaaggtgaggaacgtgtcgaagaaacgctgttgacagtgccggggaattatccggcttactatgcggctattcgtgatgcgttaaatggcgatggtgaaaatccggttccggcaagtcaggcaatccaggtaatggagttgattgagctgggcatcgaatccgccaaacatcgcgcgactttgtgccttgcgtga

SEQ ID NO: 3337 - DNA, 216 bp, Escherichia coli
atgactgttcaggactacttattaaaatttcgcaaaatcagttcactcgaaagtctggaaaaactctacgaccatcttaattacaccctgacggacgatcaggaactgatcaatatgtatcgtgctgccgatcaccgtcgcgcagagctggtttctggcgggcgtttgtttgacctcggccaggtaccgaagtccgtctggcgctatgtccagtaa

SEQ ID NO: 3338 - DNA, 441 bp, Escherichia coli
atgaccaccacaacgccacaacgtattggaggctggttgcttggcccgttggcctggcttttagtcgctctgttgagtacgacgctggcgttgttgctgtataccgctgcgttatcttctccgcaaacatttcaaacgctcggcggacaagcactgacgacacaaatcttatggggcgtttcttttattaccgctatcgccatgtggtattacacactgtggttgaccatcgctttctttaaacgtcggcgttgtgttcctaaacactatattatctggctgcttatttccgtattgctggcagtaaaagcgttcgctttttcacccgtagaagatggcatagccgttcgccagttgctgtttactttgttggcaaccgcattgatcgtcccctatttcaaacgctcgtcgcgggtgaaagcgacgtttgtgaatccgtaa

SEQ ID NO: 3339 - DNA, 582 bp, Escherichia coli
atgactgactacctgttactgtttgtcggaactgtactggtcaataactttgtactggtcaagtttctcggtctctgtccgtttatgggggtttccaaaaagctggaaaccgcgatgggcatggggctggcaacaacgtttgtgatgacgctggcgtctatttgcgcctggcttatcgatacgtggattttgatcccacttaatctgatttacctgcgcaccctggcgtttattctggtgattgctgtggttgtgcagttcaccgaaatggtggtgcgcaaaaccagcccggtactttaccgtctgctggggatttttttgccgcttatcaccaccaactgtgccgtgctcggcgtggcgttgctgaatatcaatctcgggcacaatttcttgcagtcagcgctgtacggtttttccgccgctgtcggtttctcgctggtgatggtgctcttcgccgccatccgcgaacgccttgctgtggctgatgtcccggcaccttttcgcggtaatgccattgcgttaattaccgcaggtcttatgtctctggcctttatgggctttagtggtttggtgaagttgtaa

SEQ ID NO: 3340 - DNA, 579 bp, Escherichia coli
atgaatgctatctggattgccgttgccgccgtgagcctgctgggcctggcgtttggcgccattctgggttatgcctcccgccgttttgcggtggaagacgatccggtcgttgagaaaattgacgaaatcttaccgcagagccagtgtggtcagtgcggttatcccggctgtcgcccctacgcggaagccatcagctgtaacggtgaaaaaatcaaccgttgcgccccaggtggcgaagctgtgatgctaaaaattgccgagttgcttaatgtcgagccgcagccgctggatggcgaagcgcaagagctaacgccagcgcggatggtggcggtgattgatgaaaataactgtattggctgcactaaatgtattcaggcgtgtccggtagacgccatcgttggcgctacccgcgccatgcatacggtaatgagtgatctctgtacgggctgcaatttatgtgttgatccgtgcccgacacactgcatctcgttgcaaccggtcgcagaaactcctgactcctggaaatgggatctgaacaccattcccgtgcgtatcattcccgtggaacaccatgcttaa

SEQ ID NO: 3341 - DNA, 2523 bp, Escherichia coli
atgcttaagttattctctgcattcagaaaaaataaaatctgggatttcaacggcggcatccatccaccggagatgaaaacccagtccaacggtacgcccctgcgccaggtaccactggcgcagcgttttgtcattccactgaaacaacatattggcgctgaaggtgagttgtgcgttagcgtcggcgataaagtattgcgcggccagccgcttacccgtggtcgcggcaaaatgctgccggttcacgcgcccacctcgggtaccgttacggctattgcgccccactctacggctcatccttcagctttagctgaattaagtgtgattattgatgccgatggcgaagactgctggatcccgcgcgacggctgggccgattatcgctctcgcagtcgcgaagagttaatcgagcgcattcatcagtttggtgttgccgggctgggtggtgcgggatttccgacaggcgttaaattgcagggcggcggagataagattgaaacgttgattatcaacgctgctgagtgcgagccgtacattaccgccgatgaccgtttgatgcaggattgcgcggctcaggtcgtagagggtatccgcatccttgcgcatattctgcagccacgcgaaattcttatcggtattgaagataacaaaccgcaggcgatttccatgctgcgtgcggtgctggcagactctcacgatatttctctgcgggtgattcccaccaaatatccttctggcggtgctaaacaattaacctacattctgaccgggaagcaggttccacatggcgggcgttcatccgatatcggcgtattaatgcaaaacgtcggcaccgcttatgcagtgaaacgtgccgttattgatggcgagccgattaccgagcgtgtcgtgaccctgactggcgaagcaatcgctcgcccgggcaacgtctgggcacggctgggtacgccagtgcgtcatttattgaatgatgccggattctgcccctctgccgatcaaatggtgattatgggcggcccgctaatgggctttaccttgccgtggctggatgtcccggtcgtaaagattaccaactgtcttttggctccctctgccaatgaacttggcgaaccacaggaagaacaaagttgcatccgttgtagcgcctgtgctgacgcctgccctgcggatcttttgccgcaacagctgtactggttcagcaaaggtcagcaacacgataaagccaccacgcataacattgccgactgcattgaatgtggagcttgcgcgtgggtttgcccgagcaatatccccctggtgcaatatttccgtcaggaaaaagctgaaattgcggctattcgtcaggaagaaaagcgcgccgcagaagccaaagcgcgtttcgaagcgcgccaggctcgtctggagcgcgaaaaagcggctcgccttgaacgacataagagcgcagccgttcaacctgcagccaaagataaagatgcgattgctgccgctctggcgcgggtgaaagagaaacaggcccaggctacacagcctattgtgattaaagcgggcgaacgcccggataacagtgcaattattgcagcacgggaagcccgtaaagcgcaagccagagcgaaacaggcagaactgcagcaaactaacgacgctgcaaccgttgctgatccacgtaaaactgccgttgaagcggctattgcccgcgccaaagcacgtaagctggaacagcaacaggctaatgcggagccagaagaacagattgatccgcgcaaagccgccgtcgaagcggctattgcccgtgccaaagcacgcaagctggaacagcaacaggctaatgcggagccagaagaacagattgatccgcgcaaagccgccgtcgaagcggctattgcccgtgccaaagcacgcaagctggaacagcaacaggctaatgcggagccagaagaacagattgatccgcgcaaagctgccgtcgaagcggctattgcacgcgccaaagcgcgcaagctggaacagcaacaacaggctaatgcggaaccagaagaacaggtcgatccgcgcaaagctgccgtcgaagcggctattgcacgcgccaaagcgcgcaagctggaacagcaacaacaggctaatgcggaaccagaagaacaggtcgatccgcgcaaagctgccgtcgaagcggctattgcacgcgccaaagcgcgcaagctggaacagcaacaacaggctaatgcggaaccagaagaacaggtcgatccgcgcaaagctgccgtcgaagcggctattgcacgcgccaaagcgcgcaagctggaacagcaacaacaggctaatgcggaaccagaagaacaggttgatccacgcaaagccgccgtcgaagcggctattgcccgtgccaaagcacgcaagctggaacagcaacaggctaatgcagagccagaagaacagattgatccgcgcaaagcggcagttgctgcggctattgcccgcgttcaggccaaaaaagccgcccagcaaaaggttgtaaacgaggactaa

SEQ ID NO: 3342 - DNA, 1059 bp, Escherichia coli
atggtattcagaatagctagctccccttatacccataaccagcgccagacatcgcgcattatgctgttggtattgctcgcagccgtgccaggaatcgcagcgcaactgtggttttttggttggggtactctcgttcagatcctgttggcgtcggtcagtgctcttctggccgaagctctcgtcctcaaactacgcaagcagtcggtagctgcaacgttgaaagataactcagcattgctgacaggcttattgctggcggtaagtattccccccctcgcgccatggtggatgatcgtgctgggtacggtgtttgcggtgatcatcgctaaacagttgtatggcggtctggggcaaaacccgtttaatccggcaatgattggttatgtggtcttactgatctccttcccggtgcagatgaccagttggttaccgccacatgaaattgcggtcaacatccctggttttatcgacgccatacaggttattttcagtggtcataccgccagtggtggtgatatgaacacgctacgcttaggtattgatggcattagtcaggcgacaccgctggatacatttaaaacctctgtccgtgccggtcattcggttgaagagattatgcaatatccgatctacagcggtattctggcgggcgctggttggcaatgggtaaatctcgcctggctggctggcggcgtgtggttgctatggcagaaagcgattcgctggcatattcccctcagcttcttagcaacgttggcgttatgcgcaacgttgggctggttgttctcaccagatactctggcagcaccgcaaattcatctgctgtctggtgcgaccatgctcggcgcattctttattttgactgacccggttaccgcttctacgaccaatcgtggtcgtcttattttcggcgcgctggcgggcttattagtctggatgatccgcagtttcggcggctatcctgacggcgtggcttttgccgtcctgctggcgaacatcacggttcctctgatcgattactacacgcgtccgcgcgtctacggccatcgcaaagggtaa

SEQ ID NO: 3343 - DNA, 621 bp, Escherichia coli
atgctgaaaactatccgaaaacacggcattacgttggcgctctttgcagcgggttcaacagggttaactgcggccatcaaccagatgaccaaaacgacaattgctgaacaggccagtctgcaacaaaaggcgttatttgatcaggtgctgccagctgaacgctataacaatgcgctggcacagagttgctatctggtaactgcgccagagttaggtaaaggtgagcatcgggtttacatcgccaaacaggatgacaaaccggtagccgccgttctggaagcaaccgcgccagatggctattccggtgcgattcagctgctggtgggagccgattttaacggcacggtacttggcacgcgcgtgactgagcaccacgaaacgccagggcttggcgataaaatcgaactgcgcctttctgactggatcacccattttgcgggtaaaaaaatcggtggtgcggatgatgcgaactgggcggtgaagaaagatggtggtgatttcgaccagttcaccggcgcgacgattactccccgcgcggtggttaatgcggtaaaacgcgccggattgtacgctcagacgttaccggcacaactttctcaacttcctgcctgtggagaataa

SEQ ID NO: 3344 - DNA, 696 bp, Escherichia coli
gtgagcgaaattaaagacgttattgttcaggggttgtggaaaaacaactctgcgctggtccagttgctcggcctttgtccgctgttggcggtcacgtccactgccactaacgctctgggtttaggacttgcgactacgctggtactgacgctaaccaacctgaccatttcgacgctgcgtcactggacgcccgccgagatccgcattcccatttacgtgatgatcatcgcctcggtggtcagcgctgtacagatgctgatcaacgcctacgcctttggcctgtatcaatcattagggatttttattccgctgattgtcactaactgtatcgttgtgggccgcgctgaagccttcgccgccaaaaaaggtccggcgctttcggcactggacggcttttcaattggtatgggcgcaacctgcgccatgttcgtgctgggttcactacgcgaaattatcggcaatggcacgttgtttgacggtgcagatgcgctgttaggtagctgggcaaaagtattacgcgtggagattttccacaccgactcccctttcctgctggcgatgctgccaccaggtgcatttattggcctgggactgatgctggcaggaaaatacctgattgatgaaaaaatgaaaaagcgccgtactgaagcagctgccgaacgtgcattgccaaacggtgaaacagggaatgtctga

SEQ ID NO: 3345 - DNA, 636 bp, Escherichia coli
atgaacaaagcaaaacgcctggagatcctcactcgcctgcgtgagaacaatcctcatcccaccaccgagcttaatttcagttcgccttttgaattgctgattgccgtactgctttccgctcaggcgaccgatgtcagtgttaataaggcgacggcgaaactctacccggtggctaatacgcctgcagcgatgcttgaactgggcgttgaaggggtgaaaacctatatcaaaacgattggcctttataacagcaaagcagaaaatatcatcaaaacctgccgtatattactggaacaacataatggcgaggttccggaagatcgtgctgcgcttgaagccctgcctggtgtaggtcgtaaaacagccaacgtcgtattaaacactgcattcggctggccgactattgctgtcgacacgcacattttccgcgtttgtaatcgtacacaatttgcgccggggaaaaacgtcgaacaggtagaagaaaagctactgaaagtggttccggcagagtttaaagtcgactgccaccattggttgatcctgcacgggcgttatacctgcattgcccgcaagcctcgctgtggctcttgtattattgaagatctttgtgaatacaaagagaaagttgacatctaa

SEQ ID NO: 3346 - DNA, 1503 bp, Escherichia coli
gtgtccacagcaaaccaaaaaccaactgaaagcgtcagtttaaacgcttttaaacaaccgaaggcgttctatctcatcttctcgattgagttatgggaacgttttggttattacggcctacaaggaattatggctgtttacctggttaaacaactgggtatgtctgaagcggattcaatcacccttttctcttcctttagtgccctggtttatggtctggtcgctatcggcggctggttaggtgacaaggtactgggtactaaacgcgtaattatgctcggcgctattgtgctggcgattggttatgctctggttgcctggtctggtcacgacgccggtatcgtttatatgggtatggcggctattgcggtcggtaacggcctgtttaaagctaacccgtcttctctgctttctacatgctatgagaaaaacgacccgcgtctggacggtgcattcaccatgtactacatgtccgtcaacatcggctctttcttctctatgattgctacgccgtggctggccgcgaaatacggctggagtgttgcgtttgcgttgagcgttgtaggcctgctgatcactatcgttaacttcgccttctgccaacgttgggttaaacagtacggttcaaaaccagacttcgagcctatcaactaccgtaacctgctgctgaccattattggtgttgtggcactgatcgctatcgccacctggctgctgcacaatcaggaagttgcgcgtatggcgctgggcgttgttgccttcggtatcgtggttatcttcggtaaagaagccttcgcgatgaaaggtgctgcgcgtcgtaaaatgatcgttgccttcatcctgatgctcgaagccattatcttcttcgtgctttatagccagatgccaacgtcactgaacttctttgcgattcgtaacgttgaacacaccattctgggcctggccgtagaacctgagcagtatcaggcactgaacccgttctggatcatcattggtagcccgattctggccgctatctataacaagatgggcgataccctgccaatgccaaccaagtttgctatcggcatggtgatgtgttctggtgcgttcctgattctgccgctgggtgcgaaattcgcgtctgacgctggtatcgtgtctgtaagctggctggtcgcgagctatggcctgcagagtatcggggaactgatgatctctggcctgggtctggcaatggttgcacaactcgttccgcagcgtctgatgggcttcattatgggtagctggttcctgaccactgccggtgcaaacctgattggtggttatgttgcaggtatgatggctgtgccggataacgttaccgatccgctgatgtcactggaagtctatggtcgcgtattcttgcagattggtgtcgctactgccgttattgcagtactgatgctgtttaccgcgccgaaactgcaccgcatgacgcaggatgacgctgcagacaaagcggcgaaagcagccgtagcgtaa

SEQ ID NO: 3347 - DNA, 606 bp, Escherichia coli
atgaaattgttctacaaaccgggcgcctgctctctcgcttcccatatcaccctgcgtgagagcggaaaggattttacgctcgtcagtgtggatttaatgaaaaaacgtctcgaaaacggtgacgattactttgccgttaaccctaagggacaggtacctgcattgctgctggacgatggtactttgctgacggaaggcgtagcgattatgcagtatcttgccgacagcgtccccgaccgccagttgctggcaccggtaaacagtatttcccgctataaaaccatcgaatggctgaattacatcgccaccgagctgcataaaggtttcacacctctgtttcgccctgatacaccggaagagtacaaatcgacagttcgcgcgcagctggagaagaagctgcaatatgtgaacgaggcactgaaggatgagcattggatctgcgggcaacgatttacaattgctgatgcctatctgtttacggttctgcgctgggcatacgcggtgaaactgaatctggaagggttagagcacattgcggcatttatgcaacgtatggctgaacgtccggaagtacaagacgcgctgtcagcggaaggcttaaagtaa

SEQ ID NO: 3348 - DNA, 861 bp, Escherichia coli
atgaaaaatattctcgctatccagtctcacgttgtttatggtcatgcgggtaacagtgcggcagagtttccgatgcgccgcctgggcgcgaacgtctggccgctgaacaccgttcaattttctaatcacacccaatacggcaaatggaccggttgcgtgatgccgcccagccatttaaccgaaattgtgcaaggcattgccgccattgataaattacacacctgtgatgccgtattaagtggctatctgggatcggcggagcagggtgaacatatcctcggtatcgttcgtcaggtgaaagcagcgaatccacaggcgaaatatttttgcgatccggtaatgggtcatccggaaaaaggctgtatcgttgcaccgggtgtcgcagagtttcatgtgcggcacggtttgcctgccagcgatatcattgcgccgaatctggttgagctggaaatactctgtgagcatccggtaaataacgtcgaagaagcggttctggcagcgcgcgaactcattgcgcaagggccacaaattgtgttggttaaacacctggcgcgagctggctacagccgtgaccgttttgaaatgctgctagtcaccgccgatgaagcctggcatatcagccgtccgctggtggattttggtatgcgccagccggtaggtgttggtgatgtgacgagcggtttactgctggtgaaactgcttcagggggcaacgctgcaggaggccctggaacatgtgaccgctgcagtatacgaaatcatggtgaccacaaaagcaatgcaggaatatgagctgcaagtggttgctgctcaggatcgtattgccaatccagaacattatttcagtgcaacaaagctctga

SEQ ID NO: 3349 - DNA, 1275 bp, Escherichia coli
atggcaagcagtaacttgattaaacaattgcaagagcgggggctggtagcccaggtgacggacgaggaagcgttagcagagcgactggcgcaaggcccgatcgcgctctattgcggcttcgatcctaccgctgacagcttgcatttggggcatcttgttccattgttatgcctgaaacgcttccagcaggcgggccacaagccggttgcgctggtaggcggcgcgacgggtctgattggcgacccgagcttcaaagctgctgagcgtaagctgaacaccgaagaaactgttcaggaatgggtggacaaaatccgcaagcaggttgccccgttcctcgatttcgactgtggagaaaactctgctatcgcggcgaacaactatgactggttcggcaatatgaatgtgctgaccttcctgcgcgatattggcaaacatttctccgttaaccagatgatcaacaaagaagcggttaagcagcgtctcaaccgtgaagatcaggggatttcgttcactgagttttcctacaacctgttgcagggttatgacttcgcctgtctgaacaaacagtacggtgtggtgctgcaaatcggtggttctgaccagtggggtaacatcacttctggtatcgacctgacccgtcgtctgcatcagaatcaggtgtttggcttgaccgttccgctgatcaccaaagcagacggcaccaaatttggtaaaactgaaggcggcgcagtctggttggatccgaagaaaaccagcccgtacaaattctaccagttctggatcaacactgcggatgccgacgtttaccgcttcctgaagttcttcaccttcatgagcattgaagagatcaacgccctggaagaagaagataaaaacagcggtaaagcaccgcgcgcccagtatgtgcttgcagaacaggtgacacgtctggtgcatggtgaagaaggtttgcaggcggcaaaacgtattaccgaatgcctgttcagcggttccttgagtgcgctgagtgaagcggacttcgaacagctggcgcaggacggcgtaccgatggttgagatggaaaagggcgcagacctgatgcaggcgctggtcgattctgaactgcaaccttcccgtggtcaggcgcgtaaaactatcgcctccaatgccatcactattaacggtgaaaaacagtccgatcctgaatacttctttaaagaagaagatcgtctgtttggtcgttttaccttactgcgtcgcggcaaaaagaattactgtctgatttgctggaaataa

SEQ ID NO: 3350 - DNA, 657 bp, Escherichia coli
atgtctgataacgacgaattgcagcaaatcgcgcatctgcgccgtgaatacaccaaaggcgggttacgccgccgcgatctacccgccgatccattaaccctttttgaacgttggctctctcaggcttgtgaagccaaactggctgaccctaccgcgatggtggtcgctaccgtggatgaacatggtcagccttatcagcgcatcgttttactcaaacattacgacgaaaaaggcatggtgttttacaccaacctcggcagccgtaaagcacatcaaatcgaaaataatccgcgcgttagcctgctgttcccgtggcatacccttgaacgccaggtgatggtgatcggtaaagcggaacgactttcgactctcgaagtgatgaaatattttcatagtcgcccccgtgatagccagattggtgcatgggtttctaagcagtccagtcgcatttctgcccgcggtatccttgaaagtaaattcctggagctgaagcagaagtttcaacagggcgaagtgccattgccgagtttttggggcggttttcgcgtcagccttgaacagattgagttctggcagggcggtgagcatcgcctgcatgaccgctttttgtaccagcgtgaaaatgatgcgtggaagattgatcgtcttgccccctga

SEQ ID NO: 3351 - DNA, 324 bp, Escherichia coli
atggaaaaactgttactgatctgtttgccggtgcttctcaccggctgtagcgcgttcaatcaactggttgagcgcatgcaaaccgatacgctggaataccagtgtgatgaaaaaccgttgacggtcaaactgaataatccgcgccaggaagtcagttttgtttacgataatcaactactgcatctcaaacagggcatttcagcgtctggtgcacgttacaccgacggaatctatgttttctggtcgaaaggcgaggaagcgactgtctataaacgcgaccgcatcgtcttgaataactgtcagttacaaaatccgcagcgttga

SEQ ID NO: 3352 - DNA, 1110 bp, Escherichia coli
atgaaatcgggccgctttattggcgttatgtcaggcaccagccttgatggtgttgatgttgtgttggcgacaattgatgaacaccgggtcgcacagctggcaagtttgagctggccgatcccggtgtctctgaaacaggctgtactggatatttgccagggccagcagcttacactttcgcagtttggacagcttgatactcaactcgggcgactttttgctgatgcggtcaatgccttgcttaaggaacaaaacctgcaggcgagagatatagttgcgatcggctgtcacggtcaaaccgtctggcatgaaccgacgggcgtggcaccacacactttacagattggcgataacaatcaaattgtggcgcgcaccggaattacggttgtcggtgattttcgccgtcgcgatattgccttgggaggacaaggtgcaccgctggtacctgcgttccatcatgcgctgctggctcacccaaccgagcgacgaatggtgctcaatattggcggcatcgccaatctgtcactgctcattcctggccagccggttgggggctacgataccggtcctggtaacatgctgatggatgcctggatctggcgtcaggccggtaaaccttacgataaagatgccgagtgggcacgggcgggtaaagttattctcccactgctgcaaaatatgctcagcgacccatatttctcgcaacccgcaccgaaaagcaccggacgcgaatactttaactacggctggctggagcgccatttgcgccattttccgggggttgatccccgtgatgtgcaggccacagtggcagaactcaccgccgtgaccatttctgaacaagttttgttgagcggtggctgcgaacgattgatggtatgcggtggaggtagtcgtaatccgctactcatggcgcgtctggcggcattactgccaggcacagaagtcaccaccaccgatgccgttggcattagtggcgatgacatggaagcattggcgttcgcctggcttgcctggcgaacgctggcgggaataccaggaaatctgccttccgtcactggcgcaagccaggagacggtactgggggctattttccccgctaacccgtga

SEQ ID NO: 3353 - DNA, 468 bp, Escherichia coli
atgattaaacgcgtattggttgtttcaatggtaggtctgtctcttgtcggttgtgttaataacgacaccctgtcaggggatgtttataccgcttctgaagcgaaacaagtacagaatgtcagctatggcaccatcgttaatgtacgtcaggtacagattcagggcggtgatgattccaacgttatcggcgcaattggtggtgctgtacttggtggtttcctgggaaatactattggcggcggaaccgggcgttctctggctactgcagcaggggctgttgcaggtggtgtagccggtcagggcgtacagagtgcaatgaacaaaacgcagggtgtcgagctggaaattcgtaaagatgatggcaacaccatcatggtggtacagaaacaagggaacactcatttctctccaggccaacgtgtcgtactggccagcaatggcagtcaggtgaccgtttccccgcgctaa

SEQ ID NO: 3354 - DNA, 435 bp, Escherichia coli
ttggaatcgccactaggttctgatctggcacggttggtgcgcatatggcgtgctctgatagaccatcgcctgaaaccgctggagttaacacaaacccattgggttacgttacacaatatccatcagttacctccagaccagtcgcaaattcaactggcaaaagcgattggcatcgagcagccatcactggtccgtacgctggaccaactggaagaaaaagggttaatttcgcgtcaaacttgtgccagcgatcgtcgggctaaacgtattaaactgacggaaaaggcagagccactgatcagcgaaatggaagctgttattaacaaaacccgcgcggaaattttacatggcatctccgcagaggaactggaacaactgattaagctcatcgcaaaacttgagcataatatcattgagttacaggccaaagggtga

SEQ ID NO: 3355 - DNA, 237 bp, Escherichia coli
gtgaagtttatgctcaatgcaacaggattgcccttacaagatctggtgttcggtgcgtccgtctactttcctccgtttttcaaagcattcgcatttggattcgtcatctggcttgtcatacaccgcctgcttcgaggctggatctacgccggtgacatctggcatcccttgttaatggatttatcgctgtttgcgatttgcgtttgccttgctctggcaatactgattgcgtggtaa

SEQ ID NO: 3356 - DNA, 858 bp, Escherichia coli
atgtcaattaaaacaattaagtatttctcaacaatcattgtagcggtagttgcggttcttgccggatggtggctgtggaatttttacatgcaatctccgtggacacgcgacgggaaaatacgcgcagaacaggtttctatcaccccacaggtgtcgggacgtattgttgagctgaatataaaagacaaccagctggttaacgcgggggatcttctgctcacgatcgataaaacgccctttcagatcgccgagctgaacgcacaggctcagctggcgaaagcgcaatctggcctcgcaaaagccaataacgaagcgaatcgtcgtcgtcatctctcacaaaattttatttctgccgaagaactcgataccgctaacctcaatgttaaagcgatgcaggccagcgttgatgccgcacaggcgacgctgaaacaggcacaatggcaactggcacaaacggaaattcgcgccccggtgagtggatgggtgactaatctcactacccgcatcggcgactacgctgacaccgggaaaccgctgtttgcccttgttgacagccactcgttttacgtcattggttattttgaagaaaccaagttgcgccatatccgcgaaggtgcaccagcacaaattaccctctatagtgataacaaaacgttacagggtcacgtgtccagtatcggtcgggcgatttatgatcagagcgttgaaagtgactcaagccttattccggatgtgaaacctaacgtcccctgggttcgcctcgcccaacgcgttcccgtccgctttacgctggataaagtcccaggcgatgtcacgctggtgtcgggcaccacctgtagcattgccgtaggtcaataa

SEQ ID NO: 3357 - DNA, 2013 bp, Escherichia coli
atgaacgcatcgtcatggtccttgcgcaatttgccctggttcagggccacgctggcgcaatggcgttatgcgttacgcaataccattgccatgtgtctggcgctgacggttgcctattatttgaatctggatgagccctattgggcgatgacctcggctgcggtggttagctttcccaccgttggcggtgtcatcagcaaaagcctcggacgcatcgctggcagtttgctcggagccattgcggcactgcttcttgccggacatacgctcaatgagccgtggttttttctattgagcatgtcggcgtggcttggcttttgtacctgggcctgtgcgcacttcacgaataacgtcgcgtatgcatttcaactggcgggctacacggctgccatcatcgcctttccgatggttaatattactgaggccagccagctgtgggatatcgctcaggcgcgtgtttgcgaggtgatagtcggtattttgtgcggcggcatgatgatgatgatcctgccgagcagttccgatgctacagcccttttaaccgcattgaaaaacatgcacgcccgattactggaacatgccagtttactctggcggcctgaaacaacagatgccattcgtgcagcacatgaaggggtgattgggcagatactgaccatgaatttgctgcgtatccaggctttctggagccactatcgttttcgccagcaaaacgcgcgccttaatgcgctactccaccagcaattacgtatgaccagtgtcatctccagcctgcgacgtatgttgctcaactggccctcaccgccagatgccacgcgagaaattctcgaacagctgctgacggcgctcgccagttcgcaaacagatgtttacaccgtcgcacgtattatctccccgctacgcccgaccaacgtcgccgactaccggcacgtcgccttctggcagcgactacgttatttttgccgcctttatctgcaaagtagtcaggaattacatcgtctgcaaagcggtgtagatgatcatgccagactcccacggacatccggcctggctcgtcataccgataacgccgaagctatgtggagcgggctgcgtacattttgtacgttaatgatgattggcgcatggagtattgcttcgcaatgggatgccggtgccaatgctttaacgctggcagcaattagctgcgtactctactccgccgtcgcggcaccgtttaagtcgttgtcactgctgatgcgcacgctggtgttactttcgctattcagctttgtggtcaaatttggcctgatggtgcagattagcgatctgtggcaatttttactgtttctctttccactgctggcgacgatgcagcttcttaaattgcagatgtccaaatttgccgcactgtgggggcaactgattgtttttatgggttcgtttatcgctgtcactaatcccccggtgtatgattttgctgattttcttaacgataatctggcaaaaattgttggcgtcgcgttggcgtggttagcgttcgccattctgcgtccaggatcggatgctcgtaaaagccgccgccatattcgcgcgctgcgccgggattttgtcgatcaactaagccgccatccaacactgagtgaaagcgaatttgaatcgctcacttatcatcacgtcagtcagttgagtaacagccaggatgcgctggctcgccgttggttattacgctggggtgtagtgttgctgaactgttctcatgttgtctggcaattgcgcgactgggaatcgcgttccgatccgttatcgcgagtacgggataactgtatttcactgttgcggggagtgatgagtgagcgtggcgttcagcaaaaatcactggcggccacacttgaagaattacagcggatttgcgacagccttgcccgtcatcatcaacctgccgcccgagagctggcggcaattgtctggcggctgtactgctcgctttcgcaacttgagcaagcaccgccgcaaggtacgctggcttcttaa

SEQ ID NO: 3358 - DNA, 522 bp, Escherichia coli
atgaaacgttttagtctggccattctggcgctggttgttgcgaccggcgcacaagctgccagtgaaaaagtcgagatgaacctcgtcacgtcgcaaggggttgggcagtcaattggtagcgtcaccattactgaaaccgataaaggtctggagttttcgcccgatctgaaagcattacctcccggtgaacatggcttccatattcatgccaaaggaagctgccagccagccaccaaagatggtaaagccagcgccgcagaatccgcaggcgggcatcttgatccacaaaataccggtaaacatgaagggccagaaggtgccgggcatttaggcgatctgcctgcactggtagtcaataatgacggcaaggcgaccgatgccgtcatcgcacctcgtctgaaatcactggatgaagtcaaagacaaagcgctgatggtccacgttggcggcgataatatgtccgatcaacccaaaccgctgggcggtggcggtgaacgctatgcctgtggtgtaattaagtaa

SEQ ID NO: 3359 - DNA, 897 bp, Escherichia coli
atggttcagcgtattactattgcgccgcaaggcccggagttttcccgttttgtgatgggctactggcgattgatggactggaacatgtccgcccgccagttggtcagttttattgaagagcatctggatctcggcgtgaccaccgtggaccatgctgatatttatggtggctatcagtgcgaagcggcgtttggcgaggcgctgaaactggcacctcacctgcgtgaacggatggaaatcgtcagtaaatgcggtatcgcgacgaccgcgtgtgaagaaaacgtcattggccattacctcactgaccgcgatcacatcattaagagcgccgaacagtcgctaattaatctcgcgaccgatcatctggatctgctgttaatccaccgaccagacccgttaatggatgccgatgaagtggcggacgcctttaaacatctgcatcagagcggcaaagtgcgtcattttggtgtatcaaactttacacctgcgcaatttgcgctgttgcaatcacgcctgccatttactcttgccactaatcaggtggaaatatccccggtgcatcagccgttactgctggatggcacgctcgaccaactgcaacaactgcgtattcgtccgatggcgtggtcctgccttggtggtggtcgtctgtttaatgatgattatttccagccgctgcgtgatgaactggctgtggtggcagaggagttaaacgcgggctcgattgaacaggtagtttacgcctgggtactacgtttaccgtcgcagccgctgccaattatcggctcaggtaaaattgagcgcgtacgggcagctgtcgaagcagaaacactgaaaatgacccgtcaacaatggtttcgtatccgtaaagcggcactaggttacgacgtaccgtaa

SEQ ID NO: 3360 - DNA, 240 bp, Escherichia coli
gtgacggagcaattagagttctttcccgtccagagcccgtgccggggaatttgccagtctgacgaacggggattttgtcgcggctgttttcgtagccgggatgagcgttttaactggaataagatgagcgatggcgaaaaacaagaagtgttgcgcctttgtcggcagcgattaatgcgcaaattacgtgtaaataagccagcgccatcagacgaaccggagcaaccatcactcttttga

SEQ ID NO: 3361 - DNA, 600 bp, Escherichia coli
atgaacaaacacaccgaacatgatactcgcgaacatctcctggcgacgggcgagcaactttgcctgcaacgtggattcaccgggatggggctaagcgaactcctaaaaaccgctgaagtgccgaaagggtccttctatcactactttcgttctaaagaagcgtttggcgttgctatgcttgagcgccattacgccgcatatcaccagcgactgactgagttgctgcaatccggcgaaggtaactaccgcgaccgcatactggcttattaccagcaaacactgaaccagttttgccaacatggaaccatcagtggttgcctgacagtaaaactctctgccgaagtgtgcgatctgtcagaagatatgcgcagcgcaatggataaaggggctcgcggcgtgatcgccctgctctctcaggcgctggaaaatggccgtgagaaccattgtttaaccttttgtggcgaaccgctgcaacaggcacaagtgctttacgcactgtggcttggcgcgaatctgcaggccaaaatttcgcgcagtttcgagccactggaaaacgcgctggcccatgtaaaaaacattattgcgacgcctgccgtttag

SEQ ID NO: 3362 - DNA, 1098 bp, Escherichia coli
atgtcatctgaaaaactgtattccccactgaaagtgggcgcgatcacggcggcaaatcgtatttttatggcaccgctgacgcgtctgcgcagtatcgaaccgggtgacatccctaccccgttgatggcggaatactatcgccaacgtgccagcgccggtttgattattagcgaagccacgcaaatttctgcccaggcaaaaggatacgcaggtgcacctggcatccatagcccggaacaaattgccgcatggaaaaaaattaccgctggcgttcatgctgaaaatggtcatatggccgtacagctgtggcacaccggacgcatttctcacgccagcctgcaacctggcggtcaggcaccggtagcgccttcagcacttagcgcgggaacacgtacttctctgcgcgatgaaaatggtcaggcgatccgtgttgaaacatccatgccgcgtgcgcttgaattgggagagattccgggtatcgtcaatgatttccgtcaggccattgctaacgcgcgtgaagccggttttgatctggtagagctccactctgctcacggttatttgctgcatcagttcctttccccttcttcaaaccatcgtaccgatcagtacggcggcagcgtggaaaatcgcgcgcgtctggtgctggaagtggtcgatgccgggattgaagaatggggtgccgatcgcattggcattcgcatttcgccaatcggtactttccagaacacggataacggcccgaatgaagaagccgatgcactgtatctgattgaacaactgggtaaacgcggcattgcttatcttcatatgtcagaaccagattgggcgggaggtgaaccatatactgatgcgtttcgcgaaaaagtacgcgcccgtttccacggtccgattatcggcgcaggtgcatacacagtagaaaaagctgaaacgctgatcggcaaagggttaattgatgcggtagcatttggtcgtgactggattgcgaacccggatctggtcgcccgcttgcagcgcaaagctgagcttaacccgcagcgtgccgaaagtttttatggtggcggtgctgaaggttacactgattacccgacgctgtaa

SEQ ID NO: 3363 - DNA, 408 bp, Escherichia coli
atgcgtcttcttcataccatgctgcgcgttggcgatctgcaacgctccatcgatttttataccaacgtgctgggcatgaaactgctgcgtaccagcgaaaacccggaatacaaatactcactggcgtttgttggttacggcccggaaaccgaagaagcagtgattgaactgacctacaactggggcgtggataaatacgaactcggcactgcttatggtcacatcgcgcttagcgtagataacgccgctgaagcgtgcgaaaaaatccgtcaaaacgggggtaacgtgacccgtgaagcgggtccggtaaaaggcggtactacggttatcgcatttgtggaagatccggacggttacaaaattgaattaatcgaagagaaagacgccggtcgcggtctgggcaactaa

SEQ ID NO: 3364 - DNA, 648 bp, Escherichia coli
atgtccgataacgctcaacttaccggtctgtgcgaccgttttcgtggtttttatcctgttgtgatcgatgttgaaacagccggatttaacgccaaaaccgatgcgctgcttgagattgccgccatcaccctgaaaatggatgaacaaggctggctgatgccggacaccacattacatttccacgtcgaaccatttgtcggcgcaaatttgcaaccagaggcccttgccttcaacggcattgacccaaacgatcccgatcgcggcgcggtcagcgagtacgaggcgctgcacgaaatttttaaagttgtacgtaaaggtattaaagcgagcggttgtaaccgcgccattatggtggcacacaacgccaatttcgatcacagctttatgatggccgccgcagaacgcgcctcactgaaacgtaacccgttccaccctttcgccacttttgacactgctgcactggccgggctggcactcggacaaaccgtattgtcaaaggcttgccagacagctggcatggacttcgacagcacccaggcgcactccgcgctgtacgacaccgaacgcactgctgtgctgttttgtgaaatcgtcaaccgctggaaacgtctgggaggctggccactacctgccgccgcagaggtgtaa

SEQ ID NO: 3365 - DNA, 348 bp, Escherichia coli
atgagcaccactatcgaaaaaatccaacgccagattgctgaaaacccgatcctgctgtacatgaaaggttcaccgaaactgccgagctgcggtttctctgcccaggcagtccaggcgcttgccgcatgtggcgaacgttttgcctatgttgatattctgcagaatccggacattcgtgcggaactgccgaaatatgcgaactggccgaccttcccgcaactgtgggttgacggcgagctggtgggcggttgtgatatcgtgatcgaaatgtatcagcgtggtgaactgcagcagctgatcaaagaaactgccgctaaatacaagtctgaagagccggacgcggaataa

SEQ ID NO: 3366 - DNA, 828 bp, Escherichia coli
gtggcgcggataaaccgtatttcgatcacgctctgtgctttactttttaccaccctgcctttaacgcctatggcccatgcttcaaagcaagccagggagagttctgctaccactcatatcaccaaaaaagcagataaaaagaaaagcacggcaaccacccaaaagacccagaaagccagccagaaaacagcgaaaaaagccgccagtaaaagtacgaccaaaagcaaaaccgcttcttccgttaaaaaatcttccattaccgcttctaaaaacggcaaaactcgcagcaaacacgccgtcaataaaacggcctcagccagctttaccgaaaagtgtaccaaacgtaagggctataaatcgcattgtgtgaaagtcaaaaatgccgcgtcaggaacccttgccgacgcgcacaaagcgaaggtgcaaaaagccacaaaagtggcaatgaataaactgatgcagcaaattggtaagccatatcgttggggtggcagctcaccgcgtaccggttttgattgcagcggtctggtttattatgcttataaagatttggtgaaaattcgtattccgcgtacggcgaatgaaatgtatcacctgcgcgatgcagcgccaatcgaacgtagtgaactgaaaaacggcgacctggtcttcttccgtactcagggacgcggtacagccgatcatgtcggcgtgtatgtcggcaacggcaaatttattcagtcaccgcgcacgggccaagaaattcaaatcacttctctcagtgaagactactggcagcgccactatgttggcgctcgccgggtaatgaccccaaaaacacttcgctaa

SEQ ID NO: 3367 - DNA, 582 bp, Escherichia coli
atgtcattcgaattacctgcactaccatatgctaaagatgctctggcaccgcacatttctgcggaaaccatcgagtatcactacggcaagcatcatcagacttatgtcactaacctgaacaacctgatcaaagataccgcgtttgaaggtaaatcactggaagagattattcgcagctctgaaggtggcgtattcaacaacgcagctcaggtctggaaccatactttctactggaactgcctggcaccgaacgcgggtggcgaaccgactggaaaagtcgctgaagctatcgccgcatcttttggcagctttgccgatttcaaagctcagtttactgatgcagcgatcaaaaactttggttctggctggacctggctggtgaaaaacagcgatggcaaactggctatcgtttcaacctctaacgcgggtactccactgaccaccgatgcgactccgctgctgaccgttgatgtctgggaacacgcttattacatcgactatcgcaatgcacgtcctggctatctggagcacttctgggcgctggtgaactgggaattcgtagcgaaaaatctcgctgcataa

SEQ ID NO: 3368 - DNA, 1935 bp, Escherichia coli
atgtttcaggacaacccgctgctagcgcagcttaaacagcaactgcattcccagacgccacgcgctgaaggggtggtaaaagccacagaaaaaggctttggcttcctggaagtcgacgcgcaaaaaagttatttcattccgccgccgcagatgaaaaaagtcatgcatggcgaccgaattatcgcggtgatccacagtgaaaaagaacgtgaatccgcagagccagaagaactggttgaaccgttcctgactcgtttcgtgggtaaagttcagggcaaaaatgaccgtctggccatcgttcctgatcatccactcttaaaagacgccattccttgccgcgcagcccgtggcctgaaccacgagtttaaagaaggcgactgggcggttgccgaaatgcgccgtcatccgctgaaaggcgatcgttctttctatgctgaactgacacaatacatcacttttggtgacgatcactttgtaccgtggtgggttacccttgcgcgtcataacctggaaaaagaagcaccagacggcgtcgctaccgaaatgctcgatgaaggtctggttcgtgaagatctgactgcgctggattttgtcaccatcgacagtgccagcacagaagatatggatgacgcccttttcgctaaggcgttgccggatggcaaacttcagctgattgtggcgattgccgatccaaccgcgtggattgctgaaggcagcaagctggacaaagccgcgaaaattcgcgcattcaccaactatctgcctggcttcaacatccctatgctgcctcgcgagctttctgacgatctctgctcactgcgcgccaatgaagtccgcccggtactggcatgccgcatgacgctctccactgatggcaccattgaagataatatcgaattctttgccgccaccatcgaatccaaagcgaagctggtgtatgaccaggtttctgactggctggaaaataccggtgactggcagcctgaaagcgaagcaattgccgaacaagtccgtttgctagcgcaaatatgccaacgccgcggcgagtggcgtcataaccacgcactggtgtttaaagatcgcccggattaccgctttattctcggtgaaaaaggtgaagtgctggatatcgtcgccgagcctcgtcgcattgccaaccgtatcgtcgaagaagcgatgattgccgctaacatttgtgcggcccgcgtactgcgcgataagctcggttttggcatctataacgtgcatatgggctttgatccggcgaatgccgacgcgttggcagcgttgctgaaaacgcacggtctgcatgtcgatgctgaagaagtgctcacgctggacggtttctgcaaactgcgtcgtgaactggatgcgcaaccaactggtttcctcgacagccgcattcgtcgcttccagtcatttgctgaaattagcactgaacccggtcctcactttggcctcggtctggaagcatacgccacctggacttcgccgatccgtaaatatggcgacatgatcaaccaccgtctgctgaaagcggttatcaaaggcgaaactgcgacgcgtccacaggatgaaatcactgtccaaatggccgagcgtcgccgtctcaaccggatggcagaacgtgatgttggcgactggttatacgcacgcttcctgaaagacaaagccgggaccgacacccgtttcgcggcggaaattgtcgatatcagccgtggcggcatgcgtgttcgtttggttgataacggcgctatcgcctttattccagcacctttcttacacgctgtgcgcgatgaactggtttgcagccaggaaaacggcactgtacaaattaaaggtgaaacggcttacaaagtgactgacgttattgacgtcaccattgccgaagtccgcatggaaacccgcagcattattgcgcgcccagtcgcgtaa

SEQ ID NO: 3369 - DNA, 1128 bp, Escherichia coli
atggaacaacgccacatcaccggcaaaagccactggtatcatgaaacgcaatccagtactgcggagtatgacgttctgcctctggtcccggaagccgcaaaggtcagcgatccctttctgctcgacgtgatccttgatgaagaaacgctggcacccttcctttcatggctggtccctgcgcgcgttcttgcagtagagttgttccctgacccgcttaccgtgacccgttcacagaccttcaccgcttatgaacgcttgtcgacggccctgacggttgctcaggtttgcggcgtccaacggttatgtaactactattcggcgcgacttacgccgctccccgggcctgattcctccagggaaagtaatcatcggttggcacaaatcacgcaatatgcccgccaactggctagctcgccttctattatcgacaaccgatcgcgccagcatctgaatgacgttggtcttactgtctgtgactgtgtgatcattaaccaaatcattggttttattggctttcaggcgcggacaattgcgacatttcaggcttatctcgggcatccggtacgctggttacccgggctggagatacaaaactacgccgacgcgtcactgtttgctgatgaatcattacgctggcgaagcagctatgaggtggaaaaactccctgaagagcacacaaaaagttcaactgcagaactttgccaactggccaacacactctctctccaccctatttcactttcccttctcgaaaagttgttaaacagcacacgggtcaatacacagccggataatcagcttgcggcgttgttatgcgcgcggataaatggcagtcctgcttgttttgccgcctgtatgaattcatcaaatgaatataaaaaaatcagcccccttctgcgcaagggcgaaaatgaaattaaccgatgggctgaccgtcattctgttgagcgcgctaccgttcaggcgatacaatggctgacccgagcacccgatcgctttagcgccgcccagttcagcccattactcgaacacgaaaaatcatcaacgcagattattaatctgctggtatggagcgggctgtgtggctggataaatcgcttaaaaatcgcgttgggtgagacatattaa

SEQ ID NO: 3370 - DNA, 789 bp, Escherichia coli
atgggttttctttccggtaagcgcattctggtaaccggtgttgccagcaaactgtccatcgcctacggtatcgctcaggcgatgcaccgcgaaggagctgaactggcattcacctaccagaacgacaaactgaaaggccgcgtagaagaatttgccgctcaattgggttctgacatcgttctgcagtgcgatgttgccgaagataccagcatcgacaccatgttcgctgaactggggaaagtttggccgaaatttgacggtttcgtacactctattggttttgcacctggcgatcagctggatggtgactatgttaacgccgttactcgtgaaggcttcaaaattgcccacgacatcagctcctacagcttcgttgcaatggcaaaagcttgccgctccatgctgaatccgggttctgccctgctgaccctttcctaccttggcgctgagcgcgctatcccgaattacaacgttatgggtctggcaaaagcgtctctggaagcgaacgtgcgctatatggcgaacgcgatgggtccggaaggtgtgcgtgttaacgccatctctgcgggtccgatccgtactctggcggcttccggtatcaaagacttccgcaaaatgctggctcattgcgaagccgttaccccgattcgccgtaccgttactattgaagatgtgggtaactccgcggcattcctgtgctccgatctctctgccggtatctccggtgaagtggtccacgttgacggcggtttcagcatcgctgcaatgaacgaactcgaactgaaataa

SEQ ID NO: 3371 - DNA, 447 bp, Escherichia coli
atgaccagcaagctggagatacgccacaaacagcgtcaggatgaaatcattaacgccgcccgtcggtgttttcgtcgctgcggatttcatgccgccagtatgtcgcaaattgccagcgaagctcagcttagcgtgggtcagatatatcgttacttcgccaacaaagacgccattattgaagagatggttcgccgtatcatcgactttcgtattgcccaaatggacattgacgcgcgtaccgatcacttcccggaagtccttgccttgcgtaaatccttaaatgaggacgacgacgcgctgatgctggaagtggctgcagaagccacacgcaacccgcgggttatggcaatgcttgaagaagctgacgccagaatgttcgctaacggttgtgcacatatgaaaagaatgcatccccatcttagcggagcacattcgttgctgcgttga

SEQ ID NO: 3372 - DNA, 1122 bp, Escherichia coli
atgaagtatatagcaacatctgtagtggcaatgctgctcttatcgggttgtgataatacgcaaagtaacaattcatccccgtcagaaacagaagtcggcgttgttacgctcaaatctcaaccggtttcggtagtcagtgaattaaccggacgcaccagtgctgcgctcagtgctgaagtacgtccgcaggttgggggaattatccagaaacgcttatttaaggaaggtgatctggtcaaggctggacagcctctctaccagattgatgcggccagttatcaggctgcatggaatgaagcccgggcagcattacaacaagcacaggcactggtaaaagccgattgccagaaagcgcagcgttatgcccgactggtgaaagagaatggtgtttcacaacaggatgctgatgatgctcagtctacctgtgcacaagataaagccagtgtagaggcgaaaaaagccgcactggaaactgcgcgcattaatcttgactggaccacggtaaccgcaccgatttcggggcgtattggcatttcgtcggtaacccctggcgcactggtgaccgcgtcgcaggatacagcgttaacgactattcgtggtctggatacaatgtatgtcgacctcactcgctccagtgtcgatttattacgtctgcgtaaacagtcactggcgaccaacagtgacaccatgagcgtctcacttattctggaagatggcacaacctacagcgaaaaagggcgtctggaactcaccgaagtcgcggtggatgagtctaccggttcggtgacattacgggcaattttccccaatccacaacagcagttattaccgggaatgtttgttcgcgctcgtgtcgatgaaggcgtgatggaagacgctattctcgcgcctcaacagggcgttacgcgcgatgctaaaggcaatgcaactgcgctggtggtgaataaagacaataaagtagagcagcgaacgctcgaaacgggagaaacgtatggtgataaatggctggtgctgaacggcctgcacaacggcgaccgactgattgttgaaggttctgccaaagtcacttcagggcagaccgtcaaggctgttgaagttcaggctaatggaggcaacgcctga

SEQ ID NO: 3373 - DNA, 3108 bp, Escherichia coli
atgttttcgcgcttttttgttcgccgcccggtctttgcctgggttatcgccattttgattatgttggcggggattctggctattcgcacattgcccgtcgcgcaatatcctgacgttgcaccgccgaccattaaaatttcagccacttatactggtgcttctgccgaaacgctggagaacagcgtgactcaggttatcgagcaacaactcactgggcttgataatttactctatttcagctcaaccagtagctctgatggttcggtcagtattaatgtgacctttgaacaaggtaccgatccagatactgcacaggttcaggtgcagaataaaattcagcaggcggagtcgcgcctacccagcgaagtgcagcaaacgggtgttacggtggagaaatcacaaagcaactttttgctgattgctgccgtgtatgacaccactgacaaagcctccagttcggatatcgccgactggctggtcagtaacgttcaggaccccctggcgcgtgttgaaggtgtggggagtctgcaagtctttggcgcggaatacgctatgcgcatctggctcgacccggccaaactggcgtcttactcgctgatgccttcagacgtgcaaagtgctattgaagcgcaaaacgtgcaggttactgccgggaaaataggggcattgccttcaccggatactcagcaactgaccgcaacggtacgtgcgcagtctcgtttgcagacggtggatcagttcaaaaatattatcgtgaaaagccagtcagacggcgcagttgttcgtataaaagatgtggctcgcgttgagatgggcagtgaagattataccgctatcggcaaacttaacggtcacccgtctgccggggttgctgtaatgctttcgcccggtgcgaatgcgctgaatacggcgacgctggtcaaggataagattgccgaattccagcggaacatgccgcagggatacgacatcgcatacccgaaagacagcactgaatttattaaaatctccgtagaggacgtaattcagacgctgtttgaagccatcgtattggtggtttgcgtgatgtatttattcctgcaaaacctgcgtgccacactgattccggcgttagctgtccccgtcgttttgctgggcacattcggcgttcttgcgttgtttggctattcgattaataccctgacgttgtttgcaatggtgctggcgatcggcttgctggtggacgatgccattgtggtggtagagaacgtcgaacgcattatgcgtgacgaagggttgcccgcgcgtgaagccacggaaaaatcaatgggcgagatttctggcgcactggttgccattgcgctggtgttgtcagccgtattcctgccgatggccttctttgggggatctacgggggtaatttatcgtcagttctccatcaccatcatctccgcaatgctgctttccgtggtggtggcattgaccttgactcccgccctgtgcggttccgtcctccagcatgttccgccacataaaaaaggctttttcggcgcatttaaccgcttttatcgccgtactgaagataaatatcagcgaggcgtaatttatgtcctgcgccgtgcagcccgaacgatggggctttatgtcgtgctgggtggtggaatggccctgatgatgtggaagctgccgggcagtttcttacccactgaagaccagggcgaaatcatggtgcagtacacgctgccggccggggcgaccgctgcccgtacagcagaagtgaatcgccagattgttgactggttcctgattaacgagaaagcaaataccgatgtcatctttaccgttgatggtttcagttttagcggcagcggacagaacaccgggatggcgtttgtttcgttgaaaaactggtctcaacgtaaaggggcagaaaacaccgcccaggctatcgccctacgggctaccaaagagctgggcacaattcgtgatgccacggtatttgcgatgacgccgccagccgttgatgggctggggcaaagcaatggttttacgtttgaattgttagctaacggtggaaccgatcgtgaaacactgctgcaaatgcgtaatcagttgatagaaaaagcgaatcaaagtccggagttacattctgtacgcgccaatgatttgccacaaatgccgcaattgcaggtagatattgatagtaataaagcggtgtcattagggttgagtttgaatgatgtcaccgacaccctgtccagtgcgtggggcggtacttatgtgaatgactttattgaccgtggtcgtgtgaaaaaagtctacattcagggcgacagcgaatttcgttccgcgccgtcagacttaggtaaatggtttgtgcgcggtagcgataacgccatgacaccattctctgcttttgcgaccacccgctggctgtatggaccggaaagactggtgcgctacaacggctcggcagcctatgaaattcagggcgaaaacgcgactggctttagttccggcgatgcaatgacaaaaatggaggaactggcaaacagtcttcctgcgggaacaacctgggcctggagtggtttgtcattgcaggagaaactggccagcggtcaggcattaagtctgtatgcagtttctattctggtggttttcctctgccttgcagcactgtacgaaagctggtcagtcccgttctcggtcattctggtgatccctctggggcttcttggcgcggcgctggcggcctggatgcgtgatttaaacaacgacgtttacttccaggtagcgctattaactactatcggcttgtcgtcgaaaaacgccattctgattgtggaatttgctgaagcggcggttgcagagggctattccttgagtcgtgcggcattacgcgcggcgcagactcgtttacgcccaatcatcatgacctcgctggcgtttattgcgggggtaatgccgctggcgatagcaactggcgcaggggcgaacagccgcatcgccattggtacgggcattattggtggcacgctgaccgctacattactggccattttcttcgttcctctgttttttgtactggtgaaacgtttgtttgccggtaaaccgcgccgtcaggagtaa

SEQ ID NO: 3374 - DNA, 1374 bp, Escherichia coli
atgttgcgtcgttctcttatttttctggtgttgttgagtgcgggatgtgtctcgctcgatcctcactacagtacgcctgaatccccaatcccggcgaccttgccgggagcacagggccaggggaaggcaatcagccatgactggcagcaggtgattcacgatccccgattgcagcaggtagtaaccattgcactgaacagtaaccgcgatgtgcaaaaagcgattgctgatattgactcagcacgggcgctctatgggcaaactaatgcgtcgttatttccgacggtgaatgcggccttaagttcgactcgcagtcgttcgctggcgaatggtacgggaacaactgccgaggctgacggcacggtgtccagttatacgttagatctgtttggtcgtaatcagagtttatctcgggcggcgcgggaaacctggcttgccagtgaatttacagcccagaacactcgtttaacgctgattgctgaaatcagcaccgcctggctgacactggcggccgataacagcaacctggccctggcaaaagaaacgatggccagtgcagaaaactcattgaaaattatccagcgccagcaacaggttggcacggcggcagcgacagatgtcagtgaggcgatgagtgtttatcagcaagcgcgcgccagcgttgccagctatcagacacaagtgatgcaggataaaaatgcgctgaacttactggcaggtacaacgcttgcggaaaatctgctaccgggaacactggaaagcctgccggaacaaatgataagtctggttcctgcgggagtatcatctgatgttctgctgcgtcgcccggatatccaggaagctgaacataatttgaagagcgccaatgcagatattggcgcggcgcgggctaactttttcccgacgatttcgctgactgccagtgccggtgttggcagtgacgcattgtcgtcgttgttcagccacggaatgcagatctggtcatttgcgccatcggtcacattaccgctgttcactggcggaagtaatctggcgcagcttcgttacgcagaagcacaaaagcgtgggctcattgccacctatgaaaaaaccgttcagagcgcatttaaagatgtcgctaacgcactggcgcggcggaccacgcttgaagagcaactggatgcacagagccagtatgttaaagctgagcaacaaacggtcgatgttggcttgcgtcgctatcaggcgggtgttggtgattacctgaccgtgttgacggcgcagcgcagcttgtggagtgcacagcaggagctgctggcactgcaactgactgattttacaaaccgaatcacgctctggcagtcgctgggcggcggcatgtcatcactcaagtaa

SEQ ID NO: 3375 - DNA, 1164 bp, Escherichia coli
atggctagagtctctctttcatgggcattgattcttggtcttttagccggtatcggcccgatgtgtaccgatctttatttgccggctttgccggagatgtctgagcaactggcggcaaccacgaccataacgcaattaaccctgaccgcatcactgattggtcttggcgtcggacaactgttatttggccctctgagcgacaaaatagggcgtaaacgtccgttaatcttgtcgttgttattgtttattgtttcttccattttgtgcgcgacaacgaacaatatttactggctggtggtctggcgttttattcaagggatcgcgggggcgggtggttcggtgctctctcgttctattgctcgtgacaaatatcagggagtaacgttgacccagttttttgcgctgttaatgacggtgaatggcctggcaccggtgttgtcgccagtgctgggcgggtacattgtcagcacttttgactggcgcactttattctgggtaatggctgaaattagcaccgtactgttgctgggctgcctgttatttattaatgagaccttgccagaaaataaaaggggctcatcattgctattaaccggacgaagcgtggtgcagaaccgccgttttatgcgcttttgcctgattcaaagttttatgctggccggtttgtttgcatatatcggctcttcgtcgttcgtgttgcagaaggaatttggctttagtccaatgcaatttagcctggtgtttggccttaacggcatcggacttatcattgcttcatggatcttctcgcgcctggcgcgacggattaacgcgatgacattgttgcgaggtggcctgatagcggcaattttgtgtgcattgctcacggtcttatgcgcatgggtacaattgcccattccggcactggtggcattatttttcaccatcgcattttgtagcggcatcggcactgttggcggggcagaggctatgagtgcagtagggacgcaggaatctggaacggcgtctgcgttgatggggatgagcatgtttgtcttcggcggtatagccgcgccattgtcgggaattggcggagaaacactgttaaaaatgagtctggcaattacggtgtgttatacgctggcattgctggttgctctcaccagaatcgacaatcaaaagtaa

SEQ ID NO: 3376 - DNA, 807 bp, Escherichia coli
atgatcgaaacgctacttgaagtgcgcaatttaagtaaaacgttccgctaccggaccggctggtttcgtcgtcagaccgtagaagcggtaaaacccttgagctttacgctacgtgaaggccagacactggcgattatcggcgagaatggttcgggtaaatccacgctggcaaaaatgctggcgggaatgatagaacctaccagcggcgagttattgattgacgatcatccgctgcattttggcgattattccttccgcagtcagcgtattcgcatgatttttcaggatccttccacctcgttgaatccccgtcaacgtatctcgcaaattctggattttccactgcgcctgaacaccgacctggaaccggaacagcgtcgcaaacagattattgaaacgatgcgtatggttgggctgctaccggatcacgtcagttactatccgcatatgttagcacccgggcaaaaacagcgtctgggtctggcgcgcgcgctgatattgcgcccaaaagtcattattgccgatgaagccctcgcctcactggatatgtcgatgcgttcgcagttgattaatctgatgctggagttacaggaaaaacagggcatttcgtatatttatgttacccagcatatcggaatgatgaagcacattagcgaccaggtgctggtgatgcatcagggcgaggttgtcgagcgaggcagcaccgcagatgtgctggcatcgccgctgcatgaactcaccaaacggctgatcgccggtcattttggcgaagcattgacggcggatgcgtggcgtaaggaccgttag

SEQ ID NO: 3377 - DNA, 993 bp, Escherichia coli
atgccattactcgatattcgtaacctgaccattgaatttaaaaccggtgatgagtgggttaaagccgtcgaccgcgtaagtatgaccttaaccgaaggtgaaatccgcggtcttgttggcgaatccggttccggcaaaagtttgattgctaaagcgatttgtggggtgaataaagataactggcgtgttactgctgaccgtatgcgttttgatgatatcgatttgctgcgtctctccgcacgcgaacggcgcaagctggttggtcacaacgtgtcgatgattttccaggaaccacagtcgtgtcttgacccttcagaacgtgtgggtcgccagttgatgcaaaacatccctgcctggacctataaaggccgttggtggcagcgttttggctggcgcaaacgccgtgccattgaactgctgcaccgcgtggggattaaagatcacaaagatgcgatgcgcagttttccctatgagttgaccgaaggtgaatgtcagaaagtgatgatagccattgcactggcgaatcaaccacgtctgctaattgctgacgaaccgaccaactcaatggagccaacaacccaggcgcaaatctttcgcctgctgacgcgtctcaaccaaaacagcaataccactattttgcttatcagccatgacttacaaatgcttagccaatgggcggataaaattaacgtgctttactgcggtcaaacggtggaaaccgcgccgagtaaggagttggtgacgatgccacaccatccttatacccaggcgctgatccgcgcgataccagacttcggcagcgcgatgccgcataaaagtcgcctcaatacgctgcccggcgctatcccgctgctggaacagttaccgattggttgtcgtctggggccacgttgcccgtatgcacaacgagaatgcattgtgacgccacgtttgacgggggcgaaaaatcatctctatgcctgtcatttcccgctgaacatggagaaagagtga

SEQ ID NO: 3378 - DNA, 891 bp, Escherichia coli
atgccttacgatagcgtatacagcgaaaagcgcccgccgggcacgctgcgtaccgcctggcgcaaattttatagtgacgcctctgcgatggtcggcctgtacggctgcgcggggctggctgtactgtgtatttttggcggctggtttgcgccttacggcatcgaccagcaatttctcggttatcaattattgccgccgtcatggtcgcgctatggcgaagtttctttcttcctggggactgacgacctcggacgcgatgttttaagccgtttactgagcggagctgcgccaaccgtaggtggcgcatttgtggtgacgctcgccgcgacgatctgtggcctggtactgggcaccttcgccggggcgacccacggcctacgctcagcggtgcttaaccatattctggataccttactggcgatcccttcgctgctgctggcaattatcgttgtagcgtttgccggaccgagtttgtctcacgccatgtttgctgtctggctggcgctgctgccgcgtatggtacgttcgatttacagcatggtgcatgacgaactggaaaaagagtacgttatcgccgcccgtctggatggcgcatcaacgctgaatattctctggtttgctgtgatgcctaacatcaccgccgggctggtcaccgagatcacccgcgcactgtcgatggcaattctcgatatcgccgcgctgggctttcttgacctcggcgcacaactcccctcgcctgaatggggcgcgatgctcggtgatgcgctggaactgatttatgtcgccccatggactgtcatgctgccaggtgcggcaattatgattagcgtgctgttggttaacctccttggcgacggtgtccgtcgtgcaattattgcgggggtggaataa

SEQ ID NO: 3379 - DNA, 966 bp, Escherichia coli
atgattatcttcaccttacgccgtattttgttattgattgtgaccttgttcctgctgaccttcgttggcttcagcttgagctatttcaccccacatgcgccgttacaaggcgcgtcactgtggaatgcctgggtgttctggtttaacggcctgatccactgggattttggtgtttccagcattaacggtcaaccgattgccgaacagttaaaagaggtcttcccggcgacgatggaactgtgcatcctcgccttcggttttgcgctgattgttggcatccccgtaggaatgattgccgggattacgcgccataagtggcaggataacttgatcaacgccatcgccttactgggcttttcaatcccggtgttctggctggcgcttctgctgacgctgttttgttcactcacactaggttggttgcccgtttctgggcgtttcgatttgctctacgaagtgaaaccgattaccggttttgcgttgattgatgcctggctttcggactcaccgtggcgggatgaaatgatcattagcgcaatccgtcatatggtattgcccgtgatcaccctgtcggttgcgccaacaactgaagtgatccgactgatgcgtatcagcactatcgaagtgtatgaccagaactatgttaaagcagcggcgacccgcggtttgtcgcgctttactattttgcgtcgccacgttctgcataacgcgttacctccggttattcctcgcctgggcttacagttttctaccatgctgacgctggcgatgatcaccgaaatggtttttagctggccgggtttagggcgctggttaattaacgccatccgccagcaggattacgcagccatttccgccggagtgatggtgtgtggctcactggtcattattgttaacgtgatttctgatattttgggtgccatggctaaccctctgaaacataaggaatggtatgccttacgatag

SEQ ID NO: 3380 - DNA, 1644 bp, Escherichia coli
atgcgccaggtattatcgtctcttttggtgattgctggacttgtgagtggtcaggcaatcgccgcgcctgaatcccccccgcatgctgatatccgcgacagcggttttgtctattgcgtcagcgggcaagtcaacacctttaacccatccaaagcgagcagtgggttaattgtcgatacccttgccgcccagttttatgatcgactgctggatgtcgatccctatacctatcgcctgatgccggaacttgccgaaagctgggaagtactcgacaacggcgcgacctatcgcttccacctgcgtcgcgatgttccgtttcaaaaaaccgactggtttactcccactcgtaaaatgaatgccgatgatgtggtgtttaccttccaacggatttttgaccgcaacaacccgtggcataacgtcaacggcagtaacttcccctatttcgacagtctgcaatttgccgataacgtgaaaagcgtccgcaagctggataatcataccgttgagttccgtctcgcccagccggatgcttcttttttgtggcacctggcgacccattatgcttcggtcatgtcggcagaatatgcagggaagttagagaaagaagatcgccaggagcaactcgaccgtcaaccggtcggcactggtccgtatcagttgtcggaataccgcgccgggcaatatattcgcttacaacgtcatgatgatttctggcgtggtaagccgttgatgccacaagtggtggtggatttaggctctggcggtacaggacgattgtcgaaactcctgaccggggagtgcgacgttctggcctggcctgctgccagtcagctatccattttgcgtgacgacccacgcttgcgtttaacgctgcgcccggggatgaacgtcgcctatctggcgtttaacaccgctaaaccgccgctaaataatcccgctgtccgccatgcgctggcactggcaattaataaccagcgcctgatgcaatccatctattatggtacggctgaaacggcggcctctattttaccgcgagcctcgtgggcctatgacaacgaggctaaaattactgaatacaatccggcaaaatcgcgcgaacagttgaaggcgttggggctggaaaacttaacgctgaaactgtgggtgcccacacgttcgcaggcgtggaaccccagtccactgaaaaccgccgaactgattcaggcggatatggcacaggttggcgtaaaagtggtgattgtgccggtagaaggtcgttttcaggaggcgcggttgatggatatgagccatgatctgacgttatccggttgggcgacggacagtaacgacccggacagtttcttccgtccgttactgagctgcgcagcaattcattcgcagaccaacctcgcccactggtgcgatccgaaattcgacagcgtattgcgtaaggcgctctcttcgcagcagctggcggcgcgtattgaagcctatgacgaagcgcaaagtattctggcgcaggaattacctattctgccgctggcgtcgtcattgcgtttgcaggcctatcggtacgatatcaaaggtctggtacttagcccgtttggtaacgcctcctttgctggggtgtatcgcgagaaacaggatgaggtgaaaaagccatga

SEQ ID NO: 3381 - DNA, 246 bp, Escherichia coli
atgaaccacgatatcccgctaaaatattttgatattgccgatgagtacgcgaccgaatgcgcagagcctgtcgcagacgctgaacgcacaccactggcccactacttccagttactgctcacccgtttgatgaacaatgaagagatcagtgaagaagcccaacatgaaatggctgctgaagcggggattaatcccgtacgcattgatgagatcgcagagtttttgaatcaatggggtaatgagtaa

SEQ ID NO: 3382 - DNA, 978 bp, Escherichia coli
atggcagaatacaaagataatttactcggtgaggcgaacagctttctcgaagtgctggaacaggtttcgcatctcgcaccgctggacaaaccggtgctcatcatcggcgagcgcggcaccggtaaagagctgatcgccaaccgcctgcattatctctcctcccgttggcaagggccgtttatttcccttaactgcgcggcgttaaatgaaaatttgctggattccgaactgtttggtcatgaagcgggggcgtttaccggtgcgcaaaaacgtcatccagggagatttgaacgtgccgacggcggtacgctatttcttgatgaactcgctacggcaccgatgatggtgcaggaaaaattattgcgtgtgattgagtacggtgaactggagcgcgtcggcggcagccaaccattgcaggtgaatgtgcggttggtatgcgcgacgaatgccgatctcccggcgatggtcaatgaaggtacttttcgcgctgacctgctcgaccgactagcgttcgatgttgtgcaactgccaccactgcgcgagcgtgaaagcgacattatgttgatggcagaacactttgccatccagatgtgtcgggaaatcaagctgcctctgttcccgggttttaccgagcacgccagagaaacattgctgaattatcgctggccgggaaatatacgtgaattgaaaaacgtggtggaacgttcagtgtatcgtcacggcaccagcgattatccgcttgatgacatcattattgatccctttaaacgccgtccatctgaagaagccatcgccgtttcagaaaacacctcgcttccgacgctgccactggatttacgcgagtttcagatgcagcaggaaaaagagttgctgcaactcagtttgcaacaggggaaatataaccagaagcgcgccgctgaattgctggggttaacctatcatcagttccgcgcgttgttgaaaaagcaccagatttag

SEQ ID NO: 3383 - DNA, 669 bp, Escherichia coli
atgggtattttttctcgctttgccgacatcgtgaatgccaacatcaacgctctgttagagaaagcggaagatccacagaaactggtgcgtctgatgatccaggagatggaagatacattggttgaagtacgttctacttcggcgcgtgcgctggcagaaaagaaacagctgactcgtcgtattgaacaagcgtcggcgcgtgaaattgaatggcaggaaaaagcggaactggcactgctgaaagatagagaagatctggcgcgtgcggcgttaattgaaaaacagaaactgaccgatctgattaagagcctggaacatgaagtgacgctggtggacgatacgctagtgcgtatgaagaaagagatcggcgagctggaaaacaaattgagtgaaacacgcgctcgccagcaggcattgatgttacgccatcaggcggcaaactcgtcgcgcgatgtgcgtcgtcagctggacagtggcaaactggatgaagcaatggctcgtttcgaatctttcgaacgtcgaattgaccagatggaagcggaagcagaaagccacagcttcggtaaacaaaaatcgctggacgatcagtttgccgaactgaaagccgatgatgcaatcagcgagcaactggcacaattaaaagccaaaatgaagcaagacaatcaataa

SEQ ID NO: 3384 - DNA, 225 bp, Escherichia coli
atgagcgcgctatttctggctattccgttaaccatttttgtgctgtttgttttaccgatctggttatggctgcattacagcaatcgttctggtcgcagtgaattgtcgcaaagtgagcagcagcgattagcgcaactggctgatgaagcaaaacggatgcgcgaacgtattcaggcgctggaatctattcttgatgcagaacatccgaactggagggatcgctaa

SEQ ID NO: 3385 - DNA, 360 bp, Escherichia coli
atggcgggcattaatctcaataaaaaattatggcgtattccgcagcagggcatggtccgtggcgtctgcgccgggattgccaactattttgatgtaccagtaaaactggtgcgtatcctggtggtgctgtcgattttcttcggtctggcgctgtttaccctggttgcttacatcattttgtcatttgcgcttgatccaatgccggacaacatggcctttggtgagcagctaccttccagccgcgaattgctggatgaagtcgaccgtgaactggcggcaagtgaaacgcgtttacgcgagatggaacgttatgtcacttccgatactttcacgttacgtagccgtttccgtcaactgtga

SEQ ID NO: 3386 - DNA, 222 bp, Escherichia coli
atgaatactcgctggcaacaggccgggcaaaaggtgaagcctgggttcaaattagcaggcaagctggtacttcttaccgcactgcgctatggcccggcgggtgtggcgggctgggcgataaaatcagttgctcgccgaccgctgaaaatgttgctggctgtggcgctggaaccgctgttaagtcgggctgccaataaactggcgcagcgttataaaaggtga

SEQ ID NO: 3387 - DNA, 315 bp, Escherichia coli
atgtttaaaaaaggcttacttgctctgacactggtgttttcactgcccgttttcgccgctgaacactggatcgatgttcgtgttccagagcagtatcagcaagaacacgttcagggggccatcaatattcccttgaaggaagtgaaagagcgcattgccaccgccgttccggataaaaacgacaccgttaaagtgtattgcaatgccggacgccagtcagggcaggcaaaagagatccttagcgagatgggatatacccacgttgagaacgccggtggcctgaaagacatcgcaatgccgaaggtcaaaggttaa

SEQ ID NO: 3388 - DNA, 1680 bp, Escherichia coli
atgaaacagaaaattacggattacctggacgaaatctacggtggaacatttaccgcgactcatttacagaaacttgtaacgcgtcttgagagtgcgaaacgattaattacacagcgacgtaaaaaacactgggatgaaagtgatgtcgtgttaattacctatgccgatcaatttcacagtaatgatttaaagccactacccacatttaatcagttttaccctcaatggctgcaaagaattttttcacatgttcatttattacctttttatccatggtcatctgatgatggattttcggtaattgattatcatcaggtcgccagtgaagcgggggagtggcaggatattcagcaactcggtgaatgcagccatttaatgtttgattttgtctgcaaccatatgtcggcaaaaagtgaatggtttaaaaactatttacaacagcagccaggttttgaagatttttttattgccgttgatccgaaaaccgatctcagcgccgtcactcgcccgcgtgcgttaccgttattaacgccattccagatgcgcgatcattcaacgcgccatttatggaccacctttagcgacgatcaaattgacctcaattaccgtagccctgaagtgttgctggcgatggtggatgtattgctgtgctacctggaaaagggcgcagagtatgtccgtctggatgccgttggctttatgtggaaagagccgggaacaagctgcatccatctggaaaaaacacatctgattatcaaactgttacggtcgattattgataacgtcgcgccaggcacagtgatcattaccgagaccaatgttccgcataaagacaacattgcttactttggcgaaggcgatgacgaagcgcatatggtgtaccagttctcgctgccgccgctggtgctgcatgcggtgcaaaaacagaacgttgaggcactttgtgcgtgggcgcaaaacctgacactaccttccagcaacaccacctggtttaacttccttgcctctcacgatggcatcgggcttaacccactgcgggggttgttgcccgaaaacgaaatattagcgctggtcgaggtgttacagcaggaaggggcattagtaaactggaaaaataatcccgacggtacgcgtagcccctatgaaatgaatgtcacctatatggatgcgttgagccgccgtgagtgtagcgacgaagaacggtgtgccaggtttattctcgcccatgcgattttgttaagttttcccggtgtgccagcgatatatattcaaagcattctggggtcgcgtaatgattacgcaggtgtcgaaaaactgggatataaccgtgcgattaaccgtaaaaaatattacagtgaagagatcacgaccgaactgaacaataaaacgacgttaaggcacgcggtatatcatgaattgtcgcgactaattaaaattcgtcgaagtcataacgagtttcatccagataatgattttaccatcgacacggttaattcatccgtaatgtgtattcaaagaagcaacgcggatggtaattgtctgacaggattgtttaatgtcagtgaaaatattcagcatataaatattactgacctgcacggtcgggatctgattagtgaagttgatatagtgggtaatgaaataacgctgcgcccctggcaggttatgtggattaaataa

SEQ ID NO: 3389 - DNA, 1293 bp, Escherichia coli
atgattaaatcaaaaatcgtgctgttatcagcactggtttcctgcgccctgatttcaggttgtaaagaagaaaataaaacgaatgtctccatcgagtttatgcattcttcggtggaacaggaacgccaggcgataattagtcagttaattgcgcgttttgaaaaagaaaacccaggcatcaccgttaaacaagtgccggtggaagaagacgcctataacaccaaagtcattaccctttcacgtagcggttcgctgccggaagtgatcgaaaccagccatgactacgccaaagtgatggacaaagagcagcttatcgatcgccaggcggttgccacggtcatcagcaacgtcggtgaaggcgcgttctacgatggcgtactgcggattgtgcgcactgaagatggcagcgcctggaccggtgttcctgtcagcgcatggattggcgggatctggtatcgcaaagatgtgctggcaaaagctgggctggaggagccaaaaaactggcagcaattgctggacgttgcacagaaactgaatgacccggcgaataaaaaatacggtattgcgctgcctacagcagaaagcgtgttgacggaacagtctttctcccagtttgcgttatccaatcaggctaacgtctttaacgccgaaggcaaaatcacccttgatacaccagagatgatgcaggcgctgacctattaccgcaaccttgctgccaacaccatgccaggttctaacgacatcatggaagtgaaagacgcttttatgaacggcaccgcgccgatggcgatttactccacctatatccttccggctgtgattaaagaaggcgatccgaaaaacgttggtttcgtggtgccaaccgagaaaaattctgcggtctacggcatgttgacctcgctgaccattaccgccgggcaaaagactgaagagaccgaagcggctgaaaaatttgtcacctttatggagcaggcggacaacattgccgactgggtgatgatgtcaccaggcgcggcgctgccggtgaacaaagcggtggtgactaccgccacctggaaagacaacgacgttattaaggcgctgggagaattgccgaatcagctaatcagcgaactgccaaatattcaggtctttggcgcagtaggggataaaaactttacccgcatgggcgatgtcacggggtctggtgtggtgagttcaatggtgcataacgtcaccgtgggtaaagccgatctccctggcacgctgcaagcgagccagaaaaagctggatgaactgatcgaactgcactaa

SEQ ID NO: 3390 - DNA, 882 bp, Escherichia coli
atgaacaggcttttttcaggtcgttccgatatgccttttgcactgctgcttctcgcgcccagcttattactgctgggcggtctggtggcgtggccaatggtgtcgaatatcgaaatcagttttttacgtctgccgctcaatcccaacatcgagtcaacctttgttggggtgagtaactatgtgcgtattctctccgatcccggcttctggcactcgctgtggatgacggtctggtataccacactggtggtggcgggcagcaccgtgctcgggctggccgtggcgatgtttttcaaccgcgagttccgcctgcgcaaaaccgcgcgttcgctggtgatcctctcctacgtaacgccgtctatttcgctggtgttcgcctggaaatacatgttcaacaacggttacggcattgtgaactacctcggcgtcgatcttctgcatctctatgagcaggcgccgctgtggttcgataacccgggcagcagctttgtgctggtggtgttgttcgccatctggcgctacttcccgtatgcctttatctcatttctggcgattttgcagaccatcgacaaatcgctgtacgaagcggcagagatggatggcgcgaatgcctggcagcggtttcgcatcgtcacgctgcccgcgattatgccggtcctggcgacggtggtgaccctgcgcactatctggatgttctacatgttcgcggatgtttatctgctgacgaccaaggtcgatattctcggtgtctatctctacaaaaccgcctttgcctttaatgacttagggaaagcggcggcgatctcggtggtgcttttcatcattattttcgctgtcattctgctgaccaggaaacgggtgaacctcaatggcaacaaataa

SEQ ID NO: 3391 - DNA, 843 bp, Escherichia coli
atggcaacaaataaacgcacactcagtcgaatcggtttttactgcgggctggcgctgtttctcatcatcacgctgtttccattttttgtgatgctgatgacctcgttcaagagcgcaaaagaggcgatctcgctgcatcctacgctgctgccacagcagtggacgctggagcattacgtcgacatttttaatccggtgattttcccgtttgtcgactacttccgtaacagcatggtggtgtcggtggtttcatccgtggtggcggtatttctcggcattctcggggcttacgcgctttcccgcctgcgctttaaagggcggatgaccatcaacgccagcttttacacggtgtacatgttctccggcattttgctggtggtgccgctgttcaaaatcatcaccgcacttggcatttacgacaccgagatggcgctgatcattaccatggtgacgcaaaccctgcccaccgccgtgtttatgctgaaaagctacttcgacaccatccctgatgagattgaagaagcggcgatgatggatggcctcaaccgtctgcaaatcatcttccgtatcaccgtgcccctggcgatgtccgggctgatatccgtattcgtctactgctttatggtggcatggaacgactatctgtttgcgtcgattttcctctccagcgccagcaatttcactttaccggtaggcctgaacgcactgttcagtacgcctgattacatctggggacggatgatggcggcctcgctggtgaccgcattgccggtggtgattatgtatgcgctttcggagcgttttattaagagtggtttgaccgccggtggcgtgaagggctaa

SEQ ID NO: 3392 - DNA, 1053 bp, Escherichia coli
atgaaaaagttagtagccacagcaccgcgcgtagctgcgctggttgagtatgaagatcgggcgattttagccaatgaagtgaagatccgcgtgcgtttcggcgcgccgaaacatggaacggaagtggtcgattttcgcgccgccagcccgtttatcgatgaagactttaacggcgaatggcagatgtttaccccgcgtccggcagatgcgccgcgcggcattgagtttggcaaattccagcttggcaacatggtggttggcgacattatcgagtgcggcagcgacgttaccgactacgcggtgggcgacagcgtatgcggctacggcccgctctccgagacggtcatcattaacgcagtgaataactacaagctgcgcaaaatgccgcaaggcagctcctggaaaaacgccgtctgttacgacccggcgcagtttgccatgagcggtgtgcgcgatgccaacgtacgcgtaggggattttgtcgtggtggtagggcttggcgcgatcggtcaaattgccatccaactggcgaaacgcgctggcgcatcggtggtaattggcgtcgatcctattgaccatcgttgtgatattgcccgtcgacacggtgcggatttctgccttaaccctattggcactgacgtaggcaaagagatcaaaacgctgaccggcaagcagggtgccgatgtgattatcgaaaccagcggttacgccgacgcgctgcaatcggcgcttcgcggcctggcatatggcggcaccatctcgtatgtcgcgtttgccaaaccgtttgccgaaggttttaacctcggacgcgaagcccatttcaataacgccaaaattgttttctcccgtgcgtgcagcgagccgaacccggattatccgcgctggagccgcaaacgtatcgaagaaacctgttgggaactgctgatgaacggttatctcaattgcgaagatttaatcgacccggtggtgacctttgccaatagcccggaaagctacatgcagtatgtcgaccagcatccggaacagagcatcaaaatgggcgtcacgttttaa

SEQ ID NO: 3393 - DNA, 789 bp, Escherichia coli
atgaaaatcggcacacagaatcaggcgttctttccagaaaacattctggagaaatttcgttatatcaaagagatgggcttcgatagttttgagattgacggcaaactgctggtcaacaatatagaagaagtcaaagcggcaatcaaagaaaccggcttaccggtgaccaccgcctgcggcggctatgacggctggattggcgactttatcgaagagcgtcgtcttaatggcttaaagcagatcgaacgcattcttgaagcgctggccgaagtgggcggtaaaggtatcgtcgttcctgctgcatggggcatgtttaccttccgtttaccgccgatgacctcgccgcgtagcctggacggcgaccgcaaaatggtgagtgattccctgcgcgtactggagcaggtggcagcgcgtaccggaaccgtggtgtatctcgaaccgttaaaccgttatcaggatcacatgatcaacaccctcgccgatgcccgccgttacatcgtcgaaaacgatcttaaacatgtacagattatcggcgatttctatcacatgaatatcgaagaagataacctggcgcaggcgttgcacgacaaccgcgacttgctcggtcatgtgcatattgccgataaccatcgctaccagccgggcagcggcaccctcgatttccacgcgctgtttgaacagctgcgcgccgataactatcagggctatgtggtgtatgaagggcgtatccgggcagaaaatcctgcccaggcgtaccgtgattcgttggcctggttgcgcacctgctaa

SEQ ID NO: 3394 - DNA, 1056 bp, Escherichia coli
gtgaaaagtgcaatgacaagctctccgctgcgagtcgcgatcataggcgcgggccaggtggcggataaagttcatgcttcgtactactgcacccgcaacgatctggaactggtggctgtctgtgacagccgcctttcccaggcgcaggcgctggcagaaaaatacgggaatgcatccgtgtgggacgatccgcaggccatgctgctggcggtgaaacctgatgtggttagcgtctgctcacctaaccgttttcattacgaacataccctgatggcgctggaagcgggctgccatgtgatgtgcgaaaaaccgcccgccatgacgccagaacaggcgcgggaaatgtgcgataccgcgcgcaaacagggcaaggtgctggcctacgactttcaccatcgttttgcactcgatacgcaacagctgcgtgaacaggtgaccaacggcgttttgggagagatttacgttaccaccgcccgcgccctgcgtcgttgcggtgttcccggctggggtgtctttactaataaagaattgcagggcggaggcccgctgatcgacatcggcattcatatgctggatgcggcgatgtatgtgctgggttttccagcggtgaaaagcgtgactgcgcatagctttcaaaagatcggcacgcaaaagagctgcggtcaatttggcgagtgggacccggcaacctacagcgtcgaagattcgctgtttggcaccattgaatttcataacggcggcattctgtggcttgagacctcatttgcactcaacatccgcgaacagtcgattatgaacgtcagcttttgtggtgataaagccggggcgacgctgtttccagcacatatctacaccgataacaacggtgagttaatgacgctgatgcaacgggaaatggcagacgacaaccgtcatctgcgcagtatggaagcctttatcaaccacgtacaaggtaagcccgtgatgatagccgacgccgagcaggggtacatcatccagcaactggtggcggcgttgtatcaatccgcagaaacagggacgcgtgtggaattatga

SEQ ID NO: 3395 - DNA, 2268 bp, Escherichia coli
atgaccaggccagtaacgttatcagaaccccatttcagccagcatacactgaacaagtatgcttcgctgatggcgcaggggaacggctatcttgggcttcgcgccagccatgaagaagattacacgcgccagacgcgcggcatgtatctggcggggctgtatcatcgggcgggtaaaggtgaaatcaacgaactggtgaacctgcctgatgtcgtggggatggagctttctctcaatggtgagatcttctcgttatcccgcgaagcctggcagcgtgagcttgactttgccagtggcgaattacgccgcaacgttgtctggcgtaccagcaacggcgcaggttacaccatcaccagccgtcgctttgtttcggcagaccaactgccgctcattgcgctggaaatcactattacgccactggacgccgacgcgttagtgctgatttcaacaggcattgacgccacgcaaaccaaccacggtcgccagcatctcgacgaaacccaggtgcgggtgtttggtcagcatctgatgcaggggatctacaccacccaggatggacgcagtgatgtggccatcagctgttgctgtaaggtgagcggtgatgtgcagcaatgctataccgccaaagagcgtcgcttgctgcaacacaccagcgcgcaacttcacgcaggcgaaacgctgacgctgcaaaaactggtgtggatcgactggcgggatgacaggcaagctgctttagacgagtggggcagtgcgtcgcttcgccagcttgaaatgtgtgcgcagcagagttacgaccaacttcttgcagcatccacagaaaactggcgtcagtggtggcagaaacgtcgtatcacggtaaacggcggcgatgcgcacgatcagcaagcgttagattatgcactttatcatctgcgcattatgacgcctgcccacgacgagcgcagcagtattgcggcaaaaggtttgaccggggaaggctacaaaggccacgttttctgggatacggaagtatttttactgccgttccatctgtttagcgaacctacgattgcccgaagtttactgcgttatcgctggcacaacttgccaggcgcgcaggagaaagcgcgacgcaacggctggcagggcgcgctatttccgtgggaaagcgcgcgcagcggcgaagaagagacgccggaatttgccgccattaacatccgtaccgggttgcggcaaaaagtggcctctgcgcaggcggaacatcatctggtggccgatatcgcctgggcggttattcaatactggcggaccacgggggatgaaagtttcattgctcatgaaggcatggcgctacttctggagacggcaaagttctggattagccgcgcggtgagggttaacgaccgtctagaaattcatgatgttattgggccagacgaatataccgaacatgtcaataataacgccttcaccagctatatggcgtattacaacgtccagcaggcgctgaatatcgctcgtcagtttggctgtagcgacgacgcgtttattcatcgtgcagaaatgtacctcaaagaactgcggctgccagaaattcagcccgacggcgttttgccgcaggatgattcgtttatggctaagccggtgattaatctggcgaaatacaaagcggcggcggggaagcaaaccattctgctggattattcacgcgcagaagtgaacgagatgcagatcctcaaacaagctgatgtggtgatgctcaattacatgctgccggagcagttctcagcggcatcgtgtcttgccaatctgcaattttatgaaccgcgcaccattcacggctcttcactgagtaaagcgatccacggcattgttgccgcacgctgtggcctgttggcgcaaagttatcagttctggcgggaggggactgaaatcgatcttggtgctgatccgcatagctgtgatgacggtatccacgctgccgcaactggtgctatctggctgggggcgattcagggttttgccggggtgagcgtgcgtgacggtgaattaaatttgaatccggcgttacctgtgcagtggcaacagttgtctttccctctgttctggcagggctgcgaattacaggtcactctcgacgcgcagcgtattgcgattcgaacttctgcgcccgtttcactgcgtttgaacgggcagcttatatctgtggctgaagaatctgttttctgtttgggtgattttattttgcccttcaatgggaccgctaccacgcatcaggaggatgaatga

SEQ ID NO: 3396 - DNA, 660 bp, Escherichia coli
atgaaactgcaaggggtaattttcgatctggatggtgtaatcaccgataccgcgcatctgcatttcaaggcgtggcagcagattgccgctgaaattggcatcagcattgatgcgcagtttaacgaatccctaaaagggatcagccgcgatgagtccctgcggcgaattctgcagcacgggggcaaagagggcgactttaacccgcaggagagggcgcaactggcgtatcgcaaaaatctgctctacgtccactcactgcgcgaactgacggttaatgctgtgctgcccggcattcgctctttgctgacagatctccgtgcacaacagatcccggtagggctggcttctgtctccctcaatgcgccgacgattttagatgcactggagctgcgtgagtttttcaccttctgcgcggacgcttcccaacttaaaaactcgaaaccggacccggaaatctttctcgccgcctgtgccggactgggcgtgccgccgcaggcatgtatcggcattgaagatgcgcaggcgggcattgaagccattaacgccagcggtatgcgctcggtggggatcggcgcgggcttaaccggggcgcaattattgttgccctcaacggaatcactcacctggccgcggttatcggccttctggcaaaacgtatag

SEQ ID NO: 3397 - DNA, 1083 bp, Escherichia coli
atggcacagctttcgttacaacatattcaaaagatctacgataaccaggtgcatgtggtgaaggacttcaacctggagattgccgataaagagttcatcgtgtttgtcggtccgtcgggctgcggtaaatcgaccaccctgcgtatgattgccgggcttgaggagatcagcggcggcgatctgttgatcgacggcaaacgaatgaatgacgttccagccaaagcacgcaatatagcgatggtgttccagaactacgcgctgtatccgcatatgacggtctacgagaacatggcgtttggcctgaagatgcaaaaaatcgccaaagaggtgattgatgagcgggttaactgggcggcgcaaatcctcggcctgcgtgagtacctgaaacgcaagccaggcgcgctttccggcgggcaacgccagcgtgtggcgctcggacgggcgattgtgcgcgaagcgggcgtgtttttaatggatgaaccgctctctaacctggatgccaagctgcgcgtgcaaatgcgcgcagagatcagcaagctgcatcagaaactgaacaccaccatgatctacgtgacccacgatcagaccgaagcgatgaccatggcgacgcggattgtcattatgaaggatgggattgttcagcaggtcggtgcgccgaaaacggtttataaccaacctgcgaatatgtttgttgccggatttattggatcaccagcgatgaattttattcgcggcacgatcgatggcgataaattcgttacggaaacgcttaaattaaccatacccgaagagaaattagcggttctgaaaacacaggaaagtttgcataagcccatcgtgatgggaatacgaccggaagatattcatccggacgcgcaagaggaaaataacatttccgccaaaattagcgtggcggaattaaccggtgcggaatttatgctctacaccacggttggggggcacgagttagtggtccgtgctggtgcgttaaatgattatcatgcaggagaaaatatcactattcattttgatatgactaaatgtcatttctttgatgcagaaacggaaatagcaatttgctaa

SEQ ID NO: 3398 - DNA, 906 bp, Escherichia coli
atgaaaaagttattaccctgtaccgcactggtgatgtgtgcgggaatggcctgcgcacaggccgaggaaaagaacgactggcactttaatatcggtgcgatgtacgaaatagaaaacgtcgagggttatggcgaagatatggatgggctggcggagccttctgtctattttaatgccgccaacgggccgtggagaatttctctggcctattatcaggaagggccggtagattatagcgcgggtaaacgtggaacgtggtttgatcgcccggagctggaggtacattatcagttcctcgaaagcgatgatttcagtttcggtctgactggtggtttccgtaattatggttatcactacgttgatgaaccgggtaaagacacggcgaatatgcagcgctggaaaattgcgccagactgggatgtgaaactgactgacgatttacgtttcaacggttggctgtcgatgtataaatttgccaacgatttgaacacgaccggttacgctgatacccgtgtcgaaacggaaacgggtctgcaatataccttcaacgaaacggttgccttgcgagtgaactattatctcgagcgcggtttcaatatggatgatagccgcaataacggtgagttttccacgcaagaaattcgcgcctatttgccgctgacgctcggcaaccactcggtgacgccgtatacgcgcattgggctggatcgctggagtaactgggactggcaggatgatattgaacgtgaaggccatgattttaaccgtgtgggtttattttacggttatgatttccagaatggtctttccgtttcgctggaatacgcgtttgagtggcaggatcacgacgaaggcgacagcgataaattccattatgcgggtgttggggtgaattactcgttctga

SEQ ID NO: 3399 - DNA, 999 bp, Escherichia coli
atgtcccctactatttatgatattgccagggttgcaggcgtatcaaaatccaccgtatcacgcgtgctgaataagcaaaccaatatctccccggaagcgcgcgaaaaagtgttacgggccattgaagaattacagtatcaaccaaacaagctggcccgcgcgctgacctcttcgggttttgatgccattatggtgatttctacccgttcgaccaaaactacggcgggtaatccatttttctcggaagttttgcatgccatcaccgccaaagcagaagaagaaggtttcgacgtgatattacaaacgtcgcacaatccggcagaagatctgcaaaaatgcgaaagcaaaattaagcagaaaatgattaaaggcattattatgctaagttcccctgccgatgaatccttctttgcacaactcgacaaatacgagatcccggtggtggtgatcggtaaagttgaaggtcaatacagccatgtttattccgtcgataccgataattatggcgacagtattgcgctgaccaatgcgttaattgaaagcgggcataagaatatagcctgcctgcatgcgccgcttgatgtacatgtttcagtggatcgggtaaatggttataagcaaagcctggctacgcataatattgcagtgcgtgatgaatggattgttgacggcggttatacccatgaaacagccttgcaagccgcacggcaattattaagccagtcgccgttgccagaagccgtatttgccactgacagcctgaaattaatgagcatttatcgtgcagcagcagagaaaaacattgctattccgcagcagttagcggtggtgggttatagtaatgaaacgctgtcgtttatattaacgcctgcaccaggcggcatcgatgttccgacgcaggagttaggtcaacaaagctgcgagttattattccagctaattgccggaaaaccgtcaccacaaaatattaccgttgctacgcatatgtcgttgaaataa

SEQ ID NO: 3400 - DNA, 1398 bp, Escherichia coli
atgaagcgacttaaaaatgaactcaatgcgctggtgaatcggggtgtcgacagacatctgcgcctcgctgtaaccggacttagccgcagcggcaaaacagcgtttatcaccgcgatggttaatcagttgctcaatattcatgccggagcacgtttgccgcttttaagtgcggtgcgtgaagagcgcctgctgggcgtaaaacgcattcctcagcgtgactttggcattccgcgcttcacctatgatgaaggactggcgcagttatatggcgatcctcccgcctggccgacgccaacgcgcggcgtcagcgaaattcgcctggcgctacgctataaatcgaacgattcgctgctgcgccactttaaggatacctccacgctgtatctggagattgtggattaccccggcgaatggttgctcgacctgccgatgctggcgcaggactatttaagctggtcgcgccagatgacgggcttactcaatggtcagcgcggcgaatggtcggcgaaatggcgaatgatgtgcgaagggctggacccgctagcgcctgccgacgaaaaccgactggcagacattgccgccgcgtggaccgattatctccaccactgcaaacagcaggggcagcactttattcagccaggacgctttgttttgcctggcgatatggcaggagcgcccgcgctgcaattcttcccatggccagatgtcgatgcctggggcgagtctaaactggcgcaggccgataaacacaccaacgccggaatgttgcgcgagcgttttaattattactgcgagaaggtggtgaaaggattctataaaaatcacttcctgcgttttgaccgccagattgtgctggtggactgcctgcaaccgctcaacagtggaccacaggcatttaatgatatgcgtctggcgctgacgcagctgatgcaaagtttccactacgggcagcgtaccctgttccggcgtttgttttcgccggttatcgataagctattgtttgctgccactaaagcggaccatgtgaccatcgatcagcacgctaatatggtttcattgctgcaacaactgattcaggatgcctggcaaaatgcggcgttcgaagggatcagtatggactgcctggggctggcgtctgttcaggcgaccaccagcggaattattgatgttaacggtgagaaaatcccggcgctgcgcggtaatcgactcagcgatggcgcaccgctcactgtttatcctggcgaagttcccgcacgtttgccaggtcaggcgttctgggataagcaaggcttccagtttgaggcgtttcgtccgcaggtgatggatgtcgacaaaccgctaccgcatattcgtcttgatgctgcgctggaatttttaataggagataaattgcgatga

SEQ ID NO: 3401 - DNA, 1062 bp, Escherichia coli
atgaccgaaccgttaaaaccacgtattgatttcgacggtccactggaggtcgatcagaatccaaaattcagggcgcagcagacctttgacgaaaatcaggcgcaaaattttgccccagccacgctcgatgaagcgcaggaagaagaggggcaagttgaagcggtgatggacgcagcgttgcgtccgaaacgcagcctgtggcgcaaaatggtgatgggcgggctggctctgtttggcgcaagcgttgtcgggcagggcgtgcagtggacaatgaacgcctggcaaacccaggactgggtggcgctgggtggatgtgccgctggggcattgattatcggcgctggcgtaggttctgtggtaacagagtggcggcgcttatggcgcttgcgacagcgcgcccatgaacgcgacgaagcgcgcgatttgttgcacagtcacggcacgggtaaaggccgtgcattctgcgaaaaactggcgcagcaggcgggtattgatcagtcacatccggcgctgcagcgctggtatgcctcaatccatgaaacgcagaacgatcgtgaagtggtcagcctgtatgctcacctggtccagccagttttagatgcccaggcgcggcgcgaaatcagccgttcggcagcggaatcaacgttaatgattgccgttagcccactggcgctggtggatatggcgtttatcgcctggcgcaatctgcgtttgattaatcgcatcgccacgctgtatggcattgaactgggatattacagccgtttgcgcctgtttaagctggtattgctgaatattgcttttgccggagccagcgaactggtgcgcgaagtggggatggactggatgtcgcaagatctcgctgcgcgtttgtctacccgggcagctcaggggattggtgctggacttctgacggcacgactggggattaaagctatggagctttgccgcccgctgccgtggattgacgatgacaaacctcgcctcggggatttccgtcgtcagcttatcggtcaggtgaaagagacgctgcaaaaaggcaaaacgcccagcgaaaaataa

SEQ ID NO: 3402 - DNA, 1542 bp, Escherichia coli
atgcgtctggaagtcttttgtgaagaccgactcggtctgacccgcgaattactcgatctactcgtgctaagaggcattgatttacgcggtattgagattgaccccattgggcgaatctacctcaattttgctgaactggagtttgagagtttcagcagtctgatggccgaaatacgccgtattgcaggtgttaccgatgtgcgtactgtcccgtggatgccttccgaacgtgagcatctggcgttgagcgcgttactggaggcgttgcctgaacctgtgctctctgtcgatatgaaaagcaaagtggatatggcgaacccggcgagctgtcagctttttgggcaaaaattggatcgcctgcgcaaccataccgccgcgcaattgattaacggctttaattttttacgctggctggaaagcgaaccgcaagattcgcataacgagcatgtcgttattaatgggcagaatttcctgatggagattacgcctgtttatcttcaggatgaaaatgatcaacacgtcctgaccggtgcggtggtgatgctgcgatcaacgattcgtatgggccgtcagttgcaaaatgtcgccgcccaggatgtcagcgccttcagtcaaattgtcgctgtcagcccgaaaatgaagcatgttgtcgaacaggcgcagaaactggcgatgctaagcgcgccactgctgattacgggtgataccggcaccggaaaagatctctttgcttacgcctgtcatcaggcaagccccagagcgagcaaaccttacctggcgctgaactgtgcgtctataccggaagatgcggtcgagagtgaactgtttggtcatgctccggaagggaagaaagggttctttgagcaggcgaacggtggttcggtgctgttggatgaaataggtgagatgtcaccacggatgcaggcgaaattactgcgtttccttaatgatggcaccttccgtcgggttggcgaagaccatgaggtgcatgtcgatgtgcgggtgatttgtgctacgcagaagaatctggtcgaactggtgcaaaaaggcgtgttccgtgaagatctctattatcgtctgaacgtgttgacgctcaatctgccgccgctacgtgactgtccgcaggacatcatgccgttaaccgagctgttcgtcgctcgctttgccgacgagcagggcgtgccgcgtccgaaactggccgctgacctgaatactgtacttacgcgttatgcgtggccgggaaatgtgcggcagttaaagaacgctatctatcgcgcactgacacaactggacggttatgagctgcgtccacaggatattttgttgccggattatgacgccgcaacggtagccgtgggcgaagatgcgatggaaggttcgctggacgaaatcaccagccgttttgaacgctcggtattaacccagctttatcgcaattatcccagcacgcgcaaactggcaaaacgtctcggcgtttcacataccgcgattgccaataagttgcgggaatatggtctgagtcagaagaggaacgaagagtaa

SEQ ID NO: 3403 - DNA, 507 bp, Escherichia coli
atgtcacaaaccgttcatttccagggcaacccggttacagtcgccaattccatcccgcaggcgggtagcaaagcgcagacttttactctcgtggcaaaagatctgtctgacgtcaccctcggtcagtttgcgggtaaacgcaaagtgctgaacattttcccgagtattgataccggtgtttgcgccgcatcagtacgtaagtttaaccaactggcaaccgagatcgacaacaccgttgtgctgtgtatctctgccgatctgccgttcgcccagtctcgtttctgcggcgcagaaggtctgaacaacgttatcaccctctccactttccgtaacgctgaattcctgcaagcctacggtgtggcaattgctgatggcccactgaaaggtctggcagcgcgtgccgttgtggttattgatgaaaatgacaatgtgattttcagccagctggtggatgaaatcaccaccgagccggattacgaagcagctctggctgtactgaaagcataa

SEQ ID NO: 3404 - DNA, 966 bp, Escherichia coli
atgagaaccgttaaggtatttgaggaagcctggcccttacataccccgtttgtgattgctcggggaagtcgcagtgaagcgcgcgtggtggtggttgaactggaagaagagggtattaaaggcaccggcgaatgcacgccgtatccgcgttatggggaaagtgatgcctcagtaatggcgcaaattatgagcgtcgtgccgcaattagagaaagagctgacacgggaggagttgcaaaaaatcctccctgccggcgcagcacgtaatgcgctggattgtgcattgtgggatctggcggcgcgaaaacagcagcaatcgctggctgctttgatcggcataacgcttcccgagacagtcaccacggcacagacgatagtcatcggtacgcctgatcagatggccaatagtgcatcaacactctggcaggcaggcgcgaaattactgaaagtgaagctggataaccatcttatcagtgagcggatggtggcaattcgcacagctgtgcccgatgcgacgctgatcgttgatgcaaatgaatcctggcgtgcagaagggttggcggcgcgttgccagctattggcggatttaggcgttgcgatgcttgaacaaccgcttcctgcgcaggacgatgcggcgctggagaattttattcatccgttaccgatttgtgctgatgaaagttgtcatactcgtagcaatctgaaggcgctgaaagggcgctatgagatggttaacattaagcttgataaaaccggtggtctgacggaagcgctggcgctggcgactgaagcgcgtgcacaaggttttcgtctgatgctgggctgcatgttgtgtacctctcgtgccattagcgccgctttaccgctggtgccgcaggtcagtttcgccgatcttgacggaccgacctggctggcggtagatgtggaaccggcgcttcagttcacgacgggcgaattgcatctttag

SEQ ID NO: 3405 - DNA, 729 bp, Escherichia coli
atgaccgtaactcgcccacgcgccgaacgcggcgcatttccgcccggaacagaacattacggacgttcattattgggcgcgccgttaatctggtttccggcccctgcagccagtcacgaaagtggtttgattctggctggcactcacggtgatgaaaactcttcgatcgtcacgctctcctgtgctctgcggactttgacaccttctttgcgccgccatcatgtggtgctgtgtgtgaatcctgacggctgccagttagggttacgggccaatgctaatggtgtggatttaaaccgaaactttccggcagcaaactggaaggaaggtgaaacagtttatcgctggaacagcgccgctgaagaacgtgatgttgtattactgacaggtgacaaacctggctccgaacctgaaacccaggcgctgtgccagcttatacaccgcattcaacctgcctgggtggtctcattccacgatccgctggcctgtattgaagatcccagacacagcgaattaggtgaatggctggcccaggcgtttgaattgcctctggtaaccagcgtcggttatgaaacgcctggctctttcggcagttggtgtgcagatctcaacttgcattgcatcaccgcagagtttccccccatctcctccgacgaagccagcgaaaaatatctctttgcgatggcaaacttgctgcgctggcatcctaaagatgcaattcgcccgtcgtga

SEQ ID NO: 3406 - DNA, 639 bp, Escherichia coli
atgaaaaatgtactgattcttggtgctggcggtcagatagcccgccatgtgattaatcaactggcagataaacaaaccattaaacaaactttatttgcccgtcagccagcaaaaatccacaaaccctatccaactaatagcaagattattatgggggatgtactgaatcatgcagcactgaagcaggccatgcagggacaggatgttgtgtatgccaaccttacgggggaagatttagatattcaggcaaattcagtgatcgctgcgatgaaagcctgtgatgttaaacgtctgatctttgttctttccctcggtatttatgatgaagttccaggaaaatttggcgaatggaataatgcagttattggtgaacccctaaaaccattccgcagggctgcggatgcaattgaggcttctggactggaatatacaattcttcgccctgcctggctgactgatgaagatattattgattatgagcttacctcacgcaatgaaccattcaaaggtacgatcgtatcacgtaagagtgtcgcagcattaatcacagatatcatcgataaacctgagaaacacattggtgagaatataggcatcaatcaacccgggactgatggtgataagcccttcttcatgtaa

SEQ ID NO: 3407 - DNA, 921 bp, Escherichia coli
atgatgaataataaagtcagcttcactaacagcaataatccaaccatctctttgtctgcagtgatctatttccctccaaaatttgatgaaacccgtcagtatccggcaattgtggtatctcacccaggtgggggcgttaaagagcaaacggccggaacctatgccgaaaaactggcggaaaagggatttgtcactattgcttatgacgcatcttatcaaggtgaaagcggcggcgagccgcgtcagttagaaaacccatacattcgtactgaagacgtcagtgccgtgattgattacctgacaacgctttcttatgtcgacaatacccgaattggtgcgatgggaatttgtgccggagcaggatatacagccaatgctgcaattcaggatcgccgcatcaaggccatcggtactgttagtgcggtcaatattggttcgatgttccgtaatggttgggaaaacaatgtgaaatctattgatgccctaccatacgttgacgcgggttcaaacgcccgaaccagcgatattagcagcggagaatacgccactatgccactggcaccaatgaaggagtccgatgcgccgaacgaagaactgcgtcaggcctgggagtattaccacacccctcgcgcgcagtatccaacagcaccgggttacgctactttgcgcagccttaaccagattattacctatgatgcttaccatatggcggaagtgtacctgactcagccgatacagattgtggcgggcagccaggctgggagcaaatggatgagtgacgacctgtacgatcgagcatcaagccaggataaacgctatcacattgttgaaggcgcaaaccatatggatctttatgatggcaaagtctatgtggctgaagcaatttcagtattagctccgttctttgaggaaactctgtaa

SEQ ID NO: 3408 - DNA, 900 bp, Escherichia coli
atgaagcgtgaagaaatcgctgatctgatggcgtttgtcgttgttgcagaggagcgtagcttcactcgcgcagcagcccgcctgagcatggcgcagtcagctttaagccagatagtgcgccgtatagaagaacgattgggattgcggcttctgacgcgaaccacgcgcagcgttgtacccactgaagcgggcgagcatcttttgtctgttcttggccctatgttgcatgacatagattctgccctgacatccctgagcgatctgcagaaccgcccatccgggacaatacgtattactactgtagaacatgcagcaaaaacgatattgttaccagctatgcgcacattcctgaaatcgcatcctgaaattgatattcagcttaccattgattatggtttgaccgatgtcgtttctgaacgttttgatgcaggcgtccgtctgggtggggagatggataaagatatgatcgccattcgaatcgggccagacataccaatggctattgttggctcaccggattatttttctcgccgaagtgctccaacgtcagtgtcacaattaatagatcatcaggcaattaatttgtatcttcccacatcgggtacagcaaatcgctggagattaatacgcggtggacgtgaagttcgtgttcgcatggaaggtcagcttttactgaatacgatagacctgatcattgatgctgcaattgatgggcatggattggcgtatctaccttatgatcaggttgagcgggctattaaagaaaaaaaactgatacgtgttttggataaattcacaccagatttacccggttatcacctgtactatccacaccgtcgacatgctggctcggcattctcattatttatagataggctgaagtataaaggtgctgtttag

SEQ ID NO: 3409 - DNA, 1614 bp, Escherichia coli
atgaagcactctgtttcagtcacgtgttgtgtgctgttggtcagcagcatttctctttcgtatgctgctgaagttccgagcggcacagtactggcagagaagcaggagctggtgcgccacattaaagatgagccagcgtcgctggatcccgctaaagccgtgggcctgccggagattcaggtcattcgcgatctgtttgaaggactggtgaatcagaacgagaaaggggagattgtccccggcgttgcgactcagtggaaaagtaatgacaaccgtatatggacttttaccctgcgcgataacgcaaaatgggcggatggcacaccggtaacggcgcaagattttgtctacagctggcaacgtctggtggacccgaaaacgctatcgccatttgcatggtttgccgcgctggcgggaatcaacaacgcacaggcgattattgatgataaagccgcgcctgaccagcttggcgttaccgcagttgatgcccatactttgaaaatccagcttgataaaccgttgccgtggtttgtgaatttaaccgctaactttgccttcttcccggtgcaaaaagccaacgtagaaagcagtaaagagtggacgaaacccggaaatctgatcggcaatggcgcttatgttcttaaagagcgcgtagtcaatgaaaaactggtcgtggtgccgaatacccattattgggataacgccaaaacggtactgcaaaaagtgaccttcctgccaattaatcaggaatccgcagccactaagcgttatctcgcgggggatattgatatcaccgaatccttcccgaaaaatatgtatcagaagctgttgaaggatattccggggcaggtttatacgccgccgcagctcgggacctattattatgcgtttaacacgcaaaaagggccgacggcagatcagcgcgttcgcctggcattaagtatgacgatagatcgccgcctgatgaccgaaaaagtgttggggacgggcgaaaagccagcgtggcattttacaccagatgttaccgcgggatttacgccggaaccttcgccgtttgaacaaatgagtcaggaagaactgaatgcgcaggcaaaaactttgttgagcgcagctggttatggtccgcaaaaaccgctgaagttgacgcttttgtataacacttcagaaaaccatcaaaaaattgcgattgctgtagcatcgatgtggaaaaagaacctgggcgtagatgttaaattgcaaaaccaggaatggaaaacctatatcgatagccgtaataccggcaattttgatgttatccgcgcctcgtgggtaggggattataatgaaccctccactttcctgacattattaacgtcaacgcattccgggaatatttcacgctttaacaatccggcatatgacaaagttctggcccaggcatcgacggaaaataccgttaaagcgcgtaatgccgattacaacgcggcagaaaaaatcctcatggagcaagcaccgattgcaccaatttatcaatataccaatggacgattaatcaagccgtggctgaaaggttatcccattaataaccctgaagatgtggcgtacagtcggactatgtatattgtgaagcattga

SEQ ID NO: 3410 - DNA, 1032 bp, Escherichia coli
atgatcgctgaactgtttacaaataatgcgcttaatctggtcattattttcggtagctgcgcagcattgattctgatgagcttttggtttcgccgtggagatcgtaaaagaaaaggatttttattccatgcggtgcaatttttaatctacaccataattattagtgctgttggtagcatcattaactatgttatagaaaactataaactcaaatttatcaccccaggcgttatcgattttatctgtacgtccctgattgcggttattctgacgattaagctatttctgctgattaatcagtttgaaaaacagcagattaaaaaaggtcgcgatatcaccagtgcgcggatcatgtcgcgcattatcaaaatcaccattattgtggtgcttgttctgctttatggcgaacatttcggcatgagcctttctggcttgttgacctttggtggtattggtggtctggctgtcggtatggccggtaaagatattctgagtaacttcttttccgggattatgctctatttcgaccgtcctttcagtattggcgactggatccgttcaccggacagaaatatcgaaggtacagtagcggaaattggctggcgaattaccaaaattaagacctttgataatcgtccattgtacgtaccgaactcgctgttttcgtcgatcagcgtagaaaatcctggacgaatgaccaaccggcgcattaccacgaccattggtttacgttatgaggatgcggcaaaagtgggcgttattgtcgaagccgtacgtgagatgctgaaaaatcacccggccatcgaccagcgacaaaccttactggtttatttcaaccagtttgctgattcgtcattaaatattatggtttattgctttaccaaaaccacggtatgggctgagtggcttgctgcacagcaagacgtttatttgaagattatcgatattgtacagtcacacggcgcggactttgccttccccagccagacgctgtatatggataacattacaccgccggaccagggtcgctaa

SEQ ID NO: 3411 - DNA, 258 bp, Escherichia coli
atgattatggcgaaactgaagtcagcgaaagggaagaaatttctctttggtttgttggcggttttcattattgcggcgtcggttgtgactcgcgcgaccatcggcggcgttatagaacagtacaatattccgctgtctgagtggacgacatcaatgtatgtgattcagtcatcgatgatttttgtttatagcctggtctttactgtgttgctggcaatcccgttgggaatttatttccttggcggcgaagagcagtaa

SEQ ID NO: 3412 - DNA, 951 bp, Escherichia coli
atggctatgtatcagaacatgctcgttgttatcgatcctaaccaggacgaccaaccagcattgcggcgagctgtttatttacatcaacggattggtggcaaaattaaagcctttttgccgatctatgacttctcatacgaaatgaccaccctgctctctccggacgaacgtaccgctatgcgtcagggcgtcatcagccagcgtacagcctggatccacgagcaggcaaaatattatctcaatgctggcgttcccattgaaattaaagtggtctggcataaccgtcctttcgaagccatcattcaggaagtgatcagcggcgggcacgatttggtgctaaaaatggcgcaccaacatgaccgtctggaagcggtgatttttacgccaacggactggcatctgttacgcaaatgcccaagccccgtgtggatggtgaaagaccagccgtggccggaagggggtaaggcgctggtggcggtgaatctcgccagtgaagagccgtaccataatgcgctcaatgaaaaactggtcaaagagacgatcgaactggcagaacaagtcaaccataccgaagttcatctggttggcgcttatccggtaacgccaattaatatcgcgattgaactgccggaatttgacccgagcgtttataacgatgccattcgtgggcaacatttgctggcaatgaaagctctgcgacagaaattcggcattaatgaaaacatgacgcacgtagaaaaaggtctgcccgaagaggtgattcctgatttggcggagcacttacaggcggggattgtggttctgggcacggtcggacgcaccggtatttcagcagcattccttggcaacacggcggaacaggtgattgatcatcttcgctgcgacctgctggtcattaaacctgaccagtatcagacacccgttgaactggatgacgaagaagacgattaa

SEQ ID NO: 3413 - DNA, 753 bp, Escherichia coli
atgatcccggaaaagcgaattatacggcgcattcagtctggcggttgtgctatccattgccaggattgcagcatcagccagctttgcatcccgttcacactcaacgaacatgagcttgatcagcttgataatatcattgagcggaagaagcctattcagaaaggccagacgctgtttaaggctggagatgaactaaaatcgctttatgccatccgctccggtacgattaaaagttataccatcactgagcaaggcgacgagcaaatcactggtttccatttagcaggcgatctggtgggatttgatgccatcggcagcggtcatcacccgagtttcgcgcaggcgctggaaacctcgatggtatgtgaaatcccgttcgaaacgctggacgatttgtctggtaaaatgccgaatctgcgtcagcagatgatgcgtctgatgagcggtgaaatcaaaggcgatcaggacatgatcctgctgttgtcgaagaaaaatgccgaggaacgtctggctgcattcatctacaacctgtcccgtcgttttgcccaacgcggcttctcccctcgtgaattccgcctgacgatgactcgtggtgatatcggtaactatctgggcctgacggttgaaaccatcagccgtctgctgggtcgcttccagaaaagcggtatgctggcagtcaaaggtaaatacatcactatcgaaaataacgatgcgctggcccagcttgctggtcatacgcgtaacgttgcctga

SEQ ID NO: 3414 - DNA, 516 bp, Escherichia coli
atgctgagattacttgaagaaaaaattgccacgccactgggtccactgtgggtgatttgcgatgagcaatttcgcctgcgggcggttgaatgggaagagtacagcgaacgcatggtgcagctgctggacatccattatcgcaaagatggctatgagcgcatttctgccaccaacccaggtggtttaagcgacaagcttcgtgaatattttgccggtaatcttagcattattgatacgcttcccactgccacgggggggacgccatttcagcgcgaagtctggaaaacactgcgcactatcccctgcgggcaggtaatgcattatggccaactggctgaacaattaggccgccctggcgcggcgcgtgccgttggtgcggcaaacggatcgaatcccatcagcatcgtcgtaccttgccatcgggttattggccgaaacggcaccatgaccggatatgcaggcggagttcagcgaaaagagtggttattgcgccacgaaggttatcttttgctgtaa

SEQ ID NO: 3415 - DNA, 816 bp, Escherichia coli
atgacaatcacactgcaacccaaagcatcaccagggcatcacattatcggactggattcggaacatctgaatggaggcacagttccctggcataaacatctctatgcccagttgctttacccggctgaaggagtcgttcgtatatgggctggagaaagcgtctggctagtgcatgccagcagcgcgctttggctgcccccacaaatgccgcataagtttgttgcgacaggcaacgtacttttaaaaaccgtactggtttcagaagcggaaagtgaaacgctgggaaaagtttgcttcatgacgggtatttcccccctgttaagggaattactaattgcaattaaccaacttccaccgtcgcaaagtaccacagataaacaacagttacgtttttcagccctcgagacactgatacttcaggaaataaaaatgggggtgaaaatgtcacttgaactcccttggccaaatgatgagcggctacagcagctttgtgagaatttgctaaacaaccaagggtatctgccaacactggataatctagcggataaaattaacgtcagtagccgtacactcatgcgcttatttgttaaagagacgggattaacatttcgccactgggttcagcaaatgcacgttatttctgcagtgacgcttcttgatgatggatattcgttgaccaaaattgcccatcgtctgggctatgcctcagctgaatcgttcggcaatatgtttaagcgtcgaacgggctactcacccggtaaatttactcgtcgattaacgatgcatgattatgcaatcacaagacaaatgatttaa

SEQ ID NO: 3416 - DNA, 915 bp, Escherichia coli
atgataatttctaaaaaacagcttattggggtggtagcgatcggtattcttttggctggcgttgtcttttttatctggtgggtaagcaaaggaagatttatacagacgacggatgatgcttacattggtggtaatatcaccacggtggcaagtaaagtttctggttatatttctgctatagaggtgcgcgataatcagagtgtaaaaaaaggcgatattatcctgcgtctcgatgatcgggattatcgtgcaaatgtcgccaggcttgaggcaaaaataaaaagtagcaaagccaatctcgaaagcattcaagccactattgcgatgcagcagtcgataattcaaagtgccagtgaaacatggcaggcagtaaaacatgaggagcaaaagcgcctgcgagatactgaacgttatgaaaaactcgcacaatcagcggcaatatcgcaacaaattattgataacgccaggtttgactaccagcaggtcgcagcaaaggagcgcaaagccgcgaacgatttcctggtggagaagcaacggctggcagttttatctgctcaggaagaaaacgtacgtgcaagtatcgaagaagttcaggccgctttgactcaggtactactggatctggaatatacccttgttcgtgcgccgattgatggcattgtcgcaaaccgcagcgcccatacaggcagttgggtggaaggcggcacatcgttagtttcactagtaccagtcagtgagttgtgggttgatgcaaattataaagaaaaccaaatagcgggaatgaagccaggaatgaaggctgagatccgtgctgatattctcaaaggggaagtgtttcacggtcacattgaaagcctttccccagcgacaggagccagtttcagcttgatattcaaattgtatcgtcatccctaa

SEQ ID NO: 3417 - DNA, 1383 bp, Escherichia coli
atggcctggcttcagaccagctatttaattgccgagattattgttattccgctctctgggtggctgtcacgggtattttccactcgttggctttttactctatccgcgggaatatttactttaatgagtatcgcttgtggacttgcatggaatattcagatcatgattttttttcgtgctttacagggagttgctggcgcatccatgatccctttagttttcacgacggcgtttatttattaccagggtaaagagttggggttggctgctgcggtagtcagtgcgctggcctcactgtcaccgacgctagggccaactctggggggctggatcactgataacctcgactggcgatggctattttatatcaatatattaccgggcatatatttagttttgagtattccttttctggttaattttgataaacctgatctctctttactgaaagttgctgattatccgagtattatcctgttggccatgacactgggatgtctggaatatacccttgaagaaggagcgcgctggggatggctggatgataatactattttgctgacatcagttctggcattggtaagttttattttatttgctgcgcgtacacttacaatatccaatccgataatggatcttcatgcttttaaggataaaaatttcacactgggatgttttttttctttttctggaggggttgggatattctctactgtatatttaatacctgtgtttttggggcaggttcgcggattaaatgccgaagagataggttttgccgtttgcacaacaggtattttccagttattttctgttcccttttacttctggttaagtaaaaaaataaatctgcgatggctgttgatggcggggctgggtggatttgtgttttcaatgtatctttttacccctataacccacgaatggggatggcaggagttactgtttccacaggcaattagagggatttcgcagcagtttgcgatggcccccatcgtaacattaacgctggggggaattccaaaagaacggctgaagttagcctctggtgtatttaatttaacacgtaatcttgggggcgcaattggtattgccctgtgtggctctattctcaataatcgaactaattttcatttttcgagaatgggtgaaaaaatggtttctgttccccatgcggtgaatgacttcatttccagaagtgctttgttttttaatcgcagtggaagtgaccagacatcggaaatactggcttcaaccaaattattgagtcaattgatgctgagggaggcgcaaactatggcattttcggatacctttctgctaatcagtggtctgttatttatcgcatttttgttggttcctgctatggataaatcatcctga

SEQ ID NO: 3418 - DNA, 564 bp, Escherichia coli
atgaaccttgacgacaaatcgctgtttcttgacgccatggaagatgtccagccgctgaaacgtgctacagatgtccactggcatccagcgcgtaaccaacgtgcgccgcagcgtatcgacacgctgcaacttgataatttcctcaccaccggatttctcgacatcatcccgctaagtcagccgctggagtttcggcgggaagggttgcaacatggggtgctggataagctgcgcagtggtaaatatccgcaacaggcgagcctgaatcttttgcgccagccggtggaagagtgccgcaaaatgatgttcagtttcattcaacaagccctggcggatggtttgcgtaacgtgctgattattcatggcaaaggacgggatgataaatcgcatgccaatattgtccgcagctatgtggcgcgctggctgaccgaatttgatgatgttcaggcatattgcactgcgctaccgcatcatggcggcagcggggcgtgttacgtcgcactacgtaaaacagcgcaggcgaagcaagaaaactgggagcgccacgctaagcgcagtcgttga

SEQ ID NO: 3419 - DNA, 1233 bp, Escherichia coli
atgattacacacaacttcaatactctggacttactcaccagtcctgtctggatcgtttcgccctttgaggaacagttaatttatgccaacagcgaggcacgactgttgatgcaagacctcacgtttagtcagctacgaaccggtccctattccgtctcctcacaaaaagaactgccgaaatacctctccgatctgcaaaatcaacacgatattatcgaaatcctcaccgttcagcgcaatgaagaggaaacagcattgagctgtcgacttgttttgcgaaagctgacagaagcagaaccggtgattattttcgaaggtatcgaagcgccggcaacgctgggtttaaaagccagtcgctcggcaaattatcagcgcaaaaaacaaggtttttatgcgcgcttttttctgactaactctgcaccaatgttgttgattgacccctcacgagatggccaaatcgtcgatgctaacctcgccgcgctcaatttctatggttataaccatgaaacgatgtgccagaaacatacctgggaaattaatatgctcgggcgtcgcgtcatgcctatcatgcatgaaatctcgcatttacccggtggtcataagcctttgaattttattcataaactggcggatggttcgactcgtcatgtgcagacctatgccgggccgattgaaatttatggcgacaagctcatgttatgtattgtgcatgatattactgagcaaaaacggctggaggagcagctggaacatgcagcccaccatgatgcgatgaccggattactgaatcggcgacagttttatcacattaccgagccaggccaaatgcagcacctcgctatcgctcaggattacagcttgttgctcatcgacaccgatcgttttaaacacattaacgatctctatgggcattctaaaggtgatgaggtgttatgcgcccttgcccgcactctcgaaagttgcgctcgcaaaggcgatttggtgtttcgttggggaggcgaagagtttgtcttattgctaccaagaaccccactggataccgcgctttcgctggctgaaactatccgcgtaagcgtggcaaaagtgagtatttcgagcttaccacgctttactgtcagcattggtgtggcgcatcacgaaggaaatgaaagcatcgatgaactgtttaaacgcgttgatgatgctttgtatcgagcgaaaaatgatggacgcaaccgcgtgctggcggcataa

SEQ ID NO: 3420 - DNA, 984 bp, Escherichia coli
gtggaagcgattaagggatcggacgttaatgtcccggatgcagtatttgcctggatgctggatggtagaggcggcgttaaaccgctggaaaatacagatgtgattgatgaagcgcatccctgctggctccaccttaattatgtacaccatgatagcgcccaatggctggcgacaacaccgctgcttcccaataacgtacgtgatgcgctggcgggcgagagcacacggccccgagtcagccgtctcggtgaaggcacgctgattacattgcgctgtataaacggcagcaccgatgaacgccccgatcaactggtcgctatgcgtgtatatatggacgggcggttaattgtttcgacccgacaacgcaaagtgctggcgctggacgatgtggtgagcgatcttgaagagggcactggtccgaccgattgcggggggtggctggttgatgtgtgcgatgcgttgaccgatcattccagcgaatttatcgagcagctgcacgataaaattatcgacctcgaagataatcttctcgatcagcaaattccaccgcgtggattcctggctctgctgcgcaaacaattaattgtgatgcgtcgctatatggcaccgcaacgtgatgtttatgctcgtcttgccagtgaacgtttgccgtggatgagcgatgaccaacgccgtcggatgcaggatattgccgatcgccttgggcgcggtcttgacgaaatcgacgcctgtatagcacggactggcgtgatggcggatgaaatcgctcaggtgatgcaggaaaatttagctcgtcgtacctatacaatgtcgttgatggcaatggtctttttacccagtacgtttctgacagggttatttggcgtcaaccttggtgggatccctggcggcggatggcaatttggattttcaattttttgtattctgttagttgttcttattggtggtgttgctttatggttgcatcgtagtaaatggttgtaa

SEQ ID NO: 3421 - DNA, 174 bp, Escherichia coli
atgacgacacttatttatttgcaaattcctgtccctgaaccgattcctggcgatcctgttccagtacctgatccgatccctcgcccgcaacccatgcctgacccaccacccgatgaagaaccgattaaattgtcgcatcgtgagcgtagatctgcgaggatacgcgcctgctga

SEQ ID NO: 3422 - DNA, 1374 bp, Escherichia coli
gtgaccgctttttctaccctgaatgttttgcctcccgcccaactcacaaaccttaatgagttgggttatttaaccatgacgccggtgcaggccgccgcgcttccggcgatccttgccggaaaagatgttcgcgtgcaggcgaaaaccggcagcggcaaaacggcggcttttggcctcggcttgttacagcaaattgatgcgtcgctatttcaaacccaggctttagtgctgtgtcctacgcgtgaactggcggatcaggtggcaggtgaattgcgtcggctggcgcgttttctgtcaaataccaaaattttgacgttgtgcggtggtcaaccgttcggtatgcagcgtgattcgttacaacatgcgccgcatattatcgtggcaacgccgggccgtttgctggatcacctgcaaaaaggcactgtatcactggatgcgttgaatacgctggtgatggatgaggccgaccgcatgctggatatgggatttagtgacgccattgatgatgtcatccgttttgcgccagcatctcggcagacacttctgttttcggcaacctggccggaagccattgccgcaatcagcggaagagtgcaacgcgatcctttagcgattgaaattgactcaacagatgctctgccacctattgaacaacaattttatgagacatccagcaaaggcaaaattcctctgttgcaacggttattaagcttgcatcagccatcctcttgcgtggtgttttgcaataccaaaaaagattgccagtctgtctgcgacgcgctgaatgaagtagggcaaagtgcattgtcgttacacggcgatctggagcaacgcgatcgcgatcagaccctggtacgttttgctaacggtagcgcccgtgtactggtcgcgactgatgttgctgcgcgtggtctggatataaaatcgcttgagctggtggtgaactttgagctggcgtgggaccctgaagttcatgtacatcgcatcggtcgtacagctcgtgcaggaaatagcggtctggcgatcagtttctgtgccccggaagaagcacagcgggccaatatcatttctgacatgttgcagataaaacttaactggcaaacgctgccagcgaatagttccattgtgccgctggaagcagaaatggcaacgttgtgtatcgatggcgggaaaaaagccaaaatgcgcccgggtgatgtattaggtgcgctgacaggagacatcgggcttgatggcgcagatattggcaaaatcgccgtgcatccggcgcatgtttatgtcgcggtgcgtcaggctgttgctcataaagcatggaaacagttacagggcgggaagattaaaggaaaaacgtgccgggtgcggttattaaaataa

SEQ ID NO: 3423 - DNA, 936 bp, Escherichia coli
atgcaagaaaatcaacaaattacaaagaaagaacaatacaacctgaacaaattacaaaaacgtctgcgtcgtaacgtgggcgaagccattgctgacttcaatatgattgaagaaggcgatcgcatcatggtttgcctctccgggggtaaagacagctataccatgctggaaattctgcgcaatttgcagcaaagcgcgccaatcaatttttcgttggtggctgttaacctcgatcaaaagcaaccgggcttcccggaacacgttctgcccgagtatcttgaaacgctgggcgttgagtacaagattgttgaagagaacacttacggtatcgtgaaagagaagattccggagggcaaaaccacttgctcactgtgttctcgtcttcgtcgcggtatcctttatcgcaccgcaacggaactgggggcgacgaagatcgcgctgggtcaccatcgtgacgatatcctgcaaacgctgttcttaaatatgttctatggtggcaagatgaaaggtatgcctccgaaactgatgagcgatgatggcaaacatatcgtgattcgtccgctggcctactgccgcgagaaagatattcagcgctttgccgatgcaaaagcgttcccgattattccgtgcaacctgtgcggttctcagcctaacctgcaacgtcaggtaattgctgacatgttgcgtgactgggataaacgttatccggggcgtatcgagacgatgttcagcgcgatgcagaatgtggtgccgtcgcatctgtgcgataccaacctgttcgatttcaaaggcattacccacggttctgaagtggttaacgggggtgatctggcgtttgatcgcgaagagatcccactacaaccagcgggctggcagccagaagaagatgaaaatcagttggatgagttacggctgaatgtggttgaagtgaaataa

SEQ ID NO: 3424 - DNA, 222 bp, Escherichia coli
atgccgctgggaattggtgcatttattgtaggactgtcttgtgcaattgcaactggctatctgaaagataatagcatcataaagaaagataccattataggtatcgttttttcaggaatttttgtcttgactatcaacaggcacaattcagcggattacagatatcattattacattacggtttactctgcatggtatcgcctaccatttttgccacattaa

SEQ ID NO: 3425 - DNA, 435 bp, Escherichia coli
atgaacagaacgattcttgtccctatcgatatttccgattcagaattaactcaacgcgtgattagccacgttgaggcagaggcaaagattgatgatgcagaggttcatttcctgacggtaataccttcgctgccctactatgcctctctgggtttagcctattccgcagaattaccggcaatggatgatctgaaagcggaagccaaatcgcaactggaagagatcattaaaaaatttaaactgccaaccgacagagtgcatgtccatgttgaagaaggctcgcccaaagaccgcattctggaattggcgaagaagatccccgctcatatgatcatcattgcttcccatcgaccggatatcaccacttatctgctcggttctaacgccgcagctgtagtgcgtcacgcagagtgctccgtgctggttgtgcgctga

SEQ ID NO: 3426 - DNA, 1134 bp, Escherichia coli
atgaaaagcaaagtactggcactcttaattcctgccctgctcgctacaggtgctgcacatgcagccgaagtttataataaagacggcaacaaattagatctgtatggcaaagttgatggcctgcattatttttctgataattcagcgaaagatggcgaccagagctatgctcgtctgggttttaaaggcgaaacccaaattaacgatcaactcactggctacggtcaatgggaatacaatattcaggcaaacaacaccgaatcttcaacaaaccagtcatggacccgtctggcatttgccggactgaaatttgcagattacggttctttcgattacggacgtaattatggcgtaatgtacgacatcgaaggctggactgatatgctacctgaatttggcggagactcttataccaatgcagacaactttatgactggtcgtgccaatggcgtcgcgacttatcgtaatgctgatttcttcggtctggtaaatggtctgaacttcgcggtgcagtatcaaggtaacaacgaaggtgccagtaatggtcaggaaggcaccaacaacggacgtgatgttcgccatgaaaacggtgacggctggggtctttccacaacatatgatttaggcatgggctttagcgctggtgcggcatacacctcttctgaccgcaccaatgaccaggttaaccatactgcggcaggtggtgataaagcagacgcgtggactgctgggctaaaatacgatgctaacaatatttacctggcaaccatgtattcagaaacgcgtaatatgaccccgtttggcgacagcgattatgctgttgcaaacaaaacccagaactttgaagtcactgcacagtaccagtttgattttggtctgcgtccggcagtctctttcctgatgtctaaaggccgtgacctgcacgctgccggtggtgcagacaacccagcaggtgttgatgataaagatctggttaaatacgccgatgttggcgcgacttactatttcaataaaaacatgtccacctatgttgactataaaatcaacctgttggatgaagatgacagtttctacgctgccaacggcatctctaccgatgatattgtcgctttaggtctggtttatcagttctaa

SEQ ID NO: 3427 - DNA, 3525 bp, Escherichia coli
atgattactattgacggtaatggcgcggttgcttcggtggcgtttcgcaccagtgaagttatcgccatctaccctattacccccagttccacgatggcagaacaggctgatgcatgggccggaaacggcttgaaaaacgtttggggagacacaccacgcgtggttgaaatgcagtcggaagcgggtgctatcgctaccgtgcatggtgctttgcaaactggtgccctctcaacatcgtttacgtcatcgcagggtttgctgctgatgatcccaacgctgtacaaactggcaggcgaactcacaccgtttgtcctgcatgttgcggcacgtaccgttgccacacatgcactctctatttttggcgatcattccgacgttatggcggtgcgccagacgggttgcgcgatgttgtgtgcagcaaacgtccaggaggcgcaagactttgcactcatttcgcacatcgcgacgctgaaaagccgcgtgccatttattcatttctttgatggtttccgcacatcccacgaaatcaataaaattgtcccgctggccgatgacacgattcttgaactgatgccgcaggcagaaattgatgctcatcgcgcccgggcactcaacccggaacatccggtgatccgcggtacgtccgccaatcctgacacttatttccagtctcgcgaagccaccaacccatggtacaacgcggtctatgaccatgttgaacaggcgatgaatgatttcgctgccgcgacaggtcgtcagtatcagccgtttgagtattacgggcatccgcaagcggaacgggtgattatcctgatgggctctgccattggcaccagtgaagaagtggttgatgaattgctgacccgtggcgaaaaagtcggcgtgctgaaagttcgcctgtaccgccccttctccgccaaacacttgctgcaagctctgccgggatccgtgcgcaacgtggcggtactggacagaaccaaagagccaggtgcgcaagcggaacccctgtacctggatgtgatgaccgcactggcagaagcctttaataatggcgagcgcgaaaccctgccccgtgtcattggtgggcgctatggtctttcatccaaagaatttggcccggactgtgtactggcggtatttgccgagctcaacgcggctaaaccgaaagcgcgctttacggttggtatttacgatgatgtaaccaatctgtcactgccgttgccggaaaacaccctaccaaactcggcgaaactggaagccttgttttatggccttggtagtgatggcagcgtttccgcgaccaaaaacaatatcaagattatcggtaattccacgccgtggtacgcacagggctattttgtttacgattccaaaaaggcgggcggcctgacggtttctcaccttcgcgtgagcgaacagccgattcgttccgcttatctcatttcccaggctgattttgttggctgccaccagttgcagtttatcgataaatatcagatggctgagcgtttaaaacctggcggcattttcctgctcaacacgccgtacagcgcagctgaagtgtggtcgcgcttgccgcaggaagttcaggccgtgctaaaccagaaaaaagcgcgcttctatgtgattaacgcggcgaaaatcgcccgcgaatgtggcctggcggcccgtattaataccgtcatgcagatggcttttttccatctgacgcagattctgcctggcgatagtgccctcgcagaattgcagggtgcgattgccaaaagttacagtagcaaaggccaggatctggtggaacgcaactggcaggctctggcgctggcgcgtgaatccgtagaagaagttccactgcagccagttaatccgcatagcgccaatcgaccgccagtggtttccgatgccgctcctgatttcgtgaaaaccgtaaccgctgcgatgctcgccgggcttggcgacgccctccccgtttcggcgctgccgccagacggcacctggccgatgggcaccacgcgctgggaaaaacgcaatatcgccgaagagatccccatctggaaagaggaactctgtacccaatgtaaccactgtgtcgccgcttgcccacactcagctattcgcgcaaaagtggtaccgcctgaagcgatggaaaacgcccctgccagcctgcattcgctggatgtgaaatcgcgtgatatgcgcgggcagaaatatgtcttgcaggtggctccggaagattgcaccggttgtaacctgtgcgtcgaagtttgcccggcgaaagaccgtcagaatccagagattaaagccatcaatatgatgtcgcgcctggaacatgtcgaagaagagaaaatcaattacgatttcttcctcaacctgccagaaatcgaccgtagcaaactggaacgtattgatattcgtacatcgcagctgattacaccgctgtttgaatattccggtgcttgctccggttgtggcgagacgccgtatattaaattgctgactcagctctatggcgaccggatgttgatcgctaatgccactggctgttcttcaatatacggcggtaacctgccttcaacaccatataccaccgatgccaatggtcgtggaccggcatgggcgaactcgctgtttgaagataacgccgaatttggccttggtttccgcctgacggtcgatcaacaccgtgtccgcgtgctgcgtctgctcgatcaatttgccgataaaatcccggcggaattactgactgcgttgaaatcagactccacgccagaggttcgtcgtgaacaggttgcagctttacgccagcaactcaacgatgttgccgaagcacatgaactgctgcgtgacgcagatgcactggtggaaaaatcaatctggctgattggtggcgatggctgggcttacgatatcggctttggcggtctggatcatgtattgagtttgacggaaaacgtcaacattctggtgctggatacgcaatgctattccaacaccggtggtcaggcatcgaaagcgacaccgctgggtgcagtaactaagtttggcgagcatggtaaacgtaaagcgcgtaaagatcttggcgtcagtatgatgatgtacggtcatgtttatgtggcgcagatttctctcggcgcgcagctgaaccagacggtgaaagcgattcaggaagcggaagcgtatccggggccatcgctgatcatcgcttatagcccatgtgaagagcatggttacgatctggcactcagccacgatcagatgcgccaactcactgctaccggcttctggccgttatatcgcttcgatcctcgtcgtgccgatgaaggcaaactgccgctggcgctggattcacgcccgccgtcagaagcactggaagaaacgttacttcacgagcagcgtttccgtcgtctgaattcgcagcagccagaagtggcagaacagttatggaaagatgctgcagctgatttgcaaaagcgctatgacttcctggcacaaatggccggaaaagcggaaaaaagcaacaccgattaa

SEQ ID NO: 3428 - DNA, 267 bp, Escherichia coli
atgcgagcagcgttttgggtagggtgtgccgctttattgttgtcggcgtgtagtagtgaacctgttcagcaggcgactgcggcgcacgtagcgccaggtttaaaagcgtcgatgtccagtagtggagaagcaaattgtgcaatgatcggcggttcgctttctgttgcccgccaactggatggtacggcgattgggatgtgtgcattacccaacggcaaacgctgtagcgaacagtcacttgccgccgggagctgtggcagctattaa

SEQ ID NO: 3429 - DNA, 423 bp, Escherichia coli
atgaagaaagtagccgcgcttgttgcgctaagcctgctgatggcgggatgtgtaagtagtgacaaaattgctgtaacgccagaacagctacagcatcatcgctttgtgctggaaagcgtaaacggtaagcccgtgaccagcgataaaaatccgccagaaatcagctttggtgaaaagatgatgatttccggcagcatgtgtaaccgctttaacggtgaaggcaaactgtctaatggtgaactgaccgccaaagggctggcaatgacccgtatgatgtgcgctaacccgcagcttaatgaactcgataacaccattagcgaaatgctgaaagaaggtgcacaagtggatctgaccgcgaaccagttaacgctggcgaccgcgaaacagacattaacttataagctggcggatttaatgaattaa

SEQ ID NO: 3430 - DNA, 990 bp, Escherichia coli
atgaaactcgccgtttatagcacaaaacagtacgacaagaagtacctgcaacaggtgaacgagtcctttggctttgagctggaattttttgactttctgctgacggaaaaaaccgctaaaactgccaatggctgcgaagcggtatgtattttcgtaaacgatgacggcagccgcccggtgctggaagagctgaaaaagcacggcgttaaatatatcgccttgcgctgtgctggtttcaataacgtcgaccttgacgcggcaaaagaactggggctcaaagtagtccgtgttccagcctatgatccagaggccgttgctgaacacgccatcggtatgatgatgacgctgaaccgccgtattcaccgcgcatatcagcgtacccgtgacgctaacttctctctggaaggtctgaccggctttactatgtatggcaaaacggcaggcgttatcggtaccggtaaaatcggtgtggcgatgctgcgcattctgaaaggttttggtatgcgtctgctggcgttcgatccgtatccaagtgcggcggcgctggaactcggtgtggagtatgtcgatctgccaaccctgttctctgaatcagacgttatctctctgcactgcccgctgacaccggaaaactaccatctgttgaacgaagccgccttcgatcagatgaaaaatggcgtgatgatcgtcaataccagtcgcggtgcattgattgattctcaggcggcaattgaagcgctgaaaaatcagaaaattggttcgttgggtatggacgtgtatgagaacgaacgcgatctgttctttgaagataaatccaacgacgtgatccaggatgacgtattccgtcgcttgtctgcctgccacaacgtgctgtttaccgggcaccaggcattcctgacagcagaagctctgaccagtatttctcagactacgctgcaaaacttaagcaatctggaaaaaggcgaaacctgcccgaacgaactggtttaa

SEQ ID NO: 3431 - DNA, 2640 bp, Escherichia coli
atgctgggtaaatataaagccgttctcgcgctgttattactgattattcttgtgccgttgacgctgctgatgacgctcgggctgtgggttcccacgctggcgggcatctggctaccgctcgggacacgtattgcattagatgaaagcccacgcattacgcgtaaaggtttaatcatccccgatctccgttatctggtgggagattgtcagcttgcgcatatcaccaacgccagcctttcacatcccagccgctggttattgagcgtcggcacggtagaacttgattctgcttgtctggcgaaattgccgcagacggagcaatcgccagccgctccaaaaaccctcgcgcagtggcagtccatgctgcctaacacctggatcaatatcgataaactgattttttctccctggcaggaatggcagggaaaactctctctcgcattaacctccgatatccagcaactgcgttatcagggcgaaaaagttaaatttcaaggccagctgaaagggcaacaacttacagtcagcgaactggatgtcgccgcgtttgaaaatcagccgccggtaaaactggtgggggaatttactatgccgctcgtgccggatggacttccggtaagtggtcatgctactgcgacgttaaacttaccgcaggagccttcactggtggatgccgagctggactggcaggaaaatagcgggcaattgattgtgctggcacgggataacggcgatccgttgctcgatttgccgtggcaaattactcgtcaacaattgaccgtaagcgatggtcgctggagctggccgtatgcaggttttcctttaagtggccgactgggtgtcaaagtcgacaactggcaggcagggctcgagaacgctctggtcagcgggcgactgagtgtgctgacccaggggcaagcgggtaaaggcaacgcggtgttaaattttggcccaggaaaattaagcatggataacagccagctgcctctgcagctgaccggtgaagcgaaacaggcggacctcattttatatgcccgtttacctgcgcagctaagtggaagtctgtctgacccaacgctgacctttgagccaggcgcgttacttcgttcaaagggaagagtcattgattcgctggacatcgatgaaatccgctggcctttagcgggtgtaaaagtcacccaacgtggtgttgacggacgtttgcaggccattttgcaggcgcatgaaaatgaactgggcgatttcgtgctgcatatggatgggctggcgaatgattttctccctgacgctggccgctggcagtggcgctactggggaaaagggagttttacaccgatgaatgccacctgggatgtcgcaggaaaaggtgagtggcatgacagcacgattacgctgaccgatctctccaccggtttcgaccagttacaatacggtacgatgacggtagaaaagccgagattaattctcgacaagcccgtcgtctgggtacgtgacgcacagcatccctccttcagcggcgctctgtcactggacgccgggcaaacgctgttcactggcggcagtgtgttaccgccatcaaccttaaaatttagcgtcgatgggcgcgatccgacgtatttcctctttaaaggcgatttacatgctggtgagattggcccggttcgggtaaatggtcgctgggacggtattcgtctgcgcggtaacgcctggtggcctaaacaatcactgactgtattccagccgctggtgccacccgactggaagatgaacttatgcgatggtgaactgtatgctcaggttgcattttcagctgcgcctgaacaaggattccgcgcgggagggcacggcgtgttgaaaggcggtagtgcctggatgccagataatcaggttaacggtgtcgattttgtcctgcctttccgttttgccgatggagcctggcatctggggactcgcggtcccgttacgttgcgaattgccgaagtgattaatctggtgacagcgaaaaatattacggctgatttgcaaggtcgttatccgtggactgaagaagaaccattgctgttgactgatgttagcgtcgatgtgttaggcggtaacgtgctgatgaaacaattacgtatgccgcaacatgatccggcactgttgcgactgaataatctttcctccagcgaactggttagcgccgtcaatccgaaacaattcgccatgtccggggcatttagtggtgcattgccgttatggctaaacaacgaaaaatggatagtgaaagacggctggctggcaaatagcgggccgatgaccttgcggctggataaagacaccgcagatgcggtggtgaaagacaatatgaccgcgggttcagcaattaactggttgcgctatatggaaattagccgttcatcgacaaaaattaatttagataatctcggtttattaaccatgcaggccaatattacaggtaccagtcgcgttgatggtaaaagcggtacggtaaatcttaattaccatcatgaagagaatatttttacgctgtggcgcagtttacgctttggcgataatctccaggcatggctggagcagaacgcgcgtctgccgggaaatgactgtccgcaaggaaaagagtgtgaggataaacaatga

SEQ ID NO: 3432 - DNA, 186 bp, Escherichia coli
atgaaaattttactggctgcgttgacgtcatcttttatgctggttggctgtacgcctcgcattgaagtcgctgcacctaaggaaccgatcactatcaatatgaacgttaaaattgagcatgagatcatcatcaaggcagacaaagatgtcgaagagctgcttgagacccgtagcgatcttttttga

SEQ ID NO: 3433 - DNA, 327 bp, Escherichia coli
atgaaaagaacattacttctttgtgcatttcttgttggcttggtaagcagcaatgtaatggcattgactctggatgaagccagaactcaggggcgggtaggggaaacattttatggttatctggttgcgctgaaaacagatgctgaaactgagaaattagtaaccgacatcaatgccgaacgtaaagcgagctatcaacaactggcaaagcagaataatgtgtcggtggatgatatcgcgaaactcgccgggcaaaagctcgtagaacgggccaaacccggggaatatgtacaagggataaacggtaaatggatgcgaaaattttaa

SEQ ID NO: 3434 - DNA, 6201 bp, Escherichia coli
atgcaaaggaaaactctattgtcggcctgtattgcattagctctgagtggtcagggttgggcggcagatattacagaaatagaaaccaccacaggtgaaaagaaaaataccaatgtgacttgtccagcagatcctggaaaactcagtccagaagagcttaaacgcttaccctctgaatgctcctctgtagtcgaacagaacctgatgccatggcttgtcacaggtgctgctactgcgttaatcacaaccttagccatagtggaactaaacgacgatgatgatcatcatcgcaataattctccacttccaccaactccacctgatgatgattcagacgacactccagttcctccaactcctggcggagatgagataataccagacgatggtccggatgataccccgacgcctcccaaaccgatttcgtttaataatgacgttatcctcgataaaacagaaaaaacgttaactattcgcgattcagtttttacttataccgagaatgctgacgggactatttctctgcaagatagcaatgggcgtaaggcgactattaatctttggcagattgatgaaacgaataacacggttgcccttgaagggatgagcgcagatggtgcaacgaagtggcaatataatcacaacggtgagctcgttattacgggcgacaataccacagtaaacaacactggaaaaaccatcgtcgacggcaaaggcaccaccggaactgaaatcgcgggtaacaacgcggtggtgaatcaggacggcgagctggatgtgagcggcggcggtcacggtattgatatcaccggcgacagcgcaacggtggacaacaaaggcggcatgactgtcaccgatcctgactccatcggtattcagatagacggcgacaaggcggtcgtgaacaacgacggtgacaatgccatcagcaacggcggcaccggcacgcaggttaacggcgacgaagccaccgtgaacaataacggcaacaccaccgttgacggcaaggattccacgggcaccgagataaacggtgacaaagctatcgtcaataacgacggcgacagcacgatccttgatggcggcaccggaacccgcattacgggtgatgatgcgacggccaacaacagcggcaataccaccgttgatggtcagggttcgaccggaactgaaatcgcgggtaataacgcggtggtgaaccaggacggcgagctggatgtgagcggtggcggtcacgggattgatatcaccggcgacagcgcaacggtggacaacaaaggcggtatgaccgttgcggatgcggactccatcggtattcagatagacggcgacaaggcggtcgtgaacaacgacggtgacagtgccatcagcaacggcggcaccggcacgcaggttaatggcgacgaagccaccgtgaacaataacggcaacaccaccgttgacggtaaggattccacgggcaccgagataaacggtgacaaagctatcgtcaacaacgacggtgacagcacgatccttgatggcggcaccggaacccgtattacgggtgatgatgcgacggccaacaacagtggcaataccaccgttgatggtcagggttcgaccggaactgaaatcgcgggtaataacgcggtggtgaaccaggacggcgagctggatgtgagcggcggcggtcacgggattgatatcaccggcgacagcgcaacggtggacaacaaaggcggcatgaccgttgcggatgcggattcgattggcattcagatagacggcgacaaggcggtcgtgaacaacgacggtgacaatgccatcagcaacggcggcaccggcacgcaggttaacggcgacgaagccaccgtgaacaataacggcaacaccaccgttgacggcaaagattccaccggcaccgagatcgcaggtaataacgccaccgttactcaggaaggtgaactcacggttagcagcggcggccgcggtatcgacattacaggcaacaatgccaaggtcgacactaaaggcaaaatgaccatcacaggtactgactcggttggtgtgtccatcaatggcgacagtgcgacgttgaccaatacgggcgatattgacgtcagcaattcggctaccggattcagcctcgttaccaatgaggggattatctcgctggctggcagcatgaaagtgggcgatttttcaacgggcatggcgcttagcggcgacaacaacagcgtgacgctggcggcgaaagatatcaatgtcaccgggcagaaagcgacaggcgttaacatctcaggcgagagtaataccgttgatatcaccggtaatattctggtggataaagatcaaaccgcagataacgcggtagattatttctacgacccatccgttggtgtgaatatcagcggcaacagtaacacggtatcactggacggtaagctaaccgttattgcagatagtgagttaacctcacgcaaatacatggagtttgatggtagccaggagaatatttctgggcttaccgtgtctggcgatggtaacaccgtcaatttgaatggcggcattcagtttgtgggcgagaaaaacgcgctggcagacggttcaactattgccgataagcgcagctactttggtaagacacctcttgttagtgtcgatggacaatccaaagtttatctgaacggtgattctactatcagcggctctttgccgttaggctatgccaacattcttcagctaagcaataaggcggcgcttgaaattggtagtgacgctacgttcagtatgcaggacattagtgtttacgagcactatttcgcgcaaactccgcaaattatcaaggttgatacgggttcacaggtcgtcaacaatggtgatgtggatatctggaatatcagttttgcaggcatttggggcgaaaactctaccggtattaacaacggaaatattacgctttctcaatatgactattcttctccggagacatcgttctcagaacctgaccacatggcctttttaagctccagtggcggtagtgctgtgaacaacggaacgatcactgcaaaagtgatggaacagcacagtgttctcaatatgggctctacagccggtgttgcagacccgagggtattcaataatagcgtgtcgagtatgatgggaatggaggcctacggtaaaggcactgttcttaacagcgaaagcggcgttattgacatgtacgggcgcggcaacattggtatgttggcagttgatgactccgcagcggataacgccgggaaaatcacgctggatacgctttgggtcgatcaaaacgacaccacgacgctgcgtactgacctcccttccagcacggctatagattacggtgttggtatggccaccggaacgaatagtggtggtggcgcaagaagcaacggtgttgcgactaaccaacaaggcggtgtaatcactgtttataatgccggtgctgctatggctgcttacggtgccagcaacatggttattaaccagggcattatcaatctggagaaaaacggaaattacgatggcagcttgggcgcgaatatgctcgtgggaatggcggtctataacagaggcaccgctatcaacgataaaacaggcgtgatcaatattaacgtcgatacggggcaggcgttttataacgacggtacagggacaattctgaactatggtgagataaaccttctcggctcgccaatggacagtgcagactctcacatgggggctattccggagaatctggatctgctgacagcactgacaggcagcggcgaaacggatatgcgaactgcttcaagtggcgggtttgtgacgaccaaagcgctggcaaactacggcaatgaaacgctgaatagcaatgtggctgccaaagcgtggctttataaccaggataaggccaacctgacaattaacggagagctatccatcgggcaagggctggaaaacagcggcttactcaattctgacaccattagcgcagccgcgaatgtctataaccgagcatcgggtagcattatcactgatcagttatcgctaacgggtagcaactcgtttttcaatgagggcaacttcagcggttcggttgctggctcaagctataagcaaaatgtggttaacacgggaacgatggctgtaatggctgacggtaagtcgcttatcagtggcagcttcctgctttataacgaagcaggcgcaacactcagcaacagcagcagcgccgtttcgggtggagaaaatgccattgttaacgtaacccgcaccggcgattcactcgcgcaagttaaccgtggcaccattactgcggtcaacggctacagtgcaattaaaacggcaagtacgggttctaacagcaacggaaaatggatctggaataccgacacgggtgtaattagcggcgtgaatcctaatgcaccgttaattgatcttggtcgcggctataactttgccaacgcaggcactattaatgtgcagggggatggtgcagtcgctatcagcgggggaaccaccagctatacggttcaactggtgaacagtgggaccatcaatgtcggtacggcgcagggtaaagcggacggcactaacggtactgggttaattggtatcaaggggaatggcagtgatacgacaattaataacgcacaaagcggtgtaattaacgtttatgcggataattcctgggccttcggtggaaagaccaaagcgatcattaacaatggtgaaattaacctgctgtgtgatacgggatgtgatatctatgcaccgggtaccaccggtacgctgaacgatcataacagtactactgatattatcgttcctgcagcaacgagcacacctacgcagggttcagtacccacagtacctgcggactccagtgcacagcaaaaactgactaactacactattggtaccaatagcgatggcacctctggtatgttgaaagccaataacctggtcatcagcgacaacgtcaaggtaaataccgggttcagtgcaggtactgccgacacgactgttgtgattaatgatgttttcaaaggtgaaaatatttccggggctgagaatatttcttcttccacggtaatgtggaatgctcagggcagcactgatgccagcggcaacgtagacgtcacgatgaccaaaaatgcctatacggaggttgtgacggattcttcagttaataatgtcgctcaggtactggatacgggttacaccaataacgacctgtacactagtctgaacgtaggaacgactgctgaactgaacagtgcgctgaaacaaattagcggcagccaggcaacaacggtatttaatgaagcacgagtgttaagtaaccgcttcagcatgctgtcagatgctgcaccggaagttgcaaacggtctggccttcaacgtggtagcgaaaggcgacccgcgtgctgaactgggtaacgacacacagtacgacatgatggcgctgcgtaaatctctgacgctgactgaacatcagaacctgagtctggaatacgggattgctcgtctggagggtaatggttcagataccgcaggcgataatggtgtgacaggcggttacagccagttcttcggtctgaaacaccagatggcgtttgacaacggtatgagctggaataacgccctgcgttatgatgtgcataatctcaatagcagtcgctcgatagcttacggcgacgtcaacaaaaccgctgatgctaatgtgaaacagcagtatctggaattccgtagtgaaggggcaaaaacctttgaactgcgtgaaggtctgaatgtgacaccttatgcgggtgtgaaactgcgtcatacgctggaaaacggttatcaggagcgtaatgcgggcgactttaacctgagcatgaacagcggcagcgaaacggcggtggacagcatcgttgggctgaaactggactatgcagggaaagaaggctggagtgcgaacgccacgctggaaggtgggccgaatctgagctatgtgaaaagtcaacgtactgcgagtatttcgggcgctggaagccaacgttttaacattgacgatggtcagagtggcggtggtttcaacagcctggcgacgatgggtgtgaaatacagcagccaggaaagtgcgttgcaggtagatgcattccactggaaagaagacggcatcagtgataaaggtgtgatgctaaacttcaagaaaacgttctaa

SEQ ID NO: 3435 - DNA, 861 bp, Escherichia coli
atgagcagcaacacatttactctcggtacaaaatccgttaaccgtcttggttatggcgcgatgcaactggcaggtcctggggtttttggccccccaagagatcgccacgtcgctataaccgtgctgcgcgaggcgctggcattgggcgtcaatcatattgataccagcgacttttatggtccgcacgtcaccaatcagattatccgcgaagcgctttatccgtactctgacgacctgacaattgtcactaaaattggtgcgcggcgtggagaggacgcttcctggttacccgcattttctccggcagagctgcaaaaagcggtacacgataatctacgtaatctcggcctggacgtactggatgtggttaacctgcgcgttatgatgggggatggtcatggcccgacggaaggatcgattgaagccagccttaccgtgctggcggagatgcaacaacaaggcctggtaaaacatattggcctgagtaacgtcacaccgacgcaggttgcagaggcgcgaaagattgccgaaatcgtctgcgtgcagaacgaatacaacattgcccaccgtgctgatgacgcaatgattgatgctttggctcgtgatggcattgcctacgtgccgttttttccgctcgggggctttacgccgctgcaatcctccacgctttccgatgttgctacgagcctgggtgcaacaccaatgcaggtggcgctggcgtggctgttacagcgttcaccgaatattttgctgattcctggaacatcttctgttgcgcatttacgggagaatatggctgctgaaaaattgcatctttctgagaaagtgttgtctacgttggatggtatttcgcgagaataa

SEQ ID NO: 3436 - DNA, 606 bp, Escherichia coli
atgacgctctaccagataaaaccgctctttcagccgctgttaagaccgacgatgttttggctttataagcaccatgttacagcgaatcacatcactcttgctgcactggcgctttctcttattacaggattgctgttgatgttggtcgcacaacccatcctctttttgctattgcccatcgtgctttttgtccgtatggcactcaatgcgctggatggcatgatggcgcgtgagtgcaatcagcaaacacgtcttggggcgattttgaatgaaactggcgatgttatttccgatattgcgctttatttaccgtttttatttttaccggtaagtaacgcatcactcgtaatactcatgttattttgcaccatattgactgagttttgcggtttactcgcgcagacgattaacggtattcgcagttatgccggtccatttggcaaaagcgatcgcgcgttaatatttggtctgtgggggctagccgttgccatttatccacagtggatgcaatggaataatcttttatggagcattgcttcaattctgcttctctggactgcgattaatcgttgtcggagtgtgctttttatgagtgcagaaagataa

SEQ ID NO: 3437 - DNA, 897 bp, Escherichia coli
atgctggaaaaatctctggcaacacttttcgcgttgttaattttagcaacgttgataaaccgttttctggtatggcggttaccggagagaaaagggggtgaggttacattacgtattcgtacctggtggggcatcgtcatttgtttttcaatggtgatttcaggtccacgctggatgacgttgacgttttttgcgctgataagttttctggcattgaaagaatattgtacgcttatatctgtacattttccgcgttggttatattggggtattcctcttaactatttgcttatcggttttaattgctttgagctgtttctgttatttatacctttggctgggtttctgatattagccacctggcgagttttagtgggtgacccctccggttttctgcataccgtgagcgccattttttgtggctggataatgaccgttttcaccttgagtcatgccgcctggttattaatgttgccaaccataaatatccagggcggggcgttactggtgttatttcttttggcattaaccgagtcaaacgatattgcacagtatttatggggaaaatcctgcggcagaagaaaagtggtccctaaagtcagcccgggaaaaacattggaagggctgatgggcggcgtaatcaccaccatgattgcgtcactgattattggaccgttgcttacaccgctagatacattacaggcattattagcgggtttgttaattggtattagtggtttttgcggcgatgtagtgatgtcagccatcaaacgagatattggtgttaaagatagtggaaaactattaccaggacatggcggactccttgacaggattgactcattaattttcaccgctccggtatttttttattttattcgctactgctgttactga

SEQ ID NO: 3438 - DNA, 1758 bp, Escherichia coli
atgaaaaattcacgcatccctggggaacatttttttaccaccagtgataatacagcgttgttttatcggcactggcccactttacagccaggggtgaaaaaggtcatcgtcttatttcatcgcggtcatgaacattctggtcgtctacaacatatcgttgatgaactggcgatgccagatactgctttttatgcatgggatgcccgagggcatggacaaacttcggggccgcgtggttatagtccgtctcttgcgcgttcagtgcaggatgttgatgaatttgtccgttttgctgccagcgacagccaggtcggactggaagaggtggttgtgatcgcgcaaagcgtcggcgcagtgatggttgccacatgggttcatgattatgcgcctgctattcgcggactagtgctggcatctccggcctttaaggttaaattgtatgtgccgctggcacgtcctgggctggcgttatggcatcgtctgcgtggtctgttttttattaattcctatgtgaaagggcgttatctgacccacgatcggcaacgggtggcgagtttcaataatgatccgctgatcacacgggcgattgccgtcaatatcttgctcgatctctataaaacgtctgaacgtattgttagcgatgcggcggcgattacgctccccacgcaacttctgatatcaggcgatgactatgtggtgcatcgccaaccgcagattgatttttatcagcgtttacgtagtcctctgaaagagctgcatctgctgccaggcttttatcacgacacgttgggtgaagagaacagggcgcaggcatttgaaaaaatgcaaagctttatcagccgtttatatgctaacaagtcacaaaaatttgattatcagcatgaagaccgcactggaccatcagcggatcgatggcggctcctttctggtggacccgtgccgttatcgccggttgatttggcgtatcgctttatgcgaaaggcgatgaaactgttcggggcgcactctgcgggcctgcatctcggaatgagtaccggctttgattcaggcagttcgctggattatgtctatcaaaatcaaccacaaggcagtaacgcattcgggcgcttaatcgacaaaatctacctgaacagtgttggctggcgcggtattcgccagcgcaaaacccatttacaaatgctgattaaacaagccgttgccgatctccacgctaaaggtttagccatccgcgtggttgacattgccgcagggcatgggcgctatgtactggatgcgctggcaaacgagcccgccataagcgaaattttgttacgtgattacagtgaggtaaatgttgcacaagggcaagagatgattgcccaacggggaatgtctgggcgggcgcgttttgaacagggcgatgcgtttaatccggcagaactcagcacgttaactccgtggcctacgctggcgattgtctctggcctgtatgagctttttcccgaaaatgagcaggtaaaaaactcactcgcaggtcttgccaatgccatcgatccgggtggcattctcatctacaccgggcagccgtggcacccacaactggagctgattgccgggttgttaaccagtcataaagatggtaaaccgtgggtaatgcgcgtgcgttcgcaaggggagatggattcgctcgtgcatgatgccggattcgataaatgcacacaacggattgatgagtggggcatttttacggtttcgatggcggtgcgtcgtgataactga

SEQ ID NO: 3439 - DNA, 1269 bp, Escherichia coli
ttgttgctggccccatttttcttcttcacctatggatctcttaatcagttcaccacgactcaggatcttaacaaccatgatatccccagtcaggtattcggttgggaaacggcgatcccttttcttccctggactattgttccttactggagtctggatcttttatatggattttcgctgttcgtttgtagctcgacatttgagcagcgccgactggtccaccggcttattctggcaacggtaatggcctgctgcggttttttgctctacccgctgaagtttagttttatccgtcctgaagtgagtggggtgacaggatggttattttcgcaacttgaattgtttgatctgccttataaccagtctccttcgctgcatattattctctgctggctactttggcgtcactttcgtcagcatctggctgtgaggtggcgtaaagtctgcggcggatggtttttactcatcgccatttcgacgctgacgacctggcagcatcattttattgatgtcatcacagggctggcggtaggtatgttaattgactggatggtgcccgtagaccgtcgttggaattatcagaaacctgatcaacgtcgaatcaaaatagcactgccatatgtcgcaggcgcgtgctcgtgcattgtgttgatggagctaatgataatgcttcagttatggtggtcagtctggttatgttggccagtattatcgctactcatcattggccgtgggtacggtgggcttggcgcgataacaacaggtaaagatagtcaagggaaactcccgcccgccgtttactggctgacattgccatggcgcatcgggatgtggctgtctatgcgttggttttgccttcgcctggagccggtgagcaaaattactgctggtgtttatttaggggcgtttccacgacatattccggcacagaatgcggttctggacgtcacctttgaattccctcgcggacgagcgacaaaagatcgactctatttttgtgtaccgatgttggatctggtggttccggaagagggggagctccgacaggccgtggcgatgttggaaacattacgcgaagagcaaggcagcgttctggtccattgcgcgttgggattatcgcgcagtgcgctggtggtggcggcatggctgttatgttacggacattgtaaaaccgttgatgaagcgattagttatattcgagccagacgctcgcggattgtgcttaaggaagagcacaaagcgatgctgaaattatgggaaaacaggtaa

SEQ ID NO: 3440 - DNA, 606 bp, Escherichia coli
atgagcaaggtattagttcttaaatccagcatcctggcagggtactctcagtctaatcagttgtccgattattttgttgaacaatggcgcgaaaagcactccgctgatgaaatcaccgtgcgtgacctggctacaaacccgattccggtcctggatggcgaactggttggtgcactgcgtccgagcgatgcgccgctgactccgcgtcagcaggaagctctggcgctttccgatgagctgattgccgagctgaaagcccacgacgttatcgttattgcggcaccgatgtataacttcaacatctcgactcagttgaaaaactattttgacctggttgcacgcgcaggcgttactttccgctataccgagaagggtccggaaggcctggtcaccggtaaaaaagccatcgttatcaccagccgcggtgggatccataaagatggcccaacggatctggtaacgccatatctgtccacattcctgggctttatcggcattaccgatgtgaaatttgtcttcgccgaagggatcgcgtacggcccggaaatggcagcgaaagcacagtctgacgcgaaagcagccatcgacagtattgttgctgaataa

SEQ ID NO: 3441 - DNA, 3903 bp, Escherichia coli
atgacagaacaacaaaaattgacctttactgccttgcagcagcggctggattcgctgatgctgcgtgacagactgcgtttttctcgccgtctgcacggcgtgaagaaggttaaaaatcctgatgcacaacaggccattttccaggagatggcgaaagagattgaccatgcggcagggaaagtcctgctgcgtgaagcggcacgaccggagattacttacccggacaatttgccggttagtcagaaaaagcaggacattctcgaagcgattcgtgaccaccaggtggtgatcgtcgccggggaaacgggttccggtaaaacgactcagctaccgaaaatctgtatggagctgggtcgcgggattaaagggctgatcggccatacccagccgcgtcggctggcggcgcgaacggtggcgaaccgtattgcggaagagctaaaaacggagccgggcggttgcatcggttacaaagtgcgtttcagcgatcacgtcagtgataacacgatggtcaagctgatgaccgacggtatcctgctggcagagatccagcaagaccgcctgctgatgcagtacgacaccatcattattgacgaagcgcacgaacgcagcctgaatatcgattttctgctcggctatttgaaagagttgctgccgcggcgtcctgacctaaaaattattatcacttccgcgactatcgacccggaacgcttttcgcgccactttaataatgcgccgattatcgaagtctccggtcggacctatccggtggaagtgcgctatcgcccgattgttgaagaagccgatgacaccgagcgcgaccagttgcaggcgatttttgacgccgtagatgaactgagccaggaaagccctggcgacattctgatctttatgagcggcgagcgagaaattcgcgataccgccgatgcgctgaacaagctgaacttacgccataccgaaatcttgccgctttatgcacggctttccaacagcgaacagaaccgcgtgttccagtcgcacagcgggcgacgcattgtactggcgaccaacgtcgcggaaacctcgctgaccgtaccgggtattaaatacgttatcgaccccggtacagcgcgtatcagccgctacagctatcgcaccaaagtgcagcgtttgccgattgagccaatttcgcaggcttcagctaatcagcgtaaaggccgctgcggtcgtgtgtcagaagggatctgtattcgtctctattccgaagacgatttcctctcgcgcccggagtttaccgacccagaaattctgcgtactaacctggcctcggttattttgcagatgaccgcactgggcttgggcgatatcgccgcattcccgtttgtcgaagcaccggataaacgcaatatccaggatggcgtgcgtctgctcgaagagctgggcgcgatcaccactgatgaacaggccagcgcctataaactgacgccgctcggtcgccagctctcgcaactgccagtcgatcctcgtctggcgcgaatggtgctggaagcgcagaaacatggctgcgtgcgtgaggcgatgattatcacttccgcgctctctattcaggacccgcgtgagcggccaatggacaagcagcaggcatcggacgaaaaacatcgtcgcttccacgataaagagtctgacttcctcgcgtttgtgaatctgtggaattatcttggcgagcagcaaaaggcgctctcttcaaacgccttccgtcgcctgtgtcgtaccgattatctcaactatctgcgcgtgcgcgaatggcaggatatctacacccagttgcgccaggtggtgaaagaacttggcattccggttaacagcgaaccggcggattatcgcgaaattcacattgcgttgctgaccggtttgctttcgcatatcggcatgaaagatgccgataaacaagaatataccggcgcacgtaacgcgcgtttctccatcttccccggttctggtttattcaaaaagccgccgaaatgggtaatggtggcggaactggtagaaaccagccgcctgtgggggcgcattgcggcacgcatcgatccagaatgggtggaacctgtcgctcagcatttaatcaaacgcacctacagcgaaccgcactgggaacgggcgcagggcgcggtgatggcaacggaaaaagtcaccgtttacgggttgccgattgttgctgcgcgtaaggtcaactacagccagatcgatccggcgttatgtcgtgaactctttattcgccacgcgctggtggaaggtgactggcagacgcgtcacgcattcttccgtgaaaacctgaaactacgggccgaagtggaagaactggaacacaaaactcgtcgccgcgatattctggtggatgacgaaacgctgtttgagttctacgaccagcgcatcagccacgatgtgatttccgcacgtcacttcgacagctggtggaaaaaagtcagccgcgaaacgcctgatttgctcaactttgaaaagagcatgttgatcaaagaaggggcggaaaaaatcagcaaactggattacccgaacttctggcatcagggcaatctcaaactgcgtttgagctatcagtttgagcccggcgcggatgctgacggtgtgaccgtgcatatcccgctgccgttacttaaccaggttgaggaaagtgggtttgagtggcagatccccggtctgcgtcgtgagctgatcatcgccctgattaaatcgctgccgaagccggtacgccgtaattttgtgcccgcgccaaactacgccgaagcgtttttaggccgcgtcacaccgctggaattgccgttgctcgacagccttgaacgagagttacggcggatgactggcgtcaccgttgaccgcgaagactggcactgggatcaggtgcccgatcacctgaaaatcactttccgcgtggtggatgacaaaaacaagaagctaaaagaagggcgctcattacaggatctgaaagacgccctgaaaggcaaagtgcaggaaacgctgtctgccgtggcggatgacggtatcgagcagagcggtttacatatctggagttttggtcaactgccggaaagctacgagcagaagcgcggcaactacaaagtgaaggcgtggccggcgctggtggatgagcgtgacagcgtagcgatcaaactgtttgataacccgctggaacagaagcaggcaatgtggaacggtcttcgccgtttactgctgctaaatattccatcgccgatcaagtacttgcacgaaaagctgccaaacaaagccaagctggggctgtactttaatccgtatggcaaagtgctggagctgatcgatgactgtatctcctgcggtgtggatcaactgatcgacgccaatggtggcccggtctggacggaagaaggctttgctgcgctgcatgaaaaagtccgcgctgaactgaacgacacggtggtggatattgcgaagcaggtcgagcaaatcctcactgcggtgttcaatatcaacaaacgtctgaaagggcgggtggatatgaccatggcgctggggctttctgacattaaagcgcagatgggcgggctggtgtatcgcggttttgtcactggcaacggttttaaacggttgggcgacacgttacggtatttgcaggcgattgaaaaacgactggaaaaactggcgattgatccgcatcgtgaccgtgctcagatgctgaaagtcgaaaacgtccagcaggcatggcagcaatggatcaacaaactgccgcctgcacgtcgtgaggatgaagacgtgaaagaggtccgctggatgatagaagagctgcgcgttagttacttcgctcaacaacttggtacgccttatccgatttcggataagcgtattttgcaggcgatggagcagattagcggttaa

SEQ ID NO: 3442 - DNA, 801 bp, Escherichia coli
atgaatattaccccgtttccgacgctttcgccggcaaccatagatgccataaatgttatcggacagtggctggcgcaggatgatttctccggtgaggtgccgtatcaggccgattgcgtgatccttgcaggcaatgcggttatgccgactatcgatgcggcatgtaagattgcccgcgatcagcaaattcctttactgattagtggtggtatcggtcactcgacaacttttttgtatagcgccatcgcacagcatccgcactacaacactatccgcaccactggcagagctgaagctaccatcctggcggatatcgctcatcagttctggcatattccgcatgaaaaaatctggattgaagaccagtcaacaaattgcggtgaaaacgcacgctttagcatcgcgctattgaatcaggccgtagaacgagttcatacggctatcgttgttcaggaccccaccatgcagcggcgcacgatggcgacgttccaccgtataaccggggataatcccgatgcaccacgctggttaagttatcccggattcgttcctcagttaggaaataacgcagacagtgtaatctttgttaatccgttgcaaggattatggccggttgagcgttatctatcgctactcactggcgagctgccgcgtttacgcgatgatagcgatggctacggcccccgcgggcgagattttatcgttcacgttgattttccggcagaagtcattcaggcatggcaaacgctgaaacatgatgcggtgctcatcgaggcgatggaaagtcgctcgttacgttaa

SEQ ID NO: 3443 - DNA, 1365 bp, Escherichia coli
gtggtaaaccctgctacagaggctgtcatttctcgcattcccgatggtcaggccgaggatgcccgtaaggcaatcgatgcagcagaacgtgcacaaccagaatgggaagcgttgcctgctattgaacgcgccagttggttgcgcaaaatctccgccgggatccgggaacgtgccagtgaaatcagtgcgctgattgtcgaagaagggggcaagatccagcagttggctgaagtcgaagtggcttttactgcggactatatcgattatatggcggagtgggcacggcgttacgagggcgagattattcagagcgatcgtccaggagaaaatattcttctgtttaaacgtgcgcttggcgtgactaccggcattctgccgtggaactttccgttcttcctcattgcccgcaaaatggctcccgctcttttgaccggtaataccatcgtcattaaacccagtgaatttacgccaaacaatgcgattgcattcgccaaaatcgttgatgaaataggtcttccgcgcggcgtgtttaaccttgtactcgggcgtggtgaaaccgttgggcaagaactggcgggtaacccaaaggtcgcaatggtcagtatgacaggcagcgtctctgcaggtgaaaagattatggcgactgcggcgaaaaacatcaccaaagtgtgcctggaattggggggtaaagcaccggctatcgtaatggacgatgccgatcttgaactggcagtcaaagccatcgttgattcacgcgtcattaatagtgggcaagtgtgtaactgtgcagaacgtgtttatgtacagaaaagcatttatgatcagttcgtcaatcggctgggggaagcgatgcaggcggttcaatttggtaaccccgctgaacgcaacgacattgcgatgggaccgttgattaacgccgcggcgctggaaagggttgagcaaaaagtggcgcgcgcagtagaagaaggggcgagagtggcgttgggtggcaaagcggtagaggggaaaggatattattatccgccgacattgctgctggatgttcgccaggaaatgtcgattatgcatgaggaaacctttggcccggttctgccggtggtcgcatttgacacgctggaagaggctatctcaatggctaatgacagtgattacggcctgacctcatcaatctatacccaaaatctgaacgtcgcgatgaaagccattaaagggctgaagtttggtgaaacttacatcaaccgtgaaaacttcgaagctatgcaaggcttccacgctggatggcgtaaatccggtattggcggcgcagatggtaaacatggcttgcatgaatatctgcagacccaggtggtttatttacagtcgtaa

SEQ ID NO: 3444 - DNA, 1002 bp, Escherichia coli
atgagtaaagttggtattaatggttttggtcgtatcggtcgactggtgttgcgtcgattacttgaagtcaaaagcaacatagacgttgtcgctattaatgatctcacttccccaaaaattctcgcctacctgctgaaacatgattcaaactacggaccgttcccctggagcattgattatacggaagattcacttatcgttgatgggaaaagtatcgcggtttacgccgaaaaagaggctaaaaatattccgtggaaagcgaaaggcgcagaaatcattgtcgaatgtacaggcttttatacctccgccgagaaatcgcaggcgcatcttgatgctggcgcgaagaaggtgttgatttccgcccctgccggtgaaatgaaaaccatcgtttataacgtcaatgacgacactctggatggcaacgacaccattgtttccgtggcgtcatgcaccactaactgccttgcgccgatggccaaagccttgcatgacagtttcgggatagaagtcggcacgatgacaaccattcatgcctataccggcacccagtcactggtggatggcccacgtggtaaagatttacgtgcttcacgcgcagcggcagaaaatatcattccccacactacgggggcggcaaaagccattggtctggtgatcccggaattgagcggcaaactgaaaggtcatgcgcaacgcgtgccggtgaaaacaggttcggtcactgaactggtgtcgattctcggaaaaaaagtgactgccgaagaggtgaacaacgcgcttaaaaaggcgacaaacaataacgagtcatttggttatactgatgaagaaatagtctcttccgatatcattggcagccatttcggttcggtgtttgatgccacgcaaacggaaattaccgccgtgggcgatttacaactggtgaaaacggtcgcctggtacgataacgaatatggcttcgtcacgcagcttattcgcaccctcgaaaaattcgctaaactctga

SEQ ID NO: 3445 - DNA, 531 bp, Escherichia coli
atgggaaataaatactcaaggttacaaatcagcattcactggctggtctttttgctggttatcgtagcgtattgcgcaatggagtttcgtggtttcttcccacgtagcgatcggcccctcatcaacatgattcatgtttcctgtggcatctcaattctcgtactgatggtggttcgtcttttgttaaggctgaaatacccaaccccgccgattatacctaagccaaaaccgatgatgacgggactggcgcatttgggccatttggtgatttatctcctgtttattgcgctgccggtgattggtttggtgatgatgtataaccggggcaacccgtggtttgcgtttggtttgacgatgccttacgcttcagaggccaatttcgagcgggttgatagcttaaagtcgtggcatgaaacgctggcgaatctgggatattttgtcatcgggttgcacgctgcggctgcactggcacaccactatttctggaaggacaactcacttctacgcatgatgccacgtaaacgttcctga

SEQ ID NO: 3446 - DNA, 174 bp, Escherichia coli
atgaaaaaactggcacttatcctggttatgggaacgcttgtttccttttatgccgatgccgggcgcaaaccctgttctggttcgaaaggggggatctcacactgtacggcaggcggcaaatttgtctgtaatgatggttctattagtgcatcgaaaaaaacatgcactaactga

SEQ ID NO: 3447 - DNA, 456 bp, Escherichia coli
gtgttactctcgcaaggccgtggatttgccgttgtcgccagcgaagtacggacactcgcaagccgcagcgctcaggcggcgaaagagattgaaggcttgatcagtgaatcagtcaggttaattgacctgggatcggatgaggtggcaacggcagggaaaaccatgtgcactattgttgatgccgtcgcgagtgtcacacatatcatgcaggaaatcgccaccgcctcggatgaacaaagtcgaggcataacgcaggttagccaggcgatttctgaaatggataaggtgacgcaacagaatgcttctctggtagaagaggcctcaacggcggcggtgtcccttgaagaacaggcggcacgactaactgaggcggtggacgtattccgtctgaacaaacattctgtgtcggcagaaccacgaggagctggtgaaccagttagttttgctacggtgtga

SEQ ID NO: 3448 - DNA, 924 bp, Escherichia coli
atggaaaaaaatagtctgtttagtcagcgcatccgtttgcgccaccttcatacattcgtagctgtcgcacaacaaggaactttggggcgcgcggctgaaacccttaatttgagtcaacctgcgctctctaagacattgaatgaactggagcagctgacgggcgctcgcttgtttgagcgtggtcgtcagggggcgcaacttaccttacccggcgaacaatttttaacgcatgcagtcagagttcttgacgccatcaacactgccggacagtcgcttcatcgtaaagaaggtcttaataatgatgtcgtcagggttggtgcgctacctactgcggcactagggatattaccttcggttataggtcagtttcatcagcaacaaaaagagacgaccttgcaagttgcgacaatgagtaaccctatgattctggcgggtttaaaaaccggggaaatcgatatcggcattggtcggatgtcagatcctgaactgatgaacgggcttaattatgaactgctgtttcttgaatcgctgaagctggttgtccgccccaatcacccgctacttcaggagaacgtaacgctaagccgggtgctggaatggccggtcgttgtatcaccagaaggcactgcgccacgccagcattcagatgcattagtgcagagccagggatgtaaaattccttcgggttgtatcgaaacgctgtctgcttcgctatctcgtcaacttacggttgaatacgattacgtgtggtttgtcccttctggcgctgtaaaagacgacctgcgtcatgccacgctggtagccctgcctgttccgggacatggtgcaggcgaaccgattggaatactgacccgcgtagatgcgacgttctcttctggttgccagttgatgattaacgctattcgaaaatcaatgccgttctga

SEQ ID NO: 3449 - DNA, 1344 bp, Escherichia coli
atggcgaacagcatcacggcggatgagattcgggaacagttttcgcaggcaatgtcagccatgtaccagcaagaagttccgcagtacggcacgctgctggaactggtagctgatgtaaatctggcggtgctggaaaacaatcctcaactgcacgaaaaaatggtaaatgcagacgagctggcgcgactgaatgttgaacgtcatggggcgattcgcgttgggactgcacaagagcttgctactcttcggcggatgtttgccattatggggatgtacccggtgagctattacgatctctcgcaggcaggggtgccggtacattcgacagcatttcggcccattgatgatgcttctctggcgcgtaatcccttccgcgtttttacctcgttactccgtcttgagcttatcgagaacgaaattttgcgccagaaagcggcggagattctgcgtcagcgcgatatcttcaccccacgttgtcgacaactgttagaggaatatgagcagcagggcggttttaacgaaacacaggcacaggagtttgtgcaggaagccctggaaacgtttcgctggcaccagtcagcaacggtagatgaagaaacctatcgcgccttgcacaacgaacatcggttgattgctgatgtggtctgttttcctggatgccatatcaaccatctgacgccacgtacgctggatattgaccgggtgcagtcgatgatgcctgaatgcggaattgaacccaaagttctgatcgaagggccgccgcgccgcgaggtgccgattttactacgccagaccagctttaaagcactggaagagacggtgttgtttgcggggcagaaacagggcacacataccgcgcgctttggtgaaattgagcagcgtggtgtggcattaacgccgaaagggcgacaactgtatgatgatcttctgcggagcgctggaaccgggcaggataatctcactcaccaaatgcatttacaggaaaccttccgcacttttcctgacagtgagtttttaatgcgtcagcaagggctgggatggttccggtaccgtctgacgccttcgggtgaggcgcatcgtcaggcgattcatcccggagacgatccacagcccttaatagaacgtggttgggtagtggcgcaacccattacctatgaagatttcttgcccgttagcgcggcggggatcttccagtcaaatctgggtaatgaaacgcaggcatgcaatcacggtgatgccagtcgcgaagcatttgagcaggcgttgggggggccggttttggatgagttccagctttatcaggaagcggaagaacgcagtaaacgtcgctgtggtttgctttaa

SEQ ID NO: 3450 - DNA, 1620 bp, Escherichia coli
atggccgccgtgtgcggtaccagcggcattgcttctcttttttctcaggcggcattcgcggccgattctgatattgccgacgggcaaacccagcgttttgacttctccattctacagtcaatggcgcacgacttagcgcaaacagcatggcgtggtgcaccacgtccgttacctgacactttggcgacaatgacgccgcaggcttataacagtattcaatacgacgccgaaaaatcgctctggcataacgttgaaaaccgtcaactggacgctcagtttttccatatgggaatgggattccgtcgccgcgttcgtatgttttctgtagatccagcaacacatctggcgcgtgaaattcactttcgcccggagttgttcaaatacaacgatgcgggtgtggataccaaacaattagaagggcaaagcgatctcggttttgccggttttcgcgtgtttaaagcccccgaactggcgcgccgtgatgtagtatcattcctcggcgcgagttatttccgcgccgttgatgacacatatcaatacggtttgtcggcccgcggcctggcgatcgacacttacaccgacagcaaagaagagttccccgactttaccgccttctggtttgatacggtaaaaccaggggcaaccacctttaccgtttatgcgttgctcgatagcgccagcattactggtgcctataagttcactatccattgtgagaaaaatcaggtgattatggatgtggaaaatcacctgtatgcgcgcaaagacattaaacagctgggcattgcaccgatgaccagtatgttcagctgcggtactaatgaacgtcggatgtgcgacaccattcatccgcaaatccatgactctgatcgtctgtccatgtggcggggcaacggcgagtggatttgccgtccgctgaacaatccgcaaaaattgcagttcaatgcttacaccgacaacaacccgaaagggtttggtttattgcaactggatcgtgatttctcccattatcaggacattatgggctggtataacaaacgcccaagtctgtgggtggaaccgcgtaacaagtggggtaagggcaccatcggcctgatggaaatcccaacaacgggcgaaacgctggataacattgtctgcttctggcagccagaaaaagctgtaaaagcgggtgatgagtttgcattccagtatcgtctgtactggagtgcgcaaccgcctgttcattgcccattagcgcgcgttatggcgacgcgtaccggcatgggcggtttcccggaaggttgggcgccaggtgaacactatcccgaaaaatgggcgcgacgttttgccgtcgatttcgttggtggtgatctgaaagctgccgcgccaaaaggcattgagccggtgattacgctttccagtggggaagcgaagcaaatcgaaattctctatattgaacccattgatggttatcgtattcagtttgactggtatccgacttcggactccactgatccggtcgatatgcggatgtatctgcgttgtcagggcgacgctatcagtgaaacatggctctatcagtatttcccgccagcgccggataaacgtcagtatgttgatgaccgcgtgatgagttaa

SEQ ID NO: 3451 - DNA, 225 bp, Escherichia coli
atgtttccagaataccgagatttaatatcccgtctgaaaaacgaaaatcctcgctttatgtccttgttcgataaacacaataaacttgatcatgaaattgccagaaaagaaggttccgacggtcgagggtacaatgcggaagtggtccgcatgaaaaaacaaaagctacagttaaaagatgagatgctcaaaatcctgcagcaggtgagcgtcaaagaggtgtaa

SEQ ID NO: 3452 - DNA, 540 bp, Escherichia coli
atgactgaaacgataaaagtaagcgaatcacttgaattacatgctgttgcggaaagtcatgtcacacctctttatcagttaatctgtaaaaataaaacctggttacagcagtcgctaaactggccgcagtttgttcaaagtgaagaggacacgcgaaaaacggtgcagggtaatgtgatgttgcatcaacgcggctatgccaaaatgttcatgattttcaaagaagatgaacttatcggcgttatctcttttaatcgtattgaaccactgaataaaaccgctgaaatcggctactggctcgacgaatctcatcaggggcaggggatcatttctcaggcgctgcaggcattgattcatcattacgctcagtctggtgaacttagacgcttcgtgatcaaatgtcgggtggacaatgcgcaaagcaaccaggtcgctttgcgcaatggttttatccttgaaggttgcctgaaacaggctgagttcctgaatgatgcctatgatgatgtgaacttatacgcgcgtattatcgattcacaataa

SEQ ID NO: 3453 - DNA, 981 bp, Escherichia coli
atgcgtaaatatcgtctaagtgaagaacagcgagcctttagttatcaggaagatggcactaaaaaaagtgtgttattacggcaaattatcgccatgagcgattttaacgatgtgatagcaggaagcgctggcggctggatcgatcacgaaacggtgttagcacaggaaggaaattgctggatttacgaccagaatgctattgcgttcggcggaacggtgatttccgggaatacgcgtatcaccggcaccagcgtgctgtggggagaggtttacgcaacggataatgtctggatcgataatagtgaaatcagccagggtgcatatataagtgacagtgtcaccattcgtgactcattagtttgtggtcaatgtagaatatttggtcacgccttaattgatcaacattctatgatcgtcgccgcacaaggcttaacgcccgaccatcaactcctgctacaaatttatgatcgcgcaaaggttagcgcctcgcgtattgtccaccaggcacaaatttatggcgatgccgtcgcccggtatgcttttattgaacatcgcgccgaagtttttgattttgccagcgttgaaggtaatgaagagaacaacgtctggctatgcgattgcgctaaagtctacggtcacgcgcaggtgaaagctggcatagaagaagatgccattccgacgattcattacagttcgcaggtggcggaatatgccattgtggaaggtaattgtgtgttaaaacatcatgtcttgattggcggaaatgccgtggtatgcggcggaccgattctgctcgacgagcacgttgtcatacaaggtgagagccgtattactggtgcggtgataattgaaaaccatgtggagttaaccgaccacgccgtcgttgaagcctttgatggcgacacggttcatgtccgtggtccaaaagtcattaacggcgaggagcgcattactcgaacgccgttggcagggttattgtga

SEQ ID NO: 3454 - DNA, 993 bp, Escherichia coli
atgcagagcgataaagtgctcaatttgccggcaggctactttggtattgtgttggggacgatagggatgggatttgcctggcgctatgccagccaggtttggcaggtcagccactggttgggggatgggctggtgattctggcgatgatcatctggggattattgactggcgcatttattacccgactcatacgctttccgcatagcgtgctggcagaagtgcgccatccagtgctgagcagttttgtgagtttgtttccggcaacgacgatgctggtggcgattggttttgttccgtggtttcgcccactggcggtgtgcctgttcagttttggtgtcgtggttcagttggcttatgccgcctggcaaactgcgggattatggcgcggatctcaccctgaagaagctaccacgcctggactgtatctgccgacagttgccaacaactttatcagcgcaatggcctgtggtgcgttgggctacaccgacgccggtctggtgtttttaggcgcaggcgttttctcatggctaagcctggaaccggtgatcttgcagcgtctgcgcagttcgggagaattacccacggcactgcggacatcactcggcattcagctcgctcctgcgctggtggcctgtagtgcctggctgagcgtcaacggcggcgagggtgacacgctggcgaaaatgcttttcggttatggactgctgcaactgctgtttatgctacgtctgatgccatggtatctctcccagccatttaatgcttcattctggagtttctcgttcggtgtatctgcactggcaaccaccggtttgcatctggggagtggcagcgataatggatttttccatacgctggcggtgccgctgtttatctttaccaattttattattgcaatactgctcatccgtacttttgcgcttctgatgcagggaaaattgttagtcagaaccgagcgcgccgttttaatgaaagcagaggacaaagaatga

SEQ ID NO: 3455 - DNA, 594 bp, Escherichia coli
atgatcattcgtgatgaaaactattttactgataaatatgaattaacccgcacacactctgaagtgctggaagcggtgaaagtggttaaaccgggtaaaacgctggatctgggctgtggcaatggtcgtaacagtctttacctggcagccaatggttatgatgttgacgcatgggataaaaatgccatgagtatcgccaacgtcgagcgcattaagtccattgaaaatctggataatttacacacccgggtcgttgatctgaataacctcacatttgatggacagtacgattttattctttcgactgtggtgctgatgttccttgaggctaaaaccatcccagggctgattgccaatatgcaacgttgcactaaacctggcggttacaacctgattgtggcggcgatggataccgctgattatccatgtaccgtcggcttcccgtttgccttcaaagagggggaattacgtcgatattacgaaggctgggagagggtgaaatacaatgaagacgtcggcgagctgcaccgcaccgacgccaacggtaatcgtattaaactgcgtttcgccacgatgctggcacgtaaaaaatga

SEQ ID NO: 3456 - DNA, 669 bp, Escherichia coli
atgcgtaccacatcatttgcgaaagttgcagctttatgcggcttgttggctctgtctggttgtgcctctaaaatcacccagccagataaatattctggttttttaaacaattactctgatttaaaagaaacaacctcggcaacaggtaaacctgttttacgttgggtagacccgagttttgatcaaagcaaatatgacagcatcgtctggaacccaatcacttattatccggtaccgaaaccttctacccaggtagggcagaaagttctggataaaattttgaactataccaacaccgaaatgaaagaagcgatagcgcagcgtaaaccactggttaccaccgctgggccgcgtagtctgattttccgtggggccattaccggtgtagataccagtaaagaagggctgcaattctatgaagtggttcctgttgcattagtggttgcggggacgcaaatggctacaggccaccgtaccatggatactcgcttgtattttgaaggtgagctgattgatgcagcgactaataaaccggttatcaaggtcgttcgtcagggcgaaggtaaagacctgaataacgaaagtacgccaatggctttcgaaaatattaaacaagttattgatgacatggcgaccgatgccaccatgtttgacgttaacaaaaagtag

SEQ ID NO: 3457 - DNA, 1173 bp, Escherichia coli
atgcgtctgttttctattcctccacccacgctactggcggggtttctggcggtattaattggctacgccagttcagcggcaataatctggcaagcagcgattgtcgccggagccaccactgcacaaatctctggctggatgacggcgctggggctggcaatgggcgtcagtacgctggctctgacattatggtatcgcgtacctgttctcaccgcatggtcaacgcctggcgcggctttgttggtcaccggattacagggactaacacttaacgaaaccatcggcgtttttattgtcaccaacgtgttaatagtcctctgcggcataacgggactctttgctcgtctgatgcgcattattccgcactcgcttgcggcggcaatgcttgccgggattttattacgttttggtttacaggcgtttgccagtctggatggtcaatttacgttgtgtggcagtatgttgctggcatggctggcaaccagggccgttgcgccgcgctatgcggtaattgccgcgatgattattgggatcgtgatcgttatcgcgcaaggtgacgttgtcacaactgatgttgtctttaaacccgttctccccacttatattccccctgatttttcgtttgctcacagtctgagcgttgcactccccctttttctggtgacgatggcatcgcaaaacgcaccgggtatcgcagcaatgaaagcagccgggtattcggctcctgtttcgccgttgattgtgtttactggattgctggcgcttgttttttcccctttcggcgtttattccgtcggtattgcggcaatcaccgcggctatttgccaaagcccggaagcgcatccggataaagatcaacgttggctggccgctgccgttgccggcattttttatttgatcgcaggtctgtttggtagtgccattaccgggatgatggctgccctgcccgtaagttggatccagatgctggcaggtcttgcgctgttgagtaccattggcggcagtttgtatcaggcgctgcataatgagcgtgagcgcgacgcggcggtggtggcatttctggtaacggcaagtggattgacgctgttcgggattggttctgcgttttggggattaattgccggaggcgtttgttacgtggtgttgaatttaatcgctgacagaaaccgataa

SEQ ID NO: 3458 - DNA, 537 bp, Escherichia coli
atggaaaatctcgctcgctttttatccaccacacttaaacaactacgtcagcagcgcggctggagtctttcgcgactggcagaagcgacgggcgtttctaaagcgatgttagggcagattgagcgtaatgaatccagcccgacggtcgcgacattatggaaaattgccaccgggttgaacgtgccattttcaacatttatttctccgccgcagtcctctacgccttcagtttatgatccacaacggcaggcgatggtgatcacttcgctgtttccttatgatccacaactctgctttgaacacttctcgattcagatggcacccggtgcaataagcgaatcgacgccccatgaaaagggggtaatcgaacatgtcgtcgtcattgatggacaacttgatctgtgtgttgatggtgaatggcagagccttaattgtggggaaggcgttcgatttgctgcagacgtcacgcatgtctatcgtaatggtggggagcaaaccgtacattttcattccctcatccattacccgcgcagttaa

SEQ ID NO: 3459 - DNA, 2004 bp, Escherichia coli
gtggctaaaatagccgccatttttcagctactggataagaaagtgaccgtatcttctcatcgtcttgaactgttaagcccggcacgcgatgccgccattgcccgcgaagctattttgcacggtgccgatgctgtttatatcggcggccctggttttggtgcccgtcataatgccagtaatagcctgaaagatattgccgagttggtgccgtttgcccatcgttatggtgcaaaaattttcgtcacgcttaacaccattttgcatgatgatgagctggaacccgcgcaacggctgattactgacctctaccagaccggtgtcgatgcgctgattgttcaggatatggggattctggaacttgatattccgccgattgaactgcacgccagtacgcagtgcgatattcgtacagtagaaaaagcgaagttcctctctgatgttggcttcacgcagattgtgctggcgcgagagctgaatcttgagcagatccgcgcgattcaccaggccacggacgcgaccattgaattctttattcatggcgcattgtgcgtggcctattcgggtcagtgctacatttctcatgcgcaaacagggcgtagcgccaaccgtggcgattgctcgcaggcgtgccgtttgccatacacattgaaagacgatcaggggcgggtggtttcctatgaaaaacatctgctgtcgatgaaagataacgatcagactgccaacctcggcgcgctgattgatgctggcgtacgctccttcaagattgaagggcgttacaaagatatgagctacgtgaagaatatcaccgcccattatcgtcagatgctggatgccattattgaagaacgtggcgatctggcgcgcgcttcatcaggtcgtactgaacatttctttgttccatcgacggaaaagactttccaccgtggtagcacagattattttgtgaatgcccgtaatggcgatattggcgcgttcgattcgccgaaatttatcggcctgccggtgggcgaagtattgaaagtagcgaaagatcatattgatgttgccgttaccgagccactggcaaatggcgatggcctgaacgtgatgattaaacgtgaagtcgtcggttttcgtgccaatacggtagagaaaaccggagaaaatcagtaccgcgtctggcccaatgaaatgccagcagatttgcacaaaattcgcccgcatcacccactaaaccgtaatcttgatcataactggcagcaggcactgacaaaaacctccagcgaacgtcgggtggcggtagacattgaactgggcggctggcaggaacaactgattctgaccctcaccagtgaagagggtgtcagcatcacacatacgctggacgggcagttcgacgaagccaataacgccgaaaaagcaatgaacaatctgaaggatggtctggcaaaactggggcaaaccatctattacgcccgcaatgtgcaaattaatttgccgggggcgctgtttgtaccaaacagtctgttaaaccagttccgccgtgaagccgccgatatgcttgatgctgcgcgtcttgccagttaccagcgcggcagccgtaaaccggttgctgatcctgcgccagtttatccgcaaacgcatctgagtttcctcgcgaacgtatacaaccagaaagcgcgtgaattttatcatcgctatggtgtgcaactgattgacgcggcgtatgaggcacatgaagagaagggcgaagtcccggtgatgatcaccaagcattgtctgcgctttgccttcaatctgtgcccgaaacaggcgaaaggcaatatcaaaagctggaaggcgacgccaatgcaactggttaacggcgatgaagtgttaacgctaaagtttgattgccgcccatgcgagatgcacgtcattggcaaaatcaaaaatcacatactgaaaatgccgttaccgggaagcgtagtggcatccgtaagtccggatgatctgctgaaaacattgccgaagcgaaaagggtaa

SEQ ID NO: 3460 - DNA, 171 bp, Escherichia coli
atggcagggcacaaaggacatgaatttatgtgggtaaagaatgtggatcatcagctgcgtcatgaagcggacagcgatgaattgcgtgctgtggcggaagagtcggcggaaggtttgcgcgagcatttttactggcaaaaatcgcgcaaaccagaagcgggacagcgttga

SEQ ID NO: 3461 - DNA, 1407 bp, Escherichia coli
atgaaaaaataccagcagcttgcagaacaattacgcgagcagattgcgtcgggtatctggcaacccggcgatcgtttgccttcgttgcgtgaccaggtggcgctttctggcatgagctttatgactgtcagccatgcctatcagttgctcgaaagtcagggatatattatcgcgcgaccgcaatcgggttattacgttgcgccacaggcaataaaaatgccgaaagcgacagtcattccagtcacacgagatgaagccgtcgatatcaacacctatatttttgatatgttgcaggccagtcgtgatccgtcggtagttccgtttgcctcggcctttcccgacccgcgacttttccccctccaacaactaaaccgctcgctggcgcaggtaagcaaaaccgccacggcgatgagcgtgattgaaaacttaccgccaggaaacgtagaactgcgtcaggctattgctcgtcgctatgccttacagggcatcaccatttctcctgatgaaattgtcattaccgccggggcgttagaggcattaaacctcagtttgcaagcggtaactgaaccgggcgattgggtgatagtagagaatccttgtttctacggcgcgttgcaggcgctggagcggttacggctgaaggcgttatcggtggcgacggatgttaaagaagggatcgatcttcaggcgctggaactggcgttgcaggagtatccggtgaaagcgtgctggctgatgactaatagccagaacccacttggatttaccttaacgccgcagaaaaaagtgcggctggtagcgttgctcaatcagtacaacgtaacgctgattgaagatgacgtttacagcgaactttattttggacgggaaaaaccgctgcctgcgaaagcgtgggatcgccacgatggtgttttgcattgctcttcgttttcgaaatgtctggtgcctggttttcgtattggttgggtcgccgccggaaaacatgcacgtaaaattcaacgcttgcagttgatgagtacgctttccaccagctcaccgatgcagcttgcgctggtggattacctttctactcgccgatacgatgctcatcttcgtcgcctgcgtcgccagcttgcggaacgtaaacaacgcgcctggcaggctttgctgcgttatctgcctgcggaagtcaaaattcatcacaatgacagcggttattttctctggctggagctccccgagccgttagatgcaggagaattaagcctggtggcactgacgcatcatatcagtattgcgccgggtaatatgttttctaccggtgaaaactggtcacgtttttttcgttttaataccgcgtggcagtggggagaacgtgaagaacaggcggtaaaacaattaggcaaacttattcaagaacggctgtaa

SEQ ID NO: 3462 - DNA, 1146 bp, Escherichia coli
atgagcaagacatttgcccgcagcagcctgtgtgcgctcagcatgacaataatgaccgctcacgccgccgaaccgcctaccaatttagagaatccggaagggcgactggatattatcgcctggccgggatacatcgaacgcggacaaactgataaacagtacgactgggtaacgcaattcgaaaaagagacaggctgcgcggtgaatgttaaaaccgccgcgacttccgatgaaatggtcagtctgatggccaaagggggttacgatctggttacggcatccggcgatgcctcgctgcgtttgattatgggcaaacgcgtgcagccaattaataccgccttgattcccaactggaaagcgctcgatccgcgcgtggttaaaggcgactggtttaacgttggtggcaaagtttacggcacaccttaccaatgggggccgaacctgctgatgtacaacactaaaaccttcccgacgccgccggatagctggcaagtggtttttgttgagcagaatctgccggacggcaagagcaataaaggccgggtacaggcttatgatggccctatctacattgcggatgccgcgttgttcgtcaaagccacgcagccacagttgggcatccgcgatccgtatcaactcaccgaagaacagtatcaggcggtgctgaaagtgctgcgcgatcaacataatttgatccatcgctactggcatgacactaccgtgcaaatgagcgatttcaaaaacgagggtgtggttgcttccagtgcatggccctatcaggccaacgccctgaaagccgaaggccagcctgtcgctaccgttttcccgaaggagggcgttaccggttgggctgacaccaccatgctacatagcgaagcgaaacatccggtttgcgcctacaaatggatgaactggtcattaaccccaaaagtgcagggcgatgtggcggcctggtttggctcgctaccagtagtgccgcaagggtgtaaagccagtccgttattaggcgagaaaggttgtgaaacaaacggttttaactatttcgataaaatcgccttctggaaaacgcctatagcagaagggggcaagtttgttccctacagtcgctggacgcaggattacattgccattatgggcggtcgctaa

SEQ ID NO: 3463 - DNA, 1014 bp, Escherichia coli
atgacgtacgcagtggagtttgacaacgtctcacggttgtacggtgacgtgcgcgcagtagatggcgtcagtattgcgataaaagatggtgagttcttctctatgctggggccgtccggctccggcaaaaccacctacctgcgcctgattgctggcttcgaacagctttccggcggggctatctctatctttggtaaatccgccagcaatctgccaccgtgggagcgggacgtgaatactgtcttccaggactacgcgctatttccgcatatgtcgattcttgacaacgtagcctatgggctgatggtcaaaggcgtgaataaaaagcagcggcacgcaatggcgcaagaggcgcttgagaaagtggcgcttggttttgttcagcaacgtaaaccgtcacaactttctggtggtcagcgccagcgggttgctatcgccagagcactggtgaacgaaccgcgtgtgttgttgctggatgaaccgctcggcgcgctggatctcaaattgcgagagcaaatgcagcttgagctgaaaaagctgcaacagtctctcggtatcacttttatcttcgttacccacgatcagggcgaagcgttatcgatgtccgatcgtgtggcggttttcaataatggacgcattgaacaggtcgattctccgcgcgatctctatatgcgcccgcgcacgccgtttgttgccgggtttgtcgggacatcgaatgtttttgatgcactgatggcagacaaactttgtggcatgacgggaagcttcgccctgcgaccggaacatatccgcttcaacatccccggcgaagtgcaggctaatggcacgatccaggcggtgcagtatcagggcgcggcgacccgttttgaactgagactgaacggcggtgaaaaactgctggtgagtcaggccaatatgacaggcgaagaactgcccgccacgctcacgcccggacaacaggtgatggtttcctggtcgcgtgatgtgatggtaccgctggttgaggagaggtga

SEQ ID NO: 3464 - DNA, 942 bp, Escherichia coli
atggcgatgaacgtattgcaatcaccttcacgtccaggtctgggtaaggtgtccggtttcttctggcgtaatccggggctggggctgtttttgctgctgcttggcccgctaatgtggtttggcattgtctatttcggctcgctgctaacgctgttatggcagggcttttatacctttgacgatttcaccatgtcggtaacgccggaactgacgctggcgaatatccgtgcgctgtttaatccggcgaattacgacatcattctccgcacgctgaccatggctgtggcagtcactatcgccagcgccattctggcttttccaatggcgtggtatatggcgcgctataccagcggaaaaatgaaagcgtttttttatatcgcggtaatgttgccgatgtgggcgagctacattgttaaagcctatgcctggacgttattgctggcaaaagatggcgtggcgcagtggtttttacaacatctggggctggaaccactgctgactgcgttcctcacgctaccggcggtgggaggtaatacgctgtcaacttccgggctggggcgctttctggtgtttctctatatctggttgccgttcatgatcctcccggtgcaggcggcgcttgagcgtttgccgccgtcattgttgcaggcgtcggctgatcttggcgcacgtccacgacaaacctttcgctatgtggtgctgccgctggcaatcccgggtattgccgctggctctatctttaccttctcactcacgctgggcgattttattgtcccgcagctggttggccctccaggatattttatcggcaatatggtttattcccagcagggggcgattggcaatatgccgatggcggcggcattcaccctggtgccgattgttctcatcgcactttacctggcgttcgtgaaacgtctgggagcgttcgatgcactctga

SEQ ID NO: 3465 - DNA, 795 bp, Escherichia coli
atgcactctgaacgcgcaccgtttttcctcaaactggcggcctggggcggcgtggttttcttacattttcccattctgattatcgccgtttatgcgtttaacactgaagatgcggcgtttagttttccaccgcaaggcctgacgctgcgctggtttagcgtggcagcacagcgtagtgatattcttgatgccgtgacactgtcacttaaagtggcggcgctggcgacattaatcgcgctggtgttagggacgctggccgctgccgcgctgtggcgacgagactttttcggcaaaaacgccatttcgctgttactgttgctgcccattgcgctgccgggcattgtcactggtctggcgctattaaccgcttttaaaaccatcaatctggagccgggatttttcaccatcgtggtcggtcatgcgactttttgcgtagtggtggtgtttaacaatgtcatcgcccgttttcgccgcacctcgtggagtctggttgaggcgtcaatggatcttggggccaatggctggcaaaccttccgctacgtagtgttgccgaatctcagttcggcgctactggcaggaggaatgctggcgtttgccttgtcgttcgatgaaatcatcgttacgacctttacggcaggtcatgaacgaacgttaccgttgtggttgctcaatcagcttgggcgaccgcgtgatgtaccggtaactaacgtggtggcactgctggttatgttggtaacaaccttgccgatcctgggagcctggtggctaacccgcgaaggcgacaatggtcaataa

SEQ ID NO: 3466 - DNA, 1425 bp, Escherichia coli
atgcaacataagttactgattaacggagaactggttagcggcgaaggggaaaaacagcctgtctataatccggcaacgggggaagttttactggagattgccgaggcatccgtagagcaggtggatgctgctgttcgcgcggcagatgcagcatttgccgaatgggggcaaaccacgccaaaagcgcgtgcggaatgcctgctgaaactggctgatgttatcgaagaaaatggtcaggtttttgccgaactggagtcccgtaattgtggcaaaccgctgcatagtgcgttcaatgatgaaattccggcgattgtcgatgtctttcgctttttcgccggtgcggcgcgctgcctgaatggtctggcggcaggtgaatatcttgaaggtcatacttcgatgatccgtcgcgatccgttgggggtcgtggcttctatcgcaccgtggaattatccgctgatgatggctgcgtggaaactggctccggcgctggcggcagggaactgcgtagtgcttaaaccatcagaaattaccccgctgaccgcgttgaagttggcagagctggcgaaagatatcttcccggctggcgtgattaacgtgctgtttggcagaggcaaaacggtgggagatccgctgaccggacatcccaaagtgcggatggtgtcgctgacgggctctatcgccactggggaacacatcatcagccataccgcgccgtccattaagcgtactcatatggaacttggtggcaaagcgccagtgattgtttttgatgatgcggatattgaagcagtggtcgaaggtgtacgtacttttggctattacaatgccggacaggattgtactgcggcttgtcggatctacgcgcaaaaaggcatttacgatacgctggtggaaaaactcggtgctgcggtggcaacgttaaaatcgggttcgccggatgacgagtctacggagcttggacctttaagctcgctggcgcatctcgaacgcgtcagcaaggcggtagaagaggcgaaagcgacagggcacatcaaagtgatcactggcggtgaaaagcgcaagggtaatggctattactatgcgccgacgctgctggctggcgcattacaggacgatgccatcgtgcaaaaagaggtatttggtccggtagtgagtgttacgctcttcgacaacgaagaacaggtggtgaactgggcgaatgacagtcagtacggacttgcatcttcggtatggacgaaggatgtgggcagggcgcatcgcgtcagcgcgcggctgcaatatggttgtacctgggtcaatacccatttcatgctggtaagtgaaatgccgcacggtgggcagaaactttctggttacggcaaggatatgtcactttatgggctggaggattacaccgtcgtccgccacgtcatggttaaacattaa

SEQ ID NO: 3467 - DNA, 174 bp, Escherichia coli
atgtctctctatcaacatatgcttgttttttatgcggttatggcagcaatcgcatttcttatcacctggtttctttctcacgataagaaacgcatccgtttcttaagcgcctttctggtgggggcaacatggccgatgagtttcccggtggcgctgttgttttctctgttttaa

SEQ ID NO: 3468 - DNA, 234 bp, Escherichia coli
atgtcgcatctggatgaagtcatcgcgcgcgtggatgccgcgattgaagagagcgtcattgcccatatgaacgaattattaatcgccctgagcgatgacgcggagttaagtcgggaagatcgctacacccagcagcagcgtttgcgcaccgctattgctcatcacggtcgcaaacataaagaagatatggaagcgcgccacgaacagttaaccaaaggcggtaccatcctctga

SEQ ID NO: 3469 - DNA, 450 bp, Escherichia coli
atgaatcagtcacttacccttgcctttttgattgcagccgggattggtctggtagtccagaacacgctgatggtgcgcatcacccagacctcctctaccattctcatcgccatgttgctgaactcactggtggggattgtgctctttgtttctattttatggtttaaacaaggcatggcggggtttggcgaactggtgtccagcgtgcgctggtggacacttatacctggcttgctgggatcgttttttgtcttcgccagtatcagcggatatcagaatgtgggagcggcgacaactattgcagtactggtcgccagccagctgattggcggtctggtgctggatatcttccgcagccatggcgtaccacttcgggcgttgatcggcccaatttgtggcgcaattttacttgtggttggcgcctggctggtggccagacgctcattttaa

SEQ ID NO: 3470 - DNA, 519 bp, Escherichia coli
atgtccatccgttttgcccgcaaagccgactgtgctgcaattgcggaaatttataaccacgccgtgttgtatacggcggctatctggaatgaccaaacggtggatgcggataaccgcattgcctggtttgaagcgcggaccatagcaggttatccggtgctggtgagtgaagaagatggcgtagtgacgggatatgcctcgtttggcgactggcgtagttttgatggttttcgccataccgtggaacattcggtttatgtccatcccgatcatcaggggaaaggtctggggcgtaaattgttaagccgattgattgatgaagcgcgggattgcgggaagcatgtcatggtcgccgggatcgaatcgcaaaatcaggcctcgctgcatctgcaccagtcgctgggatttgtcgtcaccgcgcaaatgccgcaggtaggtactaaatttgggcgctggctggatctgacatttatgcagttgcaactcgacgagcgcactgaaccggacgcgatcggatga

SEQ ID NO: 3471 - DNA, 237 bp, Escherichia coli
atgttgggttctgtcctcgcgtccgcatggcgcgccggttccttacgtctggtttcggtaaatgtgctctttgtcgcaccagcgcaagcatttacagttccggaagtgggaaaacgtcaattaaatgaaatcaatcggatccgctacgaactggaattaatggcagttgctctggctgtcgaaaacctcactatgcaaaaaaacgttgctatgttgtgccagcaatacagccgataa

SEQ ID NO: 3472 - DNA, 2103 bp, Escherichia coli
atgaagattttttccgtccgacagaccgttttgcccgcactgcttgtcctttcccccgttgtttttgccgctgatgaacagaccatgattgtcagtgccgcaccgcaggtggtttcagaactggataccccagcagccgtgagcgtggtggatggcgaggagatgcgcctggcaacaccgcgcattaacttgtctgaatcactgaccggagtgcctggtttacaggtacaaaaccggcagaactatgcgcaagatttacagctgtcgattcgcggatttggctcccgctccacttacggaattcgcggtattcgcctgtatgtggacggtattcccgctaccatgcccgacggacaagggcaaacatctaacatcgatttaagcagtgtgcaaaatgtggaagtgctgcgtggccccttctctgctctgtatggcaacgcgtctggcggtgtaatgaatgtcaccacccagaccggacaacagccaccaaccattgaagccagtagttactacggcagttttggcagctggcgctatgggctgaaagctacgggcgcaacgggcgacggcacacaacccggcgatgtcgattacaccgtctcaaccacacgttttacgacccacggctatcgtgaccatagcggcgcacagaaaaatttagccaatgccaaactgggcgtacgcattgatgacgccagcaaattaagcctgattttcaatagtgtggatatcaaagcagatgacccaggtgggctaaccaaagcagaatggaaggcgaatccacaacaagcgcctcgtgcagaacagtacgacacgcgaaaaaccatcaagcaaactcaggctgggttgcgctatgagcgtagcctgagcgcgcaagatgatatgagtgtgatgatgtatgccggagagcgagaaacgacccagtaccagtcaatcccgatggctccccaacttaacccgtcacatgcgggcggcgtgattactctgcaacgccattatcaggggatagacagccgctggacacaccgtggtgaactgggcgttccgctcacgttcactaccggcctgaactacgaaaacatgagtgaaaaccgcaagggctacaataacttccgcctgaatagcggcgtgccggaatacgggcaaaaaggtgagttgcgccgcgacgaacgcaatctgatgtggaacgtcgatccctatttacagacgcagtggcagctgagcgaaaaactgtcgctggatgctggcgtgcgctacagctccgtgtggtttgattccaacgaccattacgttactccgggtaacggcgatgacagcggtgatgccagttatcacaaatggctacctgccggttcgttaaaatatgcaatgaccgatgcctggaatatctatctggcagccgggcgaggttttgaaacgccgacgattaatgagctgtcttatcgtgctgatggacaaagcggtatgaactttgggttaaaaccctccaccaacgatacaattgagatcggcagtaaaacgcgtattggtgatgggctgcttagtctcgcattgttccagaccgacaccgatgatgaaattgttgtcgatagcagtagcggtgggcgtacgacttacaaaaatgccggaaagacccgtcgtcaaggcgctgaactggcatgggatcaacgtttcgcgggagattttcgcgtaaaagcgtcctggacctggcttgatgcgacctatcgcagcaatgtgtgcaatgaacaggattgtaacggtaaccggatgccagggatcgcccgtaatatgggctttgcgtcgataggttatataccggaagatggttggtatgcaggcacggaagcgcgttatatgggcgatattatggcagatgatgaaaatacggccaaagcgccttcttatacactcgtcggcttattcaccgggtataaatacaattaccacaatttaaccgtggatttatttggtcgtgtcgataatttattcgataaagaatacgttggttctgtcattgtcaatgagtcaaacgggcgatattacgaacctgcgcccggacgaaattatggtgtcggcataaatattgcgtggcgatttgagtaa

SEQ ID NO: 3473 - DNA, 1062 bp, Escherichia coli
atgcatttacgtcatctgttttcatcgcgcctgcgtggttcattactgttaggttcattgcttgttgcttcatcattcagtacgcaggccgcagaagaaatgctgcgtaaagcggtaggtaaaggtgcctacgaaatggcttatagccagcaagaaaacgcgctgtggcttgccacttcgcaaagccgcaaactggataaaggcggcgtggtttatcgtcttgatccggttactctggaagtgacgcaggcgatccataacgatctcaagccgtttggtgccaccatcaataacacgactcagacgttgtggtttggtaacaccgtaaatagtgcggtcacggcgatagatgccaaaacgggcgaagtgaaaggtcgtctggtgctggatgatcgtaagcgcacggaagaggtacgcccgttgcaaccacgtgagctggtagctgatgatgccacgaacaccgtttacatcagtggtattggtaaagagagcgtgatttgggtcgttgatggcgagaatatcaaactgaaaaccgccatccagaacaccggtaaaatgagtaccggtctggcgctggatagcaaaggcaaacgtctttacaccactaacgctgacggcgaattgattaccatcgacaccgccgacaataaaatcctcagccgtaaaaagctgctggatgacggcaaagagcacttctttatcaacatcagccttgataccaacaatcagcgtgcatttatcaccgattctaaagcggcagaagtgttagtggtcgatacccgtaatggcaatattctggcgaaggttgcggcaccggaatcactggctgtgctgtttaacccagcgcgtaatgaagcctacgtgacgcatcgtcaggcaggtaaagtcagtgtgattgacgcgaaaagctataaagtggtgaaaacgttcgatacgccgactcatccgaacagcctggcgctgtctgccgatggcaaaacgctgtatgtcagtgtgaaacaaaaatccactaaacagcaggaagctacccagccggacgatgtgattcgtattgcgctgtaa

SEQ ID NO: 3474 - DNA, 1500 bp, Escherichia coli
atgagtaaacacaacaccgacacttcagatcaacacgccgcgaaacgtcgctggcttaatgcccacgaagaggggtatcacaaagcgatgggcaatcgccaggtacagatgatcgccattggcggcgcgattggtacgggtttgtttttaggcgcgggggcgcgactgcaaatggcggggcccgcactggcactggtctatttgatctgcggcctgttttcgttttttattctgcgtgcattgggtgagctggtgttacaccgcccttccagtggcagttttgtctcttatgcccgtgagtttttgggtgagaaggccgcttatgttgctggctggatgtacttcatcaactgggcgatgacggggattgttgatattaccgccgtcgctctgtatatgcattactggggcgcgtttggcggcgtgccgcagtgggtctttgcgctcgctgcactgaccatcgttggcaccatgaatatgatcggtgtgaaatggtttgcggagatggagttctggtttgcgcttattaaagtgctcgccattgtaacctttttggtcgtgggtacagtgttcctcggtagtggtcagccgctggatggcaacaccactggctttcatttaatcaccgataatggcggcttcttcccccacggtttgctgcctgcgctggtgttgattcagggcgtagtgtttgcttttgcctccattgaaatggtgggtacagcggccggagaatgtaaagatccgcagaccatggtgcctaaagcgattaacagtgtgatttggcgtattggcctgttttacgtcggctccgtggtgttgctggttatgttattaccgtggagcgcgtatcaggcggggcaaagtccatttgtgacgtttttctctaaactgggtgtgccgtacatcggcagcattatgaacattgtggtgctgaccgctgccctctccagcctgaattcaggtctgtactgcaccgggcgtattctgcgctcgatggcgatgggcggttccgcaccgagttttatggcgaaaatgagtcgtcagcatgtgccgtatgccgggattctggcgacactggttgtgtatgtcgtcggcgtattcctcaactatctggtgccgtcacgcgtatttgagattgtgttgaacttcgcgtcgctgggaatcatcgcttcatgggcgtttatcatcgtttgccagatgcgcctgcgtaaagcgattaaagaaggcaaagcagcggatgtcagttttaaactgcctggcgcgcccttcacttcctggctgacattactgtttttactgagtgtcctggtgctgatggcgttcgattacccgaacgggacttataccatcgcggcactgccgattatcggtattctgctggttataggctggtttggtgtgcgcaaacgcgttgctgaaattcacagcactgcgccagtcgtcgaggaagatgaagaaaaacaggaaattgtgtttaagcctgaaacgtcgagttaa

SEQ ID NO: 3475 - DNA, 177 bp, Escherichia coli
atgattaaggtgtatggcgtacccggctggggctctacaatcagtgagctgatgctaacactggctgatattccttatcagttcgttgatgtcagtggttttgaccacgagggaacttcacgcgatttattaaaaaccctgaatccgttgtgtcaggttccgacactggcgctgtaa

SEQ ID NO: 3476 - DNA, 285 bp, Escherichia coli
atgcctttagcagccaaacttaccgacaaaggcacccagcacgacggttattacgagaccgtcatcaccgccgggtcatccaccgtttttatcgatggtctccccgcagcccgtcagggagatccgctgacgccgcatgctaaaccgaagcatccacctcatccccgaaaaatcgccagaggctcgtcaaccgtctttattgacggcctgcccgccgccagaaccggtgatgctattgactgcggcggcgtggttattggtggcggcacggtaaatataggctga

SEQ ID NO: 3477 - DNA, 216 bp, Escherichia coli
atgaaatccatggataagttaacaacgggtgtcgcctatggcacctcagcaggtagtgccgggtactggtttttacagttgctcgataaagtcacgccctcacagtgggcggcaataggtgtgctgggtagtctggtatttggcttgctgacgtatctgacaaacctttatttcaagattaaagaagataagcgtaaggctgcgagaggtgaataa

SEQ ID NO: 3478 - DNA, 1083 bp, Escherichia coli
atgaaaaaattaacagtggcaatttctgctgtagctgcatcagtactgatggcgatgtctgctcaggcagctgaaatttataataaagacagtaacaagctggatctatacgggaaagttaatgccaagcactacttctcctctaatgatgcagatgatggtgatactacttatgcccgtcttggcttcaaaggtgaaacccaaatcaacgatcaactgactggtttcggtcagtgggaatatgaattcaaaggcaaccgtgctgaatctcaaggttcttccaaagacaaaacccgtcttgcatttgcaggcctgaaatttggtgattacggctcaatcgattacggccgtaactacggtgtagcatacgacatcggtgcgtggactgacgtcctgccagaattcggtggtgatacctggacccaaacagatgtgttcatgactggtcgcactactggtgttgcaacttatcgtaacaacgacttctttggtctggtcgatggcctgaactttgctgctcagtatcagggtaaaaatgaccgcactgacgtaactgaagccaatggtgatggtttcggtttctccactacttatgagtatgaaggattcggcgtgggtgcaacctatgctaaatcagatcgcactgacggtcaggtcgcctatggtaagagcaaattcaatgcctccggcaaaaatgcggaagtatgggctgcaggcctgaaatatgatgcgaacaatatctatctggctaccacatattctgaaactcagaatatgaccgtttttggtaataaccatattgcaaacaaagcacaaaactttgaagcagtagcacaatatcagtttgacttcggtctgcgaccatctgttgcttaccttcagtcaaaaggtaaagaccttggtgttcatggtgaccgagacttagtcaagtatgtcgatgtcggtgctacttactactttaataaaaacatgtccacttttgttgattacaaaatcaacttaattgacgatagtaagtttaccaaaacagctggtattgataccgacgacatcgtcgctgtaggtctggtttatcagttctaa

SEQ ID NO: 3479 - DNA, 384 bp, Escherichia coli
atgcgtgatattcagatggttcttgagcgttggggagcgtgggcggctaataatcatgaagatgtgacctggtcgtccgttgccgccggttttaagggattaattccttcaaaagtaaaatctcgcccgcaatgttgtgacgatgacgcgatgatcatttgcgggtgcatggcccgtctgaaaaagaacaacagcgatttacacgatttattagtagattattatgtatgtggtatgacattcatgtcactggcaagtaagcattgctgctcggatggttatatcgggaaaaggttacagaaggctgagggcataattgaagggatgttaatggcattagatatccggttagatatggatatcgttgctaataattctaattga

SEQ ID NO: 3480 - DNA, 138 bp, Escherichia coli
atgtttgagtcttatatggcagagcgtcttcgccgccgctgggtgcgcctgcgcttatatcgttttcctggttctgttttgaccgattaccgaatactgaagaattacgccaaaaccctgacaggagcaggagtatga

SEQ ID NO: 3481 - DNA, 363 bp, Escherichia coli
gtgaatacctacagcatcacattaccctggccgccgagcaataatcgctattaccgccataatcgcggacgcacgcatatcagcgcagaggggcaggcataccgcgataatgtcgcccgaatcattaaaaacgcaatgctggatatcggcctggctattcctgtgaaaatcagcattgagtgccacatgccggatcgccgtcgccgtgaccttgataatctgcaaaaggccgcttttgacgcactcaccaaagcaggtttctggctggatgatgctcaggtcgttgattaccgcgttgtgaagatgcccgttaccaaaggtgggaagctggagctgactatcactgaactgggagatgaatga

SEQ ID NO: 3482 - DNA, 291 bp, Escherichia coli
atggctgatttgagaaaagcagcgcgtggtcgggaatgccaggtaagaatccctggcgtatgtaatggcaatcctgaaacgtcagtactggcacatatccggctggctggattgtgctgtaccggtatcaaaccgccagacctgattgccaccattgcatgttctgcctgccacgacgaaatcgaccgtcgcacgcattttgttgacgctggatatgcaaaagaatgcgcgctggaaggtatggcgagaacacaggttatctggttgaaagagggggttattgaggcgtga

SEQ ID NO: 3483 - DNA, 171 bp, Escherichia coli
atggctacaccgcttattcgtgtcatgaacggacacatctacaaagtaccaaatcgtcgtaagcgtaaacctgagctgaagccatccgaaataccaacactgctcgggtataccgccagcctggttgataaaaaatggttgcgactggcagcaaggaggaatcatggctga

SEQ ID NO: 3484 - DNA, 456 bp, Escherichia coli
gtgaacctaccacaagatggcatcaaactgcatcgcggtaacttcatcgctatcggccagcagatccagccttatctggaggacggaaaatgctttcgcatggtgcttaaaccgtggcgtgagaaacgcagtctttcccagaatgcactcagccatatgtggtacagcgaaatcagtgaatacctcatcagcagggggaaatcgttcgctaccgcagcatgggtaaaagatgctctcaaacacacatacctcggttatgaaaccaaggacctggttgatgtcgtaaccggcgaaatcactactatccagtcgttacgccatacctccgatcttgataccggagagatgtatgtcttcctgtgtaaggttgaagcctgggcgatgaatattggctgccacctgactattccgcagagctgcgagttccagctgctgcgcgacaagcaggaggcgtaa

SEQ ID NO: 3485 - DNA, 1044 bp, Escherichia coli
atgaaaattaacaagatattatcatctgcaacactattgtatggtatgtcaatggccatgtcggtcgggagttgtgcaacacctgtccagactaatcttcctggttacaccccgggtgcagatatcattagtgtttcaccgaccagaaaccaagtcgatctcattggtgatgttgtttattcccagataaaaggaactcgttctgtcagacagcttcacatgtcagttcttgtcccgcgaacaaatgatttaaaaccagccattatttattatcccggcggcggattcatgtcttctgaacatgacaaatttattgaaatgagaatggctctggcagaagctggttttgttgtggccgctgtagaatacagaacaattcctgatacatttccagcaccagttgaggatggaaaagctgcaatacgttacctgagagagcatgccagcaattatgggattgatcctcaaagaatcggagttctgggtgactctgccggtggatggcttgctcagatgatgggaactacaaatggtgacaaaacctttgataaaggtgactttcttcagcaatcctcagatgttcaggcagttgccacactttatgggatttctgacttgttgaatattggcgaggggttccctgaatcagtgcaggaggttcatcgctctcctgccgtaaccgaagccttaatgatcaatggccctgcattcagaaattttgcgggagcccccatcacagcgtcaaaagaaaaagcgctaaacgccagtccaatcggacatatgaaaggagtaaaacccccatttcttattatgcatggtagcaaagacactctggtttcacctgagcaaagcgccaaactattcaggatgttgaagaagaacggcgataacgctgagtacgtgctggtagaaggggccgagcatggcgataagacatggtatcagccaattattataaacagagtcgttgagtggtttactaaaaacctgggagcgcctataaaaacagctccccaacaacaaaacccaaacgctaacctgtaa

SEQ ID NO: 3486 - DNA, 3552 bp, Escherichia coli
atgaccactgtgaataaaaagttaaaaaaaactgcatctggcgcgattacatggtcggtaattgttacccagatattatctccagtttctctttctttgatcccagcaaacagttttgcatcatctggtaataaagatgttacgcaaacttatgccagcgatgagcatgcaaataaagtggcctcatttgcagcaagtgcaggtcagagcctggcgaataataatgcaagtagttttgctgtaaatactttatcaactcaggcgacaaaagaggtcgtcgactggttgcaacaatatggcaatgcgcgcatcaagcttaatgtcgatgattctttttccttgaaggattcatcattcgactttttatatccatggctggatactcaggattatgtgttattcagtcagacatcactacatcgtactgatgaccgaaatcagaccaatattggtttggggattcgtcatttcactcctgataacgcaatgttgggtgcgaatgttttttatgattacgatttaagtcgcagtcactctcgtgcaggttttggggttgagtactggagggattatttcaggcttggtgtaaatacctattttggtctatctgactggaagaacagtcgggatattgatgattatctggaaagacctgcaaatggctgggatttttctgctgaaggatggctacctgcttatccgcaattaggggcatctattcagtttgaaaaatattatggtaaaaatgtcgggttatttggaagcgataaccttcaggaaaacccttacgcagttactgggggaatttcttatacaccagttcctctgattaagttttctgcacagcataagcaaggacagagcaacgttcacgatacaaccttcggtgttgagtttaattatcgcccgggcgtttccctggctgaacagcttagcagcgataatgttgcagttatgcgagaagtccagaatcggcgttatgattttgttgaacgaaataacaacattgttctggagtacaagaagaagcatgcactgaaaatcagtttgccagagtctgttcagggggagggggaatcaatcatccctgtaacactgacaatcaacaatgctagtggtggtatcaagtctgtacagtggaatgatagtgcattcactgcggctggcggcaagatcagtggaaatggcacatcatggcagatcactttaccggcttataaaagcgaaggtgtaaattcgtggaatgttggagccacagtccaggataacagaggcaatgtttccaactatgccgttatgaatatcagcgttaataatagtggtgtctcgacagcggattcatcttttacgctggatggggattcgtctccgacgatctctgctgatggtcaatccacttatccaatagtattaagcctgaaagacagtaacggtaaggcattaaccggactggctgatgacattgaaatgtctgtggaatttactgcggatagcaatagtgctcgacagcgtgaaacggtaactgctccgtcattaggcgcggtagaggaaatctctgctggtgtatatcgctctgttctggctgctggttcgcaggctgggacggtacgtgtaactgcaaaagttcagggaaaaacatttactctcagtattaagcaaacagcagcaacagaacctgattctgaggtcagtgctgttttaaccgctgcaccagcagaacaggtagttggttacaatatcaatctacaactggcagtgaaggattcacaaggaaatgcaatcactggtgataacactctgagcttttatgctcttaaccaggcagaaggagtcgagtttgggactgtaacggaaaaagacggtgtctatagcgcgacagtaacttcaaaacgagctggtaagattactatcggtgttaaatctgatagtcatgatttctcaggtgttaagaaagaaatcacctttattgaggaccggcagcaggttacattctctcagtttgaagccagccaaaataatgcattggctgatggaaaacagagaaatatggtaactgtaagccttgcggaccgtttcggcaatgttgttcctggttatgctgtcacattgtctttaccagcagggataactcaagttggtggtgaacatgctgtttcaactgacgaaaatggtaatgctatttttgcgttaataagctccactccggggtcttacgtgattacagctcatgctggttctcagatgtctactgagttaacagtgacctttgcatcaaatatgaccggagcttcactgtcactgacgcctgaaagcagtagtttaatttccaatattcctgctaatggtaaggatgcagcggtattagatgtgcagctgacaaatacgaatgcgtcggtcaatgggcaaaagattcagctcatcacctcatctgaaggattatctgtaccaacaaatatcgtgactgattcaacagggcatgtttctgttccgcttacaacggtgaaagctggtgagtacacggtgactgcacgggtgactgacggttcccatagcgtggaatctggcagcgttaagttaacttttgtgcccgatgttgcttctgcagaacttactatgagtgtatcaaaacaggagattgtggccgatggcagtgaaaacgcaacagtaaacattcagttggttgatgcgaataacaatgcgtttacaggtgaggtggatttaacgattacaccatcgacgggagcatcattgaccagtagtaatctgcaactggatgctcatggacaggcaacaacgcagttcactgcatcgaaatcaggccagtacacaattcaggccgagtatgttctggatgggaaacgcataaccgcaagccagaatattgatgccgtgacggatgtgaagggggctgtgttggagatcacatcatctgcatcttcggctgtagtgagcgataccaacaatctggtatttacgttactgttgaaaagtaagtcaggcgaagcattaagtggtcgagcattgaatgttaagacatctgggccgtctaaatatggtgcgttggtggttgataaaaccacagtaacgactgatgagaacggtcaggctacggtaagcgtacatggtcgaacggttggttcgtataaattaacggcgaccttaaacgaacttggcagtgatgttagcgcggtgaaatcattctccctgtacgctgatgacgcaaatggagtattgactctaacaaaagatcctggttatgagacaaacgatggctctccagtaggtatttatgctcgatttgtcgatcattttggaaacccattatctggtacggttgagttttctgctggtagtgaagatagtccagactctcaacgggtcaaaatggagcctgctacagtaacgttacactggacaggtaatgcagcttcggaattcagcacctatgaaagtggttatcactggattaaggccaaaataacgaatagcaaaaatacatatgagaaaacaataaggacttatgttgtaaaactacctgaaaaggatagttaa

SEQ ID NO: 3487 - DNA, 702 bp, Escherichia coli
atgaaaaacatcgccgcacagatggttaactttgaccgtgagcagatgcgtcggatcgccaacaatatgccggaacagtacgacgaaaagccgcaggtacaacaggtagcgcagatcatcaatggtgtgttcagccagttactggcaactttcccggcgagcctggctaaccgggaccagaacgaactgaacgaaattcgccgccagtgggtgctggctttccgggaaaacgggatcaccacaatggaacaggttaacgcaggaatgcgcgtagcccgtcggcagaatcgaccattcctgccatcacccgggcagtttgttgcatggtgccgtgaagaagcatccgttattgccggactgccaaacgccagcgagctggttgatatggtttacgagtattgccggaagcgtggcctgtatccggatgcagagtcttatccgtggaaatcaaacgcgcactactggctggttactagcctgtaccagaatatgcgggccaatgcgcttactgatacggaattacggcgcaaggctgccgatgaactgacttgtatgaccgcgcgaattaaccgtggtgaggcgatacctgaaccagtaaaacaacttcctgtcatgggcggtagacctctaaatcgtgttcaggcgctggcgaagatcgcagaaatcaaagctaagttcgggctgaaaggagtgatgaaatag

SEQ ID NO: 3488 - DNA, 222 bp, Escherichia coli
atgcgtgaacgtgacggacgtaaccaccgcgacatgtgtgtactgttccgctgggcatgccaggacaacttttggtctggtaacgtgctgagcccggccaaacttcgcgacaagtggacccaactcgaaatcaaccgtaacaaacaacaggctggcgtgacagccggaaaaccaaaactcgacctgacaaacactgactggatttacggggtggatttatga

SEQ ID NO: 3489 - DNA, 207 bp, Escherichia coli
atggagcgcttcttcaggagtctgaaaaacgagtggataccggtgacgggttacatgaacttcagcgatgctgcccatgaaataacggactatatcgttgggtattacaacgcgctcaggccgcacgaatataacggtgggttgccaccaaatgaatcggaaaaccgatactggaaaaactctaaagcggtggccagtttttgttga

SEQ ID NO: 3490 - DNA, 1077 bp, Escherichia coli
atggcaggtaaagttacggaaaccgctgttgtgggtggcgtggatacacataaagatctgcacgttgccgctgtcgtagatcagaacaataaagttctggggacccagtttttctccacaatacggcaaggttaccggcagatgctggcatggatgacttcgtttggggcattaaagcgaattggtgttgagtgtactggcacctatggatcaggtctgcttcgctatttacagaatgccgggttagacgttcttgaggtgactgcgccagatcggatggagcgacgcaaacggggtaaaagtgacacgattgatgctgaatgtgccgctcacgccgcattctcccgaataagaaccgtcacacccaaaacgcgcaatggcatgattgagtctctgcgggtattaaaaacttgccgaaaaacagcaatatcagcccgcagagtcgctctccagattatccattccaatattatctctgccccggatgaattacgtgaacagctcagaaatatgacgcgcatgcagctcatcaggactctgggatcctggcggcctgatgccagtgaataccgcaatgttaccaacgtttatcgtatttcattaaagtcccttgcccgacgctatctcgagttacatgacgaaatcgctgatttggatgtcatgattgcggcaattgtcgatgagctggcgcctgaactgattaaacgtaatgctattggatacgaaagcgcttcgcagttgctgatcacggcaggagacaatccccaacgattaagatcagaatcaggttttgcggcactgtgtggtgtcagccctgttcccgtatcttcaggaaaaacgaatcgttatcgacttaaccggggtggagatcgtgctgcaaatagtgcacttcacatcattgccatcggacgtttgcgaactgacgataaaacgaaggaatatgtcgccagacgagtagcggaagggcatacaaaaatggaagcaatacgctgcctgaagcgctatatctcacgcgaagtttatacattactgcgtaatcaaaacaggcagctcaacagcatcccgataacggcttga

SEQ ID NO: 3491 - DNA, 303 bp, Escherichia coli
atgaaaaaaagaaatttcagcgcagagtttaaacgcgaatccgctcaactggttgttgaccagaactacacggtggcagatgccgccaaagctatggatatcggcctttccacaatgacaagatgggtcaaacaactgcgtgatgagcgtcagggcaaaacaccaaaagcctctccgataacaccagaacaaatcgaaatacgtgagctgaggaaaaagctacaacgcattgaaatggagaatgaaatattaaaaaaggctaccgcgctcttgatgtcagactccctgaacagttctcgataa

SEQ ID NO: 3492 - DNA, 540 bp, Escherichia coli
atggcagccagaccacgtaagaataatgtttcagtcccgaacttgtatccgctctatagcagaaaagtaaataaagtttattggcgatataagcatccagtgaccgggaagtttcattctttgggcacaaacgaagctgaagccattgctattgccactgaggccaatacacgcctagctgagcaaagaacccggcagattctagctatcagtgacaggatcgcaaccagcaaaggaaaagcaatcacaacgtcaacctggttagatcgctatcaagcaatccagaaagacagactgaaaagtggcgatataaagctcaacacctataaacagaaagccaaaccagtatccttgctcagggaacgagcaggactgaagttaatttcagccgttgatgtcagggatatagcccagttgcttgacgagtatatcgccgccggacagccgagaatggcgcaagtagttcgttccgtactgattgatgttttcaaagaggcgcaacactacggagaagtccccctggctataacccggcattag

SEQ ID NO: 3493 - DNA, 480 bp, Escherichia coli
atgctgttagcactggttaccggccagaggttaggtgatatctcgcgtatgaaatttagcgatatttgggatgatcatctccatgtcatccaggaaaaaaccgggagcaaaatcgccatcccgctttccctgcgtctcaatgcgattaaatggagtttgcgcgatgtagtagcccgctgccgtgactatgctgtcagcccataccttgtacatttttttcgtactacctcacaggctgaacgcggcgcgcaggttaaagccaatacattgacgatgaatttcagtaaagcgagggatttagcaggaattaactggggtgaaggttctcccgcaacatttcatgaacaaaggtctttatcagaacgtttgtataaagaacagggtttaaatacacaaaaactacttggtcataaaacgcaacagcaaaccgatcgttatcatgatgatcgaggtaaaggatggagtaaagtagcgttgtaa

SEQ ID NO: 3494 - DNA, 858 bp, Escherichia coli
atgttgaaacttaaacaacctgcttacacatatgccgatatgctgactagttgccgcgaaggcataaccggtaatccgggcttgttgctgaaagtaaatgaagcaataactgatttgcaaacactggcagcttcatatagcgcatcggcatcaactggtgagctttatacaatacaaccattgaaaaacaaagataaggaagaccctattgttgtcggtcggttaaagaaatctgactttgttaagctttatggcaattatgttgttgggaagaaaaagcctgctcgagctatttatgattccctgattactgctgctaatgaaaaatgtccatattgtggtggaattgggcgccctcgaaatttagatcattatttgcctaaagcttactatcctcagttttctatattgccagttaatctggtgcctgcttgtcgagactgtaatatggatggcaaaggggaagtttttgcaagaaatgaagcagaacagatcatacatccctatttagacgatagccgttattatgatgaacagtggatatcggctagatacttggctggcaaaaatgatgagccaggagttattgagtattttgtttctccaccggctgattgggatgaagcacacaaacaaagagtggaaaaacattttaacgattttgatttgtctttaagatattcgaaagaggctagtgcgagattagttgtacttttagctctatataactcagtgctaccactctccagagataaaaatgctgctaaacaccttatatttcaaacaataattaataaatcgccttttgtgaatcattgggaacgggttatgtgtttggctcttatgtcagacttgtag

SEQ ID NO: 3495 - DNA, 1518 bp, Escherichia coli
atggatatcattattgtaccccgagaccaacgtattcctgcctcaggcattagtacggcttacttgcatgtggatcattggaatgacttttcattcattacaatgttttacatgtatctgtttgatcagaaaggtgaacgccatgaaattgggaatgtcaagattggttttcaaggacaaacaactcaacaatcaacttactccacattaggggacaggtttaaaattctcccagaaggatatttttccgttggtcaggatgtcgactattatcagaggatttcaaatttaccagaatccgtcaaagtttcgttacttgaggcgctcaaagatattgcttatacgccagaacttatagattttgttaagaatgaagcggtctttaaaacgtctttgcttcggtatgttagcctgtctgttattaaaggacagtttgcgcgagtgcttgagggaaagagtccactgactaattttgagtttaagttcattcgccctgcacaagacaaaatttccgatattgaattatcatttaaggtaaaagtaggagaaaaaccaagtaccaatattcatgcgatcataggtcgtaatggtgtggggaaaacgacgattctaaatggaatgattgaagctgttaccagtaaaggtacgtcgaacgcaaaattttatgatctggaggggtggagagaagacccgattgataatgattactttagtagtttagtctctgtgtcatttagcgcattcgatccattcgagccaccaagtgaacaacctgatccatcaaagggaacttgctacttctatataggtttgaaaaaaaaaggagagtcgctgaaagggctaaatgatattcatgaagactttctagaagctttgacgctatgctttagccagcatcctaagcgtgaaagatggctgaaggccattgatactttggagtctgatgaaaattttgcaagcatggagctgaaaaatctagcggaatacaatgatgagatgctcgttagtaatgcacggaaatgtataaaaaggatgagttccggtcatgcggttgtgttattaacactcacacgtttagtcgcaacggtagaagaaaaaacgttagtgctaattgatgaaccagagagccatcttcatcctccgttgctgtctgcttttattcgtgcgctgtctgatttgctacttgacagaaatggtctttctattattgctactcactcacctgtggtacttcaagaggtccctaaacgatgtgtttggaaaattaatcgttctagattatctaccgaatctcgcaggccagacattgaaacatttggtgagaatgtaggaatcttaacaagagaggtgtttggtcttgaagttgtcaaatctggttttcacgatttattagtccaatcagttaagtcaggtggaacatatgaggagatagttgatgagtatcgtaaccagcttggtgttgaagctcgagctctattaaaagcgcttgtcacacacagagatcggagtgttaagtaa

SEQ ID NO: 3496 - DNA, 1251 bp, Escherichia coli
atggaaagtaaagtagttgttccggcacaaggcaagaagatcaccctgcaaaacggcaaactcaacgttcctgaaaatccgattatcccttacattgaaggtgatggaatcggtgtagatgtaaccccagccatgctgaaagtggtcgacgctgcagtcgagaaagcctataaaggcgagcgtaaaatctcctggatggaaatttacaccggtgaaaaatccacacaggtttatggtcaggacgtctggttgcctgctgaaacccttgatctgattcgtgaatatcgcgttgccattaaaggcccgctgaccactccggttggtggcggtattcgctctctgaatgttgccctgcgccaggaactggatctctacatctgcctgcgtccggtacgttactatcagggcactccaagcccggttaaacaccctgaactgaccgatatggttatcttccgtgaaaactcggaagacatttatgcgggtatcgaatggaaagcagactctgccgacgctgagaaagtgattaaattcctgcgtgaagagatgggcgtgaagaaaattcgcttcccggaacattgcggtatcggtattaagccgtgttcggaagaaggcaccaaacgtctggttcgtgcagcgatcgaatacgcaattgctaacgatcgtgactctgtgaccctggttcacaaaggcaacatcatgaagttcaccgaaggcgcgtttaaagactggggctaccagctggcgcgtgaagaatttggcggtgaactgatcgacggcggcccgtggctgaaagttaaaaacccgaataccggcaaagagatcgtcattaaagacgtgattgctgatgcattcctgcaacagatcctgctgcgtccggctgaatatgatgttatcgcctgtatgaacctgaacggtgactacatttctgacgccctggcagcgcaggttggtggtatcggtatcgcccctggcgcaaacatcggtgacgaatgcgccctgtttgaagccacccacggtactgcgccgaaatatgccggacaggacaaagtaaacccaggctctattattctctccgctgagatgatgctgcgccatatgggttggactgaagccgcagacctgattgttaaaggtatggaaggcgcgatcaacgcgaagactgtaacctatgacttcgaacgtctgatggaaggcgctaaactgctgaaatgttcagagtttggtaacgcgatcatcaagaatatgtaa

SEQ ID NO: 3497 - DNA, 654 bp, Escherichia coli
atgcggcaattcataatctctgaaaataccatgcaaaaaacttcttttagaaatcaccaggttaagcgattcagctcgcaacgttctaccagacgaaaacctgacaaccagcccacgcgtgtgatcctgttcaataaaccctacgatgttcttccgcagttcaccgatgaagccggacgcaaaacattaaaagaatttatcccggttcaaggcgtttatgcagcaggtcgccttgaccgcgatagcgaagggttactggtgctgaccaataacggcgcgttgcaggcgcgtttaacccagccgggtaaacgcaccggaaaaatctattatgtgcaggtggaaggtattcccacacaagacgcacttgaagccttgcgcaatggtgtaaccttaaatgatggccctaccctgcccgcaggcgcggagctggttgaagaacccgcgtggttatggccgcggaatccaccaattcgtgagcgcaaaagtattcccaccagctggctgaagatcaccttatatgaaggacgtaatcgccaggtgcgccgcatgaccgcccatgttggtttccccacgctgcgactgattcgctatgcgatggggaattactctttggataatcttgccaatggcgaatggcgagaagcgacagattaa

SEQ ID NO: 3498 - DNA, 462 bp, Escherichia coli
atgtttaaaccgcacgttaccgttgcctgcgtggtgcacgcagaaggcaaatttttagtcgttgaagagacgattaatggtaaagcgttatggaaccagcctgccgggcacctggaagccgatgaaaccttagtggaagccgccgcccgtgagctgtgggaagaaaccggcatcagcgcgcagccgcaacactttattcgtatgcatcagtggattgcgccagataaaacgccgtttttgcgtttcctctttgccattgagcttgagcaaatatgcccgacgcagcctcatgacagcgatatcgactgctgccgttgggtcagcgccgaagaaattttacaggcgtcaaatcttcgttcgccgctggtggcggaaagtattcgttgttatcaaagcgggcaacgctatccgctggagatgattggcgattttaactggccttttacaaagggtgtcatctaa

SEQ ID NO: 3499 - DNA, 1107 bp, Escherichia coli
atgtctgaaaccgcaaaaaaagtaatcgtcggcatgtccggcggtgtcgattcctccgtttctgcctggctgttgcaacaacagggatatcaggtcgaaggcctgtttatgaagaactgggaagaagacgacggtgaggaatattgcacagcggcagcggatctggctgatgcccaggctgtctgcgacaagctcggcattgaactgcacaccgttaactttgctgccgagtactgggacaacgtcttcgaactgttccttgccgaatataaagccggtcgcacgccgaatccggatattctgtgcaacaaagagatcaaatttaaagccttcctcgaatttgccgccgaagatttaggtgccgattatatcgctaccggtcattacgtacgtcgggcagatgtcgatggcaagagccgcctgctgcgtggtctggacagcaataaagaccagagctacttcctttatacgctcagccatgagcagattgcgcaaagcctgttcccggtcggcgaactggaaaaaccgcaggtgcgtaagattgctgaagatcttggtctggtcaccgcgaagaaaaaagactctaccggcatttgcttcattggcgaacgtaaattccgcgagttcctgggccgttatctcccggcgcaaccgggcaaaatcattaccgtcgatggcgatgaaattggtgagcaccaggggctgatgtatcacaccctcggtcagcgtaaaggtctgggtatcggtggcaccaaagacggcaccgaagaaccgtggtatgtggtcgataaagacgtcgaaaacaacattctgattgttgcgcaaggccatgaacacccgcgtctgatgtctgtcggtctgattgcccagcagctgcactgggtcgatcgcgagccgttcaccggtactatgcgttgcacagtaaaaacccgctatcgccagaccgacatcccgtgcaccgtcaaggcgctggacgctgatcgcattgaagtgattttcgatgagccggttgccgccgtgacgccgggccagtctgccgttttctataacggtgaagtgtgcctcggtggcggtattattgagcagcgtctgccgctgccggtctga

SEQ ID NO: 3500 - DNA, 642 bp, Escherichia coli
gtggcaaagaattactatgacatcaccctcgcccttgccggtatttgtcagtcggcacgcctggtgcaacaactcgctcaccaggggcattgtgatggcgatgcgctacacgtctcactcaacagtattatcgatatgaaccccagctcaacgctggcggtttttggcggtagcgaagccaacctgcgcgtcgggctggaaaccttgctcggcgtactcaatgccagcagtcgccagggcttaaacgccgaattaacccgctacacactcagtctgatggtgcttgagcgcaaactctcctcagcgaaaggtgcgctcgacactctgggcaaccggatcaacggcctgcaacgccagctcgaacacttcgatttacagtccgaaacgctgatgagcgcgatggctgccatctatgttgatgttatcagcccgcttggcccgcgcattcaggtcactggttccccagctgtactgcaaagcccacaggtgcaggcgaaagttcgcgcaaccctgctggcaggcattcgcgccgccgtgctctggcaccaggtcggcggcggtcgtctgcaactgatgttttctcgtaatcgcctgaccactcaggcaaaacaaattcttgctcatttaaccccggagttgtga

SEQ ID NO: 3501 - DNA, 1371 bp, Escherichia coli
atggaattatcctcactgaccgccgtttcccctgtcgatggacgctacggcgataaagtcagcgcgctgcgcgggattttcagcgaatacggtttgctgaaattccgtgtacaagttgaagtacgttggctgcaaaaactggccgcgcacgcagcgatcaaggaagttcctgcttttgctgccgacgcaatcggttaccttgatgcaattgtcgccagtttcagcgaagaagatgcagcacgcatcaaaaccatcgagcgtaccactaaccacgacgttaaagcggttgagtatttcctgaaagaaaaagtggcggatatcccggaactgcacgcggtttctgaattcatccactttgcctgtacttcggaagatatcaataacctctcccacgcattaatgctgaaaaccgcgcgtgatgaagtgatcctgccgtactggcgtcaactgattgatggcattaaagatctcgccgttcagtatcgcgatatcccgctgctgtctcgtacccacggtcagccagccacgccgtcaaccatcggtaaagagatggctaacgtcgcctaccgtatggagcgccagtaccgccagcttaatcaggtggagatcctcggcaaaatcaacggcgctgtcggcaactataatgcccacatcgccgcatacccggaagttgactggcatcagttcagtgaagagtgcgtcacctcgctgggtattcagtggaacccgtacaccacccagatcgaaccgcacgactacattgccgaactgtttgattgcgttgcgcgcttcaacaccattctgatcgactttgaccgtgacgtctggggttatatcgcccttaaccactttaaacagaaaaccattgctggtgagattggttcttccaccatgccgcataaagttaacccgatcgacttcgaaaactccgaagggaacctgggcctttccaacgcggtattgcagcacctggcaagcaaactgccagtttcccgctggcagcgtgacctgaccgactccaccgtgctgcgtaacctcggcgtgggtatcggttatgcgctgattgcgtatcaatccaccctgaaaggcgtgagcaaactggaagtgaaccgtgaccatctgctggaggagctggatcacaactgggaagtgctggctgagccaatccagacagttatgcgtcgctatggcatcgaaaaaccgtacgagaagctgaaagagctgactcgcggtaagcgcgttgacgccgaaggcatgaagcaatttatcgacggtctggagttgccagaagaagagaaagcccgcctgaaagcgatgacgccggctaactatattggtcgcgccatcaccatggttgatgagctgaaataa

SEQ ID NO: 3502 - DNA, 672 bp, Escherichia coli
atgcgcgtactggttgttgaagacaatgcgttgttacgtcaccatcttaaagttcagattcaggatgctggtcatcaggtcgatgacgcagaagatgccaaagaagccgattattatctcaatgaacatttaccggatattgcgattgtcgatctcggattgcctgacgaggatggtctgtcactgattcgccgctggcgtagcaatgatgtttcactgccgattctggtattaaccgcccgtgagagctggcaggacaaagtcgaagtattaagtgccggtgctgatgattacgtgactaaaccgtttcatattgaagaggtgatggcgcgaatgcaggcattaatgcggcgtaatagcggtctggcttcacaggtcatttcgctaccaccgtttcaggttgatctctcccgccgtgaattatctattaatgacgaagtgatcaaactgaccgcgttcgaatacaccattatggaaacgttgatacgcaataatggcaaagtggtcagcaaagattcgttaatgctccaactctatccggatgcggagctgcgggaaagtcataccatagatgtactgatgggacgtctgcgcaaaaaaatacaggcacaatatccgcaagaagtgattaccaccgttcgcggccagggctatctgttcgaattgcgctga

SEQ ID NO: 3503 - DNA, 1461 bp, Escherichia coli
atgaaaaaattactgcatctttttttcccgctctcgctgcgggtacgttttctgttagcaacggcagcagtagtattggtgctttcgcttgcctacggaatggttgcgctgatcggttatagcgtcagtttcgataaaaccacgtttcggctgttacgtggcgagagcaatctgttctatacccttgcgaagtgggaaaacaataagttgcatgtcgagttacccgaaaatatcgacaagcaaagccccacgatgacactaatttatgatgagaacgggcagcttttatgggcgcaacgtgacgtgccctggctgatgaagatgatccagcctgactggctgaaatcgaatggttttcatgaaattgaagcggatgttaacgataccagcctcttgctgagtggagatcattcgatacagcaacagttgcaggaagtgcgggaagatgatgacgacgcggagatgacccactcggtggcggtaaacgtctacccggcaacatcgcggatgccaaagttaaccattgtggtggtggataccattccggtggagctaaaaagttcctatatggtctggagctggtttatctatgtgctctcagccaatctgctgttagtgatcccgctgctgtgggtcgccgcctggtggagtttacgccccatcgaagccctggcaaaagaagtccgcgaactggaagaacataaccgtgaattgctcaatccagccacaacgcgagaactgaccagtctggtacgaaacctgaaccgactgttaaaaagtgaacgcgaacgttacgacaaatatcgtacaacgctcaccgacctgacccatagtctgaaaacgccactggcggtgctgcaaagtacgctgcgttctctgcgtagtgagaagatgagcgtcagtgatgctgagccggtaatgctggagcaaatcagccgcatttcacagcaaattggctactacctgcatcgtgccagtatgcgcggcgggacattgcttagccgcgagctgcatccggtcgcgccactgttggacaatctcacctcggcgctgaacaaagtgtatcaacgcaaaggggtcaatatctctctcgatatctcgccagaaatcagctttgttggtgagcagaacgattttgtcgaagtgatgggcaacgtgctggataacgcctgtaaatattgcctcgagtttgtcgaaatttctgcaaggcaaaccgacgagcatctctatattgtggtcgaggatgatggccccggtattccattaagcaagcgagaggtcattttcgaccgtggtcaacgggttgatactttacgccctgggcaaggtgtggggctggcggtagcccgcgaaatcaccgagcaatatgagggtaaaatcgtcgccggagagagcatgctgggcggtgcgcggatggaggtgatttttggtcgccagcattctgcgccgaaagatgaataa

SEQ ID NO: 3504 - DNA, 1122 bp, Escherichia coli
atggaataccaactcactcttaactggcccgattttcttgaacgtcactggcagaaacgcccggtggtgttaaaacgcggctttaataattttattgacccaatctctccagacgagttggcgggtctggcgatggaaagcgaagtcgacagtcgactggtcagtcatcaggatggaaaatggcaggtcagccacggtccattcgaaagctacgatcatctcggtgaaactaactggtcattgttagtgcaagcagtgaaccactggcatgagccgaccgccgcgctaatgcgaccgttccgtgaactaccggactggcgtattgatgatctgatgatctctttttctgtaccgggcggcggcgtcggcccgcatctcgatcagtacgacgtgtttatcattcagggtaccggtcgtcgtcgctggcgagtgggcgaaaagctgcaaatgaaacagcactgcccgcacccggacctgttacaggtcgatccgttcgaagccatcatcgatgaagagctggagcctggcgatattctttatattccgccaggattcccgcatgaaggctacgcgctggaaaatgcgatgaactattccgtgggttttcgcgcgccaaatacgcgggaactgattagcggatttgccgattatgtgctgcaacgtgaactgggcggcaactactacagcgatcctgatgttccacctcgcgctcatcctgcggacgttctgccgcaagagatggataaactgcgtgagatgatgctcgaattgatcaaccagccggaacactttaaacaatggtttggcgagtttatatcccagtcacgtcatgaactggacatcgcgccgccagagccgccttatcagccggatgaaatctacgatgcgctgaaacaaggtgatgtgctggtgcgcctggggggtctgcgcgtattgcgcattggcgacgacgtgtatgccaatggtgagaagatcgattccccgcaccgtccggcactggatgcgctcgccagcaacattgcgctgaccgcggagaattttggcgatgcgctggaagatccgtcattcctcgcgatgctcgcggcgctggtcaatagcggatactggttcttcgaagggtaa

SEQ ID NO: 3505 - DNA, 1227 bp, Escherichia coli
atggataaactacttgagcgatttttgaactacgtgtctctggatacccaatcaaaggcaggggtgagacaggttcccagcacggaaggccaatggaagttattgcatctgctgaaagagcagctcgaagagatggggcttatcaatgtgaccttaagtgagaagggcactttgatggcgacgttaccggctaacgtccctggcgatatcccggcgattggctttatttctcatgtggatacctcaccggattgcagcggcaaaaatgtgaatccgcaaattgttgaaaactatcgcggtggcgatattgcgctgggtatcggcgatgaagttttatcaccggttatgttcccggtgctgcatcagctactgggtcagacgctgattaccaccgatggtaaaaccttgttaggtgccgatgacaaagcaggtattgcagaaatcatgaccgcgctggcggtattgcaacaaaaaaacattccgcatggtgatattcgcgtcgcctttaccccggatgaagaagtgggcaaaggggcgaagcattttgatgttgacgccttcgatgcccgctgggcatacaccgttgatggtggtggcgtcggcgaactggagtttgaaaacttcaacgccgcgtcggtcaatatcaaaattgtcggtaacaatgttcacccgggcacggcgaaaggagtgatggtaaatgcgctgtcgctggcggcacgtattcatgcggaagttccggcggatgaaagcccggaaatgacagaaggctatgaaggtttctatcacctggcgagcatgaaaggcaccgttgaacgggccgatatgcactacatcatccgtgatttcgaccgtaaacagtttgaagcgcgtaaacgtaaaatgatggagatcgccaaaaaagtgggcaaagggttacatcctgattgctacattgaactggtgattgaagacagttactacaatatgcgcgagaaagtggttgagcatccgcatattctcgatatcgcccagcaggcgatgcgtgactgcgatattgaaccggaactgaaaccgatccgcggcggtaccgacggcgcgcagttgtcgtttatgggattaccgtgcccgaacctgttcactggcggttacaactatcatggtaagcatgagtttgtgactctggaaggtatggaaaaagcggtgcaggtgatcgtccgtattgccgagttgacggcgcaacggaagtaa

SEQ ID NO: 3506 - DNA, 1137 bp, Escherichia coli
atgggacagagtaaaaaattgaataaacaaccgaattcgctttcaccgctggtgcaattggcgggaattcgcaaatgctttgatggtaaagaggtcattccccagctggatctgactatcaacaatggcgagttcctcacgctgcttggcccttctggctgcggtaaaacaaccgttcttcgcctgattgcaggtctggaaactgttgattccggacgcatcatgctggataacgaggacatcacccacgttccggcggaaaaccgctatgtgaacactgttttccaaagctacgcacttttcccccacatgaccgtgttcgaaaatgtggcctttgggttgcgcatgcaaaaaacccccgctgctgaaattacgccccgcgtgatggaagccctgcggatggtgcagctggaaaccttcgctcaacgcaaaccgcatcagctctctggtggtcaacagcaacgcgtcgccattgctcgcgcggtggttaacaagcctcgtctgttgttgctggatgagtcgctctcagcgctggattacaaactgcgcaagcaaatgcagaacgagctgaaagcgttacagcgtaagcttggcattacattcgtgttcgtaactcacgaccaggaagaagcacttaccatgtcggacaggatcgtggtgatgcgcgatggtcgcattgagcaagacggcacgccgcgtgaaatctacgaagagccgaaaaacctgtttgttgccgggtttattggcgaaatcaatatgtttaacgccactgtcatcgaacgtctcgacgagcagcgcgtacgcgccaacgttgaaggccgcgaatgtaatatctacgttaacttcgccgttgaaccggggcaaaaactgcatgttctgctgcgcccggaagacttacgtgttgaagagattaacgacgacaaccacgccgaagggctgattggttacgttcgcgagcgtaactacaaaggcatgacgctggagtcggttgttgagctggaaaatggcaagatggtgatggtcagcgaattcttcaatgaagacgatcctgactttgaccactctctcgaccaaaaaatggccattaattgggtagaaagctgggaggtcgtactggctgatgaagaacacaagtaa

SEQ ID NO: 3507 - DNA, 858 bp, Escherichia coli
atgaagaacacaagtaagttccagaatgtagtgattgtcactattgtcggttggcttgtgttgtttgtctttctgcccaacctgatgatcattggcaccagctttttgacccgcgacgacgccagtttcgtcaaaatggtctttacgctggataactacacgcgtctgctcgatccgctctattttgaagtgctattgcactcgctgaatatggcgctgatcgccaccctcgcctgcctggtgctgggctatccttttgcctggtttctggcgaagctgccacacaaggtgcgtccgctgctgctgtttctgctgattgttccgttctggaccaactcattgattcgtatttacgggctgaaaattttcctcagcaccaaaggctatctcaacgagtttttgctctggctgggcgttatcgatacaccaattcgcatcatgttcacgcctagtgcggtgattatcggtctggtttacattctgctgccgtttatggtgatgccgctgtactccagtatcgaaaaactggataagccgttgcttgaggcggcgcgcgatctcggtgccagcaagttgcagacctttatccgcatcattatcccactaacgatgccgggaattattgccggatgtctgctggtgatgctgccagcgatgggcctgttctatgtgtccgacctgatgggcggtgcgaaaaacctgctgatcggtaacgtcatcaaggtacagttcctcaatattcgtgactggccgtttggtgcagccaccagcattacgctgactatcgtaatgggcctgatgttgctggtttactggcgcgcttctcgtctgctgaataagaaggtggaactcgaatga

SEQ ID NO: 3508 - DNA, 795 bp, Escherichia coli
atgatcggtcgactgcttcgcggcggttttatgaccgctatctacgcgtacctgtatatcccaatcattattttgattgtgaactcctttaacagctcgcgctttggcatcaactggcagggttttaccaccaaatggtatagcctgctgatgaacaacgacagcctgttacaggcagcgcagcattcactaacaatggcggtgttttcggcgacgtttgctacgcttatcggttcactgacggcagttgcgctgtaccgttatcgctttcgtggtaagccgttcgttagcggaatgctgtttgtggtgatgatgtcaccagatatcgtgatggcgatttcgctgctggtgctgtttatgctgctgggtattcagcttggcttctggtcgctgctgttctcgcatatcaccttctgcctgccatttgtggtggtgacagtgtattcgcgcctgaaaggttttgacgtgcgaatgctggaagcggcgaaagatctcggtgccagcgaatttaccattctgcgaaaaatcattctgcctctggcaatgccagcggtagcggcgggctgggtgttaagctttaccctgtcgatggacgacgtggtggtttcttcgtttgtcaccgggccgagttatgaaattctgccgttaaaaatttattcgatggtcaaagtcggcgtatcgccggaagttaacgcgctggcaaccatattactggtgctgtcgctggtgatggtaattgccagccagcttattgctcgtgataaaacgaaaggtaacacaggggacgttaaatga

SEQ ID NO: 3509 - DNA, 1047 bp, Escherichia coli
atgaaaaaatggtcacgccacctgctcgcggcgggtgctctggcactgggcatgagcgccgctcacgccgatgacaacaacacgctgtatttctacaactggaccgagtacgtgccgccaggactgcttgaacagttcaccaaagaaaccggtattaaggttatctattcgacttacgagtcgaacgaaaccatgtacgcgaagctgaaaacgtacaaagacggtgcctatgacctggtggttccttcaacctattacgtcgataaaatgcgtaaagaagggatgatccagaagatcgacaagtcgaagttaagcaatttcagcaacctcgatccagacatgctcaacaagccgtttgacccgaataacgactattccattccgtatatctggggtgcaacggcgattggcgttaacggtgatgcggtggatccgaaatctgtcaccagctgggccgatctgtggaaacctgagtacaagggcagcctgctgctgaccgacgatgcccgtgaagtgttccagatggcgctgcgtaagctgggctactccggtaacaccaccgatccgaaagagattgaagctgcatacaacgagctgaaaaaactgatgccaaacgtcgcggcgtttaactccgataaccccgctaacccgtatatggaaggcgaagttaacctcggcatgatctggaacggttctgctttcgttgcacgccaggcgggtacgccaattgatgtggtatggccgaaagaaggcggcattttctggatggacagcctggcgatcccggcaaatgccaaaaacaaagaaggcgcgctgaaattgatcaacttcctgctgcgcccggatgtggcaaaacaggttgctgaaactatcggttatccaacgccaaaccttgcggcgcgtaagctgttaagtccggaagtggcgaacgataaaacgctctacccggatgctgaaaccattaaaaatggtgaatggcaaaatgacgtaggctccgccagcagcatttatgaagagtattatcagaagctgaaagcaggacgttaa

SEQ ID NO: 3510 - DNA, 462 bp, Escherichia coli
atgagccaggacagtagagttttctttcgtatattcttcggtatcggtctggtactgatcctcatttctgttgttatcttttataaccagttcacctatagcaaagacgcgattcatactgaaggcgtcattgttgataccgtctggcactccagtcattctcatcgcacgggtaaaaatggttcgtggtatcccgtcgttgcctttcgtccgacgccagattacacgctaattttcaattcgagtattggcagcgatttttatgaagacagcgaaggcgataaagttaatgtttattattctccaggacatcctgaaaaggctgagataaataacccgtgggttaatttttttaaatgggggtttatcggcattatgggcgttatttttatcgccgtcggtttattaatcagtatgccctcctcaaaaaagacacgcaggaaacggaagtcccgcccatga

SEQ ID NO: 3511 - DNA, 789 bp, Escherichia coli
atgaaaaaaatcataatattgctcagtttactgatactcctgcctctaacggcgaccagtaatccattgattccaataatgaagactctttttacagatgttaccggtactgtaccagatgctgaagagatcgcgcataaagccgagctttttcgccaacaaaccggagttgcaccgtttattgtggttttacccgacattaataatgaagccagtctcaggcaaaatggcaaagcgatgctggcgcatgcggcatcttcaatgagtaatgtaaaaggcagcgtcctgttactctttactacccgcgagccacggttaattatgataaccaacggccaggtcgaaagcagtatggacgataaacatctcggccttctggtagaaaatcacacgctggcttatttacatgcggatctctggtatcagggtatcaataatgcattggctgttttacaagcacaaatattaaaacaaccgacgccaccactgacatattatccgcatcccggacaacagcatgaaaatgatccacccggcagtaccacgacattaggcctttttgcctgggcagttgcattcatcgtctttgctgcattttttaactacacaacgcgcctttattatgcgttaaaatttgcagtggcgatggctgttgccaatatgggttatcaggctttatgtttgtatatcgataacagctttgcgattaccagaatatcgccactctgggcagggctgattggtgtctgtacgtttattgccgcgttactatggacgagtaaacggtaa

SEQ ID NO: 3512 - DNA, 822 bp, Escherichia coli
atgctgtcgcgtcggggtcatcggttaagtcgttttcgtaaaaataaacgtcgcctgcgcgagcgtttgcgtcagcgtatttttttcagagataaagtggtgccggaagcaatggaaaaaccaagagtactcgtactgacaggggcagggatttctgcggaatcaggtattcgtacctttcgcgccgcagatggcctgtgggaagaacatcgggttgaagatgtggcaacgccggaaggttttgatcgcgatcctgaactggtgcaaacgttttataacgcccgtcgtcgacagctgcagcagccagaaattcagcctaacgctgcacatcttgcgctggctaaactgcaagatgctctcggcgatcgctttttgctggtgacgcagaatatcgacaatctgcatgaacgcgcaggtaataccaatgtcattcatatgcatggggaactgctgaaagtacgttgttcgcaaagtggccaggtcctcgactggaccggagacgttacgccagaagataaatgccattgttgccagttcccggcacccttgcgcccgcacgtagtgtggtttggcgaaatgccactcggtatggatgaaatttatatggcgttgtcgatggccgatattttcattgccattggtacttcggggcatgtttatccggcggctgggtttgttcacgaagcgaaactgcatggcgcgcacaccgtggaactgaatcttgaaccgagtcaggttggtaatgaatttgccgagaaatattacggtccggcaagccaggtggtgccagagtttgttgaaaagttgctgaagggattataa

SEQ ID NO: 3513 - DNA, 912 bp, Escherichia coli
atgtattacgggtttgatattggtggaacaaaaattgcgctaggcgtgtttgatagcggtcggcagttgcagtgggaaaagcgggtgccgacaccgcgtgacagctatgacgcatttttagatgcagtgtgcgagctggtagccgaagctgaccggcgttttggctgtaaaggttctgtcggcatcggtattccgggaatgccggaaacagaagatggtacgctgtatgccgccaatgtccctgctgccagcggtaaaccgctgcgtgccgacctgagcgcacgtcttgatcgcgatgtacgccttgataacgatgccaactgctttgccctttctgaagcatgggatgatgaatttactcaatatccactggtgatggggttgattctcggcaccggcgttggcggcgggctgattttcaacggtaaacccattaccggtaaaagctatattaccggcgagtttggccatatgcgtctgccggttgatgcgttaaccatgatggggctggatttcccgttacgccgctgcggctgtggtcagcatggctgcattgaaaattatctgtctggtcgcggttttgcgtggctgtatcaacactattatcatcaaccgttgcaggctcctgagatcattgcgctttatgatcaaggcgatgagcaggcaagggcgcacgttgagcgttatctggatttattagcggtttgtctgggaaatatcctgaccattgttgaccctgacctggtcgtcattggtggtggcttatcgaatttcccggcaatcacaacgcaactggcggaaaggttgcctcgtcatctcttacctgtagctcgtgttccgcgcattgaacgcgcgcggcacggtgatgcggggggaatgcgtggtgcggccttcctacatctaaccgattaa

SEQ ID NO: 3514 - DNA, 1239 bp, Escherichia coli
atgcctttatcgttattaattggcctgcgttttagtcgcggacggcggcgcggcggcatggtgtcgctgatctccgtcatttctaccatcggcattgccctcggtgtggcggtattgatcgtcggcttaagcgcgatgaacggctttgaacgcgaactgaataaccgcattctggcggtggtgccgcatggtgaaatcgaagcggtggatcagccgtggactaactggcaggaagcactggataacgtgcagaaagtgccgggtattgccgccgctgcgccgtatatcaatttcaccggactggtagaaagtggtgccaatctgcgcgcaatccaggtgaagggcgttaacccgcaacaggaacagcgtctgagcgcattaccctcgtttgtccagggcgatgcgtggcgcaattttaaagcgggcgaacagcaaattatcatcggcaaaggcgtggcggatgcgctgaaagtgaagcagggggattgggtgtcgattatgatccccaactcgaatcctgagcataaactgatgcagccaaaacgtgtgcgtttgcacgttgccggtattttgcagttgagtggccaactcgatcacagttttgccatgatcccgctggccgatgctcagcaatatcttgatatgggttccagcgtgtcaggtattgcccttaaaatgacggatgttttcaacgccaataagctggtacgcgatgcgggggaagtgaccaacagctatgtttatattaaaagctggattggtacttacggctatatgtatcgcgatatccagatgatccgcgccattatgtatctggcgatggtactggtgattggtgtggcctgtttcaacatcgtctccaccttagtgatggcggtgaaagacaagagtggcgatatcgcagtattaagaacgctgggggcgaaagatggtttaattcgcgccatctttgtctggtatggattgctggcagggctgttcggcagcctgtgtggtgtgattatcggcgtagttgtttcactgcaacttaccccgattattgagtggattgaaaagctgatcggtcatcagttcctctccagcgatatctattttattgacttcttgccatcggaattgcactggctggacgtcttctacgtactggtcacagcattgttgctgagtcttttggcaagctggtatccggcgcggcgcgccagtaatattgaccctgcgcgagtccttagcggccagtaa

SEQ ID NO: 3515 - DNA, 702 bp, Escherichia coli
atgaataagatcctgttgcaatgcgacaacctgtgcaaacgctatcaggaaggcagtgtgcaaaccgatgtactgcacaatgtcagtttcagcgtgggcgaaggtgaaatgatggcgatcgtcggcagctctggttccggtaaaagcaccttgctgcacctgttaggcgggctggatacgccaacctccggcgatgtgatctttaacggtcaaccgatgagcaaactgtcgtcggcggccaaagcggaactgcgtaaccagaagctgggatttatttatcagtttcaccacctgttgccggattttaccgccctggaaaacgtggctatgccgctgttgattggcaagaaaaagcccgctgaaatcaacagccgtgcgctggagatgttaaaagcggtggggctggagcatcgtgcgaatcaccgcccatctgaactttctggcggcgaacgccagcgtgtggcgattgcccgtgcgctggtcaataacccgcggctggtactggcggatgaacctactggtaacctcgatgcacgtaacgccgacagcatcttccagttgcttggggaattgaatcgcttgcagggcaccgccttcctggtggttactcacgacctgcaactggcgaaacgtatgagccgccaactggaaatgcgtgatggacgtctgacggcggaactgagcctgatgggggcggagtaa

SEQ ID NO: 3516 - DNA, 1200 bp, Escherichia coli
atgtaccaacctgtcgctctatttattggcctgcgttacatgcgtgggcgtgcagcggatcgcttcggtcgtttcgtctcctggctttctaccatcggcattaccctcggggtgatggcgctggtcacagtattgtcagtgatgaacggctttgagcgcgagctgcaaaacaacatccttggcctgatgccacaggcaattctctcttctgagcatggctctcttaacccgcagcaactcccggaaacggcagtcaaactggacggcgttaatcgcgtcgcacctattactaccggtgatgtggtactgcaaagcgcgcgcagcgtggcggtcggggtgatgctgggtatcgacccggcgcaaaaagatccactaacgccgtatctggtcaatgtgaaacaaactgacctcgagccggggaaatataatgtcatcctcggtgaacagcttgcctcacagttgggcgtcaatcgcggtgatcaaatccgcgtgatggtgccatctgccagccagttcacgccgatggggcgtattccaagtcagcgcctgttcaatgtgattggcactttcgccgccaacagtgaagtcgatggctatgaaatgctggtgaatattgaggatgcctcgcgtctgatgcgttatccggcaggcaatattaccggctggcgtttgtggctggatgagccgctgaaagtcgactcattaagtcagcaaaaactgcctgaaggcagcaaatggcaggactggcgtgaccgtaaaggcgagcttttccaggccgtacgcatggaaaaaaatatgatgggcttactgctgagcctgattgtcgccgttgcggcgtttaacattattacctcgctggggctgatggtgatggagaagcagggcgaagtagcgatcctgcaaacgcaaggcttaactccgcgacaaatcatgatggtctttatggtgcaaggggccagcgctgggattatcggtgcgatcctcggagcggcgcttggcgcactgcttgccagccagttgaataatctgatgccgataatcggcgtcctgcttgatggtgcggcgctgccggtcgctatcgagcctttacaggtcattgttattgcgctggtggcgatggctatcgcgctgctgtctacgctttacccttcctggcgcgctgccgccactcaacccgctgaggctttacgttatgaataa

SEQ ID NO: 3517 - DNA, 1074 bp, Escherichia coli
atgaaacaaaaagagctatggattaaccagatcaaagggttatgtatttgtctggtggtgatttatcactcggtcattaccttttatccgcatctgaccactttccagcatccgttatcagaagtcctgagcaaatgctggatctatttcaatctttaccttgcaccctttcgtatgccggtttttttctttatatccggctatttgattcgccgctatatcgacagcgtaccgtggggaaattgtctcgataaacgcatctggaacatcttctgggtgctggcgctttggggcgtggtgcagtggctggcgctaagtgcgctgaatcagtggctggcacctgagcgcaatttaagcaatgcctccaatgccgcttatgccgattccaccggtgagttcctgcacgggatgatcaccgccagcaccagcttgtggtatctgtatgcgttaattgtctatttcgtgatatgtaaaatttttaaccgcctggccctgccgttatttgttctgtttgtactgatgagtgtggctgttaatttcgtacccacaccgtggtggggaatgaacagtgtgatccgcaatttgccttattacagccttggcgcatggtttggcgcaacattaatgacctgtgttaaagcggtaccgttgcgccgccatctgctgatggcttctttgctgaccgttctggcggtcggtgcctggttgtttaatatctcgctgctgttgtcgctggtatcgattgtggtaatcatgaagctgttttatcagtacgagcagcgtttcggtatgcgttcctccagcctgctgaatgtgattggctccaacaccattgctatctataccacccatcgcattctggtagaaatattcagcttaagcctgattccgcaaatgaacgcggtacgctggtcgccgcaagtcgaactgacgctcctgctgatttacccctttgtcagtttgttgatttgtactgttgcgggcttgctggtaagaaaactttcacagcgcgcattcagcgatctgttgttctccccgccttctctgcccgctaccgtcagttactcccgctaa

SEQ ID NO: 3518 - DNA, 3495 bp, Escherichia coli
atgccctcatatgttgaggcatatcctaacgagaatctgacaaccgttatgcctgaacaatatcgttatacgctgcccgtcaaagcgggtgagcagcgtctgctgggcgagttaaccggcgctgcctgcgcgacgctggtagcggaaattgccgaacgtcacgccggtccggtggtactcattgcaccagatatgcaaaatgctctgcgtttgcatgatgaaatcagccagttcaccgatcagatggtgatgaatctggcggactgggaaaccctcccttacgacagtttttcgcctcatcaggacattatctcctcgcgtctttccaccctttaccagctaccgaccatgcagcgtggcgtactgattgttccggtgaatacgcttatgcagcgcgtttgcccgcacagctttctccacggtcatgcgctggtgatgaaaaaaggtcagcgcctgtcacgagatgcattacgaacccaactggacagcgccggttatcgccatgttgaccaggtgatggagcacggcgaatacgccacgcgcggcgcgttgctggatctcttcccgatggggagtgagctgccttatcgtcttgatttctttgatgatgaaatcgacagcctgcgggtgtttgacgtcgatagccagcgcacgctggaggaagtagaagagatcaatctgcttcccgcgcacgaatttccgaccgataaagcggcaattgaactgttccgcagccagtggcgtgataccttcgaagtgaagcgcgacccggaacatatttaccagcaagtgagtaaaggcacattacctgccgggatcgagtactggcagccgctattcttcagcgaaccgctgccgccactgttcagttatttccctgccaatacgctgctggtaaatactggcgatctggaaaacagtgccgaacgtttccaggctgacacgctggcgcgttttgaaaatcgcggcgtcgatccgatgcgtccactgttgccaccacaatcgctctggctacgggtagacgagctcttttcagagctgaaaaactggccgcgtgtgcagctaaaaactgaacatttaccgacaaaagccgcgaatgccaatttaggtttccagaaactgccagacctggccattcaggcacaacaaaaagcgccgctggaggcgctgcgtaagttcctcgagactttcgacggtccggtggtgttctcggtagaaagtgaaggtcgccgtgaagcgctgggtgaactgctcgcgcgaattaaaattgctccgcaacgcattatgcgtcttgatgaagccagcgaccgtgggcgttatctgatgattggcgctgccgaacatggttttgtcgatacgatgcgtaacctggcgctgatttgcgaaagcgatctgctcggtgaacgcgttgcccgtcgtcgtcaggattctcgccgcgccatcaaccccgatacactgatccgtaaccttgcggagctgcatattggtcagccggtggtccatctggagcacggcgtcggtcgttatgccggaatgaccacgctcgaagctggaggcattactggcgagtatttgatgctcacctatgccaacgacgccaaactgtatgttccggtgtcgtcactgcatctgattagccgttacgcgggtggcgcagaagaaaacgcaccactgcataaacttggtggcgatgcctggtcacgcgcacggcagaaagcggcggaaaaagtgcgtgatgtggcagcggaattgctggatatctacgcgcaacgcgccgccaaagagggcttcgcgtttaaacacgatcgtgagcagtatcagttattctgcgacagcttcccgtttgaaaccacgccggatcaggctcaagccattaatgcggtgcttagcgacatgtgtcagccgctggcaatggatcgtctggtgtgcggcgatgttggctttggtaaaacagaagtggcgatgcgcgccgctttcctggcggtagataaccacaaacaggtggcggtgctggtgcctaccacccttctcgcgcagcagcattacgacaacttccgcgaccgtttcgccaactggccggtacgtatcgaaatgatctcccgtttccgcagcgccaaagagcagacgcaaatccttgcggaagtggcggaagggaaaatcgatattctgatcggtacgcacaaactgctgcaaagtgacgtcaagtttaaagatttaggcctgctgattgtcgatgaagaacaccgcttcggggtgcgtcataaagagcgcattaaagcgatgcgcgcgaacgtggatattctgacgcttaccgcaacgccgatcccacgtacgctgaatatggcaatgagcggaatgcgcgatctgtcgattatcgccacgccgcccgcccgtcgtctggcagttaaaacctttgtccgtgagtatgacagtctggtggtccgggaggcgatcctgcgtgaaattttgcgcggaggacaggtttattatctctacaatgatgtggaaaacatccagaaagccgccgaacggctggcagaactggtacctgaagcgcggattgccatcggtcacgggcaaatgcgtgagcgcgaactggaacgggtgatgaatgatttccatcatcaacgtttcaacgtgctggtttgtaccaccattatcgaaaccgggatcgacattcctaccgccaacaccattatcattgaacgcgcggatcacttcggtctggcacagttgcaccagttgcgcggtcgcgtcgggcgttctcaccaccaggcatatgcatggctactgacgccgcatccaaaagcgatgactaccgatgcgcaaaaacgtcttgaagcgattgcctcgctggaagatctcggtgcaggttttgcgctggcaacgcacgatctggagatccgcggcgcaggtgaactgcttggcgaagaacaaagcggctcaatggaaaccatcggtttctcactgtatatggagttgctggaaaacgccgtcgatgcgctgaaagccggacgcgagccgtcgctggaagatctcaccagccagcaaacagaagtcgagctgcggatgccgtcgctattgccagatgatttcatccctgacgtgaacacgcgtctgtcgttctacaaacgtattgccagcgccaaaacggaaaacgaactggaagagatcaaagtcgagcttatcgatcgcttcggcctgctgccggatccggcgcgtaccctgctggatattgcccgtctgcgccagcaagcgcagaaactggggatcaggaagctggaaggtaatgagaaaggcggcgtgatcgaatttgccgagaagaatcacgttaatccggcctggttgattggtttgctgcaaaaacagccgcagcattaccgccttgatggtccgacacgtctgaagtttattcaggatttgagcgagcggaaaacgcgtatcgaatgggtacgccagtttatgcgtgaactggaagagaacgcgatcgcttaa

SEQ ID NO: 3519 - DNA, 960 bp, Escherichia coli
atgatcaaaacgcgtttttctcgctggctaacgttttttacgttcgccgctgccgtggcgctggcgctaccggcaaaagccaacacctggccgctgccgtcagcgggcagtcgtctggttggtgaaaacaaatttcatgtggtggaaaatgacggtggttctctggaagcgatcgccaaaaaatataacgtcggctttctcgctctgttacaggctaaccccggcgttgatccttacgtaccgcgcgcgggtagcgtgttaacgatcccgttgcaaaccctacttccagacgcgccgcgcgaaggcattgtgatcaacattgcggagctgcgtctctattactacccgccgggtaaaaattcggtaaccgtgtatcccatcggcattggtcagttaggtggtgacacgctgacgccaacgatggtgactaccgtttcagacaaacgtgcaaacccaacctggacgccaacggcaaacatccgcgcgcggtataaggcacagggaattgagttgcctgcggtagtgccggcaggaccggataacccaatgggccatcatgcgattcgtctggcggcctatggcggcgtttatttgcttcacggtacgaacgctgatttcggcattggcatgcgggtaagttctggctgtattcgtctgcgggatgacgatatcaaaacactctttagccaggtcaccccaggcaccaaagtgaatatcatcaacaccccgattaaagtctctgccgaaccaaacggtgcgcgtctggttgaagtacatcagccgctgtcagagaagattgatgacgatccgcagctgctgccaattacgctgaatagcgcaatgcaatcatttaaagatgcagcacaaactgacgctgaagtgatgcaacatgtgatggatgtccgttccgggatgccggtggatgtccgccgtcatcaagtgagcccacaaactctgtaa

SEQ ID NO: 3520 - DNA, 258 bp, Escherichia coli
atgaaaaacgtaaaaaccctcatcgctgcggcgattttaagctccatgtcatttgccagctttgcggctgtcgaagttcagtcaacgccagaaggccaacaaaaagtcggtactatcagtgctaacgcggggacaaatctgggatcgctggaagagcagctggcgcaaaaagcggatgagatgggcgcaaaatctttccgtattacttctgtaaccggtccgaataccctccatggaacagcagtaatttataaataa

SEQ ID NO: 3521 - DNA, 633 bp, Escherichia coli
atggcaactgactcaacacaatgtgtaaaaaaaagccgtggccgcccaaaagtgttcgacagggatgccgcgcttgataaggccatgaaattgttctggcagcacggttatgaagcgacttctcttgcggacctcgttgaagcgaccggagctaaagcgcccacgctatacgcggaatttaccaacaaagaggggttatttcgcgccgtactcgaccgttatatcgatcgctttgccgctaagcatgaagcacagctgttttgtgaagagaaaagcgtggagtctgcgctggctgactattttactgccatcgccaactgctttaccagcaaagacaccccggcaggctgcttcatgatcaacaactgcaccaccctctccccggattctggagatatcgccaatacgctgaaatcacgccatgcgatgcaagagcgcactttgcagcagtttttatgtcaacgacaagcgcgcggggaaatcccgacccactgtgacgtgacgcatctggcagaattccttaattgtattattcaggggatgtcgatcagcgcacgcgaaggtgcatcgctggaaaaactgatgcagattgccggaacgactttgcgtttatggcccgaactggtgaaataa

SEQ ID NO: 3522 - DNA, 540 bp, Escherichia coli
gtgaataagtcaatgttggcgggtatcgggattggtgtcgcagctgcgctgggcgtagcggcagtggccagtctgaacgtgtttgaacgtggcccgcaatacgctcaggttgtttctgcaaccccaatcaaggaaacggttaaaacaccgcgtcaggagtgtcgcaacgttacagtgacccatcgtcgaccggtgcaggatgaaaatcgcattaccgggtcggtgctcggcgctgttgctggcggcgtgatagggcatcagtttggtggtggtcgcggtaaagatgtcgccactgttgtgggggcgctgggtggtggatatgccggtaaccagatccagggctctctccaggaaagcgatacttacacgactacgcaacagcgttgtaaaacggtgtatgacaagtcagaaaaaatgctcggttatgatgtgacctataagattggcgatcagcagggcaaaatccgcatggaccgcgatccgggtacgcagatcccgctagatagcaacgggcaactgattttgaataacaaagtataa

SEQ ID NO: 3523 - DNA, 1305 bp, Escherichia coli
ttgactacgccattgaaaaaaattgtgattgtcggcggcggtgctggtgggctggaaatggcaacacagctggggcataagctgggacgcaagaaaaaagccaaaattacgctggtcgatcgtaaccacagccacctgtggaaaccgctgctgcacgaagtggcgactggctcgcttgatgaaggcgtcgatgcgttgagctatctggcccatgcgcgcaatcatggtttccagttccagctgggttccgtaattgatattgatcgtgaagcgaaaacaatcactattgcagaactgcgcgacgagaaaggtgaactgctggttccggaacgtaaaatcgcctatgacaccctggtaatggcgctgggtagcacctctaacgatttcaatacaccaggtgtcaaagagaactgcattttcctcgataacccgcaccaggcgcgtcgcttccaccaggagatgctgaatctgttcctgaaatactccgccaacctgggcgcgaatggcaaagtaaacattgcgattgtcggcggcggcgcgacgggtgtagaactctccgctgaattgcacaacgcggtcaagcaactgcacagttacggttataaaggtctgaccaacgaagccctgaacgtaacgctggtagaagcgggcgaacgtattttgcctgcattgccgccacgtatctctgctgcggcccatagtgagttaacgaaactaggcgttcgcgtgctgacgcaaaccatggtcaccagtgctgatgaaggcggcctgcacactaaagatggcgaatatattgaggctgatctgatggtgtgggcagccgggatcaaagcgccagacttcctgaaagatatcggtggtcttgaaaccaaccgtatcaaccagctggtggtggaaccgacgctgcaaaccactcgcgatccagacatatacgctattggcgactgcgcgtcatgcccgcgtccggaagggggctttgttccgccgcgcgctcaggccgcacatcagatggcaacctgtgcaatgaacaacattctggcgcagatgaacggtaagccgctgaaaaattatcagtataaagatcacggttcgctggtatcgctgtcgaacttttccaccgtcggtagcctgatgggtaacctgacgcgcggctcaatgatgattgaaggacgaattgcgcgctttgtatacatctcgctgtaccgaatgcaccagattgcgctgcatggttactttaaaaccggattaatgatgctggtggggagtattaaccgtgttatccgtccacgtttgaagttgcattaa

SEQ ID NO: 3524 - DNA, 543 bp, Escherichia coli
atgattatctatttgcacggttttgactctaacagtccgggtaaccacgagaaagtcttacaattgcagtttattgacccggatgtacggctaataagctacagtacgcggcatccgaaacatgatatgcagcatttgctcaaagaagtggacaaaatgttgcaactgaacgtcgacgagcgcccgctcatttgtggtgttggtctgggcggttattgggctgagcggattggttttctctgtgatatccgccaggtgatcttcaaccccaatttgttcccttatgagaacatggaagggaagattgatcgcccggaagagtatgccgatattgccactaagtgtgtgaccaacttccgtgagaagaatcgcgatcgttgcctggtgattttgtcgcgtaatgatgaagcgcttaacagccagcggacatctgaagagttgcatcattattacgagattgtctgggacgaagagcagacgcacaaattcaagaatatctccccgcatttacagcgcattaaagcgttcaaaaccctcgggtaa

SEQ ID NO: 3525 - DNA, 1026 bp, Escherichia coli
gtgggtccagtaatgttggatgtcgaaggttacgaactggacgcggaagagcgtgaaatactggcgcatccgctggtgggagggctgattctctttacgcgaaactatcatgatcctgcccagttacgtgaactggtgcgccagatccgcgcagcatcgcgcaatcatctggtggtggcggtagatcaggaaggtggacgcgtgcagcgttttcgtgaaggttttacccgcttgccagcggcacaatcattcgctgcgctgttgggaatggaagaaggcggaaaactggcgcaagaggcaggttggttgatggccagtgaaatgattgctatggatattgatatcagctttgcgccagtgctggacgtcgggcatatcagcgcggcgattggcgagcgttcttatcatgccgatccacaaaaagccctggcaattgccagccgttttattgatggtatgcatgaagcgggaatgaaaactaccgggaaacacttcccaggtcacggtgcagtaacggcagactcacacaaagaaacaccgtgcgacccacgtccgcaagcggagattcgcgctaaagatatgtcggtcttcagttccttaatccgcgaaaataaactcgacgccattatgcctgcgcatgtgatctacagtgatgttgatccgcgtccggcgagcggttctccctactggctgaaaaccgttttgcgtcaggaattgggttttgacggcgtgattttctctgacgatttatcgatggaaggcgcagcgattatgggcagttatgccgagcgtggacaggcatcactggatgcaggttgcgatatgatcctggtctgcaataatcgtaaaggggccgtcagcgtgttagataatctgtcaccgatcaaggcagaacgtgttacacgtttgtatcataaaggttcattttcgcgacaggaactgatggactcggctcgctggaaagcgatcagcacccgtctgaatcagttacatgaacgctggcaggaagagaaggcaggtcattaa

SEQ ID NO: 3526 - DNA, 825 bp, Escherichia coli
gtgccgtttcgcagcaataatcccctcacgcgcgacgaattgctgtcgcgctttttcccgcagtttcatcccgtcacgacgtttaatagtgggcttagtggcgggagttttctcattgaacatcagggccagcgttttgttgtgcgtcagccgcacgatcctgatgcgccgcagtccgcgttcttgcgccagtatcgggctttatcacaactacccgcatgcattgcaccgaagccgcatttatatctccgtgactggatggtggtcgactatctgcccggcgaggtaaaaacgtatttgccggataccaacgaactggcaggcttgctgtattatctacatcaacaaccgcgttttggctggcgaataacgctgttgccgttactggaactgtactggcagcaaagcgatccggcgcggcggacagtgggttggctgcgaatgttaaaacgtctgcgcaaagcgcgggaaccacggcctttacgcttaagtccattgcatatggatgtccacgccggaaatttagtgcatagcgcgtcagggttaaaactcatcgactgggagtatgccggagatggtgatatcgcgctggaactggcggcggtgtgggtggaaaatattgaccagcatcggcaattggtcaatgactatgccactcgcgcgaagatttatccggcgcaattatggcgtcaggtcaggcgatggtttccctggctgctgatgctcaaagcagggtggtttgagtaccgctggcgacaaaccggcgatcaacaatttatcaggctggccgatgacacgtggcggcagctattaataaaacaataa

SEQ ID NO: 3527 - DNA, 642 bp, Escherichia coli
atgacaaaaatgagtcgctacgccttgattaccgcgctggcgatgtttcttgccgggtgtgtggggcaacgtgaacctgcaccggtagaagaagtgaaaccagcgccggaacaacctgctgagccacaacagcctgtccccacagtgccatcggtgccgacgataccgcagcagccaggcccaattgagcacgaagatcaaactgcaccgcctgcgccgcatattcgtcattatgactggaatggcgcaatgcagccgatggtcagtaagatgcttggggctgacggcgtgactgcgggtagcgtcctgctggttgatagcgttaacaaccgtactaacggttcgttgaatgccgcagaagcgaccgaaacgctgcgaaatgcgctggctaataacggtaaatttaccctggtttccgcccagcagctgtcaatggctaagcaacaattaggtttatcgccgcaggacagtttaggcacccgtagtaaagccataggcattgcccgcaatgttggcgctcattacgtgctgtactccagcgcctctggcaacgttaacgctccgaccctacaaatgcagctgatgctggtgcagacgggcgaaattatctggtcaggtaaaggtgccgtttcgcagcaataa

SEQ ID NO: 3528 - DNA, 354 bp, Escherichia coli
atgtctctggcgttgttagtgctggtgggctgtcgttcacatccggaaattccggtgaatgatgagcaatcgctggtgatggagtcatctttattggctgcgggcatcagtgcagaaaagcccgtcctttcgacatctgatattcaaccttcagcatcctcaacgctttataacgaaaggcaagaacccgttaccgttcattatcgtttttactggtatgacgccagagggctggagatgcatcctctggaaaggccacgcagcgttaccattcccgcacattcggcggtcacgctgtacggcagcgccaattttctgggggcgcacaaagtcagactttatctatatttgtaa

SEQ ID NO: 3529 - DNA, 360 bp, Escherichia coli
gtggcagaagaaactatattcagcaaaattattcgtcgtgagatcccctccgatatcgtctaccaggatgatctggtaacggcgtttcgcgatatttcgccgcaagcgccaacgcatattctgatcattccgaatatcctcattccgactgtgaacgacgtgtcagctgagcatgagcaggcgctgggacgcatgatcaccgtagcggcaaaaattgctgagcaagaaggtattgccgaagatggctatcgtctgatcatgaacaccaaccgccatggcggacaagaggtttaccacatccatatgcatttgttgggtggccgtccgctgggaccaatgctgacgcataaaggtctgtaa

SEQ ID NO: 3530 - DNA, 2190 bp, Escherichia coli
atgctttcgacacaatttaacagggataatcaacatcaagccatcatcaaaccgtcactccttgccggttgcatagcactggcactattaccttccgccgcttttgctgcaccagccactgaagaaacggtgattgttgagggttcagccacagccccagatgatggcgaaaatgattacaacgtaacgtctacctctgcgggtacaaaaatgcagatgactcaacgtgatattcctcagtcggtcactattgttagccagcagcggatggaagatcagcagttacaaacgctgggcgaagtgatggaaaacacgctggggatcagcaaaagtcaggcggattccgatcgtgctctttattattcccgcggattccagatcgataactatatggttgatggtatccccacctattttgaatcgcgctggaatctgggcgacgcactttctgatatggcactgtttgaacgcgtagaagtagtgcgtggcgcgacaggcctcatgaccgggacgggtaatccatctgcggcaattaatatggttcgaaaacacgcgaccagtcgtgaatttaaaggcgatgtctcggcggaatacggtagctggaacaaagaacggtatgtggcggatttacaaagcccactcaccgaagacggtaaaatccgcgcacgaattgtcggcggctaccagaataacgactcatggctggaccgctacaacagtgaaaagaccttcttctccggcattgtcgatgctgatttaggcgatcttacgatgctttcagccggttacgaatatcagcgtattgatgttaatagcccaacctggggtggtttaccgcgctggaatactgatggcagcagcaacagttacgatcgcgcacgcagtaccgcacctgactgggcgtacaacgataaagagatcaacaaggtctttatgaccctgaagcagcggtttgctgatacctggcaagcgacgctgaatgccacccactctgaagtcgaatttgacagcaaaatgatgtatgtcgatgcctacgtaaacaaagcggatggtatgctggttgggccatacagcaattatggacctggctttgattatgtcggcggcaccggttggaacagcggcaaacgtaaagttgatgcgctggatctgttcgctgacggtagttatgaattgtttggtcgtcagcacaatttaatgtttggtggcagttacagcaaacaaaacaatcgttacttcagttcatgggccaacattttcccggatgaaattggcagtttctacaactttaatggcaatttcccacaaaccgactggtcaccacagagcctggcgcagaacgataccacacatatgaaatcgttatatgctgccactcgtgtcacccttgccgatccgctgcatctgatcctcggcgcacgttataccaactggcgagttgatacgctgacttacagcatggagaaaaaccacaccacgccttatgctggactggtgtttgacatcaatgacaactggtcgacctacgccagctatacctctattttccagccgcaaaatgatcgtgacagttcaggcaaatatctgactccaatcaccggtaacaactacgagctaggtctgaaatcggactggatgaatagccgtctgaccaccacgttagccatcttccgtattgagcaggataatgtcgctcagtccaccggtacacctatccccggcagcaacggcgaaaccgcctataaagcggtggatgggacagtcagtaaaggtgtggaatttgaactcaacggcgcaattaccgacaactggcagttgacgtttggcgcaacgcgctatattgccgaggataacgaaggaaacgccgttaatcctaatctgccacgcaccacgtttaaaatgttcaccagctatcggttgcctgtcatgccagagttgacggtcggcggtggtgttaactggcaaaatcgcgtgtataccgacaccgtgacgccgtatggcaccttccgcgccgagcaaggtagctacgcgctggtggatctcttcacccgctaccaggtgacgaaaaacttctcgttacaggggaatgtcaataacctgttcgacaaaacctacgataccaacgtggaaggttctatcgtctacggcgcaccgcgtaatttcagcattaccggcacgtatcaattctga

SEQ ID NO: 3531 - DNA, 1434 bp, Escherichia coli
atgtttaagaatgcatttgctaacctgcaaaaggtcggtaaatcgctgatgctgccggtatccgtactgcctatcgcaggtattctgctgggcgtcggttccgcgaatttcagctggctgcccgccgttgtatcgcatgttatggcagaagcaggcggttccgtctttgcaaacatgccactgatttttgcgatcggtgtcgccctcggctttaccaataacgatggcgtatccgcgctggccgcagttgttgcctatggcatcatggttaaaaccatggccgtggttgcgccactggtactgcatttacctgctgaagaaatcgcctctaaacacctggcggatactggcgtactcggggggattatctccggtgcgatcgcagcgtacatgtttaaccgtttctaccgtattaagctgcctgagtatcttggcttctttgccggtaaacgctttgtgccgatcatttctggtctggctgccatctttactggcgttgtgctgtccttcatttggccgcctattggttctgcaatccagaccttctctcagtgggctgcttaccagaacccggtagttgcgtttggcatttacggtttcatcgaacgttgcctggtaccgtttggtctgcaccacatctggaacgtacctttccagatgcagattggtgaatacaccaacgcagcaggtcaggttttccacggcgatattccgcgttatatggcgggtgacccgactgcgggtaaactgtctggtggcttcctgttcaaaatgtacggtctgccagctgccgcaattgctatctggcactctgctaaaccagaaaaccgcgcgaaagtgggcggtattatgatctccgcggcgctgacctcgttcctgaccggtatcaccgagccgatcgagttctccttcatgttcgttgcgccgatcctgtacatcatccacgcgattctggcaggcctggcattcccaatctgtattcttctggggatgcgtgacggtacgtcgttctcgcacggtctgatcgacttcatcgttctgtctggtaacagcagcaaactgtggctgttcccgatcgtcggtatcggttatgccattgtttactacaccatcttccgcgtgctgattaaagcactggatctgaaaacgccgggtcgtgaagacgcgactgaagacgcaaaagcgacaggtaccagcgaaatggcaccggctctggttgctgcatttggtggtaaagaaaacattactaacctcgacgcatgtattacccgtctgcgcgtcagcgttgctgatgtgtctaaagtggatcaggctggcctgaagaaactgggcgcagcgggcgtagtggttgctggttctggtgttcaggcgattttcggtactaaatccgataacctgaaaaccgagatggatgagtacatccgtaaccactaa

SEQ ID NO: 3532 - DNA, 798 bp, Escherichia coli
atgtttttagtcgactcacactgccatctcgatggtctggattatgaatctttgcataaggacgtggatgacgttctggcgaaagccgccgcacgcgatgtgaaattttgtctggcagtcgccacaacattaccgggttatttacacatgcgggatctggtaggcgaacgcgacaacgtcgtattttcttgtggcgtgcatccactcaaccagaatgatccctacgatgtagaagatttacgtcgtctggcggcagaagagggcgttgtagcgctgggtgaaaccgggctggattattattacacgccggaaactaaagtacgtcagcaagagtccttcatccatcatatccagattggtcgtgaactgaacaagccggttatcgtccacacccgtgacgcccgcgccgatacgctggcaattctgcgcgaagaaaaagtgacggattgcggtggcgtactacactgttttacagaggacagagaaacggcgggcaaattactggatctcggattttacatctccttttccggcattgtgaccttccgtaatgcggagcaactgcgcgatgctgcgcgttatgtccccctggagcggttactggtggaaactgactcaccttaccttgcgccagtaccgcatcgaggaaaagagaatcaacctgcgatggttcgtgacgttgcagaatacatggctgtgttgaaaggtgttgccgttgaagaactggcgcaggtaaccaccgataacttcgcccgtctgtttcacatcgacgcttcccgccttcaatccatccgttga

SEQ ID NO: 3533 - DNA, 1005 bp, Escherichia coli
atgagatggtatccatggttacgacctgatttcgaaaaactggtagccagctatcaggccggaagaggtcaccatgcgctactcattcaggcgttaccgggcatgggcgatgatgctttaatctacgccctgagccgttatttactctgccaacaaccgcagggccacaaaagttgcggtcactgtcgtggatgtcagttgatgcaggctggcacacatcccgattactacaccctggctcccgaaaaagggaaaaatgcgctgggcattgatgcggtacgtgaggtcaccgaaaagctgaatgagcacgcacgcttaggtggtgcgaaagttgtctgggtaaccgatgctgccttactaaccgacgccgcggctaacgcattgctgaaaacgcttgaagagccaccagcagagacgtggtttttccttgctacccgcgagccagaacgtttactggcaacattacgtagtcgttgtcggttacattaccttgcgccgccgccggaacagtacgccgtgacctggctttcacgcgaagtgacaatgtcacaggatgcactacttgccgcattgcgcttaagcgccggttcgcctggggcggcactggcgttgtttcagggagataactggcaggctcgtgaaacattgtgtcaggcgctggcatatagcgtgcaatcgggcgactggtattcgctgctagcggcccttaatcatgaacaagctccggcacgtttacactggctggcaacgttgttgatggatgcgctaaaacgccatcatggcgctgcgcaggtgaccaatgttgatgtgccgggcctggtcgtcgaactggcaaaccatctttctccctcgcgcctgcaggctatactgggggatgtttgccacattcgtgaacagttaatgtctgtcacaggcatcaaccgcgagcttctcatcaccgatcttttactgcgtattgagcattacctgcaaccgggcgttgtgctaccggttcctcatctttaa

SEQ ID NO: 3534 - DNA, 642 bp, Escherichia coli
atgcgcagtaagtatatcgtcattgaggggctggaaggcgcaggcaaaactaccgcgcgtaatgtggtggttgagacgctcgagcaactgggtatccgcgacatggttttcactcgggaacctggcggtacgcaacttgccgaaaagttaagaagcctggtgctggatatcaaatcggtaggcgatgaagtcattaccgataaagccgaagttctgatgttttatgccgcgcgcgttcaactggtagaaacgatcatcaaacctgcgctggctaacggcacctgggtgattggcgatcgccacgatctctccactcaggcgtatcagggcggcggacgtggtattgaccaacatatgctggcaacactgcgtgatgctgttctcggggattttcgccccgacttaacgctctatctcgatgttaccccggaagttggcttaaaacgcgcgcgtgcgcgcggcgagctggatcgtattgagcaagagtctttcgatttttttaatcgtacccgcgcccgctatctggaactggcagcacaagataaaagcattcataccattgatgccacccagccgctggaggccgtgatggatgcaatccgcactaccgtgaccaactgggtgaaggagttggacgcatga

SEQ ID NO: 3535 - DNA, 1023 bp, Escherichia coli
atgaaaaaagtgttattgattatcttgttattgctggtggtactgggtatcgccgctggtgtgggcgtctggaaggttcgccatcttgccgacagcaaattgcttatcaaagaagagacgatatttaccctgaagccagggaccggacgtctggcgctcggtgaacagctttatgccgataagatcatcaatcgcccacgggttttccaatggttgctgcgtatcgaaccggatctttctcactttaaagccgggacttaccgctttacaccgcagatgaccgtgcgcgagatgctgaaattgctggaaagcggtaaagaagcacagttccctctgcgactggtagaagggatgcgtctgagcgattacctcaagcaattgcgtgaggccccgtatatcaagcatacgctgagcgacgataagtacgccaccgtagcgcaggcacttgaactggaaaacccagagtggattgaaggttggttctggccagacacctggatgtataccgccaataccaccgatgtcgcgttactcaagcgagcgcacaagaaaatggtgaaagcggtcgatagcgcctgggaagggcgtgcggacggtctgccctataaagataaaaaccagctggtgacgatggcatcaattatcgaaaaagaaaccgccgttgccagtgaacgcgatcaggttgcctcagtatttatcaaccgtttacgcattggtatgcgcctgcagaccgacccgaccgtgatttacgggatgggagagcgttataatggcaaactttctcgtgcagacctggaaacgccgacagcgtataacacctataccattaccggtctgccgccaggtgcgatagcgacgccgggggcggattcgctgaaggctgctgcgcatccggcaaaaacgccgtatctctattttgtggccgatggtaaaggtggtcacacgtttaataccaatcttgccagtcataacaagtctgtgcaggattatctgaaagtgcttaaggaaaaaaatgcgcagtaa

SEQ ID NO: 3536 - DNA, 810 bp, Escherichia coli
atgttcttaattaacggtcataagcaggaatcgctggcagtaagcgatcgggcaacgcagtttggtgatggttgttttaccaccgccagagttatcgacggtaaagtcagtttgttatcggcgcatatccagcgactacaggatgcttgtcagcggttgatgatttcctgtgacttctggcctcagcttgaacaagagatgaaaacgctggcagcagaacagcagaatggtgtgctgaaagtcgtgatcagtcgcggtagtggcgggcgagggtacagcacattgaacagtggaccggcaacgcggattctctccgttacggcttatcctgcacattacgaccgtttgcgtaacgaagggatgacgttggcgctaagcccggtgcggctggggcgcaatcctcatcttgcaggtattaaacatcttaatcggcttgagcaagtattgatccgctctcatcttgagcagacaaacgctgatgaggcgctggtccttgacagcgaagggtgggttacggaatgctgtgcggctaatttgttctggcggaagggcaacgtagtttatacgccgcgactggatcaggcaggtgttaacggcattatgcgacaattctgtatccgtttactggcacaatcctcttatcagcttgtcgaagtgcaagcctcgctggaggaggcgttgcaggcagatgagatggttatttgtaatgcgttaatgccagtgatacccgtacgtgcctgtggcgatgtctccttttcgtcagcaacgttatatgaatatttagccccactttgtgagcgcccgaattag

SEQ ID NO: 3537 - DNA, 1242 bp, Escherichia coli
gtgtctaagcgtcgtgtagttgtgaccggactgggcatgttgtctcctgtcggcaataccgtagagtctacctggaaagctctgcttgccggtcagagtggcatcagcctaatcgaccatttcgatactagcgcctatgcaacgaaatttgctggcttagtaaaggattttaactgtgaggacattatctcgcgcaaagaacagcgcaagatggatgccttcattcaatatggaattgtcgctggcgttcaggccatgcaggattctggccttgaaataacggaagagaacgcaacccgcattggtgccgcaattggctccgggattggcggcctcggactgatcgaagaaaaccacacatctctgatgaacggtggtccacgtaagatcagcccattcttcgttccgtcaacgattgtgaacatggtggcaggtcatctgactatcatgtatggcctgcgtggcccaagcatctctatcgcgaccgcctgtacttccggcgtgcacaacattggccatgctgcgcgtattatcgcgtatggcgatgctgacgtgatggttgcaggtggcgcagagaaagccagtacgccgctgggcgttggtggttttggcgcggcacgtgcattatctacccgcaatgataacccgcaagcggcgagccgcccgtgggataaagagcgtgatggtttcgtactgggcgatggtgccggtatgctggtacttgaagagtacgaacacgcgaaaaaacgcggtgcgaaaatttacgctgaactcgtcggctttggtatgagcagcgatgcttatcatatgacgtcaccgccagaaaatggcgcaggcgcagctctggcgatggcaaatgctctgcgtgatgcaggcattgaagcgagtcagattggctacgttaacgcgcacggtacttctacgccggctggcgataaagctgaagcgcaggcggtgaaaaccatcttcggtgaagctgcaagccgtgtgttggtaagctccacgaaatctatgaccggtcacctgttaggtgcggcgggtgcagtagaatctatctactccatcctggcgctgcgcgatcaggctgttccgccaaccatcaacctggataacccggatgaaggttgcgatctggatttcgtaccgcacgaagcgcgtcaggttagcggaatggaatacactctgtgtaactccttcggcttcggtggcactaatggttctttgatctttaaaaagatctaa

SEQ ID NO: 3538 - DNA, 237 bp, Escherichia coli
atgagcactatcgaagaacgcgttaagaaaattatcggcgaacagctgggcgttaagcaggaagaagttaccaacaatgcttctttcgttgaagacctgggcgcggattctcttgacaccgttgagctggtaatggctctggaagaagagtttgatactgagattccggacgaagaagctgagaaaatcaccaccgttcaggctgccattgattacatcaacggccaccaggcgtaa

SEQ ID NO: 3539 - DNA, 735 bp, Escherichia coli
atgaattttgaaggaaaaatcgcactggtaaccggtgcaagccgcggaattggccgcgcaattgctgaaacgctcgcagcccgtggcgcgaaagttattggcactgcgaccagtgaaaatggcgctcaggcgatcagtgattatttaggtgccaacggcaaaggtctgatgttgaatgtgaccgacccggcatctatcgaatctgttctggaaaaaattcgcgcagaatttggtgaagtggatatcctggtcaataatgccggtatcactcgtgataacctgttaatgcgaatgaaagatgaagagtggaacgatattatcgaaaccaacctttcatctgttttccgtctgtcaaaagcggtaatgcgcgctatgatgaaaaagcgtcatggtcgtattatcactatcggttctgtggttggtaccatgggaaatggcggtcaggccaactacgctgcggcgaaagcgggcttgatcggcttcagtaaatcactggcgcgcgaagttgcgtcacgcggtattactgtaaacgttgttgctccgggctttattgaaacggacatgacacgtgcgctgagcgatgaccagcgtgcgggtatcctggcgcaggttcctgcgggtcgcctcggcggcgcacaggaaatcgccaacgcggttgcattcctggcatccgacgaagcagcttacatcacgggtgaaactttgcatgtgaacggcgggatgtacatggtctga

SEQ ID NO: 3540 - DNA, 930 bp, Escherichia coli
atgacgcaatttgcatttgtgttccctggacagggttctcaaaccgttggaatgctggctgatatggcggcgagctatccaattgtcgaagaaacgtttgcagaagcttctgcggcgctgggctacgatctgtgggcgctgacccagcaggggccagctgaagaactgaataaaacctggcaaactcagccagcgctgttgactgcatctgttgcgctgtatcgcgtatggcagcagcagggcggtaaagcaccggcaatgatggccggtcacagcctgggggaatactccgcgctggtttgcgctggtgtgattgatttcgctgatgcggtgcgtctggttgagatgcgcggcaagttcatgcaagaagccgtaccggaaggaacgggcgctatggcggcaatcatcggtctggatgatgcgtctattggaaaagcgtgtgaagaagctgcagaaggtcaggtcgtttctccggtaaactttaactctccgggacaggtggttattgccggtcataaagaagcggttgagcgtgctggcgctgcctgtaaagctgcgggcgcaaaacgcgctctgccgttaccagtgagcgtaccgtctcactgtgcgctgatgaaaccagcagccgacaaactggcagtagaattagcgaaaatcacctttaacgcaccaacagttcctgttgtgaataacgttgatgtgaaatgcgaaaccaatggtgatgccatccgtgacgcactggtacgtcagttgtataacccggttcagtggacgaagtctgttgagtacatggcagcgcaaggcgtagaacatctctatgaagtcggcccgggcaaagtgcttactggcctgacgaaacgcattgtcgacaccctgaccgcctcggcgctgaacgaaccttcagcgatggcagcggcgctcgagctttaa

SEQ ID NO: 3541 - DNA, 954 bp, Escherichia coli
atgtatacgaagattattggtactggcagctatctgcccgaacaagtgcggacaaacgccgatttggaaaaaatggtggatacctctgacgagtggattgtcactcgtaccggtatccgcgaacgccacattgccgcgccaaacgaaaccgtttcaaccatgggctttgaagcggcgacacgcgcaattgagatggcgggtattgagaaagaccagattggcttgatcgttgtggcaacgacttctgcgacgcacgctttcccgagcgcagcttgtcagattcaaagcatgttgggcattaaaggttgcccggcatttgacgttgcagcagcctgcgcaggtttcacctatgcattaagcgtagccgatcaatacgtgaaatctggggcggtgaagtatgctctggtcgtcggttccgatgtactggcgcgcacctgcgatccaacagatcgtgggactattattatttttggcgatggcgcgggcgctgcggtgctggctgcctctgaagagccgggaatcatctccacccatctgcatgccgatggtagctatggtgaattgctgacgctgcctaatgctgaccgtgtgaatccagagaattcaattcatctgacgatggcgggcaacgaagtcttcaaggttgcggtaacggaactggcgcacatcgttgatgagacgctggcggcgaataatcttgaccgttctcaactggactggctggttccgcatcaggctaacctgcgtattatcagtgcaacggcgaaaaaactcggcatgtcgatggacaatgtcgtggtgacgctggatcgccacggtaatacctctgcggcctctgtcccgtgcgcgctggatgaagctgtacgtgacgggcgcattaagccgggacagttggttctgcttgaagcctttggcggtggattcacctggggctccgcgctggttcgtttctag

SEQ ID NO: 3542 - DNA, 1041 bp, Escherichia coli
atgggaggggattttggcccttccgtgacagtgcctgcagcattgcaggcactgaattctaattcgcaactcactcttcttttagtcggcaatcccgacgccatcacgccattacttgctaaagctgactttgaacaacgttcgcgtctgcagattattcctgcgcagtcagttatcgccagtgatgcccggccttcgcaagctatccgcgccagtcgtgggagttcaatgcgcgtggccctggagctggtgaaagaaggtcgagcgcaagcctgtgtcagtgccggtaataccggggcgctgatggggctggcaaaattattactcaagcccctggaggggattgagcgtccggcgctggtgacggtattaccgcatcagcaaaagggcaaaacggtggtcctcgatttaggggccaacgtcgattgtgacagtacaatgttggtgcaatttgccattatgggctcagttctggctgaagaggtggtggaaattcctaatcctcgcgtggcgttgctcaatattggtgaagaagaagtaaagggtctcgacagtattcgggatgcctcagcggtgcttaaaacaatcccttctatcaattatatcggctatcttgaagccaatgagttgttaactggcaagacagatgtgctggtttgtgacggctttacaggaaatgtcacattaaagacgatggaaggtgttgtcaggatgttcctttctctgctgaaatctcagggtgaagggaaaaaacggtcgtggtggctactgttattaaagcgttggctacaaaagagcctgacgaggcgattcagtcacctcaaccccgaccagtataacggcgcctgtctgttaggattgcgcggcacggtgataaaaagtcatggtgcagccaatcagcgagcttttgcggtcgcgattgaacaggcagtgcaggcggtgcagcgacaagttcctcagcgaattgccgctcgcctggaatctgtatacccagctggttttgagctgctggacggtggcaaaagcggaactctgcggtag

SEQ ID NO: 3543 - DNA, 174 bp, Escherichia coli
atggccgtacaacagaataaaccaacccgttccaaacgtggcatgcgtcgttcccatgacgcgctgaccgcagtcaccagcctgtctgtagacaaaacttctggtgaaaaacacctgcgtcaccacatcactgccgacggttactaccgcggccgcaaggtcatcgctaagtaa

SEQ ID NO: 3544 - DNA, 522 bp, Escherichia coli
atgcaaaaggtaaaattacccctgactctcgatccggttcgtacggctcagaaacgccttgattaccagggtatctatactcctgatcaggttgagcgcgtcgccgaatccgtagtcagtgtggacagtgatgtggaatgctccatgtcgttcgctatcgataaccaacgtctcgcagtgttaaatggcgatgcgaaggtgacggtaacgctcgagtgtcagcgttgcgggaagccgtttactcatcaggtctacacaacgtattgttttagtcctgtgcgttcagacgaacaggctgaagcactgccggaagcgtatgaaccgattgaggttaacgaattcggtgaaatcgatctgcttgcaatgattgaagatgaaatcatcctcgccttgccggtagttccggtgcatgattctgaacactgtgaagtgtccgaagcggacatggtctttggtgaactgcctgaagaagcgcaaaagccaaacccatttgccgtattagccagcttaaagcgtaagtaa

SEQ ID NO: 3545 - DNA, 624 bp, Escherichia coli
atggctatcatcaatacgctatatctgatggaaaaaaatatgcctaaacttattttagcctccacctcgccctggcgtcgcgctcttctggaaaaactgcaaatctcttttgaatgtgcagcacccgaggtcgacgaaactccacgcagcgacgaatcaccgcgacagttggtgcttcgactggcacaagaaaaagcgcaatctctggcgtcacgttatccggatcatttaattattggttcagaccaggtatgtgttcttgatggcgaaatcaccggtaaaccgttaacggaagaaaatgcccgtctgcaattacgcaaagccagcggcaatatcgtcaccttctatactggactggcgttgtttaattcggcgaatgggcatctacaaacagaagtggagccttttgacgtccatttccgtcacctgagcgaggcggagattgataattacgtgcgtaaagagcatcccctgcactgcgcgggtagctttaagagtgaaggatttggcattacgctgtttgagcgtttagaggggcgtgatcctaacacgctggttggtttaccgctaatcgcgctgtgtcagatgttacgtcgggaagggaaaaacccgctgatgggatag

SEQ ID NO: 3546 - DNA, 960 bp, Escherichia coli
atgaaaacagagactccatccgtaaaaattgttgctatcaccgctgacgacgcggggcaacgtatcgacaactttttgcgtacccaattgaaaggcgtaccaaaaagtatgatttaccgtattttgcgtaaaggcgaagtgcgggtgaacaaaaaacgtattaagcctgaatataaactcgaagcgggtgatgaggtgcgtatcccaccggttcgcgttgctgagcgggaagaagaggcggtttcgccacatctgcaaaaggtggcggcgctggcggacgtcatcttatatgaagatgatcatatcctggtgctgaataaaccttccggtacggcggtacatggcggcagtggtttaagcttcggcgttattgaaggtttgcgggcgttgcgcccggaagcgcggttccttgaactggttcatcgtcttgaccgggacacctcaggtgtgttgctggtagcgaaaaaacgctcggcgttgcgttctctgcatgagcaattacgtgaaaaagggatgcaaaaagattacctggcgctggtgcgcggtcagtggcagtcgcatgtgaagagcgtccaagcgccgttactgaaaaatattctgcaaagcggcgaacgtatcgtgcgtgtgagtcaggaaggcaaaccgtcggaaacacgctttaaagtggaagagcgctatgcatttgccaccctggtgcgttgtagcccggtaacagggcgtactcatcagatccgtgtgcatacacaatatgcgggtcatccgattgcctttgacgatcgctacggtgaccgtgaatttgacagacagctcactgaagcaggcacgggattaaatcgcctgttcctgcacgccgcagcgttgaagtttactcatccggggaccggtgaggtgatgcgtattgaagcgccgatggatgaaggtttgaagcgttgtttgcaaaagctgcgtaacgcgcgctaa

SEQ ID NO: 3547 - DNA, 3186 bp, Escherichia coli
atgaaaagaatgttaatcaacgcaactcagcaggaagagttgcgcgttgcccttgtagatgggcagcgtctgtatgacctggatatcgaaagtccagggcacgagcagaaaaaggcaaacatctacaaaggtaaaatcacccgcattgaaccgagtctggaagctgcttttgttgattacggcgctgaacgtcacggtttcctcccactaaaagaaattgcccgcgaatatttccctgctaactacagtgctcatggtcgtcccaacattaaagatgtgttgcgtgaaggtcaggaagtcattgttcagatcgataaagaagagcgcggcaacaaaggcgcggcattaaccacctttatcagtctggcgggtagctatctggttctgatgccgaacaacccgcgcgcgggcggtatttctcgtcgtatcgaaggcgacgaccgtaccgaattaaaagaagcactggcaagccttgaactgccggaaggcatggggcttatcgtgcgcaccgctggcgtcggcaaatctgctgaggcgctgcaatgggatttaagcttccgtctgaaacactgggaagccatcaaaaaagccgctgaaagccgcccggctccgttcctgattcatcaggagagcaacgtaatcgttcgcgcattccgcgattacttacgccaggacatcggcgaaatccttatcgataacccgaaagtgctcgaactggcacgtcagcatatcgctgcattaggccgcccggatttcagcagcaaaatcaaactgtacaccggcgagatcccgctgttcagccactaccagatcgagtcgcagatcgagtccgccttccagcgtgaagttcgtctgccatccggtggttcgattgttatcgacagcaccgaagcgttaacggccatcgacatcaactccgcacgcgcgacccgcggcggcgatatcgaagaaaccgcgtttaacactaacctcgaagctgccgatgagattgctcgtcagctgcgcctgcgtgacctcggcggcctgattgttatcgacttcatcgacatgacgcctgtacgccaccagcgtgcggtagaaaaccgtctgcgtgaagcggtgcgtcaggaccgtgcgcgtattcaaatcagccatatttctcgctttggcctgttggaaatgtcccgtcagcgcctgagcccatcactgggtgaatccagccatcacgtctgcccgcgctgctccggtaccggtaccgttcgtgacaacgaatcgctgtcgctctctattctgcgtctgatcgaagaagaagcgctgaaagagaacacccaggaagttcacgccattgttcctgtgccaattgcttcttacctgctgaatgaaaaacgttctgcggtaaatgcgattgaaactcgtcaggacggcgtacgctgtgtgattgtgccaaacgatcagatggaaaccccgcactaccatgtgctgcgcgtgcgcaaaggggaagaaaccccaaccttaagctacatgctgccgaagctgcatgaagaagcgatggcgctgccgtctgaagaagagttcgctgaacgtaagcgtccggaacaacctgcgctggcaacctttgccatgccggatgtgccgccagcaccaacgccagctgaacctgccgcgcctgtcgtagccccagcacctaaatctgcaccggcaacaccagccgctcctgcccaacctgggctgttgagccgcttcttcggcgcactgaaagcgctgttcagcggtggtgaagaaaccaaaccgtccgagcaaccaacaccgaaagcagaagcgaaaccggaacgtcaacaggatcgtcgcaagcctcgtcagaacaaccgccgtgaccgtaatgagcgccgcgaccctcgtagtgaacgtactgaaggcagcgataatcgcgaagaaaaccgtcgtaatcgtcgccaggcacagcagcagactgccgagacgcgtgagagccgtcagcaggcagaggtaacggaaaaagcgcgtaccaccgacgagcagcaaacgccgcgtcgtgaacgtagccgccgccgtaacgatgataaacgtcaggcgcaacaagaagtgaaggcgctgaatgttgaagagcaatctgttcaggaaaccgaacaggaagaacgtgtacgtccggttcagccgcgtcgtaaacagcgtcagctcaatcagaaagtgcgttacgagcaaagcgtagccgaagaagcggtagtcgcaccggtggttgaagaaactgtcgcagccgaaccaattgttcaggaagcggcagccccacgcacagaattggtgaaagttccgctgccagtcgtagcgcaaactgcaccagaacagcaagaagagaacaatgctgataaccgtgacaacggtggcatgccgcgtcgttctcgccgctcgcctcgtcacctgcgcgtaagtggtcagcgtcgtcgtcgctatcgtgacgagcgttatccaacccagtcgccaatgccgttgaccgtagcgtgcgcgtctccggaactggcctctggcaaagtctggatccgctatccaattgtacgtccgcaagatgtacaggttgaagagcagcgcgaacaggaagaagtacaagtgcagccgatggtgactgaggtccctgtcgccgccgctgccgaacctgttgttagcacgccagttgttgaagaagtggctgaagtcgtagaagcccccgttcaggttaccgaaccgcaaccggaagtggttgaaacgacgcatcctgaagtgattgctgccgcggtaactgaacagccgcaggtgattaccgagtctgatgttgccgtagcccaggaagttgcagaacacgcagaaccggtggttgaaccgcaggaagagacggcagatattgaagaagttgccgaaactgctgaggttgtggttgctgaacctgaagttgttgctcaacctgccgcgccagtcgtcgctgaagtcacagcagaagttgaaacggtagctgcggttgaacctgaggtcaccgttgagcataaccacgctaccgcgccgatgacgcgcgctccggcaccggaatatgttccggaagcaccgcgtcacagtgactggcagcgccctactttcgccttcgaaggtaaaggtgccgcaggtggtcatacggcaacgcatcatgcatctgccgctcctgcgcgtccgcaacctgttgagtaa

SEQ ID NO: 3548 - DNA, 954 bp, Escherichia coli
atgcgtttcagtacccagatgatgtaccagcaaaacatgcgtggcatcaccaattctcaggcagaatggatgaagtacggcgaacagatgtcgacgggtaagcgagtcgttaacccttcagatgatcccattgctgcatcacaagctgttgttctctcccaggcacaggcgcaaaacagccagtacacgctggcgcgtactttcgccactcaaaaagtgtcactggaagagagtgtacttagccaggtcaccactgctatccagaatgcccaggaaaaaattgtttacgccagcaatggcaccttgagtgacgatgaccgggcctcgctggctacggatattcaggggcttcgtgaccagttgctgaatctggcgaacaccactgacggtaacgggcgctacatttttgccggttataaaacagagactgcgccgtttagtgaggttgacggtgattatgtcggcggaacagaaagtattaagcaacaggtcgatgcttcgcgttcgatggtgataggacatacgggcgacaaaattttcgacagtattaccagcaacgcggtagcggaaccagacggtagcgcttctgaaaccaatctttttgccatgctggatagcgccatcgcagccctgaaaacgccggtcgcggatagcgaagcggataaagaaaccgccgctgcggcactggataaaaccaaccgcggactgaaaaactcgctgaacaatgtgctgactgttcgcgcggaattaggcacgcagctgaacgaactggagtcgctggattcattaggtagcgatcgcgctttagggcaaacgcagcagatgagcgatctggttgatgtggactggaatgcaactatttcatcttacatcatgcagcaaacggcattgcaggcatcgtataaagcatttaccgatatgcagggattgtcgctcttccagctcaacaaataa

SEQ ID NO: 3549 - DNA, 1644 bp, Escherichia coli
atgtccagcttgatcaataacgccatgagcggactgaacgcggcccaggcggcgttaaatacggcaagtaataatatctccagctataacgttgccggatatacccgccaaaccactattatggcgcaggccaatagcacgctgggcgctggcggctgggttggcaatggcgtctacgtttctggtgtgcagcgtgagtatgatgcatttattaccaaccagttacgtgcggcgcagacgcaaagtagcggcctgactgcccgctatgagcagatgtcgaaaatcgacaatatgctctccaccagtacctcttcgctggcaacacagatgcaggatttcttcaccagcctgcaaacgctggtaagtaacgcggaagacccggcagcgcgccaggcgctgattgggaaatcagaagggttggtgaatcagtttaaaaccaccgatcaatatctgcgcgaccaggacaaacaggtcaatatcgcgataggtgccagcgttgatcagatcaacaattacgctaaacaaatcgccagcctgaacgatcaaatctcgcgtctgacaggcgtgggggcaggggcgtcacctaacaatctgctggatcaacgcgatcaactggtgagtgaattaaaccagattgttggcgtagaagttagcgttcaggatggtggcacttataacatcacgatggccaatggctactcactggttcagggaagtacggcgcggcagctggcggcagttccttccaccgccgacccttcgcgtacgactgtcgcttatattgatgggacggctggcaatattgagatcccggagaaattactgaataccgggtcgctgggcggcattctgacattccgttctcaggatctggaccagacgcgtaatacgcttggacaactggcgctggcatttgccgaggctttcaacacccaacacaaagccggatttgatgctaacggcgatgccggtgaagatttctttgctatcggtaagcccgcggtactgcaaaacacgaaaaacaacggtgacgttgcgatcggtgccacggtaactgatgcctccgcggtactggcgacagattacaaaatctcgttcgataataatcagtggcaggtcacccgccttgccagtaataccacttttacggtgacgccggatgccaacggtaaagtggcatttgatggtctggagttgacgtttacaggaacgcctgccgttaacgacagcttcacactgaaaccggtaagtgacgccatcgtcaacatggatgtattaatcaccgacgaagcgaaaatcgccatggcgagcgcagaagatgcgggtgatagcgacaaccgcaacggtcaggccctgctggatctgcaaagcaacaataaaacggtgggcggtgcgaaatcctttaacgacgcttatgcctcattagtgagtgatatcgggaataaaaccgcgacgttgaaaaccagtagcgccacgcaaggtaatgtggtgacgcagctttccaatcagcagcagtcgatttccggtgtcaatctcgatgaggagtacggaaatctgcaacgttttcagcagtattacctcgcgaatgcgcaggttctgcagacggcaaacgcgatttttgatgcgctgattaacattcgctaa

SEQ ID NO: 3550 - DNA, 942 bp, Escherichia coli
atgatcagcgacagcaaactactggcaagtgcggcctgggatgcgcaatcactcaacgaactaaaggcgaaagcgggcgaagatccagcggcaaatatccgtccggtggcccgccaggtggaagggatgttcgtgcagatgatgttgaaaagcatgcgcgacgctttaccaaaagatggcctgttcagcagcgagcacactcgcctgtataccagtatgtatgaccagcagattgcccaacagatgacggcgggcaaaggtctggggcttgcagagatgatggttaaacagatgacgccagaacaaccattgccagaggagtccacgccagcagcaccgatgaaattcccgctcgaaaccgtggtgcgttatcaaaatcagacgctttcgcagctggtgcaaaaggccgtaccacgtaactacgatgattcgctgccgggtgacagtaaagcattcctcgcgcaactctcgttgcccgcccaactggcaagccagcaaagcggtgtgccacatcatttgatcctcgctcaggcggcgctggaatctggctggggacaacggcaaatccgccgtgaaaacggcgagccgagttataacctgtttggcgtcaaagcctctggcaactggaaagggccagtcactgaaatcaccacgactgaatatgaaaacggcgaagcgaagaaagtaaaagcgaaatttcgggtctacagctcgtatctggaagcattgtcggattacgttgggctgttaacacgtaatccgcgctacgctgccgtgacgaccgccgcgagtgcggagcagggggcgcaggccctacaggacgcgggctatgccaccgatcctcactatgcccgcaaactcaccaacatgattcagcagatgaaatcgataagcgacaaagtgagcaaaacctacagtatgaacattgataatctgttctga

SEQ ID NO: 3551 - DNA, 1098 bp, Escherichia coli
gtgattaaatttctctctgcattaattcttctactggttatcacggcggctcaggctgagcgtattcgcgatctcaccagtgttcagggggtaaggcaaaactcactgattggctatggcctggtggtggggctggatggaaccggtgaccagacaacccagacgccgtttaccacacaaacgcttaataacatgctctcacagctgggaattaccgttccgacgggcaccaatatgcagctaaaaaacgtcgctgcggtaatggtgacagcgtcacttccgccgtttggacgccaggggcaaaccatcgatgtggtggtttcttccatgggtaatgccaaaagcttgcgtggcggtacgttgttgatgacaccgcttaagggcgttgacagtcaggtgtatgcgctggcgcagggcaatattctggttggtggcgctggagcctccgctggcggtagcagtgttcaggtgaaccaactgaacggtggacggatcaccaatggtgcggttattgaacgtgaattgcccagccagtttggcgtcgggaatacccttaatttgcaacttaacgacgaagatttcagcatggcgcagcaaatcgctgacaccatcaaccgcgtgcgtggatatggcagcgccaccgcgttagatgcgcggactattcaggtgcgcgtaccaagtggcaacagttcccaggtccgtttccttgccgatatccagaatatgcaggttaatgtcaccccgcaggacgctaaagtagtgattaactcgcgcactggctcggtggtgatgaatcgcgaagtgaccctggacagctgcgcagtagcgcaggggaatctctcggttacggtcaatcgtcaggccaatgtcagccagccagatacaccgtttggtggtggacagactgtggttactccacaaacgcagatcgatttacgccagagcggcggttcgctgcaaagcgtacgttccagcgccagcctcaataacgtggtgcgcgcgctcaatgcgctgggcgctacgccgatggatctgatgtctattttgcaatcaatgcaaagtgcgggatgtctgcgggcaaaactggaaatcatctga

SEQ ID NO: 3552 - DNA, 699 bp, Escherichia coli
atgcaaaaaaacgctgcgcatacttatgccatttccagcttgttggtgctttcactaaccggctgcgcctggataccctccacgccgctggtacaaggggcgaccagtgcacaaccggctcccggtccgacgcccgtcgccaacgggtctattttccagtctgctcagccgattaactatggctatcaaccgctgtttgaagatcgtcgaccacgcaatattggcgatacgctgactatcgtgttgcaggagaacgtcagcgccagcaaaagctcctctgcgaatgccagccgtgacggtaaaactaattttggctttgatactgtgccgcgctatttgcaggggttgtttggtaacgctcgtgccgatgtcgaagcctccggtggtaacacgttcaacggaaaaggcggggccaatgccagcaatacctttagcggtacgttgacggtgacggttgaccaggtactggtcaacggcaacctgcatgtggtgggtgaaaaacagatcgccattaatcagggtaccgaatttattcgcttctctggcgtggttaatccacgcactatcagcggcagcaataccgtaccatctactcaggtggcggatgcgcgcattgaatacgtaggcaatggctacattaacgaagcgcaaaatatgggctggttgcagcgtttcttccttaacctgtcgccaatgtaa

SEQ ID NO: 3553 - DNA, 783 bp, Escherichia coli
atgatcagttcattatggatcgccaaaacgggccttgacgcccagcaaaccaatatggacgtcattgccaacaacctggcaaacgtcagtactaacggttttaagcgtcagcgcgcggtgtttgaagatctgctttatcaaaccattcgccagccgggggcacagtcttccgaacaaaccaccttaccctccggattacaaatcggcacgggggtacgcccggtcgccacggaacgtttacacagccagggcaacctgtcgcaaaccaataacagtaaagacgtcgcgattaaagggcagggctttttccaggtgatgttgccagatggctcatcagcctatacccgtgacggctctttccaggtggatcagaacgggcagctggtgacggccggtggttttcaggtgcagccagcgatcaccattccggcgaatgcgttaagtatcaccatcggtcgtgatggcgtggtcagcgtaacccaacaaggccaggcagctccggttcaggttgggcagctcaatctcaccacctttatgaatgacaccggactggagagcattggcgaaaacctctacaccgaaacgcaatcctccggtgcaccgaacgaaagcacgccgggcctgaacggcgcgggactgctgtatcaagggtatgttgaaacgtctaacgtcaacgtggcggaagaactggtcaatatgattcaggtgcaacgcgcttacgaaatcaacagtaaagcggtgtccaccaccgatcagatgctgcaaaaactgacgcaactctaa

SEQ ID NO: 3554 - DNA, 756 bp, Escherichia coli
atggatcacgcaatttataccgcgatgggagcagccagccagacgctgaatcaacaggcggtaaccgccagtaatctggccaatgcctcaacgcccggttttcgcgcgcagttaaacgccttgcgcgcagtgccggtggaagggctttcactgcccacgcgcacgctggtaacggcgtcaacaccgggtgcagacatgacgcccggcaagatggattacacctcgcgcccgctggacgttgcgttgcagcaggatggttggctggtcgtgcagaccgctgacggtagtgaagggtatacgcgtaatggcagcattcaggttgatcccaccgggcaactgacaattcagggacatccggtggtaggcgaggcggggccaattgctgtgccggaaggggcggaaatcactattgctgccgatggcacaatctcggcgctgaatccgggcgatccggcaaatacggttgcgccagtggggcgtctgaagctggtgaaagccacgggcagcgaagtccagcgcggtgacgatggcatttttcgtttaagcgcagaaagccaggctacgcgtgggccggtactgcaggcagatccaaccttgcgtgtgatgtcgggtgttctggaaggcagtaacgtcaatgccgttgcggcaatgagcgacatgattgccagcgcgcggcgttttgaaatgcagatgaaggtgatcagcagcgtcgatgataacgcaggccgtgccaaccaactgctgtcgatgagttaa

SEQ ID NO: 3555 - DNA, 1206 bp, Escherichia coli
atggccttttctcaagcggttagcggattaaacgctgccgccaccaacctcgatgttattggcaacaatatcgccaactccgccacctacggctttaaatcaggcacggcctcttttgccgatatgtttgccggttcgaaagtgggactgggggtaaaagttgctggtatcactcaggactttaccgatggcacgaccaccaacaccgggcgtggtctggacgttgctattagccagaacggttttttccgtctggtagacagcaatggttcggtgttctacagccgtaacggacaatttaagctggatgaaaaccgtaacctggtgaatatgcaaggtttacagctgacgggttacccggcaaccggtacgccgccgactattcagcaaggggcgaatccgaccaatatttcgattccgaataccctgatggcagcgaaaactaccaccacggcgtcgatgcagatcaacctgaattccagtgatccgcttccctctgttaacgcatttgatgccagcaatgcggatagctataacaaaaaaggttcggtgactgttttcgatagtcagggtaatgctcatgatatgagcgtgtactttgtgaagaccggggataataactggcaggtctacacccaggatagtagtgatccaaacagcattgcgaagacagcgacaacactggtgtttaatgccaatggcgttctgacctcaaatccaacagcgaatatttccactggcgcaattaacggcgcagatcccgccacgtttagcctgagcttcctcaactccatgcagcaaaataccggcgctaacaacattgtggcaaccacccagaacggctacaaaccgggcgatctggtgagttatcaaatcaatgatgacggtacggttgtcggcaactattccaacgaacaaacccaactgctggggcagattgtactggcgaactttgccaacaacgaaggtctggcatccgaaggcgacaacgtctggtccgctacgcaatcttctggcgtggcgctgttggggacagccgggacgggcaactttggcacactgaccaacggtgcgctggaagcgtccaacgtcgttctcagtaaagaactggtcaatatgatcgttgcccagcgtaactatcagtctaacgcccagaccatcaaaacccaggaccagatcctcaatacgctggttaacttacgctaa

SEQ ID NO: 3556 - DNA, 696 bp, Escherichia coli
atgtctattgcggtaaccaccaccgatccgacgaataccggcgtcagtaccaccagcagtagttcgctcacgggcagcaacgccgcagatttacaaagcagttttctgactttgttggtggcgcagctgaaaaaccaggacccgaccaatccaatggaaaacaacgagctgacgtcgcaattggcacaaatcagcacggtcagtgggattgaaaaactcaataccacgctcggatctatttccggacagattgataacagccagtcgttacaggccagtaacctgattggtcacggcgtgatgatccccggtaccactgttcttgcgggaatcggcagtgaagaaggggctgtgaccacgaccacgccgtttggtgttgagttgcaacaggcagcagacaaagtgacggccaccatcaccgataaaaacggcgcggtcgtccgtaccattgatatcggtgaactgactgccggagtccacagtttcacctgggacggtacgttgactgacggcagcactgcgacgaatggttcttacaatgtagcgattagcgccagtaacggtggtacacaactggttgcccaaccgctgcagtttgctctggtgcagggggtgatccgcggcaacaacggtaatacgctggatctcggcacttacggcaccactaccctcgacgaagtacggcagataatttaa

SEQ ID NO: 3557 - DNA, 405 bp, Escherichia coli
atggcactgctgaatatttttgatatcgccgggtcggcgttaactgcccagtcccagcgcctgaacgtggcggccagtaatctggcgaatgctgatagcgtgaccggtcccgatggacagccatatcgggcaaaacaggtggtattccaggttaacgctgcgccaggtgctgcgacaggcggcgtaaaggttgccgatgttatagaaagtcaggctccggacaaactggtttatgaaccgggtaatccgctggcggatgcaaagggctacgtgaaaatgccaaacgttgatgtcgtcggagagatggttaacaccatgtcggcgtcacgcagttatcaggccaatgttgaagtgctcaacacggtgaaaagcatgatgctgaaaacccttacgctcggtcaataa

SEQ ID NO: 3558 - DNA, 417 bp, Escherichia coli
atgctcgataagctcgacgccgccttacgttttcaacaagaggcgctcaatctgcgcgcccagcgtcaggaagtgctggcagcaaacatcgccaatgccgatacccctggttatcaggcgcgcgatatcgattttgccagtgaacttaaaaaagtcatgcaacgtggacgggatgcaaccagtgtggttgctctgacgatgacctcaacgaaacacattccggcgcaggcgctgacgcctccttccgcagaactgcaataccgtattccggaccagccttcgcttgacgggaatactgtcgatatggatcgcgaacgcacccagtttgccgataacagcctgcaataccagatgagccttagcgcgttgagcgggcagatcaaaggcatgatgaacgttttacagagcggaaattaa

SEQ ID NO: 3559 - DNA, 660 bp, Escherichia coli
atgctgacaataaaacgtagcgtggcgatcatcgcgatactgttcagtccgttaagtacggcgagcaatctcacatcgcaattgcacaccttttttagcgcccaactcgcgggggtaagtgatgaggttcgtgtttctattcgtacagcacccaatctgctaccgccgtgcgatcagccattgctttcgatgagcaataattcccgtctgtggggcaatgtgaatgtgttggcacgctgcggtaacgacaaacgatatttacaggttaatgtgcaggccacaggaaattatgtggttgccgcgatgcccattgtgcgtggaggaaagctggaagctggcaatgtcaaactgaaacgcggacggctggataccttgccaccgcgtacggtgctggatatcaatcaacttgttgatgccgttagcctgcgcgatctatcacccgatcaacctatccagttaacccagtttcgccaggcatggcggataaaagcggggcaacgcgtcaacgttatcgccagcggtgatgggtttagcgccaacgcagaaggtcaggcgctgaacaatgcagccgtcgcacaaaatgcgcgggtgcgcatggtatcgggacaagtggtcagcggcgttgttgatgcagatgggaatattcttataaacctgtaa

SEQ ID NO: 3560 - DNA, 294 bp, Escherichia coli
atgagtattgatcgcacttcgcctctgaagcctgtaagcaccgttcaaccgcgcgaaaccactgacgcgccggtaacaaacacccgggcggcaaaaacaacagcctccaccagcaccagtgtgacgttaagcgacgcgcaagcaaaactgatgcaacccggcagcagtgatatcaatcttgaacgtgtcgaagcgttaaagctggcgattcgtaacggtgaactaaaaatggacaccggcaaaattgccgatgcgctgatcaacgaagcgcagcaagacttgcagagtaattga

SEQ ID NO: 3561 - DNA, 417 bp, Escherichia coli
atgacgcgtcttgcagagatcctcgaccagatgtccgctgtgcttaacgatctcaaaacggtaatggatcaagagcagcaacatctctctatggggcagatcaacggcagccagttgcaatggattacagaacaaaaaagctctctgctggcgacgctggattacctcgaacagttacgcaggaaagaacccaatacagcaaatagcgttgatattagtcaacgctggcaggaaattactggcaaaacgcagcaactacgccaactgaatcaacataacggctggttactggaaggacagattgaacgcaatcaacaggcgctggaaatgttgaaaccgcatcaggaaccgacgctgtatggggcgaacggtcagacctcaacaacccatcgcggcagtaaaaagatttcgatctga

SEQ ID NO: 3562 - DNA, 1536 bp, Escherichia coli
atgaatttattaaaatcgctggccgccgtcagctcgatgaccatgttttcgcgtgtgcttggcttcgcacgagacgcaattgtcgccagaatctttggcgcagggatggcaaccgacgcctttttcgtcgcttttaaacttcctaacttgttacgccgtatctttgccgaaggggcattttcccaggcatttgtaccgattctggcagaatataaaagcaagcagggtgaagacgccacgcgggtctttgtctcttatgtttctggcctgctgacacttgcgctggcggttgtgacggtcgctggcatgctcgctgcaccgtgggtgatcatggtgaccgcgcctggcttcgctgacactgccgacaaatttgccctgaccagccagctactaaagataacctttccctatatcttgctgatctccctggcgtcgctggtgggagcgattctgaatacctggaaccgcttctcaattccggcgtttgccccgacattgctcaatatcagcatgattggttttgcgttgtttgccgcgccgtactttaatccaccggtgctggcgctggcctgggctgttacggtcggcggcatcctgcagctggtgtatcagctacctcatctgaagaagatcggcatgctggttttgccacgcattaacttccacgatgccggagcaatgcgtgtggtgaaacagatgggaccggcaatccttggcgtctctgtgagccagatctccttaatcatcaacaccatttttgcctcgtttcttgcttccggttcggtgtcgtggatgtattacgccgaccgcttaatggagtttccgtccggtgtgctgggcgtggcgcttggcaccattttgctaccgtcgctgtcgaaaagttttgccagtggcaatcatgatgaatacaaccgtttgatggactgggggctgcgtctttgtttcctgttggcgctgccaagtgcggttgcgttgggcattctttccggtccgttaaccgtttcgctgttccagtacggtaaatttaccgcctttgatgcgctgatgacccagcgggcgttaattgcctactcggtgggtttgattggcctgattgtagtgaaagtgttggctcctggcttttattcccgccaggacattaaaacgccagtgaaaattgccatcgttacgctgattttaacgcaattgatgaacctggcgtttattggtccgttgaaacatgccgggctgtcactttctattggtctggcggcgtgtctgaatgcttcgctgctttactggcagttgcgtaagcagaaaatctttaccccgcaacccggctggatggcgtttctgttgcgtctggtggtggcggtactggtgatgtctggcgtgcttttaggtatgttacatatcatgccggagtggtcattgggtactatgccctggcgtttactgcgtttaatggcggtcgtgctggcggggattgccgcgtacttcgctgcactggcagtactgggcttcaaagttaaagaatttgcccgccggacggtgtaa

SEQ ID NO: 3563 - DNA, 924 bp, Escherichia coli
gtgaaaaaattacgtatcggcgtagtggggttaggcggcatcgcgcaaaaagcgtggttaccggtgctggcggcagcgtctgactggacgttacaaggtgcgtggtcgcctacgcgcgccaaagccttgccaatttgtgacagctggcgcattccttatgctgattcgttatccagccttgccgccagttgcgatgcggtttttgtgcattccagcaccgccagccactttgacgtggtcagtacgttactcaatgcgggggtacatgtctgtgtcgataaaccgctggcagaaaatctgcgcgatgctgaacggctggtggaactggcggcgcggaaaaaactgacgttgatggtcggttttaaccgtcgtttcgcaccactctacggtgagttaaaaacgcaactcgccaccgcgtcctcgctaagaatggataaacatcgtaccaatagcgtcgggccacacgatctttatttcacattgctggatgattatctgcatgtggtggataccgcgctgtggttgtctggcggcaatgcaactctcgaaagcggtacgttgctgaccaatgagtccggcgaaatgctgtttgccgagcaccattttttggctggtcctttgcagatcaccacctgtatgcatcgccgggccggaagtcagcgtgaaaccgtgcaggccgtgactgatggtgcgctcatcgacattacggatatgcgcgaatggcgtgaggagcgcgggcagggcgtagtgcataaaccgattcctggttggcagagtacgctcgagcaacgtggatttgtcggctgtgcgcggcacttcattgaatgcgtgcaaaatcagacagttccgcaaaccgccggcgaacaggccgtgctggcgcaacgtatcgttgacaagatctggcgcgatgcgatgagtgaataa

SEQ ID NO: 3564 - DNA, 648 bp, Escherichia coli
atgaaatatcaacttactgccatggaagctcgcgtgattggttgcttgctggaaaaacaggtgaccacgccggagcaatacccgctctccgtaaatggtgtagtcacggcctgtaatcagaaaacgaaccgtgaaccggttatgaatctgagtgaatctgaagtgcaggaacagctggataatctggtcaaacgtcattatctacgcacggtgagcggttttggtaatcgggtcaccaaatatgagcaacgtttttgtaattcagaatttggcgatctgaaactgagcgccgcagaagtggcgttaatcaccacgttgttattgcgtggtgcccagacgccgggggaactgcgcagccgcgccgcgcgaatgtatgaattcagcgatatggcggaagtggagtcgacgctggaacaactggcgagtcgcgaagatggtccttttgtggtgcgtctggcccgcgaaccgggtaaacgcgaaagccgctacatgcatcttttcagtggtgaggttgagaatccgccggcggtaacggatatgttgaacgcggttgacggtgatttacaggcccgtgtcgaagccctggaaatcgaagtggcagaactgaaacagcgtcttgattcgttgctggcccatctgggagattaa

SEQ ID NO: 3565 - DNA, 585 bp, Escherichia coli
atgtttggctatcgcagtaacgtgccaaaagtgcgcttaaccacagaccgactggtcgtgcgtctggtgcatgatcgtgatgcctggcgtctggcggattattacgcagagaatcgccatttcctcaagccctgggagccagtgcgcgacgaaagccactgttatccatcaggctggcaggccaggctagggatgattagcgaatttcataaacaaggttcagctttttactttggcttattcgacccggacgaaaaagagattattggcgttgccaatttttccaatgttgttcgcggctcttttcatgcctgctatctcggttattcgattgggcaaaaatggcagggcaaaggactcatgtttgaagccctgaccgcagccattcgttatatgcagcgcacccaacatattcatcgcattatggctaattatatgccgcacaataaacgcagcggtgatttactggcgcgactgggttttgaaaaagaaggctatgcgaaagactatctgttgattgatggacaatggcgcgatcacgtactgacggcattaactaccccagactggacgcccggccgctaa

SEQ ID NO: 3566 - DNA, 1209 bp, Escherichia coli
atgtcccgcgtgtcgcaggcgaggaacctgggtaaatatttcctgctcatcgataatatgctggtcgtgctggggttctttgttgtcttcccgctgatctctatccgcttcgttgatcaaatgggctgggccgccgtcatggtcggtattgccctcggtctacgccagtttattcagcaaggtctgggtattttcggcggcgcaattgccgaccgctttggtgccaaaccgatgattgtcaccggtatgctgatgcgtgccgccggattcgccacaatgggtatcgcccacgaaccgtggctactgtggttttcatgcctgctttcgggactcggcggcacgttgtttgatcctccgcgttcggcgctggtggtgaaactaatccgtccacaacagcgtggtcgttttttctcgctgttgatgatgcaggacagtgccggtgcggtcattggcgcattgttggggagctggctgttgcaatacgactttcgcctggtctgcgccacaggggcagttttgtttgtgctgtgtgcagcgttcaatgcgtggttgttaccggcatggaaactctccaccgtacgtacgcccgttcgcgaaggcatgacccgcgtgatgcgtgacaagtgttttgtcacctatgtcctgacgctggcgggttactacatgctggctgtacaagtgatgctgatgctgccaattatggtcaacgacgtggcgggcgcgccctctgccgttaaatggatgtatgccattgaagcgtgtctgtcgttaacgttgctctaccctatcgcccgctggagtgaaaagcattttcgtctggaacaccggttaatggctgggctgttgataatgtcattaagcatgatgccagtaggcatggtcagcggcctgcaacaacttttcaccctgatttgtctgttttatatcgggtcgatcattgccgagcctgcgcgtgaaaccttaagtgcttcgctggcagacgcaagagctcgcggcagctatatggggtttagccgtctgggtctggcgattggcggcgctattggttatatcggtggcggctggctgtttgacctgggcaaatcggcgcaccagccagagcttccgtggatgatgctgggcattattggcatcttcactttccttgcgctgggttggcagtttagccagaaacgcgccgcgcgtcgtttgcttgaacgcgacgcctga

SEQ ID NO: 3567 - DNA, 648 bp, Escherichia coli
gtgaagctatacatttacgatcactgcccttactgcctcaaagcccgcatgattttcggcctgaaaaatatccccgtcgaattacatgttctgctcaacgacgacgcagaaacacccacccggatggtcggtcaaaaacaggttcccattctgcaaaaagatgacagccgctatatgccagaaagcatggacatcgttcactatgtcgataaactcgacggcaaaccgttactgaccggcaaacgttcccctgccattgaagagtggctgcgcaaggtcaatggctacgccaacaaactgctgttgccgcgttttgccaaatcggcatttgatgagttttctactcctgccgcgcgcaaatatttcgtcgacaagaaagaggccagcgcgggtaattttgccgacctgctggcccactctgacggtctgattaagaatatcagcgatgatttacgtgcgctggacaaactgatcgtcaaaccgaacgccgtgaatggcgaactttcggaagatgatattcagctatttccgctcctgcgtaatctgacgctagtagccggaatcaactggccaagccgcgttgctgattaccgcgataatatggcgaaacagacacaaatcaatttgttatcatcaatggcgatttaa

SEQ ID NO: 3568 - DNA, 561 bp, Escherichia coli
atgaacaagtttttatttgccgctgcattgatcgtcagtggcctgctcgttggctgtaatcaactcacccaatacaccatcaccgaacaagaaattaaccagtcgcttgcgaaacataataatttctcaaaagatatcggtttacccggcgtggctgacgcccatattgttctgacaaacctgaccagccaaattggtcgcgaagagccgaataaggttaccctaaccggagacgccaatctggacatgaactccctgttcggtagccagaaagcgaccatgaaactgaagctgaaagcgctgcccgtgtttgataaagaaaaaggtgcgatcttcctgaaagagatggaagtggtcgatgcgacggtacaaccggaaaaaatgcaaacggtgatgcaaacgttgctcccctatttgaaccaggcattacgcaattactttaaccagcaacctgcttacgtcctgcgcgaagatggcagccagggcgaagcaatggcgaagaaactggcgaaaggcattgaagtgaagccaggcgaaattgtcattccgtttacggattaa

SEQ ID NO: 3569 - DNA, 1047 bp, Escherichia coli
atgactgcaccatcccaggtattaaagatccgccgcccagacgactggcaccttcacctccgcgatggcgacatgttaaaaactgtcgtgccgtataccagcgaaatttatggacgggctatcgtaatgcccaatctggctccgcccgtgaccaccgttgaggctgccgtggcgtatcgccagcgcattcttgacgccgtacctgccgggcacgatttcaccccgctgatgacctgttatttaacagattcgctggaccctaatgagctggagcgcggatttaacgaaggcgtgttcaccgctgcaaaactttatccggcaaacgcaaccactaactccagccacggcgttacgtcagttgacgcaatcatgccggtacttgagcgcatggaaaaaatcggtatgccgctactggtgcatggtgaagtaacacatgcagatatcgacatttttgatcgtgaagcgcgctttatagaaagcgtgatggaaccgctgcgccagcgcctgaccgcgctgaaagtcgtttttgagcatatcaccaccaaagacgctgccgactatgtccgtgacggaaatgaacggctggctgccaccatcactccgcagcatctgatgtttaaccgcaaccatatgctggttggtggcgtgcgtccgcacctgtattgtctacccatcctcaaacgcaatatccaccaacaggcattgcgtgaactggtcgccagcggttttaatcgtgtattcctcggaacggattctgcgccacatgcacgtcatcgcaaagagagcagctgcggctgcgcgggctgtttcaacgccccaaccgcgctgggcagttacgctaccgtctttgaagagatgaatgctttgcagcactttgaagcattctgttctgtaaacggcccgcagttctatggcttgccggtcaacgacacattcatcgaactggtacgtgaagagcaacaggttgctgaaagcatcgcactgactgatgacacgctggtgccattcctcgccggagaaacggtacgctggtccgttaaacaataa

SEQ ID NO: 3570 - DNA, 246 bp, Escherichia coli
atgcgaattgaagtcaccatagcgaaaacttctccattgccagctggggctattgacgccctggctggcgaactttcccgccgtattcagtatgcgtttcctgataatgaaggccacgtatcggtacgttatgccgcagcaaataatttatcggttattggcgcgacaaaagaagataaacagcgcattagcgaaattctccaggaaacgtgggaaagcgccgatgactggtttgtcagcgaataa

SEQ ID NO: 3571 - DNA, 255 bp, Escherichia coli
atggaaaaaaataatgaagtcattcagactcatccgctcgtagggtgggacatcagcaccgttgatagctatgatgcgctgatgttgcgtttgcactaccagaccccaaataagtccgagcaggaagggactgaagttggtcagacgctctggttaaccactgatgttgccagacaatttatttcgatattagaagcaggaatcgccaaaattgaatccggtgatttccaggtaaacgagtatcggcgtcattaa

SEQ ID NO: 3572 - DNA, 1119 bp, Escherichia coli
atgaaatacgatctcatcattattggcagcggttccgtaggcgctgccgccgggtattatgcaacccgcgccggtttaaacgtgctaatgaccgacgcccatatgccaccacatcaacacggcagccaccacggcgatacgcgattaattcgccatgcttatggtgaaggtgaaaagtatgtcccgctggtcctccgcgcgcaaatgctgtgggatgaactttcccgccacaacgaagatgatcccatttttgtacgctctggtgtcattaacctcggtccggctgactccgcatttctcgccaacgtcgcccacagcgccgaacagtggcaactcaacgttgaaaagctcgacgcgcaagggattatggcccgctggccagaaatacgcgtcccggacaactacatcggtttatttgaaactgattccggttttttgcgcagcgaactggcgattaaaacctggatccaactggcgaaggaagcgggctgtgcgcagctgttcaactgcccggtcaccgcaattcgtcatgacgatgatggcgtaactattgaaacggctgacggtgagtatcaggcgaaaaaagcgattgtctgcgcgggaacatgggtaaaagacctactcccggagctgcctgtccagcccgtacgcaaagtatttgcctggtatcaggccgatggccgctatagcgtgaagaataaattcccggcttttaccggtgaactgcccaatggcgatcaatattatggttttccggcagaaaacgacgcgttgaagattggcaaacataacggaggccaggttatccattcagcggatgaacgtgttccgtttgcggaagtggccagtgatgggtcagaagccttcccgttcttgcgcaatgtattgccgggtatcggttgctgcctgtacggcgctgcctgcacctatgataattcgcctgacgaagattttattatcgatactctacccgcccacgataatacactgctcattaccggcctgagtgggcacggttttaaatttgcgtcagttttaggggaaatggctgccgattttgcgcaagacaaaaaaagcgattttgatttgacgccattcaggctttcccgcttccaataa

SEQ ID NO: 3573 - DNA, 567 bp, Escherichia coli
atgtcattcacaaatacccctgaacgctatggtgttatatctgcggccttccattggctaagcgcaattattgtctacggcatgtttgctttaggtctgtggatggtcacgctcagttattacgatggctggtatcacaaagcacccgaactgcataaaagcatcggtattttgttaatgatggggctggttattcgcgttctgtggcgtgtcatatctccaccgccgggtccgctgccgagttattcgcccatgactcgtcttgccgcaaaagctggacatctcgcattgtacctattgctgttcgccatcggcatcagcggctatctgatctcaactgccgatggtaaaccgatcagcgtttttggctggtttgacgtccccgcgaccctcgccgacgctggcacacaggctgactttgccggtgccctgcatttttggctcgcgtggagcgtcgtcgtactgtccgttatgcacggatttatggctctgaagcatcatttcatcgataaagacgacactctgaagcgcatgctgggaaagtcgtcatctgactatggagtataa

SEQ ID NO: 3574 - DNA, 576 bp, Escherichia coli
atgaaaaaaagcctgcttggtttaaccttcgcttccttgatgttctctgccggttcagcggttgccgccgattacaaaattgacaaagaaggtcagcacgcctttgttaacttccgcatccagcatcttggctatagctggttatatggcacctttaaagatttcgacggtacttttacctttgatgaaaaaaatccagctgccgataaagtgaatgtgacaattaacaccaccagcgtcgatactaatcacgccgaacgcgataaacatcttcgcagtgcggatttcctcaataccgcaaaatatccacaggcaacattcacctccaccagcgtgaagaaagacggtgacgaactggatattaccggcgatctgacgctgaatggtgtaaccaagcccgtcacactggaagcgaaattaattggtcagggtgacgacccgtggggcggtaaacgtgcaggctttgaggccgaaggcaaaattaagctcaaagacttcaatatcaagacagatttaggtccagcgtctcaggaagtggatctgattatttcagtggaaggcgtacagcagaagtaa

SEQ ID NO: 3575 - DNA, 1053 bp, Escherichia coli
atgccagtgttacacaaccgcatttccaacgacgcgttaaaagccaaaatgttggctgagagcgaaccgcgaaccaccatttcgttttataagtatttccacattgccgatcctaaggtgacccgtgacgctttatatcaactgtttaccgcgctgaatgtttttgggcgagtgtatctggcgcatgagggcattaacgcgcaaatcagcgtacctgcgagcaatgttgaaacatttcgcgcgcagctctatgccttcgacccggctttagagggtttacgcctgaacatcgcgttggatgatgacgggaaatccttctgggtactgcgtatgaaggtacgcgatcgcattgttgccgacggtattgacgatcctcactttgatgccagcaatgttggtgagtatctgcaagcggcggaagtgaacgccatgcttgacgatcccgatgcattgtttatcgacatgcgtaaccactatgagtatgaagtggggcactttgaaaacgcgctggaaataccggcagataccttccgtgagcagctgccaaaagcagttgagatgatgcaggcacataaagataaaaaaattgtcatgtactgcaccggcggcattcgttgtgaaaaggccagtgcctggatgaaacataacggattcaacaaagtctggcatatcgagggcggaattattgaatacgcccgtaaggcgcgcgagcagggcttgccggtgcgttttattggcaaaaattttgtttttgacgagcggatgggcgaacgtatatctgatgagattatcgcgcactgccaccagtgcggtgcgccgtgcgacagccataccaactgtaaaaatgatggctgccatctgctgtttattcagtgtccagtatgtgcggaaaaatacaaaggttgttgtagtgagatttgctgcgaagaaagcgcgttaccgccagatgaacagcgacgccgtcgggcaggacgtgaaaatggcaataagatctttaataagtctcgtggacgtctgaatacaacactgggcattcctgatccaacagaataa

SEQ ID NO: 3576 - DNA, 921 bp, Escherichia coli
atgacgaatctacccaagttctccaccgcactgcttcatccgcgttattggttaacctggttgggtattggcgtactttggttggtcgtgcaattgccctacccggttatctaccgcctcggttgtggattaggaaaactggcgttacgttttatgaaacgacgcgcaaaaattgtgcatcgcaacctggaactgtgcttcccggaaatgagcgaacaagaacgccgtaaaatggtggtgaagaatttcgaatccgttggcatgggcctgatggaaaccggcatggcgtggttctggccggaccgccgaatcgcccgctggacggaagtgatcggcatggaacacattcgtgacgtgcaggcgcaaaaacgcggcatcctgttagttggcatccattttctgacactggagctgggtgcgcggcagtttggtatgcaggaaccggggattggcgtttaccgcccgaacgataatccactgattgactggctacaaacctggggccgtttgcgctcaaataaatcgatgctcgaccgcaaagatttaaaaggcatgattaaagccctgaaaaaaggcgaagtggtctggtacgcaccggatcatgattacggcccgcgctcaagcgttttcgtcccgttgtttgccgttgagcaggctgcgaccacgaccggaacctggatgctggcacggatgtccggcgcatgtctggtgcccttcgttccacgccgtaagccagatggcaaagggtatcagttgattatactgccgccagagtgttctccgccgctggatgatgccgaaactaccgccgcgtggatgaacaaagtggtcgaaaaatgcatcatgatggcaccagagcagtatatgtggttacaccgtcgctttaaaacacgcccggaaggcgttccttcacgctattaa

SEQ ID NO: 3577 - DNA, 1128 bp, Escherichia coli
atgcccttcttacccctctacgttgagcagcttggcgttaccggccactccgccctgaatatgtggtccggtattgtcttcagcattacatttttattttcggccatcgcctcaccgttttggggtggactcgccgaccgtaaaggccgaaaactcatgctattacgctctgctctcggcatgggcatcgtgatggtgttgatgggactggcacaaaatatctggcagtttttgatcctgcgggcgcttcttggtttacttggcggatttgtccccaacgctaatgctcttatcgccacacaagtaccgcgtaataaaagcggctgggcgctgggtacgctctccacaggcggcgttagcggcgcgttgctcggcccaatggctggcggtttgctcgccgatagctacggcttacgtccggtattctttattaccgccagtgtgctcatactctgctttttcgtcaccctgttttgcatcagagaaaaattccagccggtcagcaaaaaagagatgctgcatatgcgggaagtggtgacatcacttaaaaacccgaaactggtactcagcctgtttgtcaccacgttaatcatccaggtggcgacgggctcaattgcccccattctgacgctgtatgtccgcgaactggcgggtaacgtcagtaacgtcgcttttatcagtggcatgatcgcctcggtgccaggcgtggcggctctgctaagtgcaccacgactcggcaaacttggcgatcgaatcggccccgaaaagatcctgattacggcgctgatcttttctgtactgctgttgatcccaatgtcttacgttcagacgccattacaacttgggattttacgttttttgctcggtgccgccgatggtgcattactccccgccgtacagacactgttggtttacaactcgagcaaccagatcgccgggcgtatcttcagctataaccaatcgtttcgtgatattggcaacgttaccggaccattgatgggagcagcgatttcagcgaactacggtttcagggcggtatttctcgtcaccgctggcgtagtgttattcaacgcagtctattcatggaacagtctacgtcgtcgtcgaatcccccagatatcgaactga

SEQ ID NO: 3578 - DNA, 375 bp, Escherichia coli
atgaccatgtacgcaacgcttgaagaagccattgacgctgcccgcgaagaatttcttgcagacaaccccggcatcgacgccgaaaacgcgaatgtgcaacagttcaatgcccaaaaatacgttttgcaggacggcgacatcatgtggcaagttgagttttttgccgacgaaggggaagaaggtgaatgtttacccatgcttagcggtgaagctgcgcaaagtgtctttgacggcgactatgatgagatagagatccgccaggagtggcaagatgagaatacattacatgaatgggacgagggggaatttcagcttgagccaccgctggataccgaggaaggacgcactgcagctgatgagtgggatgaacgttaa

SEQ ID NO: 3579 - DNA, 228 bp, Escherichia coli
atgcgtttaattgtgatgagcataatggtgaccttgctgagtggctgtggcagcatcattagtcgcactataccggggcaggggcatggcaaccaatattatcccggtgtgcaatgggacgtgcgtgactccgcctggcgttacgtcacgatccttgatctgccattctccctggttttcgatactttactgctgccgatcgacgtacatcatggcccgtatgagtga

SEQ ID NO: 3580 - DNA, 2514 bp, Escherichia coli
atgcccatcgccgcaagcgagaaagcggcattgccgaagactgatatccgcgccgttcatcaggcgctggatgccgaacaccgcacctgggcgcgggaggatgactccccgcaaggctcggtaaaggcgcgtctggaacaagcctggccagattcacttgctgatggacagttaattaaagacgacgaagggcgcgatcagctaaaggcgatgccagaagtaaaacgctcctcgatgtttcccgacccgtggcgtaccaacccggtaggccgtttctgggatcgcctgcgtggacgcgatgtgacgccgcgctatctggctcgtttgaccaaagaagagcaggagagtgagcaaaagtggcgtaccgtcggtaccatccgccgttacattctgttgatcctgacgctcgcgcaaactgttgtcgcgacctggtatatgaagaccattcttccttatcaggggtgggcgctgattaatcctatggatatggttggtcaggatgtgtgggtttcctttatgcagcttctgccttatatgctgcaaaccggtatcctgatcctctttgcggtactgttctgttgggtgtccgccggattctggacggcgttgatgggcttcctgcaactgcttattggtcgcgataaatacagtatatctgcgtcaacagttggcgatgaaccattaaacccggagcatcgcacggcgttgatcatgcctatctgtaacgaagacgtgaaccgtgtttttgctggcttgcgtgcaacgtgggaatcagtaaaagccaccgggaatgccaaacattttgatgtctacattcttagtgacagttataacccggatatctgcgtcgcagagcaaaaagcctggatggagcttatcgctgaagtcggtggcgaaggtcagattttctatcgccgccgccgccgtcgcgtgaagcgtaaaagcggtaatatcgatgacttctgccgtcgctggggcagccagtacagctacatggtggtgctggatgctgactcggtaatgaccggtgattgtttgtgcggcctggtgcgcctgatggaagccaacccgaacgccgggatcattcagtcgtcgccgaaagcgtccggcatggatacgctgtatgcgcgctgtcagcagttcgcgacccgcgtgtatgggccactgtttacagccggtttgcacttctggcaacttggcgagtcgcactactgggggcataacgcgattatccgcgtgaaaccgtttatcgagcactgtgcactggctccgctgccgggcgaaggttcttttgccggttcaatcctgtcacatgacttcgtggaagcggcgttgatgcgccgtgcaggttggggggtctggattgcttacgatctcccgggttcttatgaagaattaccgcctaacttgcttgatgagctaaaacgtgaccgccgctggtgccacggtaacctgatgaacttccgtctgttcctggtgaagggtatgcacccggttcaccgtgcggtgttcctgacgggcgtgatgtcttatctctccgctccgctgtggtttatgttcctcgcgctctctactgcattgcaggtagtacatgcgttgaccgaaccgcaatacttcctgcaaccacggcagttgttcccggtatggccgcagtggcgtcctgagctggcgattgcactttttgcttcgaccatggtgctgttgttcctgccgaagctattgagcattttgcttatctggtgcaaaggaacgaaagaatacggcggcttctggcgcgttacattatcgttgctgctggaagtgctgttttccgtgctgctggctccggttcgcatgttgttccatacggtcttcgtcgtcagcgcgttccttggctgggaagtagtgtggaattcgccgcagcgtgatgatgactccacttcctggggggaagcgttcaaacgccacggctcacagctgctgttagggttagtgtgggctgttgggatggcgtggctggatctgcgttttctgttctggctggcaccgattgtcttctcgttgatcctgtcaccgtttgtttcggttatttccagccgtgccaccgttggtctgcgaaccaaacgctggaaactgttcctgatcccggaagagtattcaccgccgcaggtgctggttgataccgatcggttccttgagatgaatcgtcaacgctcccttgatgatggttttatgcacgcggtgtttaacccgtcatttaacgctctggcaaccgcaatggcgaccgcgcgtcaccgcgccagcaaggtgctggaaatcgcccgtgaccgccacgttgaacaggcgctgaacgagacgccagagaagctgaatcgcgatcgtcgcctggtgctgctaagcgatccggtgacgatggcccgtctgcatttccgcgtctggaattccccggagagatattcttcatgggtgagttattacgaagggataaagctcaatccactggcattgcgtaaaccggatgcggcttcgcaataa

SEQ ID NO: 3581 - DNA, 1503 bp, Escherichia coli
atgttaaccctgtatacatcttcaagctgggctttcagtattgatgatgtcgcaaagcaagctcaatccttagccgggaaaggctatgaggcgcccaaaagcaacttgccctccgttttccgcgatatgaaatacgcggactatcagcagatccagtttaatcatgacaaagcgtactggaacaatctgaagaccccattcaaactcgagttctaccatcagggtatgtacttcgataccccggtcaaaataaatgaagtgactgccaccgcagtcaaacgaatcaaatacagcccggattatttcactttcggcgatgttcagcatgacaaagacacggtaaaagaccttggttttgccggtttcaaagtgctttacccgatcaacagcaaagataaaaacgatgaaatcgtcagcatgctcggggccagctatttccgcgtgattggtgcaggtcaggtttatggcctttctgcacgcggcctggcaattgataccgccttgccatcgggtgaagaatttccacgcttcaaagagttctggatcgagcgtccaaaaccgactgataaacgtttaaccatttatgcattgcttgactcgccgcgcgcgacaggtgcttacaaattcgtagttatgccaggacgtgacacggttgtggatgtgcagtcgaaaatctatctgcgcgataaagtcggcaaactgggggttgcaccgttaaccagtatgttcctgtttgggccgaaccaaccgtcgcctgcaaataactatcgtccggagttgcacgactctaacggtctgtctatccatgctggtaatggcgaatggatctggcgtccgttgaataacccgaaacatttagcggtcagcagcttctcgatggaaaacccgcaaggcttcggtctattgcagcgtggtcgtgatttctcccgctttgaagatctcgatgatcgttacgatcttcgtccaagcgcatgggtgactccgaaaggggagtggggcaaaggcagcgttgagctggtggaaattccaaccaacgatgaaaccaacgataacatcgtcgcttactggacgccggatcagctgccggagccgggtaaagagatgaactttaaatacaccatcaccttcagccgtgatgaagacaaactgcatgcgccagataacgcatgggtgcaacaaacgcgtcgttcaacgggggatgtgaagcagtcgaacctgattcgccagcctgacggtactatcgcctttgtggtcgattttaccggcgctgagatgaaaaaactgccagaggataccccggtcacagcgcaaaccagcattggtgataatggtgagatagttgaaagcacggtgcgttataacccggttaccaaaggctggcgtctggtgatgcgtgtgaaagtgaaagatgccaagaaaaccactgaaatgcgtgctgcgctggtgaatgccgatcagacgttgagtgaaacctggagctaccagttacctgccaatgaataa

SEQ ID NO: 3582 - DNA, 1158 bp, Escherichia coli
atgaatccagtacccgcgcaacgtgaatatttcctcgactccatccgcgcctggctgatgttgttagggatcccttttcatatttctttaatctattcgagccatacatggcatgtgaatagcgccgaaccgtcattgtggctgaccctttttaatgacttcatccactcgttccgcatgcaggtgtttttcgttatatccgggtacttttcctacatgctttttttacgctatcccttgaaaaaatggtggaaagtacgtgtcgaacgtgtagggatcccgatgttaacagccatccccttactgacattgccgcaatttattatgctgcaatacgtcaaagggaaagcggaaagttggcctaggctgtcattgtatgacaaatataatacgttggcctgggaattaatatcacacctgtggtttttactggtgttagtggtcatgacgacgctgtgcgtatggatatttaaacgcatcagaaataatttagaaaattctgataaaacgaataaaaaattctcgatggtaaaattatcggtgatttttttgtgcctcggcatcggttatgcggtaataagaagaacgatttttattgtgtatccacccattctgagtaacggcatgttcaattttattgtcatgcaaacgttattttatttgccgttctttatcctcggcgcactggctttcattttccctcatcttaaagccttgtttaccacgccgtctcgtggctgtacccttgcagcagcattggcgtttgtcgcttatttactcaaccagcgctatggcagtggcgatgcctggatgtatgaaaccgagtcggtgatcactatggtcctcggtctgtggatggtgaatgtggtcttctcctttggccaccgtttgcttaacttccagtcagcgcgggtgacttattttgttaacgcatcgctgtttatctatctggttcaccacccgttaacgctgtttttcggcgcatacattacaccacacatcacctccaactggcttggttttctctgtggcctgatattcgtagtagggattgcgataattctgtatgaaattcatttacgcatcccattattgaagtttttgttctctggtaaaccggttgttaagcgtgagaacgataaagcaccagcccgttaa

SEQ ID NO: 3583 - DNA, 1482 bp, Escherichia coli
atgatgaagaaaacgcccacctctacgaaagactccttacccaacaaggagatgaatgatttgcctcagctggcgagcgcggtgctgccactgtgttcgcaacatcccggtcagtgtggactttttcctctggagaaaagtctggatgcgtttgccgcccggtatcgtctggctgaaatggcagagcatacactggatgttcagtattacatctggcaggacgatatgtcgggtcggttactgttttccgccctgttagccgcagcaaagcgtggcgttcgcgtacgtttgttgctggacgacaacaatacgcccggacttgataacattttacgcttgcttgacagccatccacgcattgaagtccggctttttaatcctttctcgtttcgcttgctacgtccgcttggttatatcaccgacttttcccgtctcaatcgccgtatgcacaataaaagtttcactgtcgatggcgtggtgacgctggtgggaggacgaaatattggtgatgcctattttggtgcaggggaagagccacttttttcggatttagatgtcatggcaataggacccgtggtagaggacgttgccgatgatttcgcccgctattggtattgcaaatcggtttcacccttacagcaggtgctggatgtcccggaaggtgaaatggcggatcgcatcgagttaccggcatcctggcatgacgatgccatgacgcatcgttatttacgcaaaatggaatccagtccgtttatacatcatctggttgatggaacgttgtcgcttatctgggcgaaaacacgtttattaagtgatgatccggcgaaaggggagggcaaggcaaaacggcattcactgttaccgcagcgcctgttcgatatcatgggctcacccagtgaacgcatcgatattatctcttcctattttgtaccgacacgtgcaggtgtggcgcaactcttacggatggtgagaaaaggggtaaagattgcgatcctaaccaattctcttgccgctaacgatgttgctgtcgtccatgcaggatacgcgcgctggcgcaaaaaattgctccgctatggggtggaattatatgaactcaagccgacgcgtgaacaaagtagtacgttacacgatcgcggcataaccggtaattcaggggccagcctgcatgctaaaacctttagtatcgatggtaaaacggtgtttatcggctctttcaatttcgatccgcgttcaacgttgctcaatactgaaatgggcttcgtgatagagagcgaaacgctggcacagttaattgataaacgctttattcagagccagtatgatgcggcctggcagctccgtctggacaggtggggacggatcaactgggttgatcgtcatgcaaagaaagagattattctcaaaaaagaacccgccaccagtttctggaagcgggttatggtcaaactggcgtcgatattgcccgtggaatggttattgtaa

SEQ ID NO: 3584 - DNA, 531 bp, Escherichia coli
atgaaaacgcgtattcatgttgtgcagggtgatatcaaactggccgttgatgtgattgtgaatgcggctaatccgtcattaatgggaggcggcggcgtcgatggggccattcatcgcgcagcgggtccggccctgctggatgcctgtttaaaagtcaggcagcagcagggcgattgccctacggggcatgccgttattacgcttgcaggcgatcttcccgcgaaagccgtagtgcacaccgtcgggccagtctggcgtggtggtgaacaaaacgaagaccagcttttgcaggatgcctatctcaatagcctgcgactggtggcagcaaacagctatacgtcagtggcttttcctgcaatcagtactggggtttatggttacccccgtgcggcagcggctgaaatcgcagtaaaaaccgtttcagaatttattacccgtcacgctttacccgaacaggtatactttgtctgttatgatgaagaaaacgcccacctctacgaaagactccttacccaacaaggagatgaatga

SEQ ID NO: 3585 - DNA, 312 bp, Escherichia coli
atgttcagaccttttttaaactctcttatgctcggcagtttgttttttccttttattgccattgcaggaagcagcgcgcaagggggcgtgatccatttttatggccaaattgtggaaccggcatgtgacgtcagcacccagtcatcagccgtagaaatgaactgcccacagaatggttctgttccgcgtaaaacctattccagcaaagcgttaatgagcggcaatgttaaaaacgcgcaaatagcctcagtaaaagtgcagtatcttgataaacagaaaaagctggctgtaatgaacatcgaatataactaa

SEQ ID NO: 3586 - DNA, 333 bp, Escherichia coli
atgaatgcgttattactccttgcggcactttccagtcagataacctttaatacgacccagcaaggggatatgtacaccattattcctgaagtcactcttactcaatcttgtctgtgcagagtacaaatattgtccctgcgcgaaggcagttcagggcaaagtcagacgaagcaagaaaagaccctttcattgcctgctaatcaactcattgctttgacgaagttgagtttaaatatttccccggacgatcgggtgaaaatagttgttactgtttctgatggacagtcacttcatttatcacaacaatggccgccctcttcagaaaagtcttaa

SEQ ID NO: 3587 - DNA, 459 bp, Escherichia coli
atgaaacttttaaaagtagcagcaattgcagcaatcgtattctctggtagcgctctggcaggtgttgttcctcagtacggcggcggcggtggcaaccacggtggtggcggtaataacagcggcccgaattcagagctgaatatttaccagtacggtggcggtaactctgctcttgctctgcaagctgacgcccgtaactctgatctgaccattacccagcacggcggcggtaatggcgcagatgtgggccaaggttctgatgacagctcaatcgatctgactcagcgtggtttcggcaacagcgctactcttgatcagtggaatggtaaagattctactatgactgttaaacagttcggtggcggtaacggtgctgctgttgaccagactgcatctaactccagcgttaacgtcactcaggttggctttggtaacaacgcgaccgctcatcagtactaa

SEQ ID NO: 3588 - DNA, 456 bp, Escherichia coli
atgaaaaacaaattgttatttatgatgttaacaatactgggtgcgcctgggattgcagccgcagcaggttatgatttagctaattcagaatataactttgcggtaaatgaattgagtaagtcttcatttaatcaggcagccataattggtcaagctgggactaataatagtgctcagttacggcagggaggctcaaaacttttggcggttgttgcgcaagaaggtagtagcaaccgggcaaagattgatcagacaggagattataaccttgcatatattgatcaggcgggcagtgccaacgatgccagtatttcgcaaggtgcttatggtaatactgcgatgattatccagaaaggttctggtaataaagcaaatattacacagtatggtactcaaaaaacggcaattgtagtgcagagacagtcgcaaatggctattcgcgtgacacaacgttaa

SEQ ID NO: 3589 - DNA, 651 bp, Escherichia coli
atgtttaatgaagtccatagtattcatggtcatacattattgttgatcactaaaccttctttgcaggcgacagctctcttgcagcaccttaaacaatcgctggcaattacaggaaaattacataatattcaacgttctctggacgatatatcttcaggctctattattcttctggatatgatggaagcggataaaaagcttatccattattggcaggatactttgagcaggaaaaacaacaatatcaaaatattgttgctaaatacgcctgaagattacccgtaccgcgacattgaaaactggcctcatatcaacggcgttttttatgccatggaggatcaagaacgtgttgtcaatgggttgcaaggcgtcctgcgcggcgaatgctgctttacgcaaaagcttgccagttacctgattacgcattcaggtaactatcgttataacagcacggaatcagccctccttactcatcgggaaaaagagatcctgaataagctgcgtatcggcgcgtctaataacgagatcgctcgttcgttgttcatcagcgaaaatacggttaaaacgcatctttataatcttttcaagaagatagccgtaaaaaaccggacacaagcggtttcctgggcaaacgataacctcaggcgataa

SEQ ID NO: 3590 - DNA, 390 bp, Escherichia coli
atgaaacgttatttacgctggattgtggcggcagaatttctgttcgccgcagggaatcttcacgccgttgaggtagaagtcccgggattgttaactgaccatactgtttcatctattggccatgatttttaccgagcctttagtgataaatgggaaagtgactatacgggtaacttaacgattaatgaaaggcccagtgcacgatggggaagctggatcacaataacggtgaatcaggacgttattttccagacttttttatttccgttgaaaagagacttcgagaaaactgtcgtctttgcactgattcaaactgaagaagcactaaatcgtcgccagataaaccaggcgttattaagtacgggcgatttggcgcatgatgaattttaa

SEQ ID NO: 3591 - DNA, 417 bp, Escherichia coli
atgcgtgtcaaacatgcagtagttctactcatgcttatttcgccattaagttgggctggaaccatgactttccagttccgtaatccaaactttggtggtaacccaaataatggcgcttttttgttaaatagcgctcaggcccaaaactcttataaagatccgagctataacgatgactttggtattgaaacgccctcggcgttagataactttactcaggccatccagtcacaaattttgggtgggctactgtcgaatattaataccggtaaaccgggccgcatggtgaccaacgattatattgttgatattgctaaccgcgatggtcaattgcagttgaacgtgacagatcgtaaaaccggacaaacctcgaccatccaggtttcgggtttacaaaataactcaaccgatttttaa

SEQ ID NO: 3592 - DNA, 834 bp, Escherichia coli
atgcagcgcttatttcttttggttgccgtcatgttactgagcggatgcttaaccgccccgcctaaagaagccgccagaccgacattaatgcctcgtgctcagagctacaaagatttgacccatctgccagcgccgacgggtaagatctttgtttcggtatacaacattcaggacgaaaccgggcaatttaaaccctacccggcaagcaacttctccactgctgttccgcaaagcgccacggcaatgctggtcacggcattgaaagattctcgctggtttataccgctggagcgccagggcttacaaaatctgcttaacgagcgcaagattattcgtgcggcacaagaaaacggcacagttgccattaataaccgaatcccgctgcaatctttaacggcggcaaatatcatggttgaaggttcgattatcggttatgaaagcaacgtcaaatcgggcggggttggggcaagatattttggaatcggtgccgacacgcaataccagctcgatcagattgccgtgaacctgcgcgtcgtcaatgtgagtaccggtgagatcctctcctcggtgaacaccagtaagacgatactttcttatgaagttcaggccggggttttccgctttattgactaccagcgcttgctggaaggggaagtgggttacacctcgaacgaacctgttatgctgtgcctgatgtcggctatcgaaacaggggtcattttcctgattaatgatggtatcgaccgtggtctgtgggatttgcaaaataaagcagaacggcagaatgacattctggtgaaataccgccatatgtcggttccaccggaatcctga

SEQ ID NO: 3593 - DNA, 522 bp, Escherichia coli
atggccgcgttttctgctatcatgcgcggcatgaacatacttctctctattgcaatcacaacaggcattctctccggtatctggggatgggtggctgtttccctgggcttactaagctgggcgggcttcctgggctgtacggcctactttgcctgcccgcaaggtgggctgaaagggctggcgatctccgctgcaaccctgcttagtggcgtggtgtgggcgatggtcattatttacggtagtgcattggcaccacatctggaaatactcggttatgtaataaccggtattgtcgcgtttctgatgtgtatccaggcgaaacagctgctgctttcatttgttccggggacgtttataggcgcatgcgcgacgtttgccgggcagggtgactggaaactggtgttaccttcgctggcgcttggactggtatttggttacgcaatgaaaaacagcggcctgtggttggcggcgcgtagtgcaaagacagctcaccgtgagcagcaaatcaaaaataaagcgtga

SEQ ID NO: 3594 - DNA, 555 bp, Escherichia coli
atgaacgagttttctatcctctgtcgtgtgctgggttcgctctattaccgccaaccacaagatcctttactggtgccgctgtttaccctgattcgtgaggggaaactggctgcgaactggccactggagcaggatgagttgctgacacgtttgcagaaaagctgtgatatgacgcaagtctctgccgattacaatgcgttgtttatcggcgatgaatgtgctgtgccgccatatcgtagcgcatgggttgagggcgcaacggaagcggaagtgcgcgcttttctttccgaacgagggatgccactagcggatacgccagccgatcacatcggcacattgctgcttgcggcttcctggctggaagatcagtcaacggaagatgagagcgaagcactggaaacactgttcagtgagtatctgttaccctggtgtggtgcgttccttggcaaagtggaggcccatgcaactacgcctttctggcgcaccatggcaccgctaacccgcgatgctattagtgcaatgtgggacgagctggaagaagattctgaagagtaa

SEQ ID NO: 3595 - DNA, 738 bp, Escherichia coli
atgtatcccgtcgaccttcatatgcataccgttgccagcacgcatgcatatagcacattgagtgattacattgcccaggccaaacaaaagggcattaaactttttgcgatcaccgatcatggcccggatatggaagatgcgccgcatcactggcacttcattaacatgcgtatctggccgcgagtggttgatggggtagggatcctgcgcggcatcgaagctaacattaaaaatgttgatggtgaaattgattgcagcggcaaaatgtttgattcgctggatctgattattgccggttttcatgagccggtttttgcgccacatgacaaagcgaccaatacacaagcgatgatcgccactatcgccagcggcaatgtgcatataataagccatcccggaaacccgaaatatgaaatagatgttaaagccgttgctgaagcagccgcgaaacatcaggtggcgctggaaataaataattcctcttttttacactcacgtaagggaagtgaagacaattgtcgtgcggtagccgcagcggtacgtgacgctggaggttgggtggcattaggctcggattctcacaccgcgtttaccatgggtgaatttgaagagtgtcttaaaatcctcgacgcggtagattttccgccagagcgcattttgaatgtttctccgcgccgcttacttaacttccttgaatctcgcggtatggcaccgattgcggaatttgcagacctttaa

SEQ ID NO: 3596 - DNA, 939 bp, Escherichia coli
atggatatcatcttttatcacccaacgttcgatacccaatggtggattgaggcactgcgcaaagctattcctcaggcaagagtcagagcatggaaaagcggagataatgactctgctgattatgctttagtctggcatcctccagttgaaatgctggctgggcgcgatcttaaagcggtgtttgcacttggggcaggtgttgattctattttgagcaagctacaggctcaccctgaaatgctgaagccttctgttccactttttcgcctggaagataccggtatgggcgagcaaatgcaggaatatgctgtcagtcaggtgctgcattggtttcgacgttttgacgattaccgcatccagcaaaatagttcgcattggcaaccgctgcctgaatatcatcgggaagattttaccatcggcattttgggtgcaggcgtactgggcagtaaagttgcacagagtctgcaaacctggcgcttcccgctgcgttgctggagtcgaacccgtaaatcgtggcctggcgtgcaaagctttgccggacgggaagaactctctgcatttctgagccaatgtcgggtattgattaatttgttaccgaatacacctgaaaccgtcggcattattaatcaacaattactcgaaaaattaccggatggcgcgtatctcctcaacctggcgcgtggtgttcatgtcgtggaagatgacctgctcgcggcgctggatagcggcaaagttaaaggcgcaatgctggatgtttttaatcgtgaacccttaccgccggaaagtccgctctggcaacatccacgcgtgacgataacaccacatgtcgccgcgattacccgtcccgctgaagctgtggattacatttcgcgcaccattgcccagctcgaaaaaggggagagggtctgcgggcaagtcgaccgcgcacgcggctactaa

SEQ ID NO: 3597 - DNA, 843 bp, Escherichia coli
atgtcagatatcacaatctcccgcctggaagtggtcaacggacatacggacattatctgctccacctcagtcagccacattctggctgtgcgaaagactacactgctgcaaatcgacacacttatccggcaactgactgaaatatcagcaatgacagaaagtattggcggtaaaaccgcactggactgggccatgaaacaggattttcgctgcggctgctggctcatggataaacctgatacagcaatgaaagctatcacccgcaatctcgatcgcgaaatctggcgtgacctgatgcaatgctccgggatgctttccttaatggatgcacaggcccgtgatacatggtaccgatcactggagtacgataattttccggaaatcagtgaagagaatattctgagtacgtttgagcagctacaccagaataaggatgaagtgtttgagcgaggagtgatcaacctcttcagagggttgagctggaattacaaaaccaattgcccctgtaaatttggcaataaaattatcgtcaacaatctggtgaggtgggaccggtggggattgcatcttatcaccgggcaacaggcagatagacttgccgacctggaaagaatgctgcatctgttcagcggcaaaccgatccccgacaacagggaaaacataactattcatctggacgaacatatccggtctcttcagggaaaagaatgctatgaagatgagatgttcattattaaatactttaagaagggctctgcgcacatcacgttcaggaagccagaactggttgacagactgaatgatattatcgcaaaacactatcctgatatgctggcagtatag

SEQ ID NO: 3598 - DNA, 243 bp, Escherichia coli
atgcctgccgggtttacccactttcgactggtaaccatgaacaacatgaaatcattaaccacggaaaccgcactggatattctgattgcgtggctgcaggacaatatcgactgcgaatcgggaattatctttgacaacgatgaggataaaacagattcggcagcactgttgccctgtatcgaacaggccagggagggtatccgtaccctgtgccaactgcagcttctgcaccagaaccgatga

SEQ ID NO: 3599 - DNA, 492 bp, Escherichia coli
atgatgaaactggccctgacgctggaagccgacagcgttaacgtacaggcactgaacatggggcgcattgtcgttgacgtcgatggtattgagcttgctgaactgattaacgtggtctgcgataacggtcactcccttcgtgttgttgatgaatctgaccgagcctcaacagactgcacgccaccatttgctgccctgaccggcatacgctgcagtaccgcgcatatcacggcaaaagacaacgcctggctgtactcgctgtcgcatcagacgaatgacaccggcgaatcagaatggattcattttacaggcagcggatatctgttacgtaccgatgcgtggtcatacccggttctgcggcttaaacgcctgggcctgtcaaaaacgttccgccgcctggttgtcacactcatccgacgttatggcgtcagtctcattcatctggatgccagcgctgaatgcctgccgggtttacccactttcgactggtaa

SEQ ID NO: 3600 - DNA, 375 bp, Escherichia coli
atgaatacattacccgacactcacgtacgggaggcatcgggctgcccgtctcccgtcaccatctggcagacactgctcacccgactgctggaccagcactacggcctcacgctgaatgacacaccgttcgctgatgaacgtgtgattgagcagcatattgaggcaggtatttcactgtgtgatgcggtgaactttctcgtggaaaaatacgcgctggtgcgtaccgaccagccgggattcagcgcctgtacccgctctcagttaataaacagcatcgatatcctccgggctcgcagggcgaccggcctgatgacccgcgacaattacagaacggtaaataacataaccctgggtaagcatccggaggcgaaatga

SEQ ID NO: 3601 - DNA, 177 bp, Escherichia coli
atgagggacaaacccgcgaaccataaacgcggtaaaaacccggtgtgcatcgtttttgattattcccgcacactctcgcagaaggagttccccgtcgggctacggtctctgttaatacgggaatacggcgacgatacagcgcatgatgtgtcaggcttgaatacctttatccgttaa

SEQ ID NO: 3602 - DNA, 153 bp, Escherichia coli
atgccttcgatgatagcgataattttactcatcatccttcacatctggctctgtagacagggtggtgatcacttctggagtgaatccagattaaacatctcattgctgatgcttgaagttgagcatctggcgcgcggtaaggggctgcgttga

SEQ ID NO: 3603 - DNA, 186 bp, Escherichia coli
atgctaacgcgactatcgaaagtctccgtgctgatgtttctgctgggcgtaagcgcctgcaagtcgccgccacctgtgcaaagtcaacgaccagagccagcggcatgggcgatggagaaagcccaagacttacagcagatgctgaactcaattattaccgtctccgaagcggaatcgacaggataa

SEQ ID NO: 3604 - DNA, 534 bp, Escherichia coli
atgaacgcaaaaatcagatacggcctgtcggctgccgttctggcactgattgccgtcggtgcgcccgcgcctgatattctcgaccagtttctgaatgaaaaggaaggtaaccacaccacggcataccgtgatggtgcgggtatctggaccatctgtcgtggtgccaccatggtggatggtaagcccgtcataccgggaatgaaactgtcgaaggaaaaatgcaatcaggttaatgccattgaacgtgataaggcgctggcatgggtggagaaaaacatccgggtatcactgacggaaccacagaaagcgggtatcgcgtcattttgtccctataacattggccccggtaagtgttttccgtcgacgttttataagcggctgaatgctggtgatcgtaaaggtgcatgcgaggcgattcgatggtggataaaagatggtgggcgcgattgccgcatacgttcaaataactgctatggacaggttattcgtcgtgaccaggaaagcgcattagcctgttgggggatagatcagtga

SEQ ID NO: 3605 - DNA, 351 bp, Escherichia coli
atgactcaaaactatgaactgattgtgaaagggatccgcaattttgagaataaagttacggtaactttagcgttacgggacaaaaaacgctttgacggtgaaatttttgccctggacatctcgctggaccgtgttgaaggtgccgcgctggagttttatgaggcagcagccagaaggagcatcagacaggtcttcctggatgttgctgccgggttatgtgaaggggatgagcagtcgccggaaaagcgccccgtaattttagatgcgcagaatgtgtggataacctacaaaggaaagctaccaggaagaattactgattctctgaagactcctccggaatcacaaccttaa

SEQ ID NO: 3606 - DNA, 216 bp, Escherichia coli
atgaaatccatggacaaaatttcaacgggcattgcctacggcacctccgcaggcagtgctggctactggtttttacagtggcttgatcaggtcagtccttcacagtgggctgcgattggtgtactggggagtctggttctgggcttcctgacttatctgacaaatctgtacttcaaaatcagagaagacaagcgtaaggcggcacggggagagtaa

SEQ ID NO: 3607 - DNA, 879 bp, Escherichia coli
atgacgcagcaactcgaaaacatgccaataacagaaatcgaaattgcctacggtggagaggcatacgcagataatcagatcgacgcgaaaacattaggcgaagccttaacctctcttagtgccctgattgaacacgccgaaaaaataattaatggcgaaacagcagagccgaaagtcaacatcaaggcaacaaaagaaggttcatttactttgcttgttgctgtgatggggagcataaaaactattaacgcccttggcctcgttgcaggtggtggagttgccgcaggtggcgtactcgggataatcgaatggctcaaagggcgtaaaatcagctccattgtcgtcgatgaacaaaaagatacagcagaaatcgaagtggatggtgagaaggttaaatgcagtaacgacattcaaaaattaataaccagtccaatcatccgaaaagaactggataaattaatctataaacccctgcagactgaaaaaccatccacgttctcagtttcacagcagaagcataaggtagtcagggtgacgcaagctgaagcagtaagttttaaaactgcaaaatccacctttgtcgagaaaactcacgtaacgacacgccaagctaatgtacattttgctaatgttcgattcaagcaaggcaaaagctgggatatcatcctgccaaatggcgaagaagttagcgcatctatgaaagatgaggcttttcttgaacgggttgaacacaaccaagcagcattctgtaagggtgatctttttgttgtagaactgacagaaacaacaaaagaaacaaatggcgcgctgtctaaaccacgctatagtattactaaggttatacgccacagagcggcggcagataggaaactactttaa

SEQ ID NO: 3608 - DNA, 246 bp, Escherichia coli
atgtcaatcctaagcattatgctttacatcactgtattcatggctgtcgcagcgacggtcagatatgctgtgcttaggttcttggtttgggtaaagccgaatgcgtatattgaactaacctacaccgatcctgaaggcagaaccgctaaaaggaaagtcagcgttagaaacgaaaatgacgcagaagagttggcgctactgctacgcgaactcaaaactcgcaacgaagcaagtgcaggaaggtga

SEQ ID NO: 3609 - DNA, 387 bp, Escherichia coli
atggcgaacactaaatcctacctggcaatgcaggcatggtttaccacccttatcactgcgggattgaatttcctttttgactggcttcctcaattagccttcttcaaatcattggcgcctggagctgctgtcggcttatctcatgtggtaattcttcttatcgcttacataggtttgcctacgcttaatgatgtaagaatgaaaagggaaataaaaacggccagaaaattcatctcgaactgcctggccaaccctaacctaacaccagaccaaattgcgcactacaaccaatgtcttatcgatctagacaataagctattaaaaaacataaatattcgtattgatgctttatctgacgccgaatcgaaagctcaagcaaacgagtag

SEQ ID NO: 3610 - DNA, 351 bp, Escherichia coli
atggggcgtgatatgtatgaggttttagatcgctggggggcatgggctgcagcagaaaatagcggtgtcgattggcaaccgatagcagcgggcttcaaggggcttttgccacatggcaaaaagtcacgtctccagtgtgatgatgatgaaggcatcatgatagacggttgtgtggctcggttgcgaaagtataaaccagaggaatatgagctgctcatagctcactttgttattggtgtttctctacgctcaatcgcgaagaaacgcaggtgctcagatggaactataagaaaggagctgcaaactgcattaggctttattgatggatgtatatgcttgattctatcataa

SEQ ID NO: 3611 - DNA, 378 bp, Escherichia coli
atgactgaacgcatagaatttgttttgccttacccgccgacggtgaatacctactggcgacgtcatggcaatacgtatttcatctcggaggccggaaagcgttatcgccgtgatgtggcgctaattgttcgccagcagcggctgaaattaaacctgtccggaaggctggcaataaaaattactgcagagccgccggataagcgccgtcgggacctggacaatatcctgaaagcaccgctggatgcactgacgcatgcggggcttctcatagacgacgagcagtttgatgaaatcaatattgtgcgcggtcagctcgttcctggtgggcgactgggcgtgaagatttgcgaaatcagaggtgatggtaatggggcgtga

SEQ ID NO: 3612 - DNA, 1128 bp, Escherichia coli
atgtcaggctcccttattccgaacgcccaccgcgcccatcccgcacataccagcaacggatctggaggtaacgtgcggatattacttcgacctgttctggtaccggaactcgggctggtggtccttaggccgggccgtgaatccatgcaagtatttcataaccctcgagtgctggtggagcctgaaccgaaaagcatgcgcggtctgccgtccggagtcgtccctgccgttcgccagccgctggcggaggataaatcattactgccatttttcagcgatgagcgggtgattcgtgctgctggcggcgctggggcactgtctgactggctgttgcgtcatgtcaaatcctgccagtggcctcatggtgactatcatcacagtgaaatcgtcatacatcgttacggtaccggcgcgatggtgttgtgctggcactgcgacaaccagttgcgtgaccagacatccgaatcactcgggcaacttgctcatcaaaacctgtcagcatggatgattgacgtcatacgccatgcaatgaatggcacgcaggagcgggaattgtcgctggctgaattatcctggtgggcggtctgcaatcaggtggcggacgcgcttccggaggcagtattacgtcgttctctggggttacgtgcggaaaaaatccgctccttgtaccgcgaaagcgacatcgtaccgggagagcagaccgccaccagcatactgaagcagcgcacaaaaaatcttgcgccgttgcctcatgcccaccagcaaaacccgccacaggaaaagacggtggtcagcattgccgttgatccggagtcaccggctcagtatctccagcgccagaaaccacaacgggaagagatgcctgtatacacgcgttgggtaaaaacgcagaaatgcatgacgtgcggtaatcaggcagatgatccgcatcacatcattggtcatggactgggagggatgggaacaaaggctgatgatttgtttgttattccgctgtgccgtaaatgtcataacgaactgcacgccggggtaaaagattttgaagaaaaacacggcagccagctgttgttgctgattcgttttttaatgcacgcgagaaattcgggtgtcctgaagtggaaagcatga

SEQ ID NO: 3613 - DNA, 393 bp, Escherichia coli
atgaagaaacttgttttagtcgtaggtgtaatgattgcaacagtaatgttgggagggtgtgcagcaaaggtcgatccagcgttgaaagcagaagcaatgaagccactaacatgtaatgatgaaaagcaatgtgacttttattggaaacgagcgcaattctggttggctaataattcctcatggaaaattcaaacggcgacagacacgctaatttccacttataatccctctccaaatagtccattcctcgcttatcaagtgagtaaaatgccaaatgaagatggatcctcaagaattttcatcaagcctttttgcgataatatgtttggctgtcaaccaaacccctatcaggcagttgtttcctttaaaaacttcgttaaaacagggcagtag

SEQ ID NO: 3614 - DNA, 213 bp, Escherichia coli
atgaacggcaaatctaggttagcctcttacgtgccgaaaggcaaggagaagcaggctatgaagcagcaaaaggcgatgttaatcgccctgatcgtcatctgtttaaccgtcatagtgacggcactggtaacgaggaaagacctctgcgaggtacgaatccgaaccggccagacggaggtcgctgtcttcacagcttacgaacctgaggagtaa

SEQ ID NO: 3615 - DNA, 666 bp, Escherichia coli
atgactattgctgatttcaaacggcctaaattggagctcccaaacggggcaaacaaactactactgcactcttgctgtgctccatgttccggtgaagtgatggaggcgcttcaggcctcgggaatcgactacaccatctttttctacaacccgaacattcatcctcagaaagagtatttaattcgtaaggatgaaaatattcgctttgctgaacaacacggcgtgccgtttatcgatgctgattacgacaccgacaactggtttgaacgtgccaaaggaatggaatgggagcctgagagggggatccgttgtaccatgtgttttgacatgcgttttgagcggacagcgttgtacgctgctgaaaatggtttcagtgtgatcagcagttcactgggcatttcacgctggaaaaatatgcagcaggttaacgagtgtgggcggcgagctgttgcgcattatccgggtatggtgtactgggattataactggcgcaagcagggcggctcgtcccgtatgattgaaatcagcaagcgagaaaaattctatcagcaggaatattgtggctgtgtgtattctctgcgcgataccaatctacaccgcaaatctcagggacgccctcttatcaaaattggccaactccactacggaaaagaagagaaggagtga

SEQ ID NO: 3616 - DNA, 426 bp, Escherichia coli
gtggtaaaagtttttacacaggaagagcgggaaaaaattaaagggcaggtggtcgaacttgtgcgccagagcggtcgcgagacgttacgacaactggaagccaagacaggtgcgacaagatatctgatgagcattctcgccagagagctggttgccagtggcgatgtatacaactctggttacgggttatttccgtctgaacaggctcgtaaggactggcaaaacgcccgcaaaaaactatccagggcaaaggtgaaaaaaacggttgtggttgatcctgaccttatctggtcattaccagacggagaaatacgccgctacgacaggcgcctgaatataatctgtcgcgagtgccggaagagcgaagctatgcagcgtgtactggcattttatcaaggaaatgttaggtattttagacgttactag

SEQ ID NO: 3617 - DNA, 1071 bp, Escherichia coli
atggctaacgcctggctcagattatggcatgacatgccaaatgaccctaagtggcgaacaattgccagggtgtcagggcagccaattgcaacagtgatggcagtgtatatccacctcctggtgagcgcgtcacgaaatgtcacgcgaggtcacattgatgtcacgacagaagatttggcaagtgcgctcgacgtgacagaagaggtaattgattcaattttgcagacgatgcaggggcgggtacttgatggtgatttaatcactggatgggaaaaacgccaggtgctgaaagaggataacggcaatatttcgcaaaccgcaaaatctcctgcagagcgcaagagggcgcagcgagagagggaaagaaagcgggaacaaaatggcgattgtcacggcgcgtcacgaaatgtcacgcacatgtcacgacgagtcacgacagataaagatacagataaagatacagatcaagaagatcaaaacactatggtccatggcgtaaaaaacgccacgaaccaggcaggggatgttcagaccgtcaatcctggtcagccagcaggcacgacaccggaagccgattcagcgtatgcgctgaaagccgattcgggcgctgtgcagcaggtgatgaccgcaaggccggagcaatcacaccaactgcagcagcctgaagccgattccgccattcagcgggaagccgatcgggtagtcccggaaaacaccgggcagtctgtgggacgagtggattatccggatgtgttcgaacaggtctggcgggagtacccgttgcgcgccggggcaaacccgaagaaatccgctttcagtgcctggaaggccagattacgcgagggggtgccaccagaggccatgctggatggcgtgaggcgttacgtaagatacctggtggctaccaggaaaacgggaacggaatttgttcagcgagcgacgacgttttttggaccggaccggaattttgagaacccctggttgctcccggtaagcggcacgaacaaccagcgttgtgtgaatcatatttctgaacctgatacagaaattccgcctggtttcaggggataa

SEQ ID NO: 3618 - DNA, 426 bp, Escherichia coli
atgaaaatcaagcatgaacacatccgcatggcgatgaatgcctgggcgcatccggacggcgaaaaagtaccggctgcgaaaattaccaaagcgtatttcgagctgggaatgacgttcccggaactgtatgacgacagccatccggaagccttggctcgcaatacccagaaaattttccgctgggtagagaaagacacccctgatgcggttaaaaaaattcaggcgttgttaccagctatcgaaaaagcaatgccacctctgctggtggcccgaatgcgcagccatagctcagcctattttcgggaactagtggagacgcgggaacgactggtgagagacgctgatgattttgtcgcagtggcgatcgctggtttcaaccagatgaatcgtggtggccctgcaggaaatattgtggctgtgcattga

SEQ ID NO: 3619 - DNA, 255 bp, Escherichia coli
atgaaccagaaaacacttgaagatgtaatcaaaactgttcgcgttgctgttgtggccgacgtttgtggtgtcagccaaagagcaatctataaatggatggataacggaaaattgcctcgcacagaatataccggcgaaacaaattacgctgaaaaaatcgctcttgcatcaaacggattattttctgccgatgcaattttaactattggcaggaataaaactactacgaaaaagctgatgggagttgattcatga

SEQ ID NO: 3620 - DNA, 420 bp, Escherichia coli
atggttcatgaagataaagcgcgtaaagagttcgccagtaggcttgcgctagcctgtgaaaacgctggttatgaacaacatggaaggcaggcagaaattgcccgtcgaatgaaattaacaccaaaagcggttagcaaatggtttaatggcgaaacaattcctcgccgggagaaattaagggaattagcaacactaataggaacaacaccaacctatcttttgggagaggatacagaagaaagtggacaggtacgtttctatcaggagttaaatccaagacaaaaaatcatcattgaccttctggacgagctccctgacagtgagacagatgaacttttaaaaactcttgaagagaaaaaacagaagtacaatgcaatttacgaagagttagcacgaaagaaaaaacaaaaagcctcttaa

SEQ ID NO: 3621 - DNA, 237 bp, Escherichia coli
atgacggcagggttcaactttaataactatgcagcaggtttttgttccgctaccccggcgttaaggggaaatgaggtcagcatggatactatcgatcttggcaacagcgaatctctggtatgtggcgtgttccccaaccaggacggtacgttcaccgcgatgacgtataccaaaagcaaaacgtttaaaaccgaaaatggtgcccgtcgctggctggaaagaaactcaggtgagtaa

SEQ ID NO: 3622 - DNA, 129 bp, Escherichia coli
atggatttcgacacaatcatggaaaaggcttacgaagaatacttcgaaggccttgccgaaggcgaagaagctctcagcttcaacgaatttaaacaggcgctttccagttcggcaaaatctaacggctga

SEQ ID NO: 3623 - DNA, 219 bp, Escherichia coli
atgcagaaacgagaacccgtcatcatcgcgccagactataccgatgatgaactttatgagtggatgcgccagaaaattaatgcagcgcaggatctgaaatgggccaatgaagccagggctaagcaggctgaaaatctgtccgctctggagcaggatatcaccaatctggaaaaagcagcggcattaagcattgccagaatgattacatacccgcgttaa

SEQ ID NO: 3624 - DNA, 183 bp, Escherichia coli
atggaaacgttattaccaaacgtcaatacgtctgaaggttgttttgaaattggtgtcagaatcagtaaccctgtatttactgaagatgccattaataagagaaaacacgaacgggagctattaaatcaaatatgcattgtttcaatgctggcccgtttacgcctgatgcaaaaaggacgctga

SEQ ID NO: 3625 - DNA, 192 bp, Escherichia coli
atgaatacagcatttgcacttgttctgacagtttttcttaatacaggcgaaccagtcgatcttgttattggtatacatgactcaatgaaagaatgcatggctgccgcagcggaacagaaaattcacggcaactgttatccggttgataaagttattcgcatggacaataacgaaatcccggcaggtctttaa

SEQ ID NO: 3626 - DNA, 2472 bp, Escherichia coli
atgagtaaagtctttatttgcgccgccattccggacgaacaggcaataaaggaagaaggtgcagttgctgtagccactgccattgaagccggtgacgaacgccgcgcccgtgccaaatttacctggcaattcctggagcaatatccggctgctcaggactgcgcttataaatttcttgtctgcgaggataaacccggcatgccccgccctgctatcgactcctgggataccgaatatatgcaggaaaacagctgggatgaggaatccgcttcctttattccggttgagactgaatcagatcctatgaacgtcacttttgacaagctggcccctgaagtacagaacgctgtcatggttaagttcgacacatgtgaaaacatcaccgttgatatggtgattagcgcgcaggaattgttgcaggaagacatagcaacattcgacggacatatcgttgaagcgttgatgaaaatgccagaagttaacgccatgtatccggagcttaagctgcatgccatcgggtgggttaagcataaatgtaagcctggtgccaaatggcccgaaattcaggcagagatgcgcatctggaaaaaacgtcgcgaaggtgaacgcaaggaaaccggaaaatacacgtctgttgttgatctcgcccgcgccagagccaatcaacagtacactgaaaattcaacaggaaaaatcagcccggtcattgctgccattcatcgcgaatacaagcagacatggaaaacactggatgacgaactggcctacgctctctggcctggtgatgtggatgccggaaacattgacggcagcatccatcgctgggcaaaaaatgaagttatcgacaacgaccgcgaagactggaagcgtatctcggcatcaatgcgcaaacagcctgatgcccttcgctacgaccgccagactatttttggccttgtccgtgaacgtccgatcgacattcacaaagaccctgtggcactgaacaaatacattactgaatacctgactacaaagggcgtgtttgaagatgaaggaacaaatcagagcgcaactgatactctctcgtcgccagtaccagaaactgatgcagtggaaacggcaattccagacaacgaaaaaaccgaatgcaaagtggaagtcgaaccatctgtagaacgtgaagggccgttctacttcctcttcaccgacaaggatggcgaaaaatacggtcgcgcaaacaaactttctggtctggataaggcgctggctgccggggctactgaaatcacgaaagaagaatatttcgcccgcaaaaacggtacatactcaggttcacaacaaaatactggtgcatctgacacgaccgcacaaccagagccggtaaaagttaccgctgacgaagtaaacaaaattatgcaggcagccaatatcagccagcctgacgccgataagttgcttgctgcatcacgtggtgaatttgttgaagggattagcgacccgaatgatccgaaatgggttaaggggatccagacccgcgattctgtgaaccagaaccagcatgaatcggaacggaactaccaaaaagcggaacaaaacagcccaaatgcgttacaaaacgagccagaaacgaaacaacctgaaccagtagtgcaacaggaaccggaaaagatctgcaccgcctgcggtcagagcggtggcggcaactgccctgattgtggcgcggtgatgggcgacgcaacataccaggaaacattcgatgaagagaatcaggttgaagttcaggaaaatgatccggaggaaatggaaggcgctgaacatccacacaaggagaaccctggcggcaatcagcatcacgccagcgataataaaactggcgagacggcagatcactcaattaaggtgaacggtcatcacgaaatcacatccaccagcaggacgtgtgaccatctaatgatcgaccttgaaaccatgggaaaaaatcctgatgccccgatcatctcaataggtgcaatatttttcgatccgcaaaccggagatatgggaccggaatttagtaagactatcgatctggaaactgctggcggagtcattgatcgggacaccattaaatggtggcttaagcaatcacgcgaagcgcaatctgccattatgaccgatgaaatcccgttagatgatgcactgttacaattgcgggaatttatcgacgaaaactccggtgaattttttgttcaggtctggggaaatggagccaacttcgacaacacgattttgcgccgttcatacgaacggcaggggatcccctgcccgtggcgttactacaacgatcgcgatgtacgcacaatcgttgagctggggaaagccatagacttcgatgccagaacggctattccattcgaaggtgagcgccataatgcacttgatgacgctcgttaccaggcaaaatacgtttcagctatctggcaaaaactgatcccgagtcaggctgatttttaa

SEQ ID NO: 3627 - DNA, 204 bp, Escherichia coli
atgagcagcttatttttaaccgaagatgaattgctaatattaacgggctgcaaatatgcaagccaccagcgaaaatggttaatggaaaacgggcttccgttctataccaatcgtagtggcaaaccgattgtcagccgggatctatttacctgcaataaaactttaccaccacgcgaggtagagccgaattttggtgcgatctga

SEQ ID NO: 3628 - DNA, 1026 bp, Escherichia coli
atgggaagacgaaggaaaaatcctgaacacgaaaaattacctccaaatgtatacccaaataaatatagttatgtatggaaaccaacatccagagaatctgtcacactaaccgccatcaaggatggtttagctgctttatggaaaaagtatgaggaaactgtaaataatcgcgatcgtgcaatgacattcggtcgcttgtgggaaaaattcctcgccagcgcctattacagtgaccttagtccaagaacacaaaaagattatctgcaacatcaaaaaaagttgcttgccgtattcggtaaggtaccagcggattccataaaaccagaacacatccgtcgatacatggacaaaagaggggagcagagtaaaacgcaagccaaccatgaaaaaagcagtatgtcccgtgtttacagttgggggtatgagcgagggtacgtcaaggctaacccatgtgcaggtgtaagtaaattcaaggccaaaaaccgcgaacgatatgtaaccgacaaagaataccaggcagtattaagcgttgcacctcttcctgtttttatcgcaatggaaattgcctatctgtgtgcagcgagggtttccgatgtgttatcgctgaaatgggaacagattggaaacgacgggatattcatccagcaagggaaaaccggaaaaaaacagataaaagcatggagcccacgattacaggcagcgatcgaaaaagcaaaacagttaccaaaatctgcctatgtgatcagcaatcaatacggcaaccgatatatgtacaaaggctttaacgaaatgtgggtagatgcaagaaatcgtgctggaaaaatttcaggtattttaaccgacttcacctttcatgatctgaaggcgaaaggaatttcagactatgaaggaagcagccgggataagcaacttttctctggtcacaaaaccgaagggcaagtgctaatctatgacaggaaggttaaagtttcaccaacacttgatgtcccgttacctgaaaatattccaagaaaatattccaagtaa

SEQ ID NO: 3629 - DNA, 798 bp, Escherichia coli
atgattaagtggccctggaaagtacaagaatcagcacatcaaactgcccttccctggcaggaagcactatcgatcccccttttaacgtgtctgacagaacaggaacaaagcaaattggtcgctcttgccgaacgttttttacagcaaaaacggcttgttcctttacagggctttgagctgaattcattaagaagctgccggatagcacttctattttgcctgcccgttctggagttaggactggaatggctggatggttttcatgaagtcttaatttatcctgcgccatttgtggtcgatgatgaatgggaagacgatatcggtctggtgcataaccaacgtattgttcagtcaggtcagagctggcagcaagggcctatcgttttgaactggttggatatacaagattcttttgatgcttctggttttaacctgattattcatgaagtcgctcataagctggacacccgtaacggcgatcgcgccagcggagttccctttatttcgttgcgtgaggttgctggctgggaacatgatcttcatgctgcaatgaacaacattcaggaagaaatcgaattagttggtgagaatgcggcgagcattgatgcttatgctgccagtgatcctgctgaatgttttgccgtactttctgaatatttctttagcgccccagaactttttgctcctcgtttcccttcattgtggcaacgtttctgtcaattttatcaacaagatcctttgcagagactgcatcacgctaatgatacagacccgttttcggcgacgaatgttcattaa

SEQ ID NO: 3630 - DNA, 1263 bp, Escherichia coli
atgtcccttaccagcgcaaaaatccgcaccctcaagccttctgataaaccctttaaagtctccgattctcacggtctgtatctgcgggtcaagccgggtagctcccgccactggtatctcaaataccgtattagcggtaaagaatcccgcattgcgctgggtacctatccagccatctccctgtctgatgcgcgacagcaacgtgaaggtatccgtaaaatgctggcgctgaatatcaacccggtacagcagcgggctgctgtacgtggctcacgaacaccggagaaagtttttaaaaacgtggcgctggcgtggcataaaagtaacaggaaatggtcgcagaacaccgccgaccgtctgcttgccagtctgaacaatcacatctttccggtcatcgggaacctacctgtatcagaacttaaaccccgtcatttcattgacctgctgaaagggatcgaggaaaaaggtctgctggaggttgcgtcccgcacacggcagcacctgagtaacataatgcgccatgcggtccatcaggagttaatcgatacgaaccctgcagcaaaccttggcggcgtgaccacacctcctgtcagacggcactatcctgccctgccgctggagcggctgcctgaactgcttgaacgtattggggcatatcatcagggccgtgaactgacccggcatgccgttctgctgatgctgcatgtgttcattcgctccagtgaactgcgtttcgcccgctggtcagagattgatttcacaaaccgagtctggacgatacccgcgacgcgagaacccattattggcgtgcgttattccggccgcggggcaaaaatgcgaatgccgcatatcgtccccctctcagaacagtccatcgccattctgaaacagattaaggatatcaccggtaataatgaactgatcttccccggcgaccataacccgtataagccaatgtgtgaaaacacggtcaataaggcactgcgggtgatgggttacgacacgaaaaaggatatctgcggtcacggcttccgggcaatggcatgcagtgcgctgatggaatcgggtttatgggcaaaggacgcagtagaacgccagatgagtcatcaggagcgcaataccgtgcgcatggcttatattcataaggcagagcacctggaagcccgcaaagcgatgatgcagtggtggtcggattatctggaagcatgccgagaatcttatgcaccgccttatacaattggtaaaaataagtttatcccatag

SEQ ID NO: 3631 - DNA, 1305 bp, Escherichia coli
atgaaaatcagtgaatttctacatctggcgttaccagaggaacaatggctaccgacgatttctggcgttttacgccagttcgtagaagaagagtgttatgtctatgagcgtcaaccctgttggtatttaggcaaagggtgccaggcacggctgcacattaatgccgacggaacgcaggcgacatttattgatgatgccggggagcaaaaatgggcggtggattccattgccgactgcgcgcgtcgttttatggcgcatcctcaggtgaaaggacgtcgggtatatggacaggttgggttcaactttgcggcgcatgcgcgggggattgcctttaacgccggggagtggccgctgctgacgttaaccgttccccgtgaagaacttatttttgaaaagggaaatgtcaccgtttatgcggactccgccgacgggtgccgacgtttgtgcgagtgggtaaaagaggccggtacaacgacgcagaacgcaccactggcggtggataccgccctcaatggtgaggcatataaacaacaggttgcgcgcgccgttgcggagatccgccgtggcgagtatgtcaaagtgattgtctcgcgcgccattcccctgccatcgcggattgatatgcccgccacgctgttatacgggcggcaggcaaacacgcctgtgcgctcgtttatgttccgtcaggaaggacgcgaagcgctgggctttagcccggaactggtgatgtcagtgacgggcaataaagtggtcactgaaccgcttgcgggcacccgcgatcgcatgggaaacccggagcataataaggcgaaagaggcagaactgctgcacgacagtaaagaggtgcttgagcatatcctttctgtcaaagaagctattgctgaactggaggccgtttgccagccgggcagcgtggtggttgaagatttaatgtcggttcgccagcgcggcagcgttcagcatctggggtctggcgtgagcggtcagcttgcggaaaacaaggatgcctgggatgcgtttaccgtgctgtttccgtcgattaccgcctcaggtatccctaaaaatgctgctctgaacgcgattatgcaaattgagaagacgccgcgagagctttattccggcgcaatcctgctgctggacgatacgcgctttgatgcggctctagttctgcgttccgtatttcaggatagccagcgctgctggatacaggcgggggcgggaatcatcgcgcaatctacgccggaacgcgaactgacagaaacccgggagaaattagcgagcattgcgccctatttaatggtgtag

SEQ ID NO: 3632 - DNA, 1281 bp, Escherichia coli
atgagtgatgttcagtcgaatgtgaaacctctgacgttgacgaccgggcgggtgatttttgctattgccggcgtctatgtgacgcagagtctggtatcggcgctgtctatgcagtccttacccgcgctggtgcgcgctgctggcggttcgctggcgcttgccggtgcgacaaccctgtttatgctgccctgggcgctgaagtttatttgggcgccgtggatcgagcgctggcggcttccgcccggtagccaggaacgccgttcccgcatgttaatcctgcgtggtcaggtcgcgctagcggcgatcctgactattgccgcagcgattggctggtttgggcgagaagggggattccccgatacgcaaatcgtcgcgttatttgttctgtttatggtggcaggcacggtcgcctccaccattgatatcgccagcgacggcttttgtgtcgatcaactgacccgcacgggttacggctggggaaacagcgtgcaggtcggcggcagctatctgggaatgatgtgcggcggcggggtgttcctgatgctgtcggcggcatccggctggcctgtcgccatgctgatgatggcggtgctgattatggcgctgtcactcccgctgtggcgcattacggagccgacgcgaacagcgactatcccgcatgttccggcgttaggttatgcgctaaggaggaagcaggcgcgcctgggcttactgctggtattgatgctgaattcaggcatgcggtttgtgctgcctcttctggcaccgctgttgttggatcatgggttgagcatgtccgcattgggcgcgctgttcagcggcggcaatattgcagcgggcatagcaggaacgctggccggcggattgctgatgaaatacacctcacccggcagagcgctgttgacggcttatggcgtccaggggatcgcgctgctggcggtggtgatgacgctcatgatggcgccgggtcatctgctgctgcagattctccagtgtctggtcattgtccagtccatttcgctggcctgcgcgctggtctgtctttacgccacgctgatgtcgctttcatcgcctttgcaggccggtgtcgacttcaccctctttcaatgtactgacgcggcaatcgccattctggctggcgttatcggtggcgttgttgctcaacattttggctatgcggcctgcttcctgtttgccggggcattcacgttgctggcggcgtgggttgcttatatccggctgcattcggcaagagaactgatgacaagcgcaattgattga

SEQ ID NO: 3633 - DNA, 1803 bp, Escherichia coli
atgaaagacaataatcctgcggataacttggcctggcgcgtcatctggcgccagcttatctccagcgttggcagtcaggccaggatgctgcgacgcagtatgctggcgctgttgctggcggcattcatgcaggggatcgcctttgcctgtctttatccgatcattgatgcgctgttacggggagacgcgccgcaacttcttaactgggctatggccttcagcgtcgccgcaattgtgacgctggtgctacgctggtatggcctgggctttgaataccgtggtcatctggcgcaggccacccatgagttgcgcctgcgacttggcgagcagttacgccgcgtgccgctggagaagctccagcgcggcagggcgggtgaaatgaacgccttgctgctgggcagcgtggatgaaaacctcaattatgttattgcgatagccaatattttgctgctcaccattgtcacgccgctgacggcgtcgctggcgacattgtggatagactggcggctggggctggtgatgttgctgatcttccctctgctggtgccgttttattactggcgccgcccggcgatgcggcgacaaatgcagacgctgggggaagcgcaccagcgtctgagcggcgatatcgttgaatttgctcaggggatgatggtattgcgcacctgcggcagcgatgccgataaaagccgggcgctgctggcgcatttcaatgcgctggaaaacttacagacccgcactcaccgtcagggcgctggcgcgacgatgctgatcgccagcgtcgtggagttgggcctacaggtggtggtgttatccgggatcgtctgggtagtgacgggcactctgaacctcgcctttttgattgccgccgtcgcgatgattatgcgcttcgcagaaccgatggcgatgtttatcagctacacctcggttgtggaactgatcgccagcgccctgcaacggattgagcagtttatggcgatagcaccgcttcccgtcgcagagcaaagcgagatgccggaacgttacgatatccgctttgacaacgtcagctatcgctacgaagaaggtgacggccacgcgcttaatcatgtttctttgacgttcccggcagccagtatgagcgcgctggtgggtgcctccggcgcaggcaaaactacggtcaccaaactgttaatgcgctatgccgatccgcagcaagggcagatttctattggcggcgtcgatattcgccgcctgacgccggaacagctcaatagcctgatttctgttgttttccaggatgtctggctgtttgatgacacgctgctggcgaatatccgtatcgcgcgcccacaggcgacgcggcaggaggtagaagaggccgcccgcgcggcgcagtgccttgagtttatttcccgtcttccgcaaggctggctgacgccaatgggagagatgggcggccagctatcgggcggcgagcgccagcggatttccattgccagagcgttattgaaaaacgcgccggtcgtcattctcgatgaaccgactgccgcgctggatattgaaagcgagctggcggtgcaaaaagcgatcgataacctggttcacaaccggacggtgattatcatcgctcaccgtttatccaccatcgccggggccggaaacattctggtgatggaagagggacaggtggttgagcagggtactcatgcgcaattgctctcacatcatggacgttatcaggcgttgtggcaggcgcaaatggccgcgcgcgtgtggcgcgacgacgggggttccgcgtctggagagtgggtgcatgagtga

SEQ ID NO: 3634 - DNA, 1803 bp, Escherichia coli
atgtcatctcaatcatccaatactgaatcgctgtcccgatttcctctctggcaggtgattacaccggttcgcaggaaggttattttagctatggcgctggcggggctggcggcattaaccagcctgggggcgctcctttttctggcgtggagcctgcgtgacattcgcgcgacgcctgacgctattccggcctggccgctgggcggcgtgatcggctgcgtggtcttaacttttgttctgcgcttacaggcgttcaacacctctcattacgcagcttttcatctggagaacattctgcgcagcaggttagtccgtaaagcattgcagcttccgcctggcgtgttacagcaaatgggcagcgggtcagtggcgaaagtgatgctggatgacgtgaagtcgttacatatttttgtggccgacagcacgccgctctatgcccgcgcgatcatcatgccgctggcgacaatcgttatcttgttctggctggactggcggctggcaatcgcgacgctgggggtactggcgtttggatcgattgttctcgtgctcgcccgccagcgttcggaagatatggctcagcgttatcataaggcgcgcgagcaggttagcgcggcggttattgagttcgtgcaggccatgcccgtggtgagaacgtttgatagcggcagcaccagttttttgcgctatcaacgcgcccttgaagagtgggtcgatgtgctcaaaacctggtatcgcaaagccggtttttcagcgcgtttttccttctcgattctgaatcctctcccgaccctgtttgtcctgatctggtcgggatacggcctgttgcactatggcagtttcgattttatcgcgtgggtggccgttttactgctgggcagcggaatggccgaagccgtaatgccaatgatgatgctcaataacctggtcgcgcaaacgcgtttaagcattcagcgtatttatcaggttctcgcgatgccggagttatcgctgccgcagtctgaccagcagccgcaagaggcgagcattacctttgagcaggtgagctttcattatccgcaagcgcgtactggcgccgcgttgcaggaggtgagctttcatgtgcctgccgggcaaattgtggcgctggtcgggccaagcggcgccggaaaaagcaccgtggcgcgcttgctgctgcgttacgccgacccggacaaaggccatatccgtattggcggcgtggatctgcgtgatatgcagacggacaccctgatgaagcaactctcgtttgtgtttcaggacaacttcctttttgccgacacgatagccaataacattcgtctgggcgcgccggatacgccgctggaggcggttatagcggcggccagagtggcgcaggcccatgattttattagcgctctgccagaaggttacaacactcgagtcggggaacgtggggtatttctctccggcggccagcggcagcgcattactatcgcccgggcgcttttgcaggatcgccccatcctggtgctcgatgaggcgacggcgtttgctgacccggaaaacgaagcggcgcttatcaaggcgctcgcggcggccatgcgtggccggacggtcatcatggtcgcgcatcgtctctcaatggtgactcaggccgatgtgatattgctgttttccgacggacagctcagggaaatggggaaccatacgcaactgttggcgcagggcggcctgtatcaacggctctggcaacactatcagcaggcgcagcattgggtgccgggtggaacacaggaagaggtggtggaaaatgaaagacaataa

SEQ ID NO: 3635 - DNA, 960 bp, Escherichia coli
atgacggagtcaccgcaaacgcaatctgaaatctctattcaccagttggtggtcgggaaacctgcaaacgatggcaatattcctgctcagtgtgaactgctgcgctgttcgttgcaggaaggtatggatattttgctctggaggggccattttgcgcggcctgagacgttgcagctacacgacgatctgggcaggattaacttctcgtgcatcctggaaggcacatcgcgctttgcgattcagggactccggcgccacaccgactgggagcttgcgcgcaatcgccattacattacccatacgccagactgtcgcggcagcgcctcctattgtggccgattcgagagcattaccctctccttcagccctgaaaccctcgcgctgtgggtgccggatattagcgcggtcattaagaataagatcgactcccactgctgttgccagcagcagcgttgtaatgctgaaacccacttaacggctcaggccttgcgtcacgcgctgatgcgcatgcacggcggcttcagtcatgaacaaaagccgtcgacgctatggttgcaggggcaaagtctggtcatgctcagtctggtgctggatgaacatcgcgaagacgccagttgcctctcctgccacttcaacccgatggaacgccagaaactgctgcgggcgaaggatctgctgctggctgatctgacgcaagcgccgggcgtcgcggagctggccagagagtccggtctgagcgttctcaaaattaagcgaggcttccgcgttctgttcaacaacagcgtctatggcctgtttcaggctgaacgaatgcaggaagccagaagacgcctggccaacggcaatacctccgtcatgacggtggcggccgatctgggctatgccaacgccagccatttctctgccgccttccagaaacagtttggcgtaactccttcgacctttaagcgcgggatgtaa

SEQ ID NO: 3636 - DNA, 6108 bp, Escherichia coli
atgatttctggcgcaccatctcaggattcgctgttaccggacaaccgccacgcggctgattaccaacaattacgcgagcggctcatacaggaactgaatttaacgccgcagcagttacatgaagagagcaacctgatccaggccggcctggattccataagattgatgagatggttacactggtttcgtaaaaatggctaccgccttacccttcgcgagctgtatgccgcccccacgctggcggcatggaaccagttaatgctcagccggtcgccggagaacgcggaagaagaaacgccgcccgacgaatcatcctggccgaacatgaccgaaagtacccccttcccattgacgccagtacagcacgcctacctgacgggccgcatgccggggcagacgcttggcggcgtgggttgccacctgtatcaggagtttgaaggccattgtctgacggcgtcgcagctggagcaggccatcacgaccttgctgcaacgccacccaatgctgcatatcgcctttcgccccgacgggcagcaggtctggctaccgcaaccttactggaacggcgtcaccgttcatgatttacgccataacgacgctgaaagccgccaggcctatctggacgcactgcgccagcgcctgagccaccgtcttttacgcgtggaaatcggcgaaacgtttgattttcagctgacgctcttgccggacaatcgccaccgcctccatgtcaatattgacctgctgattatggatgcctccagctttacgcttttcttcgatgagcttaacgccctgctggccggagaatcgctgccggctatcgacacccgctatgatttccgctcgtatttgctgcaccagcagaagatcaatcaaccactgagagacgacgcgcgcgcttactggctggcgaaagcatcgacgcttccccccgcgcccgtcttgccgctggcctgcgaacccgccacgctacgtgaagtccgtaatacccgacgccgcatgattgtcccggcaacacgctggcacgcctttagcaaccgggccggcgagtatggcgtgacgccgacaatggcactggcgacctgtttttctgccgtgctggctcgctggggcggcctgacgcgtctgctgcttaacatcaccttattcgaccgccagccgctgcacccggcggttggcgcgatgcttgccgacttcaccaatattcttctgctggataccgcctgcgatggcgataccgtcagcaacctggcgcgtaaaaaccagctcacgtttacggaggactgggagcatcgccactggtccggcgtcgaattactccgtgaactcaaacgccagcagcgctacccccacggcgccccggtggtatttaccagcaatctggggcgttccctctacagcagccgcgcagaatcgccgttgggcgagccggaatggggcatctcgcaaacgccgcaggtctggatagatcatctggcgttcgagcatcacggcgaggtctggctacaatgggacagcaacgacgcgctgttccctccggcgttagtcgaaacattgttcgacgcctactgccagttgattaaccaactctgcgatgacgaaagcgcctggcaaaagccgttcgcagatatgatgcccgccagccagcgcgcgatacgcgaacgggtcaacgccaccggcgcccccattcccgaaggcttgctgcatgaaggcattttccgtatcgctctgcaacagccgcaggcgctggcggtaacggacatgcgttatcagtggaattatcatgagctgacagactatgcccgccgttgcgcgggcaggttaatcgagtgcggggttcagcccggcgataatgtggctatcacgatgtcgaaaggcgcaggacaacttgttgcggttctggccgtcctgctggccggggcggtttacgttccggtttcgctggatcagcctgccgcacggcgcgagaaaatctacgctgacgccagcgtccggctggtgctcatttgtcagcacgacgccagcgccgggtcagacgatattcccgtccttgcctggcagcaggccattgaggcggagccgatcgccaacccggtagtacgcgcccccacgcaaccggcctacattatctacacctccggctctaccggtacgccgaaaggggtagtcatttctcaccggggagcgcttaacacctgttgcgatatcaatacccgctatcaggttggcccgcatgacagggtgctggccctctccgccctacattttgatttatcggtttacgacatttttggcgtactgcgcgcgggcggcgcgctggtgatggtgatggaaaatcaacggcgcgatcctcacgcatggtgtgagctgatccagcgccatcaggtcacgctctggaacagcgtcccggcgctgttcgatatgctgctgacctggtgtgaaggtttcgccgacgccacgccggaaaacctgcgcgcagtgatgctttccggcgactggatcgggcttgacctccccgcccgttatcgggccttccggccacaaggacaatttatcgcgatgggcggtgccaccgaggcgtctatctggtctaacgcctgcgaaattcacgacgtccccgcccactggcgctccatcccttacggttttccgctaaccaaccaacgctaccgggtggtggatgaacagggccgggactgccctgactgggtgccgggtgaattatggattggcggcattggggtcgcggaaggctatttcaacgatcccctgcgtagcgagcagcaatttttgacgctcccggacgagcgctggtatcgcaccggcgatctcggctgctactggccagatggcacaatcgagttcctcggtcgtcgcgacaagcaggtcaaagtcggaggatatcgcatcgagctgggcgaaatcgaaagcgcgctcagccagctggcgggggtgaaacaagcaaccgttctggcgatcggcgaaaaagaaaaaacgctggcggcatacgttgttcctcagggcgaggctttttgcgttaccgatcatcggaacccggcactgccgcaggcgtggcacacgcttgcgggaacgttgccctgttgcgccatctcgccagagatctccgcagaacaggtagccgatttccttcagcatcgcctgctaaaactgaagccgggtcacaccgctggcgccgctcctctccccctgatgaactcactcgctatccagccgcgctggcaggccgtggtggaacgctggttagcatttctggtgacacaacggcgactgaagcccgctgctgaaggttatcaggtctgcgctggtgaagaacgcgaggatgagcacccgcacttcagcggacatgatttaacgttatcgcaaattcttcgcggtgcccgtaacgaactgtcgttactgaacgacgcgcagtggtccccggaaagcctggcctttaaccatccggccagcgccccgtatattcaggaactggcgacaatttgccaacagcttgcacagcgcttacagcgcccggtacgcctgcttgaggtgggaacccgcactggccgcgccgcagaatcgctgttagcacagctcaacgccggacagattgagtatgtcgggcttgagcagagccaggagatgctgctgagcgcccggcagaggctcgccccctggcctggcgcccgtctgtccctctggaatgcagacacgctggcggcgcacgctcactcggcggacattatctggcttaataacgccctgcatcgtctgctgccggaagatcccgggctccttgcgacattacaacagcttgccgttcccggcgcgctgctctacgtgatggagtttcgccagttaacgccgtccgccctactcagcacgctcctgttaaccaatgggcagccggaggccttgctgcataacagcgccgactgggcggcattatttagcgcggccggcttcaactgtcagcatggcgatgaggtcgcggggttacaacgcttcctcgtacaatgtcctgacaggcaggtgcgccgcgatccccgtcaacttcaggccgccctcgccgggcgtctgccggggtggatggtgccgcaacggatcgtcttcctcgacgccttaccgctgacggctaacgggaaaattgactaccaggcgctgaagcgtcgtcatacccctgaagcggaaaacccggccgaagcggatttaccccagggcgacattgaaaaacaggttgccgccctctggcagcaactcttatcaactggcaatgtcaccagagaaaccgacttcttccagcaaggcggcgatagcctgctggcgacccgtctgaccgggcaacttcatcaggcaggttatgaagcgcaattaagcgacctgtttaatcatccccggctggcggattttgccgccacgctgcggaaaaccgacgtcccggtcgaacaaccattcgtccactcccctgaagatcgctaccagccctttgcgcttaccgacgtgcagcaggcttacctggtggggcgtcagccgggctttgccctgggcggcgtcggctcacatttctttgttgaatttgaaattgccgatctggatctcacccggttggagacggtctggaaccgattaatcgcccgccacgatatgctacgcgccgtcgtgcgtgatggacagcaacaggtgctcgaacagacgcctcgctgggtaatacccgcacacatcctccatacgcctgaagaggcgttgcaggtgcgcgaaaaactggcccatcaggtactcaaccccgaagtctggccggtattcgatctccaggtcggttacgttgacgggatgcccgcccgcctgtggctgtgtctggataacctgttacttgacgggctgagcatgcagattctgttggcggagctggaacatggctaccaatatccgcaacagttgcctccgccgctacccgtcacctacagggattacctgcaacaacccgcgatccagtcgcttaacgcagattctctggcatggtggcaggcgcaacttgatgatattcctccggcgcctgcgttgccgctgcgctgcttgcctcaggaggttgaaacaccgcgcttcgcccgcctgaacggcgcgctggacagcacgcgctggcatcggctgaaaaaacgggcggctgacgcccatctcaccccgtcggccgtactgttgtcggtgtggtcaacggttctctctgcatggagtgcacagcctgagttcacgcttaaccttacgcttttcgacaggcgaccgctgcacccgcaaatcaaccagattctgggcgatttcacctcgctgatgctgctgagctggcatcccggcgaaagctggctgcacagcgcgcagtcactacagcagcggctgagccagaacctcaaccaccgcgatgtgtcagccatccgcgtgatgcgtcaactggcgcaacggcaaaacgtgcctgccgttccgatgcccgtcgtctttaccagcgcactgggctttgagcaggataacttcctcgcccggcgtaatctgctcaaaccggtctggggcatctcccagacgccgcaggtctggctcgatcaccagatttatgaatccgaaggcgaactgcgctttaactgggattttgtcgccgcgctgtttcctgccgggcaggtggagcgccagtttgaacagtattgcgcattgctaaaccgaatggccgaggatgaaagcggctggcaactgccgctcgccgcgctggtgcctcccgttaaacacgcagggcaatgcgcagagcgctcaccgcgcgtatgccctgagcactctcagccacacattgcggcggacgagagcaccgtcagcctgatttgcgacgccttccgcgaggtggttggcgagtctgtcacgcccgcagaaaacttctttgaggcgggcgcaacgtcgctgaatctggtgcaactgcacgttttgttacaacgtcacgaattttccaccctgacgttgcttgacctcttcacccacccttctcctgctgccctggccgattatctggccggcgtcgccacggtggagaaaacaaaacgacctcgccctgttcgccgtcgtcagcggcggatatag

SEQ ID NO: 3637 - DNA, 9492 bp, Escherichia coli
atggataacttgcgcttctcttctgcgccgacagcagattccattgatgcatcgatcgctcaacactacccggactgcgaacctgtcgcggttatcggctacgcctgccattttcctgaatcgccggatggcgaaacgttctggcaaaatctgctggaaggtcgtgaatgcagccgacgctttacgcgcgaagagcttctggccgtcggtctggatgccgccatcattgacgatcctcattatgtcaatatcggtacggtgttagacaacgccgactgcttcgacgccaccctgtttggctattcgcgacaggaagcggagtcgatggacccgcagcagcgcctgtttttgcaggcggtctggcatgcgctggaacatgccggttatgcccccggcgccgtcccccataagaccggcgttttcgcctcttcccggatgagtacctaccccggtcgcgaagcattgaacgtgacagaagtcgcgcaggtaaaaggtctgcaatctctgatgggcaatgataaagactatattgccacccgcgccgcgtacaaactcaacctgcacggcccggcgttatcggtacagaccgcctgctccagctcgctggttgccgtgcatctggcctgtgaaagcctgcgcgcaggcgaatccgatatggcggttgccggcggcgtggcgctctctttcccccagcaggcaggctaccgctaccagcccggaatgattttctctcctgatggtcactgtcgtccctttgacgcctcggctgagggcacctgggccggtaacggtctcggctgcgtggtgctgcgtcgcctgagagacgcgctgctgtcaggcgatccgattatctcggtgatcctctccagcgcggtcaacaacgacggcaacagaaaggtcggctataccgccccttccgtcgcagggcaacaggcagtcatcgaagaggcgttaatgctggcggccatcgacgacaggcaggtaggttacattgaaacccacggcaccggcacaccgctgggcgacgcgattgaaattgaagcgttacgcaacgtctatgcgcctcgcccgcaggatcagcgctgtgcgctcggttccgtgaaaagtaacatgggccatctggataccgcggcgggcattgccggactgctgaaaaccgttctggcagtcagtcgcgggcaaattcctcccttactgaattttcacacccccaacccggcgctgaaacttgaagagagcccctttaccataccggtgtcggcacaggcatggcaggacgaaatgcgctatgcgggcgtctcctcctttggtattggcggcaccaactgccatatgatcgtcgcctcgctgcccgacgcgctcaacgcgcgcctccccaatacggatagcggcagaaaaagtaccgcgctgctgctcagcgccgccagcgacagcgcgttgcggcggctggcgacggattatgccggggcgctgagagagaatgcggatgccagctctctggccttcacagccctgcacgcgcgccgtctcgatcttcctttccgcctggcggcgccattaaaccgtgaaaccgccgaggcgctcagcgcctgggctagtgagaaatcgggggcgctggtttacagcggccacggcgccagcggcaagcaggtgtggctgtttaccggccagggctcgcactggcgcactatgggtcaaacgatgtaccagcactcaacggcgtttgccgacacgctggatcgctgtttttccgcctgtagcgaaatgctcacgccgtcactgcgcgaagcgatgtttaaccccgattcggcgcagctggacaatatggcctgggcgcagccggcgattgtcgcgtttgaaatcgcgatggcggcgcactggcgtgctgaaggactgaagccagacttcgccattgggcattccgtcggtgaatttgccgctgccgttgtctgcggacactatacgattgaacaggtcatgccactggtttgtcggcgcggcgcgctaatgcagcagtgcgcaagcggcgcgatggtggcggtatttgcagacgaagacacgctgatgccgctggctcgccagtttgagctggatctcgccgccaacaacggtacgcaacatacggtattttccgggccggaagcccgtctcgcggtattttgcgccacgctctcgcagcatgacattaactatcgtcgcctgagcgtaaccggtgcggcgcactccgctttactggagccgatactcgatcggttccaggacgcctgcgcgggactgcacgcggagccggggcaaataccgattatttccacgctcaccgccgacgtcattgatgagtcaacgctcaaccaggcggattactggcgccgacacatgcgccagccggtgcgttttatccagagtattcaggtggcgcatcagctcggcgcccgcgtttttctggagatggggcccgatgcccagttggttgcttgcgggcagcgcgaataccgcgataacgcatactggatagccagcgcccggcgtaacaaagaggcgagcgatgtcctcaatcaggccctgctccagctttacgctgccggcgtcgccctaccgtgggccgacctgctggcgggcgatggacaacgtatcgctgcgccatgttatccgtttgatactgagcgttactggaaagagcgcgtctccccggcctgcgagcctgccgacgcagcgctgtctgccgggctggaggtggcgagtcgcgccgcgacagcgctcgatctccctcgcctggaagcgcttaaacagtgcgccacgcgactgcacgccatctacgtcgatcaactggtacaacgctgtaccggcgatgccattgagaacggcgtggacgccatgaccatcatgcgccgtggacgtctgctgccccgctaccagcagctactccagcgcctgctgaataactgcgtggtcgacggcgattaccgctgcaccgacgggcgatacgtccgcgcccgccccattgaacatcaacagcgggaatcactgctgacggaacttgccggttattgtgaaggttttcaggctattcccgacaccatcgcccgtgccggcgatcggttatatgaaatgatgagcggcgcggaagaaccggtggcgattatcttcccgcaaagcgcctccgacggcgtggaagtgctgtatcaggaattcagctttggccgctatttcaaccaaatcgccgccggggtattacgcggcattgtccagacgcgtcagccccgccagccgttgcgtattcttgaagttggcggcggaaccggcggcaccaccgcgtggctgctgccggaactcaacggcgttccggcactggagtaccatttcaccgatatctcggcgctgttcacccgtcgcgcccagcagaaattcgccgactacgattttgtgaagtatagcgagctggatctcgaaaaagaggcgcagtctcagggtttccaggcacagtcttacgatcttatcgtggcagcgaacgtgattcacgccacccgccatattggccgcacgctcgataatctgcgccccctgctcaagccgggcgggcgcctgctgatgcgcgaaatcacccagccaatgcgtctgtttgacttcgttttcggcccgctggttcttccgctacaggatctcgacgcccgcgaaggtgagttattcctcaccaccgctcagtggcaacaacagtgccgccacgccggattcagcaaagtggcgtggctaccgcaggatggcagcccgaccgccgggatgagcgaacatatcattctcgccacgctgcccggtcaggcggttagcgccgtaacattcaccgcgccatcagaacccgtgttggggcaggcgctgacggataacggtgattatctcgccgactggtctgattgcgcaggtcagcccgaacagtttaacgcccgctggcaggaggcatggcgtctgctttcacagcgtcatggcgacgctctgcctgtggaaccgccccccgtcgccgccccggagtggctggggaaggttcgcttaagctggcaaaacgaagccttttcccgcggtcagatgcgcgttgaagcccgtcatcctgctggcgagtggctgccgctatcgcccgccgcgcctcttcctgcgccgcaaacgcattatcaatggcgctggacgcccctcaacgtcgccagcattgaccatccgcttacctttagcttcagcgccggtacgcttgcgcgcagcgacgagctggcgcaatacggcatcattcacgatccgcacgcctcttcacgactgatgattgttgaggagagcgaggatacgctggccttagcggagaaagtgatagcagcgctcaccgccagcgcagccggattgattgtggttactcgccgcgcgtggcgagtcgaggaaaatgaagcactctctgcatcccatcacgcgctatgggccttgcttcgcgtcgcggccaacgaacagccggaacggttgcttgccgccatcgatctcgccgaaaacaccccgtgggaaacgctgcatcaagggttgagcgcagtctcactatcacagcgctggctcgccgcacggggtgacaccctttggcttccttcactgtcgcccaatacgggatgcgccgctgaattaccggcaaacgtgtttaccggcgatagccgctggcatctggtgaccggagcgtttggcggattaggccgccttgccgtgaactggctcagagaaaaaggggcgcgacgcatcgccctgctggcgccgcgcgtggatgagtcatggctacgcgacgtggagggcgggcagacgcgcgtctgccgttgtgatgtgggcgatgccgggcaactggccacggttcttgacgatctggcggccaacggcggcattgccggagcgattcatgccgctggcgtattggctgacgcgcccttgcaggagcttgatgaccaccagctggctgccgttttcgcggtaaaagcgcaggcggcaagccagctgttgcaaaccctgcgcaaccacgacggacgctatcttattctctactcttccgctgccgccaccctcggcgcgccgggtcagagcgcccatgcgctggcctgcggctacctggacgggctggcccagcagttttccacccttgatgcgccgaaaacgctctctgtcgcctggggcgcatggggagaaagcggtcgggcggccacgccggaaatgctggcgacgctcgccagccgaggtatgggcgcgttaagcgatgccgaaggctgctggcacctggaacaggcggtgatgcgcggcgccccgtggcgactggcgatgcgcgtttttaccgacaaaatgcccccgttacaacaggctctgtttaacatcagcgccacagaaaaagccgcaacgccggtcattcctcctgctgatgacaacgcctttaacggcagcctgagcgatgaaacagcggtgatggcatggctgaaaaagcggattgcggttcagctaaggctgagcgatccggcgtcactgcatccaaaccaggatctgttgcaactcggcatggactcgctgctcttccttgaactcagtagcgatattcagcactacctgggtgtacgcatcaatgcggaacgggcgtggcaggatctgtctcctcatggactcacgcagcttatctgttctaagccagaggcgacgcctgccgcttcgcagccggaagtgttgcggcacgacgccgacgagcgttatgcgcccttccctttgacgcccattcagcacgcctactggctggggcgaacccacctcattggctatggcggcgtcgcctgtcacgtcctgtttgagtgggataaacgccacgatgagttcgatctcgccatactggagaaagcatggaaccagctcatcgcacgccacgatatgttgcgtatggtggttgatgccgacgggcagcagcgaatcctggcgacaacgccggagtatcacatcccacgtgacgatctgcgcgcgctttccccggaagaacagcgcatcgcgctggaaaaacggcggcatgaactgagctatcgcgttttgcctgccgaccagtggcctctttttgagctggtggtcagcgaaatcgacgattgccattaccgtctgcatatgaacctcgaccttttgcagtttgatgtgcagagttttaaagtcatgatggacgacctggcgcaggtctggcgcggtgaaacgctggcaccgctcgctattaccttccgtgattatgtgatggctgaacaggcgcgccgacagacatcggcatggcacgatgcctgggattactggcaggaaaaactgccgcaactgcccttagcgccagagctgccggtggttgagacgcccccggaaacgccacacttcaccaccttcaaatcgacgatcggcaagacagaatggcaggccgtgaaacagcgctggcagcagcaaggcgtcacaccgtctgccgcgctgctcacgctgtttgccgccacccttgagcgctggagccgtaccacaacatttacgctgaacctgacgttcttcaatcgccagccgatccatccgcaaatcaaccagttgattggtgattttacctccgtcacgctggttgattttaacttctcagcgccggtgacgttgcaagagcagatgcaacagacccaacagcgcctctggcaaaacatggcgcacagtgaaatgaacggtgttgaggtgatccgtgagctgggccgcctgcgcggatcacaacgtcaaccgctgatgccggtagtgtttaccagtatgctggggatgacgctggaaggcatgactatcgatcaggcgatgagccatctgttcggcgaaccctgctatgtattcacgcaaacgccgcaggtctggctggatcatcaggtcatggagagcgacggcgagttgatgtttagctggtactgcatggacaacgtgctggaacccggcgctgccgaggcgatgtttaatgactattgcgccatcctgcaagccgtcatcgccgcccctgaaagcctgaagactctcgccagcggcatcgccgggcacattccccgccgacgctggccgctgaacgcgcaggcggactacgacctgcgggatattgagcaggcgacgctcgaataccccggcatccggcaggccagagcggaaataaccgaacagggcgcgttgacgctggatatcgtgatggccgacgatccttcgccatcagcggagatgcctgatgagcacgaacttacccaactggcgctgccgttgcctgagcaggcgcagcttgatgagctggaggcgacctggcgctggctggaggcgcgtgcgctacaggggatcgcggctacgctaaatcgtcacggcctgtttaccacgccggagatcgcccatcgctttagcgcaatagtacaggcgttgtccgcgcaagcgtctcaccagcgtctgctgcgccagtggctacagtgtctgacggaaagagagtggttaatccgcgaaggtgaaagctggcgctgccgcattccgctcagcgagattcctgagcctcaggaagcgtgcccgcaaagccaatggagccaggcgctggcgcagtatctggaaacctgcatcgcccggcacgacgccctcttctccgggcagtgttctccgctggaattgctgttcaacgagcagcatcgcgttaccgacgcgctgtatcgcgacaaccccgccagcgcctgtctgaatcgctataccgcgcagattgccgccttgtgcagcgcagaacggattctggaggttggcgccggaaccgcagccactaccgcgccggtgctgaaggccacgcggaacacgcggcagtcgtaccacttcacggacgtctccgcgcagttcctcaatgacgccagagcccgtttccatgatgaatcgcaggtgtcttatgccttgttcgacatcaaccagccgctggatttcaccgcccacccggaggcgggttacgacctgatcgttgccgtcaatgtgctccacgacgccagccatgtcgtccagacgttgcgcagattaaaactgttgctgaaagccggcggacgtttgctgatcgttgaagcgacggagcgaaacagcgtattccagctggcgagcgtgggctttattgagggattaagcggataccgcgatttccgccgccgggatgagaaaccgatgctcacccgctccgcatggcaggaggttctcgttcaggccgggtttgcaaacgagctggcgtggcccgcgcaggaatcgtcgccgctgcgccagcatctgctggtagcacgttcgcctggcgtaaatcgcccggataaaaaagccgtgagccgctatttacagcagcgctttggcaccggtctgcccattttacagatccggcaaagagaagcgttatttacgccgctgcatgccccgtctgatgcgccgactgagccagccaaacccacgccagttgccggggggaatccggcgctggaaaaacaggtggctgaactctggcaatcgctgctgtctcgccccgtggcaaggcatcacgactttttcgaactgggcggcgacagcctgatggcgacaaggatggtcgcgcagctaaaccggagagggattgccagggctaaccttcaggatctgttcaaccattcgacgctgagcgacttctgcgcccatctacaggcggctacgtcaggagaggacaacccgatacccctttgccagggcgacggtgaggaaaccctgtttgtcttccacgcttcagacggcgatatcagcgcctggctgccgctcgctagcgcgttgaacaggcgcgttttcggcctgcaagcaaaatcgccgcagcgctttgccacgctcgaccagatgatcgatgagtatgtcgggtgcatccgtcgtcagcagcctcacggcccttatgtgctggcgggttggtcgtatggcgcgtttcttgcggcgggcgccgcacaacgcctgtacgccaaaggcgagcaggttcggatggtgttaatcgatcccgtgtgccgacaggatttctgttgcgaaaaccgggcggccctgctgcgcctgttagccgaaggacaaacgcctctggcactgcccgaacatttcgaccagcagacgcccgacagccagcttgccgactttatcagcctcgctaaaacggccggtatggtgtcgcaaaacctgacgctgcaagcggcagaaacgtggctcgacaacatcgcgcatctgctgcgtttactgactgagcatacgccgggcgaaagcgttccggtcccctgtctcatggtgtatgccgccgggagacccgcgcgctggacgccagcagaaaccgagtggcagggctggataaacaacgccgacgacgctgtgattgaagccagccactggcaaatcatgatggaagcctcccacgttcaggcttgtgcgcaacacattacgcgctggctttgcgcaacctcaacgcaaccggagaacacgttatga

SEQ ID NO: 3638 - DNA, 1101 bp, Escherichia coli
atgatgccgtccgcctccccaaaacaacgcgtactgattgtgggcgccaaatttggcgaaatgtacctgaatgcctttatgcagcccccggaggggctggaactggtcggcctgctggcgcagggaagcgcccgttcaagagagctggctcatgcgtttggcattccgctgtatacctcgccggaacagataaccaggatgccggatatcgcctgtattgtcgtgcgttcgaccgtcgccggaggaaccggtacgcagcttgccagacactttctgacgcgcggcgtacacgtcattcaggagcatcccctccacccggatgacatcagttccttacaaacgctggcgcaggaacagggctgctgctattgggtaaacacgttttatccgcatacgcgcgcgggacgcacatggcttcgcgatgcgcagcagctgcgtcgctgtctggctaagacgccgcaggtggtccacgccaccaccagccgacagttgctctactccactctggatttgttgttgctggctctgggcgttgatgccgccgccgtggagtgcgacgtggttggcagctttagcgattttcactgtctgagactcttctggccggagggagaagcctgcctgctgcttcagcgctatctcgatcctgacgatccagatatgcatagccttatcatgcaccgcctgctgctgggctggccggaaggtcatctttcgctggaggcgagctacggccccgtcatctggtcatccagcctgtttgtcgcagaccatcaggagaacgcccacagcctctaccgcagaccggagatcctgcgcgatctgccgggtctgacgcgcagcgcggcgcccctgagctggcgcgactgctgcgaaaccgtcgggccggagggcgtcagctggttgctacaccagttgcgcagccatctggcgggcgaacatccaccagcggcctgccaaagcgtacatcagatcgcgttatcacgtttatggcagcagattttacgtaagaccggcaatgcggagatcagacgcctgacgccgccgcaccacgaccggttagccggtttctacaacgatgatgataaggaggcgctgtga

SEQ ID NO: 3639 - DNA, 804 bp, Escherichia coli
gtgacgcaatctgcaatgtgcatcccgctgtggcccgcccggaacggcaatactgcgcatctggtcatgtgccctttcgctggcggcagcagtagcgcgtttcgccactggcaagctgagcaactggctgattgcgcgctttctctggtgacctggccggggcgcgatcgccttcgccatctggaaccgctcagaagcattacacaactggcggcactgctggcgaacgagctggaagcatccgtatcgcctgacacgccgcttttactcgccgggcacagcatgggggcgcaggtggcgtttgaaacctgccgacttctggagcaacaggggcttgcgccacaaggactgattatttccgggtgccatgccccgcatctgcattctgaacgccagctcagccatcgcgatgatgccgactttatcgctgagctgatagacattggcggatgttctcctgaactgcgggaaaaccaggaattaatgtcgctgtttcttcctcttctgcgcgctgatttttacgccaccgagagctatcactacgactcgcccgacgtctgtccgccgctgcgcacgcctgcgctgttattgtgcggcagccacgatcgcgaagcctcctggcagcaggtcgatgcctggcgtcagtggctgagccacgttacaggcccggtggtgattgacggcgatcatttctatcccattcaacaagcccggtccttttttacgcagattgtccgccattttccccacgcattttctgcaatgaccgcgtggcaaaaacagcccagtacttcagaaaggtga

SEQ ID NO: 3640 - DNA, 1578 bp, Escherichia coli
atgaattcttcctttgaatctctgattgaacagtatcccttacccattgccgaacagttgcgccactgggcggcccgttatgcctcgcgaattgccgtcgttgatgcaaaggggtcgttaacctacagcgcgcttgatgcacaagttgacgaacttgccgcaggtctgtcatcactgggtttgcgttcgggggagcatgtaattgtgcagcttcccaacgacaacgcgtttgttaccctgctgttcgccttgttaagactgggcgttatccccgtgctggcgatgccctcgcaacgggcgctggatatcgacgcgctgattgagctggcgcaacccgtcgcttacgttattcacggggaaaaccacgcagagctggcccgacagatggcgcacaaacacgcctgcttgcgtcatgttctggtcgctggagagaccgtaagcgacgattttacgccgctctactcccttcacggtgagcgacaggcatggccgcagcctgatgtttccgccaccgcgttgttgttgctctcaggcggcacaaccggcacgcccaaactcatcccgcgccgacatgccgactatagctataacttcagcgcttctgctgaactgtgcggcatcagccaacagagcgtgtatctcgccgtcctcccggtggcgcataactttccgctggcctgccccggtattctgggaacgcttgcctgcggcggaaaagtggtgctgaccgacagcgccagctgtgatgaggtgatgcctttaatcgcgcaggaaagagtgactcacgtcgccctggttccggcgctggcgcaattatgggtgcaggccagggagtgggaagacagcgacctttcgtcgctgcgcgtcattcaggcaggcggcgcccggctcgacccgacgcttgctgagcaggttatcgccacctttgactgtaccctgcaacaggttttcggtatggcggaaggcctgctctgttttacccggctggacgatccgcatgccaccattctccacagccaggggcgcccgttgtcccctctggatgaaatccgcatcgttgatcaagacgagaacgacgtcgcgccgggcgaaaccgggcaattgttaacgcgcggcccttataccatttcgggctattaccgcgcccctgcccacaacgcgcaggcctttaccgcgcaagggttttaccgcacaggcgacaatgtcaggctggatgaggtggggaacctgcacgttgagggacgcataaaagagcagatcaaccgcgccggagaaaaaatagccgcggctgaagtggaatcggcactgctgcgtttagcggaagtgcaagattgcgcggtggtcgccgcgccggacacgctgcttggcgagcggatttgcgcgtttatcatcgcgcagcaggtgccaactgactatcagcagttgcgtcaacaactgacccgtatggggctcagcgcgtggaaaattcctgaccaaatcgagtttctggaccactggccgctcaccgccgtcggcaagatagacaaaaaacgcctgacggctctcgccgtcgaccgttatcgccattctgcccaataa

SEQ ID NO: 3641 - DNA, 2022 bp, Escherichia coli
atgaaaatgacacggctttatcctctggccttggggggattattgctccccgccattgctaatgcccagacttcacagcaagacgaaagcacgctggtggttaccgccagtaaacaatcttcccgctcggcatcagccaacaacgtctcatctactgttgtcagcgcgccggaattaagcgacgccggcgtcaccgccagcgacaaactccccagagtcttgcccgggctcaatattgaaaatagcggcaacatgcttttttcgacgatctcgctacgcggcgtctcttcagcgcaggacttctataaccccgccgtcaccctgtatgtcgatggcgtccctcagctttccaccaacaccatccaggcgcttaccgatgtgcaaagcgtggagttgctgcgaggcccacagggaacgttatatggcaaaagcgctcagggcgggatcatcaacatcgtcacccagcagccggacagcacgccgcgcggctatattgaaggcggcgtcagtagccgcgacagttatcgaagtaagttcaacctgagcggccccattcaggatggcctgctgtacggcagcgtcaccctgttacgccaggttgatgacggcgacatgattaaccccgcgacgggaagcgatgacttaggcggcacccgcgccagcatagggaatgtgaaactgcgtctggcgccggacgatcagccctgggaaatgggctttgccgcctcacgcgaatgtacccgcgccacccaggatgcctatgtgggatggaatgatattaagggccgtaagctgtcgatcagcgatggttcaccagacccgtacatgcggcgctgcactgacagccaaaccctgagtgggaaatacaccaccgatgactgggttttcaacctgatcagcgcctggcagcagcagcattattcgcgcaccttcccttccggttcgttaatcgtcaatatgcctcagcgctggaatcaggatgtgcaggagctgcgcgccgcaaccctgggcgatgcgcgtaccgttgatatggtgtttgggctgtaccggcagaacacccgcgagaagttaaattcagcctacgacatgccgacaatgccttatttaagcagtaccggctataccaccgctgaaacgctggccgcatacagtgacctgacctggcatttaaccgatcgttttgatatcggcggcggcgtgcgcttctcgcatgataaatccagtacacaatatcacggcagcatgctcggcaacccgtttggcgaccagggtaagagcaatgacgatcaggtgctcgggcagctatccgcaggctatatgctgaccgatgactggagagtgtatacccgtgtagcccagggatataaaccttccgggtacaacatcgtgcctactgcgggtcttgatgccaaaccgttcgtcgccgagaaatccatcaactatgaacttggcacccgctacgaaaccgctgacgtcacgctgcaagccgcgacgttttatacccacaccaaagacatgcagctttactctggcccggtcgggatgcagacattaagcaatgcgggtaaagccgacgccaccggcgttgagcttgaagcgaagtggcggtttgcgccaggctggtcatgggatatcaatggcaacgtgatccgttccgaattcaccaatgacagtgagttgtatcacggtaaccgggtgccgttcgtaccacgttatggcgcgggaagcagcgtgaacggcgtgattgatacgcgctatggcgcactgatgccccgactggcggttaatctggtcgggccgcattatttcgatggcgacaaccagttgcggcaaggcacctatgccaccctggacagcagcctgggctggcaggcgactgaacggatgaacatttccgtctatgtcgataacctgttcgaccgtcgttaccgtacctatggctacatgaacggcagcagcgccgtcgcgcaggtcaatatgggtcgcaccgtcggtatcaatacgcgaattgatttcttctga

SEQ ID NO: 3642 - DNA, 750 bp, Escherichia coli
atgtcaaaaaaatatcagccattgcttataactcattatatttcaacatgggtcactataacggaagcagttgagatcactaccaaagccataaaacaaaaaattactcctagcgatatttatcgtcatgccttgagtggcaacatcctactatcggtctatttccagtctcctgtgatacttaagaagatacaaacttttaatggaaaaataaaattcaggcagtttgtgggagacctacttgataaactatgcatgcttgacagggacggttttatttatggtcaaaatttaagactctgtacagaagccagatatgtttgtcctgtgcaacaaattatagatacccccctgttacgcaaactcaaccagtttcgtacgtttgttcgtaatgtccgcccgggtgatgaactggatgtcccggcacaagttagtgaaaaaaatttaaccccgccgccgggtaacagcagtggcaaccttgagcaacagatagccagtacttcacagctaattggatctctgctcgccgaagatatgaacagcgagcaagcggcaaacatagcacgtggatgggcctcttctcaggcttcagggataatgacagactggttaagccgcttcggtaccgcaagaatcacgctgggcgtggatgaagatttcagcctgaaaaactcccgtgacggcaaccctcgaaaatggcgattcgatgcaacaaacagtgaactatgtgccgaacgtcacgaatgctga

SEQ ID NO: 3643 - DNA, 1959 bp, Escherichia coli
gtgaaggcgaacttcacgctgagcgatggcgacaaagcggttactgatgccgatggcaaagcgaaagtcacgctgaaaggtacaaaagcaggcgctcataccgtgacagcatcgatggttggcggtaagagtgagcagttggtggtgaactttactgcggatacgctcactgcgcaggttaatcttaacgttaccggggacaatttcatcgccaataacattggaatgaccaggctacaggcaacagtgactgatggaaacggcaacccagtagaaggtataaaagttaatttccgtggaacctccgtcacgctaagcagcaccaacgttgaaacggatgatcaggttttcgctgaaattcttgtgacaagcaccgaggtcggactaaaaacagtttcagcctctctggcagataaacctactgaagtcatctcgcgattactgaatgccaaggtagatgttaattctgcgacgattaccagtcaggagatacctgaaggtcaggtcatggtcgcacaagacatagcagttaaagctcacgttaacgaccagtttggcaacccggtgacgcatcaacccgcgacattcagtgcagcgccatcctcgcaaatgatcatcagccagaacacggtctctactaatacgcagggagtagccgaggtcaccatgacgtctgaaagaaacggctcgtatactgtaaaagcatccctagcgaatggagcttcacttgagaaacaactggaggctattgatgaaaaactgacactcacgtccagtccgcttatcggtgtcaatgctcctaaaggcgctactctgacggcaacgctaacctctgcaaatggcactccagtggagggtcaggtcatcaactttagcgtaacgctagaaggtgcgacgttaagtggcggaaaagtgagaaccaactcttcaggtcaggctccagtcgttctgaccagcaataaagtcggtacatatacggtgactgcatcgttccataacggcgtcacaatacagacacagacaaccgtgaaggttactggcaacccaagcaccgcacatgttgctagctttatcgctgatccgtcgactatcgccgccaccaacagtgatttaagtaccttaaaggcaacggttgaggatggcagtggtaacctgatcgaaggtctcactgtgtacttcgccttaaaaagcggctccaccacattaacgtcattaacagccgtgaccgatcaaaacggaatcgcgacaacaagcgtgaaaggagcgataacggggagcgtcactgtaagcacagtcacaagcgcaggtggaatgcaaacagtagatatatcgctagtggcaggcccagcagacgcctcgcagtccatccttaagaacaaccagtcatcactgaaaggggactttaccgatagtgctgagctacatcttgttctgcacgatatatcaggcaatccgatcaaagtttctgaagggatggaatttgtgcaatcaggtacaaacgtgccctatatgaaaattagcgcaattgattacagtcaaaatatcaacggtgattacaaagctactgttacaggaggcggagagggtatcgcaacgctgatccccgtattgaatggtgttcatcaggcgggtctgagtaccacgataaaattcattagcgcggaaaccagaccaatgacgggtacagtgtcagtgaatagtgcaaacctaccgacagcttcattcccttcgcagggatttaccggggcgtattatcagttgaataatgacaactttgcaccaggaaaaacggcggctgattattcgttttcaagctcggcctcctgggtaggcgttgatgctactggtaaagtgacattcaaaaatgacggtgatagcaatactgtaataatcacagcgcccccaagatccggtggtgctatttaccaaacagttcctcctgaatcgcgttcggtgtga

SEQ ID NO: 3644 - DNA, 1053 bp, Escherichia coli
atgtttttagcatcattgttgagacgtattgcatttagttactacgattataaagcttttaatttcaatattgaaaaaacagagtttgttgttatccatattcccgatcagattggcgatgctatggccatctttccagttattcgggcgcttgaattgcataaaattaaacatcttttaattgttacgtcgacaattaatttagaagtctttaacgcgctcaaacttgaacagactaaattaacattagtcacaatgactatgcaggatcacgcaacattaaaagaaataaaagatttagcgaagaacataacacagcaatacggtacgccggatctttgtatagaggcgatgcgtaaaaagaacctgaaaacgatgatatttatcagtcagttgaaagcaaaaacgaattttcaggttgttggtttaaccatgaagtgctattcccctttgtgtaagagcgcgtcccggatggatcagaatctccgggctcctgtacccatgacatgggcatttatgatgcgtgaggcgggttttccagcagtcaggccaatatatgaattgccactaagtaaggatgtactcgatgaggtacgcgaggaaatgcgatcgttaggatcttacattgcgcttaatttagaaggtagctcgcaggaacgtacattttcattatcgattgcagaaaatctaatagaaaaaattcaaagtgaaacagatataccaatagtgatcgttcatggaccaaaaggggaagaaaaagccagggtgttagtggattgttataataatgtctaccgtttatccttatcaccctcgattaaacgttcagcagcaatcataaaagatgcttatatcgcaataactcctgacacctcaatattacatatggcaagtgcctataatacccccgttgttgcaatttatgctgattacaaaacgcgatggccagcaatggccgatgtttcggagtcagtcgtcgttgggcaaaaaattgacaatataagtctggatgatttcgcaaaggcattaaaaagtgttttggcgagaatttga

SEQ ID NO: 3645 - DNA, 1317 bp, Escherichia coli
atggactccacgctcatctccactcgtcccgatgaagggacgctttcgttaagtcgcgcccgacgagctgcgttaggcagtttcgctggtgccgtcgtcgactggtatgattttttactctatggcattaccgccgcactggtgtttaatcgcgagtttttcccgcaagtaagcccggctatgggaacgctcgccgcatttgccacctttggtgtcggcttccttttccgtccgctcggcggtgtcattttcggtcactttggcgaccgactgggacgtaagcgcatgttaatgctaaccgtctggatgatgggtatcgcgacagccttgattggtattcttccttcattctcgactattgggtggtgggcccccattttactggtgacgctgcgtgccattcagggatttgccgtcggcggcgaatggggaggcgcggcgttactttccgttgaaagtgcgccgaaaaataaaaaagccttttacagtagcggtgtacaagttggctacggagtaggtttgctgctttcaaccggactggtttcattgatcagtatgatgacgactgacgaacagtttttaagctggggctggcgcattcctttcctgtttagcatcgtactggtactgggggcattgtgggtgcgtaatggcatggaggagtccgcggaatttgaacaacagcaacataatcaagcggccgcgaaaaaacgcatcccggttatcgaagcactattacgacatcccggtgctttcctgaagattattgcgctacgactgtgcgagttgctgacgatgtacatcgttaccgcctttgcacttaattattcaacccagaatatggggttaccgcgcgaacttttccttaatattggtttgctggtcggtggattaagctgcctgacaattccctgttttgcctggcttgccgatcgttttggtcgccgcagggtttatatcacaggcgcgttgatcggaacgttgagcgcatttcctttctttatggcgcttgaagcacaatctattttctggatagttttcttctccataatgctggcaaacattgcgcatgacatggtggtgtgcgtgcaacaaccgatgtttaccgaaatgtttggtgccagttatcgctatagtggcgctggagtcggatatcaggttgccagtgtggttggcggtggatttacacctttcattgccgctgcacttatcacttactttgccgggaactggcatagcgtcgccatttatttactggctggatgcctgatttccgcaatgaccgctttgttgatgaaagacaatcaacgcgcttaa

SEQ ID NO: 3646 - DNA, 1455 bp, Escherichia coli
atgaataataagggctccggtctgaccccagctcaggcactggataaactcgacacgctgtatgagcaatctgtagtcgctttacgcaacgccattggcaaatatattacaagtggcgaattacctgatgaaaacgcccgcaaacaaggtctttttgtctatccatcactgaccgtaacctgggacggtagcacaactaatccccccaaaacgcgcgcatttggtcgttttacccacgcaggcagctacaccaccacgattactcgccctactctctttcgttcgtatctcaatgaacaacttacgttgctgtatcaggattatggtgcgcatatctcggtgcaaccctcgcagcatgaaatcccttatccttatgtcatcgatggctctgaattgacacttgatcgctcaatgagcgctgggttaactcgctacttcccgacaacagaactggcgcaaattggcgatgaaactgcagacggcatttatcatccaacggaattctccccgctatcgcattttgatgctcgccgggttgatttttccctcgcacggttgcgccattataccggtacgccagtagaacattttcaaccgttcgtcttgtttaccaactacacacgttatgtggatgaattcgttcgttggggatgcagccagatcctcgatcctgatagtccctacattgccctttcttgtgctggcgggaactggatcactgccgaaaccgaagcgccagaagaagccatttccgaccttgcatggaaaaaacaccagatgccagcatggcatttaattaccgctgatggtcagggtattactctggtgaatattggcgtgggaccgtccaatgctaaaaccatctgcgatcatctggcagtgctacgcccggatgtctggttgatgattggtcactgtggcggattacgtgaaagccaggccattggagattatgtccttgcacacgcttatttacgcgatgaccacgttcttgatgcggttctgccgcccgatattcctattccgagcattgctgaagtgcaacgtgcgctttatgacgctaccaagttagtcagcggcaggcctggtgaggaagtcaaacagcggctgcgtacaggtactgtggtaaccacagatgacaggaactgggagttacgttactcagcttctgcacttcgttttaacttaagccgggccgtagcaattgatatggaaagtgcaaccattgccgcgcaaggatatcgtttccgcgtgccatacgggacactactgtgtgtttcagataaaccgttacatggtgagattaagcttcccggccaggctaaccgtttttatgaaggcgctatttccgaacacctgcaaattggcattcgggcgatcgatttgctgcgcgcagaaggcgaccgactgcattcacgtaaattacgaacctttaatgagccgccgttccgataa

SEQ ID NO: 3647 - DNA, 717 bp, Escherichia coli
gtgggacgtaaatgggccaatattgttgctaaaaaaacggctaaagacggtgcaacgtctaaaatttatgcaaaattcggtgtagaaatctatgctgctgccaaacaaggtgaacccgatccagaattaaacacatctttaaaattcgttattgaacgtgcaaagcaggcacaagttccaaagcacgttattgataaagcaattgataaagccaaaggcggcggagatgaaacgttcgtacagggacgttatgaaggctttggtcctaatggctcaatgattattgctgagacattgacttcaaatgttaaccgtacgattgctaacgttcgcacaattttcaataaaaaaggcggcaatatcggagcggcaggttctgtcagctatatgtttgacaatacgggtgtgattgtatttaaaggaacagaccctgaccatatttttgaaattttacttgaagctgaagttgatgttcgtgatgtgactgaagaagaaggtaatattgttatttatactgaacctactgaccttcataaaggaatcgcggctctaaaagcagctggaatcactgagttctcaacaacagaattagaaatgattgctcaatctgaagttgagctttccccagaagatttagaaatctttgaagggcttgttgatgcccttgaagatgacgacgatgttcaaaaagtttatcataacgtcgcaaatctctaa

SEQ ID NO: 3648 - DNA, 1455 bp, Escherichia coli
ttgaatatctcctctgctttacgccaggttgttcacggcactcgctggcactctaaacgcaagagctacaaagtgttgttctggcgcgagataaccccgcttgctgttcctatcttcatggagaacgcctgtgtcctgttgatgggggtcctgagcacttttctggtcagctggctgggaaaagatgcgatggccggcgtggggttggcggacagcttcaatatggtcattatggctttttttgcagctatcgatcttggtactactgtcgttgtagcatttagtctcggtaagcgggatcgacgacgagcgagggtggcgacgcggcagtcattggtgatcatgacgttgtttgccgtactgttggcaacgctaattcatcattttggcgaacaaattattgatttcgtcgcgggtgatgccacgacagaagttaaagcactggcgttgacttatctggagctgaccgtactcagttatccagcagctgccatcactcttattggtagcggggcacttcgtggtgcagggaatacgaaaataccgctactgattaacggtagcctgaatattcttaatattattattagcggcatattgatttacggccttttctcctggccgggactgggatttgtcggggctgggttgggtttaaccatttctcgttatattggcgcagttgcaattttgtgggtgctggcgattggttttaatcctgcgctaaggatttcattaaagagctattttaaaccgctgaattttagcattatctgggaagtcatggggattggtattccagcgagtgtcgaatcagtgctatttaccagtggtcggttattaacccaaatgttcgttgccgggatggggaccagcgttattgccggaaattttatcgcgttttcaattgcggctcttatcaacttacccggaagtgcgctcggctctgcttctacgatcattacaggccgaaggttgggggtagggcagatagcgcaagcagagattcagttgcggcatgtgttctggctgtccactcttggattaacggccatcgcctggctaacggctccctttgccggggttatggcatcgttttacacccaggatccacaggttaaacatgtcgttgtgattctgatttggctaaatgctttatttatgcctatttggtccgcctcatgggtgctacccgctggatttaaaggtgctcgtgatgcccgttacgccatgtgggtttcgatgttgagcatgtggggttgtcgggttgtagtcggttatgtgctgggaatcatgcttggctggggtgtggttggtgtctggatgggaatgtttgccgactgggctgtgcgggccgtgctgttttactggcgaatggttactggacgttggctatggaaataccctcgatccgagccgcaaaagtgtgaaaaaaagccagttgtgtcggaataa

SEQ ID NO: 3649 - DNA, 951 bp, Escherichia coli
gtgaatttccaacaactaaagataatccgcgaggctgcacgtcaggattacaacctgacagaggttgcgaatatgctttttacctcacagtcaggcgttagccgtcatattcgggaactggaggatgaacttggcatcgaaatatttgttcgacgaggtaagcgactgctgggcatgactgaaccgggcaaagcattactggtcattgcagaacgtattctgaatgaagccagtaatgttcgtcggcttgcagacctgtttaccaacgatacgtctggtgttctcactattgcaacgacgcatactcaggcatgttatagcttgccagaggtcattaaagcttttcgcgaacttttcccggaggttcggctcgagctaatccagggtacgccacaggaaattgcgacgttgttgcaaaatggcgaagctgatattggtatcgccagcgagcgtttgagtaatgacccgcagctcgtcgccttcccgtggtttcgctggcaccatagtttgcttgttccactcgatcatcccttaacgcaaattacaccattgacgctggaatcaatagcgaagtggccgttaattacttaccgacagggaattacggggcgctcacgcattgatgacgcatttgcccgcaaaggtttgccggcagatattgtattaagtgcacaggattctgatgtcattaaaacctatgttgctcttgggcttgggatcggattagttgccgaacaatccagcggcgaacaagaggaaaagaatttaatccgcctggatacgcggcatcttttcgatgctaatactgtctggttgggactgaagcgagggcaacttcagcgtaactatgtctggcgctttctggaactttgtaatgcaggactgtcagttgaggatatcaagcgccaggtgatggaaaacagtgaagaggaaattgattatcagatatag

SEQ ID NO: 3650 - DNA, 918 bp, Escherichia coli
atgaacttcagacgcctgaaatacttcgtaaaaattgtagatattggtagcctgacccaggctgctgaagtattgcatatcgcacaaccagcgctcagccagcaggttgccacactggaaggtgagttaaatcaacagcttttgattcgcacaaaacggggcgttacgccaacagacgccggaaaaattctctatacccatgcacgggccattttacgtcagtgtgagcaggcccaactggcggtgcataacgttggtcagtcattatcggggcaagtctcgattggctttgcgccaggaaccgctgcgtcatccatcaccatgcccttattacaggcggttcgcgctgaattcccggaggtcgttatctatcttcatgaaaatagtggtgcagtgcttaacgaaaaactgataaatcaccaactcgatatggcggttatttatgagcattcccctgtggctggggtatccagtcaggctttgctgaaagaagatcttttcctggtaggaactcaagattgcccggggcaaagcgttgatgttaatgctattgcgcaaatgaacctctttctccccagtgattacagtgctattagacttcgtgttgatgaggctttttccctacggcgactcacggcaaaagtcattggtgaaattgagtctattgccacgcttaccgcagcgattgccagcggcatgggcgttgcagtattacccgaatcggccgcgcgttcgttatgtggcgcagtaaacggatggatgtcacgcattaccacaccttcaatgagtctctctttgtcattaaatttacccgccagagcgaacttatcaccacaggcgcaagcagtgaaagagttgttaatgtcagtgatgagttctccagtgatggaaaaaaggcagtggcaattggtgagctaa

SEQ ID NO: 3651 - DNA, 561 bp, Escherichia coli
atgagtgttcaggaaaatactattaatattctgcatgaattagagaataatgcgctgaagattgacgattctcaggctgcacagtttatttcgcaaatcagaaatgcccggcatatttttttgcagggagctgggcgtagtggcattgctattcgcgcttttgctaatcgcttgctgcacttaggtttttcagtaagcgttgtgggagaaatatcatcaccgcatacccaacctggagatctattaattattgggtcaggcagtggtgaaactaccagtttgaaaagtctggcacaaaaagcagttgatagcggagtaaacgtcgctctggtcactatgaaagctgattcgacgatcggtaaattagctcaatctgtgttggtactaccaggaagtgtgaaagacgataacaatcgtgttgcaggcactttcgcgcaaccaatgggctcagcttttgagcaactctgctttattacttatgatgcaattgttctggcgttgatgtcggaactgggtgaaagcagtgccacaatgtttacccgacatgctgatctggaatga

SEQ ID NO: 3652 - DNA, 753 bp, Escherichia coli
atgagtaattttgcaggtaaagtgattttagttaccggaggtgctcacggtattggcaaagggatagctaaacaatttgctgatcgtggtgcacatactgttattgttgactataacgaagagaacggcaaggccactgcagcagagttaacttttggcgatgttaaatcgctgtttgttaaaacagatgtctccgatccacaggcattagtcgatgtacgggaaaaggtaattgctacctttggtcgtattgatgtgttgatattaaatgccggtgtggcatttgccaataaagttaacaatatttcttttgaggaatggaataagactatcgcaattaacttatcaggattatttaataccgttaaggcgttttatgatgatttcctgacaaataagggatctattgtttatatctcatcgggatcagcgctttcggggactgggggcggtgtgagttatcctgccagcaaagcgggaggtgaagggttgattcgcggtctggcaaaggagttaggaccaaaaggcgtcaatgttaatgcgatcgctcctcgcttaatagacaccggagagatgatgcgggtcaattatccaacacaagccgatttagacgctgtcctggaaaaaatacccgtccgtcgtctggggactatcgatgatgtggctaacctggcaatatttttggcggataaagataactcttatattcagggacaaaccattttaatggatggtggccggactattgcttaa

SEQ ID NO: 3653 - DNA, 645 bp, Escherichia coli
atggcaaaaatattaccttctatatttggcgcggatattttacgcctgaaagatgaaattcattttctggaagaggaacaaactgaaatattgcacgttgatttaatggatggcacttacgtcagtaatattgcctttggcccaaatcaaattgcagcaatgaaaaaagccagttcgatgatctttgatgtgcatatgatgctggcaaatcctgagcgacatattgatgatgtaatcaataccggggcggagatgatttctgtacattatgaatctacgccacatgtacattatattattcaaaaaatcaaaaaagcggggcgcaaagcaggtgttgtgcttaatcctgggacacctgaatctgtcatcgagtatttattagatgatattgattatatattgttaatgacaattaaccccgggcaaccaggccagacatttattcataaaagtctggagaaaatccgtaataccaaaaaaatgatatctggcagagatattcaaattgaagtggatggtggcgttaatcttgataatgtgaaacaagttaaagaagcgggggctgaccttattgttgttggcggtgcattatttaacaaacagcctcatgaaagttatcaggcattaaaaatcgctgttcagtga

SEQ ID NO: 3654 - DNA, 1254 bp, Escherichia coli
atggaaatgttgaaaaatttaatggaaacaatcaccggaatgggggcgactgcaatactgccgctggtgatatttattttaggtctggtgttcagaatgaaacccggtgccgcgatcaagtcgggcatcactgttggtattggttttattggtttaggtctggttgttggtttattaaacagttcattacagccagctattgagtattactcaaaagtaggcagtggctttacggttgcagatattggttggccagccgtcggtgctgctgcatgggtggcaccttttgccgcattagtgataccagttggcatcgtacttaacctgattctggtgcgtctgaaattaaccaaaacgttaaatgttgatatctggaactatatgcattttttagttccgggtgctctggcatattttgtgttcgacagttttatcatcggtttctctgtcgcggtggctttgagtattgcggctctgtttattggcgatttgattgcgcccagatggcaaaaatattatggactcgagggaacgacctgtaccacgatgattcatatcggctggactctaccgttcgcctgggtagtaaataaaatcattgattacatccccgggttaaataagttagatgttgacttaaacagcgtgcaaaaacgcctgggtgtctttggtgaacctgcaattatcggtattatcgttggcgcattactcggagttttaacgaaacaggccattaccacaattgttcccatggcgatgggggttgctggtgtaatggtattgttacctaaagtggtcggtgtgctgatggaaggtcttaacccgattgggaaaagtgccaaagaaatcatgcaaaaacagatgggtaaagatgctgaattaaacatcggtatggattgtgcactggcattgggggatccggcgacggtcaccgtgacagtcattaccattcctttaaccatgctatgtgctctggtattacctgatattaagatcttcccaattggcgtattgatgtcaattatttatatgaccaccatgaccgtaatggtcagcaatggtaacgtggttcgttcgattatctcgaccttgttattctgcgttgtagtgatgtatttaggcggttatgtcgcaccaggggcaacgcaatttttagctggagccggtgtaggcttgcaaggacaaggtacagattttgtattaaccggcccgtgggaaattttaacctattggttgagcaccgtattacattga

SEQ ID NO: 3655 - DNA, 294 bp, Escherichia coli
atgattaatattcttgtcgcttgtggtagcggtgtcgctacatctacgcttgcagctgatgaagtgaagtcagtatgtgctgaatatggtattacggcatttaaaatcaataaatgcagtatggctgaactttcttctgagatggctcatgcagatattgtactcacaactaataactataaaggtgatattggaaaacctcatatgagcgttgcaggttttgtaacgggtattaatgaaggagcattacgcaagaaattaggggagttgttaactgaattagcaaatggctaa

SEQ ID NO: 3656 - DNA, 444 bp, Escherichia coli
atgatatcgatcagcgttgccgatggtgcggggttacagaactacgatgccgtgcttgagcatatttttaacacgcaccgtacaacgaatacggtgaaagagagctggctcagtgctatgcgtgaacgcgaagcggaatatccgacaggaatagaactggaaggctattcgatcgctataccacactgtgatagtgaacatgcaaatcaaccggctatttatatcatccgtctgccagacgcaatacctgtgaacagggccgatgaagatggaatattgtgggtcagactcgtcgttaatcttattgttacggatcctgctgaccagcttcgattgttaaagtctttatttaaccatctccaaaatgaagaattctaccaaaacttactgacacttcccgtcgaggatgcaaaagcactttttgtatccacaataatccaatag

SEQ ID NO: 3657 - DNA, 756 bp, Escherichia coli
atgtatctggttgatgaaaggcgaaagttaatacttgaagacttaatgtcggcaggtacggtctatgtcagtgatcttgcacgaaagtatgaagtaacgtatgagaccatcaggaaagatttgacccatcttgaacaaaaagggctgctgatcaaaagccatggtggggcgactttaaagcaaagggccatagagcatccctttcaggtcagggaaaaagaaaataactcttataagaaggcgattgctcgtaaagcgcttgattttattccgcctaatagttcgatgattatcggtacgggcagtaccacttttgagctggctaacctgttatgtatgaaatctgggtttaaaatcttcacagattcgctccccgttgccagtgtgttgattgaatctgacaaccaggtttttctctttggcggcgaactgcgtagaaagagttcctcagtgtttgggggctgggcggtatctatgatcaacgatatacatgttgatctctgttttattggaaccgacggctttagcaacatgactggtccatcgacgccttcttcttctgatgcgtttttggatcgtacgataatttcgcactcagacaaaaaatatatcctcggtgattacaccaagtttgagcgcagcagtttgtttaagatctgcgactggtcggagatcaccgcccttattaccaacgatcatgccgacaaagaggggattgccgaagtcgcaaaatacacgtcagtaataacctgttag

SEQ ID NO: 3658 - DNA, 537 bp, Escherichia coli
atgaaaacgaagattgctatcgcaagcgatgatgtaggttttgcacgtaaagaggagataaaaaaatacctcatagaagagaaaaacatggagatcgtgtacgatcccgtcatatgtaaggaacaaggtgtcaataacttcgcgcgtctggccgacgaaatggcaggcattattcaacgcgatgagtgccgtctgggaatttacatttgtgggactggcattggctttacttgtcagatcaacaaacactggggcataagagccgttgcggttactaacccctactccgcaaagcgggcgcgactcagcaataacgcacaagttattggactgggttgccgggtcaacgatctcgaatacagcaaaatgattgtcgatgcatggttggataacccattcgacttcaccaccgccagagaaaattctaaaaagaacttactggaagctgaacgtaacgataatgcattgctggttaagcccgctgatgtacgctggaatatgggtttccgaccagatgatgaaaaatctgagggttaa

SEQ ID NO: 3659 - DNA, 1371 bp, Escherichia coli
atggaactgatcacgcaatttataaacgatctgggaaattttatatttatcccggtcatctttctggtactgatgaagatacttggccgtcctctttcagaatgtatctcctccgccatcaaagtcggcattggtttcattgcgctaaccatgaccatcaaactgatgctggaaaaaatgcaaccggcagtcaccggattagcagaagcaacaggttcctcgctcagtgccatcgatgttggtggcgcagcgactgcggttatgggatttggctccagcatgggcgctatcattattcccctctgtgttgcggtaaatattgcaatgctggtcgcccgcctgactgactgtgttaacgttgatgttttcaaccttcatcaaaatgcgtcaatgggggcaattgttggcgtctattctggtagtttcctgtatggcgcattgaccgccgcgctattccatgtctgggcgctgatcgctgccgatcttggtgctaaaaataacgaaaaattctttaacctgccaaaaggtgttgcgatctctcacccggttgccaatacctacttacttttcgcttatccattcaactggatttatgatcgcatcccaggcttccgtaatctgaatgtgaccgccgaaactattcagaaacggtttggcattctcggcgatccaactatggttggttttattattggtattttattgggcttttgtggttatggctggaaatccccctaccacaccataatcgccagcctacagttagggatgtatctggctgcggtcatgcttctgttgccacgtatgacctctatcatgatggaagggcttgttccgctttctaacgtagcacgcaaaaaactggtcaaacgtttcccggatcgtcaaatcactgttggtatggatactgctctgattgtgggccatccatcagttatcgcccctgcattattgctgatcccggtgattgtgatcctcgccgtgatcttgcctggcaaccgcgttatgccactgggtgacctctctcagtttgtgtttttcattgcctgcatggtgcctgttttcaatggcaacattattcgcacctgggtgacctcgatcattttattcggtggtggtctgtatattgcatcgtggatggcaccggctaccaacgaagtcttccagaagtttggtacaaacccggatgccagcgtgatgtactcttcgcttaacccgtctgcgaatccatttactggtctgtttgccgccctgagccatgttggaatcattggctatgtgatggcaggtatccttttgttatctattggatacttaattaaacaaaaatcacgtcgccagattgaaacggatttagaaaaagcgctttaa

SEQ ID NO: 3660 - DNA, 285 bp, Escherichia coli
atgaaaaaaatcttagtagtttgcggaaacggaattgcctcatcttccatcatggtctctgtactgcaggacttcctgaaagaagagaaaattgaagcgcaagtcgataaatcttcgttaatggcatgcaccagcgataccttcaacagctatgacctggtggtttcatcgaccaaactcgataacccggccattactactcgtgtcatcgttggcgctggattactgactggtctgggcgaagatgagattttcgctgcagttaaagaagagatgttgaaataa

SEQ ID NO: 3661 - DNA, 459 bp, Escherichia coli
atgaaatttgaaattctggtgaatgatgttgataacagcatcagtgactatcaaacggcgatcacctttgctggtacgcaattattggaaaaaggctacatcactgcagaatacattgacgcctgcctggaacgtgaaaaaagctatccgacagggctaatgatggcaaacggtcagggtatcgccattccccatgccgattacacgctggtaaatgtaaacagtatcagtattgttcgtttcgccaatgatgtcactttcgggcaaatggaagatgctgatttaacagttgattgtagcattatgtttaacctggcatttgccaccagtgatcaacatatgtcgatattgcgtcgtttattcacactgtttcaggataacgcctttgttgagacttgccgcgatttacctgcaacgcgcgtagctaaatatgtagaggatactctcgcagcatcctga

SEQ ID NO: 3662 - DNA, 966 bp, Escherichia coli
atgacgaaacagaataaaaacagccgttggcagggttacgatcctcgttacatatactcgctcgtggtcagacgctattttgcggatatgaaaaccaagattgagattgctgaggagcttggcgtttcccgctttaaagttgccagattgatcgatgaggcgatcgaacaggattacgtgaggtttatcttccctaagcagcaagcgatggatgaagaaatcgccaataatctacggaaaaaatttcatctggaagatgcaattgttctttcagttgctgaatcatggacgacgcaagaagaactcaatcacaaattgggtgaagtcaccgctgaatatcttatgcaatctcttcatgaaggtatgaaagtggggatcgcctggggacgtgtattatcaagtacggtcagtaagttgagcaagctgcctcctttagacgttgtgcagttatctggcgtacatccggggatagagtttagtcaagggccaatagatcttattcataagatcgcagccatttcacagggaaaagcgcacccaatgtacgtgccgatgtgggtcgatgacgaagagcttgctgccagactggcaggtgatccagcggtattagatacacagcaatattactcgcagttggatgtggttatcaccgggataggtgactggaaatcaggttcttcaagcttgtgtaaaatatttccggatacctggtgcgaagctttgtttcaacaagatatcgctgcggatgtgtgtatctcgttggtcagcagggaagggaagattcttcatagcccgattgaacgtctgggatttggcatttcgacggatcaactacaaaaagccaaaaaagtgattggtgtcgctggaggggaagaaaaatatgaaggcattcttgcttcgctgaaatctggacttttaaacgtcttaattactgattttgatacggctattaaacttctggattaa

SEQ ID NO: 3663 - DNA, 927 bp, Escherichia coli
atgatgcgtcgtgtaaatattctttgctcatttgctctgctttttgccagccaaaatagcctggcggtaacttatccattacctccagagggtagccgtttagtggggcagtcgcttactgtaactgttcctgatcacaatactcagccgctggagacttttgccgcacaatacgggcaagggttaagtaatatgctggaagcgaatccgggcgctgatgtttttttgccgaagtctggctcacaactcaccattccgcagcaactgattttgcccgccactgtccgtaaagggattgtggttaacgtcgctgaaatgcgtctttattactatccgccagacagtaatacagtggaagtctttcctattggtatcggccaggctgggcgagaaaccccgcgtaactgggtgactaccgttgaacgtaaacaagaagcaccaacctggacgccaacgccgaacactcggcgcgaatatgcgaaacgaggggagagtttgcccgcatttgttcctgcggggcccgataaccccatggggctgtacgcgatttatattggcaggttgtatgccatccacggtaccaatgccaattttggtattgggctccgggtaagtcagggctgtattcgtctgcgcaataacgatatcaaatatctgtttgataatgttcctgtaggcactcgtgtacaaattattgatcagccagtgaaatacacaacggaaccggatggttcaaagtggctggaagttcatgagccgctgtcgcgcaatcgtgcagaatatgagtctgaccgaaaagtgccattgccggtaaccccatctttgcgggcgtttatcaacgggcaagaagttgatgtaaatcgcgcaaatgctgcgttgcaacgtcgatcgggaatgcctgtgaatatcaaccgtaacggattttga

SEQ ID NO: 3664 - DNA, 1080 bp, Escherichia coli
atgcaaatacttgccgatttactgaatacgatcccagccatcgatcctgccgctatgtcgcgtgcacaacggcatattgacgggttactcaaacctgttggtagcctgggaaagctggaggcgcttgccatacaactggcaggaatgccggggttgaatggcataccgcatgtgggcaaaaaagcggtactggttatgtgtgccgatcacggcgtctgggaggaaggggtcgctatttctccaaaagaagtgacagccatacaggctgaaaatatgacccgtggaacaaccggcgtgtgtgtgctggcagcacaagcgggcgctaacgtccacgtaattgatgttggtattgatactgctgagcctatccccgggcttatcaacatgcgtgtcgcacgaggtagtggcaatattgcttcagctccggcaatgagtcgccgtcaggctgaaaagttgcttttggacgtcatatgttatacgcgggagctggcaaaaaacggtgtcacgctgtttggtgtaggtgaactggggatggcaaacacgacaccggcagcggcaatagtcagcacaatcactggccgggatcctgaagaagtggttgggattggcgcaaacctgccgacagataaactggctaataaaattgatgttgtgcgtcgggcgattacgttgaatcaaccaaatcctcgggatggtgttgatgtcctggcaaaagtgggtggatttgatttggtcggaatagctggagtgatgttaggtgctgcttcctgcggtttacccgtgttgctggatggatttctttcttatgctgctgcgctcgcagcctgccagatgtctcctgcaatcaaaccgtatctcattccttctcacttgtcggcagaaaaaggcgcgcgtatagcgctgtcgcatttggggctggagccttatctcaatatggatatgcgtttaggtgaggggagtggtgcagctctggcgatgcccatcatcgaagctgcttgtgcgatatacaacaatatgggcgaacttgctgccagtaatattgttctaccggggaatacgacttctgatttgaacagctaa

SEQ ID NO: 3665 - DNA, 744 bp, Escherichia coli
atgagtaaattattttgggcgatgctctcatttattacgcgtctgcctgtaccgcgtcgctggtcccagggactggatttcgagcattattctcgcggtattattacttttcctttgattggattattgcttggcgcgattagcgggctggtcttcatggtgctgcaggcatggtgtggcgtaccactggcggcactgtttagcgtacttgtgctggcgctgatgaccgggggattccatctggacggcctcgctgatacctgtgatggcgtattttctgcacgtagccgcgatcgcatgttggaaatcatgcgtgatagccgtttaggcacccacggcggtctggcattgatttttgtggtactggcaaagattctggtgttaagcgagttggctctgcgtggcgaaccgatccttgcatcgctggcggcagcatgtgcggtcagccgcgggactgccgcattattgatgtatcgtcatcgttatgcgcgggaagaagggcttggcaatgtgttcattggcaaaattgatgggcgacaaacctgcgtcacactcggcttagccgctatttttgctgccgtattattgccgggtatgcatggtgtggctgctatggtggtgacgatggtggcgattttcatcctcggtcagcttctcaaacgtacgctgggcgggcaaacgggcgatacgctgggagcagccatagagcttggtgaactggtcttcctgctggcactgctataa

SEQ ID NO: 3666 - DNA, 543 bp, Escherichia coli
atgattttggtgacggggggcgcacggagcgggaagagtcgccacgcagaggcgcttattggggactcttcacaggttctgtatattgctacctcgcaaatccttgatgatgagatggctgcacggatagaacatcatcggcaaggccgcccggagcactggcgcacagtggagcgctggcaacatcttgatgaattaattcatgcagacattaacccgaatgaggctgtgttgctggaatgcgttaccacaatggtgactaatctgttgtttgattatggcggcgataaagaccctgatgaatggaattatcaggcgatggaacaggcgattaatgctgagattcagtcgttgattgctgcctgccaacgttgccccgcaaaggttgtattagtgactaacgaagtgggaatggggattgtgccggagagtcgtctggcacgacattttcgtgatattgccgggcgggtaaatcagcagttggccgctgcggcaaatgaagtatggctggtggtttcgggtattggagtaaaaatcaaatga

SEQ ID NO: 3667 - DNA, 438 bp, Escherichia coli
atgaaaacgataaaacccgaatcgatagctcttttttgcctcttatctggagatgtggatctggcgaaacatctggcggaaatattgccaataacctgtttggttggtgaggactggcagcaagatttccagccttttgacggtgggcctgtgcaatcgttatcagatgcgtatagcgattattcagtgctgctattgatagcagctgaaagcgagatatccgtaccagaatggctcgctcattctgagggaacgacggtaattttgattgcagaacacaatgcccgtttgctgaatggtccggctggtggggctgtagcattaatccattatctgaatgagatctgtcatgccagagaaaccgctgtcaatgacgcattttgtcggacgttaacacgaggaagtctggctattccgcaatgccatcttctttcgtaa

SEQ ID NO: 3668 - DNA, 915 bp, Escherichia coli
atgatttctgcggcgacacttaattcagaactcattaataaaatcgcgcaggattttgcgcaggcgaccagccttgcggttgtcgtggtcaatattcacggcgatgaaatttccgagctgtttaacttcactccattttgtcagatgatgcggcaacaccctcagctgagcactcgatgtcgcatgagcgatcgttgtgggggtctggaagcctctaaatccgatcagccttgtatttatcgctgtcatgccggattaaccgatttctctattccactggtaatcgccggacatttagttggttttgtattgtgcgggcaagttcgtctgcgtaatgatgatgtcgatttggtcgatattctgaatgtcgatgattgctggcaggcagatcccgaattacttaatgaatttcgcaaagtccctgagatggattactcaagagttatggcctctgctgatttgttgaagttgattgtagaaaattgcctaaaaaaacaactcaattttgtggttattaaagagaacaaatctcagtcagattcggtgcgccagactcgtgcgcctggtccccacgacaataaaatgaaaaaagctttacgttatattgatgcgcatttatcagacgatttgcgtctggaagatgtcgcctcgcacgtttatctaagcccttattatttcagtaagttatttaagaaataccatggaatcgggtttaatgcgtgggtaaaccaacaacggatggccagcgctcgtgagttactgtgccatagtgactggagcatcgccagcattgcgcgtaatttaggtttttcgcaaacaagttatttttgcaaagttttccgtcagacttatcaggttacgccgcaggtgtatcgacagcaagtgagtgataatgcggcgatggaaacggtatag

SEQ ID NO: 3669 - DNA, 810 bp, Escherichia coli
atgaatgattcactcaaggcgcaatgcgttgccgagtttttgggcaccggactgttcctcttttttggcattggttgtttgtgcgccctgaaggttgccggggcaagtctgggactgtgggaaatttgtatcatttggggattagggatttcgcttgctgtttaccttacggcaggtatttccggcgctcatctcaacccggcagttaccattgctctgtggctgtttgcctctttcccagcccgtaaagtgctgccattttgtgtggcgcaattagcgggtgcctttggtggtgcggttctggcatattctctctacagcagtttgtttaccgattttgaatctgctcacaatatagtgcgtggtagcgcagaaagtttacaactcgccagtatcttcagtacttatccagcagcggcgattaatgtatggcaagctgcgttggtcgaagtggtcataacgtccatgttaatggggttgattatggcgttgaccgatgacggtaatggcgtacccaaaggaccgcttgcgcctttactcattggtattctggttgctgttattggtgcttctaccggaccattaaccggttttgccatgaatccagcgcgtgattttggacctaaaattttcacctggtttgcgggttggggggaaattgcgatgactggtggacgcaatattccttatttcattgtacccattattgcaccgatcattggggcatgtgttggtgcggcgatttatcgctatctcattgcaaagaatttacctgtcaatagtgtaacgcctaaagaaatcagcgaataa

SEQ ID NO: 3670 - DNA, 285 bp, Escherichia coli
atgcaacaagaagcgttaggaatggtagaaaccaaaggcttaactgccgccatagaggctgcagacgccatggtgaagtcggcaaatgttttgctggtcggctacgaaaaaataggttccgggctggtgaccgtcatcgttcgtggtgatgtcggggcggtaaaagcggcaacagacgcgggtgccgcagctgcgcgtaacgtcggcgaagtaaaagccgtacacgttattccccgcccacataccgatgtcgaaaaaatcttaccaaagggaattaacccatga

SEQ ID NO: 3671 - DNA, 813 bp, Escherichia coli
atgagcagcaatgaactggtcgaacagatcatggcgcaggtcatcgctcgcgtagcgacgccagagcatgaggttctcccgaaaaccactcatcaaatacgagagacggctatggcagaaaaaagctgcacgttaacagaatttgttggcaccgctattggcgacactgtaggtctggtcattgcgaacgttgatagcgccctgttggacgcgatgaaacttgaaaaacgctatcgttccattggcattctgggggcgcgtattggcgcagggccacacattatggccgctgatgaagcggtaaaagccaccaacactgaagttattagcattgaacttcctcgggatactaaaggcggtgccggacacggctcattgatcctcttaggtggcaacgatgtttccgacgtgaaacacggtattgaagttgccctgaaagaactcgatcggacctttggtgatgtctatgccaacgaagccgggcatcttgaactgcaatacaccgcccgcgccagctatgcactggaaaaagcgtttggcgctccactgggacgggcttgcggcgttattgtcggcgctccggctgcggtgggtgttctaatggccgacaccgcgctgaagtccgccaatgtggatgtcgtggcatacagctcccccgctcaaggcaccagctacagcaacgaagtcattctgattatctcgggtgactccggcgcagtccgccaggcggtcatctccgcacgcgaaatcggtaaaaccgtgctttcgactctcggcgatacaccgaaaaacgatcgcccttcctacatctga

SEQ ID NO: 3672 - DNA, 1665 bp, Escherichia coli
atgagatcgaaaagatttgaagcactggcaaaacgcccggtcaaccaggacggtttcgttaaagagtggattgaagaaggcttcattgcgatggaaagcccgaacgatcctaaaccgtcaatcaaaattgttaacggcgtcgttaccgaactggatggaaaacccgccagtcagtttgacctgatcgaccactttatcgcccgctacggtatcaatctcgcgcgcgcagaagaagtcatcgcgatggattcggtaaaacttgccaatatgttgtgcgatccaaatgtcaaacgtagcgatatcgttccccttaccacagcaatgacgcctgcaaaaatcgtcgaagtggtttcgcagatgaacgtggtagagatgatgatggcgatgcagaaaatgcgcgcccgtcgaacaccatcacaacaggctcacgtcaccaacatcaaagataacccggtacaaattgccgccgacgcagctgaaggcgcatggcgcgggtttgatgaacaggaaaccaccgttgccgttgctcgctatgcaccgttcaacgccatcgccctgctggtcggctcacaggtgggacgtccgggcgtcttgacccagtgttcactggaagaagccaccgaactgaaactcggtatgttaggccacacctgttacgccgaaacaatttctgtctatggtacagaacctgttttcaccgatggcgatgataccccgtggtcaaaaggatttctcgcgtcatcctatgcttctcgcggcttaaaaatgcgctttacttccggctccggctctgaagtacagatgggttacgcggaaggcaaatcaatgctttatctcgaggctcgatgtatttacatcaccaaagccgcaggcgttcagggtctgcagaatggttcggtaagctgcatcggtgttccatcagctgtgccatcaggcatccgtgcagtattagcggaaaacttaatttgctcatcgctggatctggaatgcgcctccagtaatgaccagacctttacccactcggatatgcgccgtaccgcacgtttcctgatgcaatttctgccaggtaccgactttatctcttccggtttttccgctgtgccgaactacgacaacatgtttgctggttcaaacgaagatgctgaagacttcgatgattacaacgtcattcagcgtgacctgaaggttgatggcgggctgcgaccagtacgcgaagaagatgttatcgcaatccgcaataaagccgctcgcgctttacaggctgtctttgccggtatgggactaccgccaattaccgatgaagaagtcgaagcggcaacctatgcccacggttcgaaagatatgcctgagcgcaatattgtggaagacatcaagttcgcccaggagattatcaataaaaaccgtaacagcctggaagtggtgaaagccctggcgcaaggcggttttaccgatgtcgcccaggacatgctcaacatgcaaaaagcaaaactgaccggcgattatctccatacctcagccatcatcgtcgatgacggacaagtgctctcagcggtcaatgacatcaatgattacgccggaccagctacgggttaccgcctgcaaggggaacgctgggaagagatcaaaaatattcccggtgcacttgatcccaacgaaattgactaa

SEQ ID NO: 3673 - DNA, 669 bp, Escherichia coli
atggaaattaacgaaaaattactgcgtcagattatcgaaggcgtgctggcagaaatgcaaaccagcgacaagtccgtttcatttcgtgcacctgtctctgcaactgtctcttcagtgccagataccggaaattttctgaccgaaattggcgaagcccaacaaggcactcagcaagatgaagtcattattgctgtaggcccggcgttcggcctggcgcaaaccgtcaatatcatcggtattccgcataaaaacattttgcgcgaagtgattgccggtatcgaagaagaaggcattaaagcccgtgtgattcgctgctttaaatcgtccgatgtcgcattcgtagcagtcgaaggagatcgtcttagtggttcaggtattgctatcggtattcagtcgaaaggcacaacggttatccaccagcagggacttcctcccttgtctaacctggaacttttcccacaagcgcctttgttgacgctggatacttatcgtcagattggcaaaaacgccgcgcgttatgcgaagcgcgagtctccacaaccggtgccgaccctcaacgatcaaatggcgcggccgaaataccaggccaaatctgccattttgcatattaaagagacgaagtacgtggtcactggcaaaaaaccgcaagaactgcgcgtgacgttttaa

SEQ ID NO: 3674 - DNA, 519 bp, Escherichia coli
atgaataccgatgcaattgagtcgatggtcagggacgtgttgaaccgcatgaacagtttacaggatgcagctcctgtttctgcggtccccagcgcgtcaatacagagcgccaaagtgacggattacccgctggcaaataaacatccggaatgggttaaaacagcaaccaataaaacgctcgacgatttcactctggaaaatgtgctcagcgataacgtcaccgcccaggatatgcgcattacccctgaaacattgcgtattcaggccgcgattgccagagatgctggtcgtgatcgcctggcgatgaattttgaacgcgccgctgagcttacctcagtaccggatgatcgcatcctcgaaatctacaatgcgttacgcccttatcgttcgactaagcaagaacttattgccattgctgacgatcttgaacggcgttatcaggcccaaatttgtgctgcatttgtccgtgaagctgcggaactttatgtcgagcgcaaaaaactgaaaggcgacgattaa

SEQ ID NO: 3675 - DNA, 1833 bp, Escherichia coli
atgcgatatatagcaggcattgatatcggcaactcatcaacagaggttgcgctggcaacgctcagtgcaactggagagttgtcgttcgtgagtagcaccctggcggaaaccaccggaattaaaggtacgttgcgtaacgtccatggtattcaggaggcgctcgcacaggcaacgaaaaaagtcggcatcaatgttagcgatatttcgcttattcgtatcaacgaagcaactccggtcattggtgatgtggcgatggaaaccatcactgaaactatcatcaccgaatcaaccatgatcggtcacaacccgaaaactccgggcggagtggggctgggcgtaggactcaccatcactccgcaagagttattaacatgcccggcggacacaccctacattctggtggtgtcatcggcatttgattttgccgatatcgcaacgatgataaacgcctccgtacgagccggatatcagctgactggcgttattctgcaacgcgacgatggcgtactggtcaataaccgcctggaaattcctctacctattgttgatgaagtcctctacatcgatcgtattccgctcggcatgctggctgcaattgaagttgccgttcccgggaaagttatcgaaaccctgtctaacccgtatgggattgccaccgttttcgccctcaatgctgaagagactaaaaatattgttcctgtcgcgcgggcgctaatcggcaaccgttcagcagtggtagtgaaaacgccttctggcgacgttaaagcccgttcgatacccgccggaaatatcgaactgctttctgccgggcgcacaacgcgggttgatgtagctgctggtgccgatgccattatgaaagcggtcggtgagtgcccaaaactggaaaacgtgacgggagaacctggcaccaacatcggcggaatgctggaacatgttcgccagactatggctgaactgaccaacaaacccagcaacgaaatttttattcaggatttgctggcgatagatacctatgtccccgtcaacgtaaccggtggtctggcaggtgaattttcactggaacaggctgtgggtattgcctctatggtgaaatccgaccgtctgcaaatggcgatgatcgccagtgaaattaagcaaaaactgcatgttgatgttcaggtcggaggcgcagaagcagaagccgccattcagggggccttgacgacccctggaacgacacgtccactggcaattctggacttaggtgcaggctctaccgatgcctccatcatcaatcagaaaggggaaatagttgccactcaccttgcgggagcgggcgacatggtaacgatgattatcgctcgtgagctgggcttaaatgatcgttatctggcagaagaaatcaaaaagtacccgttggcaaaagtagaaagcctgttccacttacgccatgaagatggcagcgttcagttcttccctactccgctgtcccctcatgtatttgcccgcgtttgtgtggtgaaacctgacgaactggtacctattcccggtgatttgacgctggaaaaagtacgcgctgtccgtcgtagtgcgaaagagcgtgtcttcgtaactaatgccctgcgtgcgctgcggcaggtaagccctgccggaaatattcgcgacattccgttcgtcgttctggtgggtggctcttcgctggatttcgaagtaccgcaattggtcaccgacgcgctggcacattatcgactggtcgccgggcgggggaatatccgtggtagcgaaggtccgcgcaatgcggtagctactgggctcctcatcgcctggcacaaggagtcgattcatggaaagtaa

SEQ ID NO: 3676 - DNA, 351 bp, Escherichia coli
atggaaagtaaagagcgtgcaccagccatcgttgtcatggagatcggtgactgtatcactacatgggatgaagtgcttcttggcattgaagaggaaggtattccctttcgcattcaacacattccgtcaggtgaagttatcgatagcgcctggctggctgctcgtcaatctcccctgttggttggcattgcctgcgatcaggaaaaactgattgtgcattacaaaaacttaccggcatcagcgccactgtttacgctgatgtatcaacaagataaccatgccaggcgcagcatcggcactaacgctgcccgcctggtaaaagggattcccttccgggaactccactcataa

SEQ ID NO: 3677 - DNA, 276 bp, Escherichia coli
atgaacaacgcactaggactggttgaaacaaaagggttagttggcgcaattgaagctgcagatgccatggttaaatccgccaacgtgcagctggttggctatgaaaagattggttcgggtctgattacggtgatggtccgtggcgatgttggcgcagtaaaagccgccgttgatgcaggaagcgccgccgcaagcgccgttggcgaagtgaaatcctgccatgtcatcccgcgcccacacagtgatgttgaggctattttacctaaatcagcataa

SEQ ID NO: 3678 - DNA, 423 bp, Escherichia coli
gtgaagcaatcactgggattacttgaagtcagtggtctggcactcgccatcagttgcgcagatgctatggcaaaagccgcgtccatcacgctggttggccttgagaagaccaatggctcaggctggacgctcatcaaaatcaccggtgacgtcgcctcggttaatgcggcgatcacgacgggagccagtttcgccggacagcgaaatggcctcgtcgcacacaaagtgattgcccgtccgggagacggcattctgccccacacaactgaagcattgactgtgacggttgaaacaagcgaaacaccagcaacaaccgtcatctcagagattatcagttgtaatttgtgtcttgacccggcatgtcagcggcaaaaaggtgagccccgctcactttgcctgcacgccaataagcgaggggagtaa

SEQ ID NO: 3679 - DNA, 633 bp, Escherichia coli
gtggataaacaaaccttgcaggaaacagtgagccagattctggatgagatgcgcgagcgccctatccctctgggtgtttccagtcgtcatattcatctttcaacagcggattatttgcgtctttttcctgaacaaccgattagcgagaaaaagctgttaatgcaacctggccaattcgctgctgaacaggttgttacgctggagggaccaaaaggtaaattgcacaacgttcgcttgttggggccgctacgcaatgcaagccaggtggaaatttcccgtacggacgccagaacgttagggatcaccgccccgctacgcatgtcaggcgatctcagcggcactccagggattcgtttgataagcccatttgcggaactggagatcacatctggcgtcattgtcgcacaacggcatattcatatgtctccgctggatgccctgatttatggcgttacgcatggcgataaagtggcggttgccattaaaggtgatgagcgacgactgatattcgaaaacgtcgctgttcgcgtctctccggatatgcgtcttgaaatgcatattgataccgatgaagccaacgccgcaggggctgatagccctgacgtttttgccacactggtgtcagtgccatga

SEQ ID NO: 3680 - DNA, 492 bp, Escherichia coli
atgaataacatgctgatgcaacgtattgttgacgaagtggtttttcgccttaaacaacgtgcgggaaaaacactcgtgctgactgtttttcaactgcgagacgccagcgttcaagagatagttcatcagtatgcatcattacaaatccgatatgtcgatctgccgctgctacgacaacttgcggggaacgaaacgtcagatcgagcagcaattcagatacacgaagcgttagcctggggattgcacattcaattgtcgttgcagtgtcatttcctgaacgccattgaattgaagactctcgcccgtctaccgctaagctggtgcgacgagcaagggcaaccgatctaccttcatcgtgatcgacttttaagttatgccgatattgcacagttaagctcgggaatactggtgttacagcgaaaatgttgtgtgaccgcactggctcgtgaagcggcaattacccgaaatattcagttaatcaggcaggagtaa

SEQ ID NO: 3681 - DNA, 276 bp, Escherichia coli
atgcatctggctcgagtcactggcgcggtagtatccacgcaaaaatcaccttctctgatcgggaaaaaactgctgctggttcgccgggtcagtgctgacggcgaactgcctctcacgccattaaccggcgacgaagttgccgttgattcagtcggcgcaggcgttggtgagttggtactcctcagcagtggttccagcgccagacatgttttttccggccctaacgaagccatcgacctggcagtggtcggcattgtcgatacgctttcgcgctaa

SEQ ID NO: 3682 - DNA, 1008 bp, Escherichia coli
atggcaatttatacccgaacaggtgattcaggaagtacgtctttatttaccggacagcgcgtcagcaaaactcatctacgtgtcgaaacctatggcacgctggatgaactgaacgcgacactcagtctgtgttattgcgccaccgccatcgaaagccatcgcatcttactggaagccattcaacaacagatattttggtttagcgctgaactcgccagtgaaagcgaacagccgtcagcgcagctgcgttacatcggtacggaagaaattgccgcgctggaaaacgcgatcgatagcgcaatgaacgccgtccctccagttcacagcttcattctgcctggtcgatgtgaagccgcaagccgcatgcatttcgcccgcacggtggctcgacgggctgaaagacgtctggttgaactgacaacggaaaccatcgtccggaatgttttgctgcactatatcaaccgactttccgattgcctgtatgccctcgcccgcgtggaggacaatgttgctcatcaaaacctgatgattcaggaaatcacaaaacgttatcacgaagccaaccacacaccagcattgaaggaacgcacaatgccgctcacttttcaggatcttcaccagctcattcgtagtgcggcaatgcgcgcagatgaactgcatattcccgttgtcatcagcattgttgatgccaacggaacagaaagtgttacctggcggatgcctgatgccctgttggtcagcagtgaactggcaccgaaaaaagcctggaccgccgtggcgatgaaaacggcaacccacaaacttgctgataccgtacaacccggcgcgccgctttacgggctcgaaagccatatgcaaggcaaagtcgtcacttttggtggcggcttccccctctggcgtgacggaaaattgcttggcgggcttggcatcagcggcggtagcgttgaacaagacatggatattgcccaaagcgcaatggcggcaattaacgtgggagtaaaccaatga

SEQ ID NO: 3683 - DNA, 1386 bp, Escherichia coli
atgaataactctgaattagaaacactgatccgcaatattctgcgtgaacaacttgtccccgctacgccacgaatgcaaagaaacgctatttttcagactgttgatgaagcggtctgcgcagcacaccaggcctttttacgctttcaacagtgcccgcttaaaacccgtagcgccattatcagcgccattcgcgaagaattaatgccccgccttacagaactggcagaagaaagcgccagtgaaacagggatgggaaataaagaggataagtacctaaagaacaaagcagcactcaataatacgccaggaattgaagatttaaccaccactgcactaaccggtgatggtggcatggttttgtttgaatactccccgtttggggttattggctcggtcacgccaagcaccaaccccacggaaaccatcattaacaacagcatcagcatgctggcagcaggtaatagcgtctacttcagtccacacccgggagccaaatacgtttcgttaaaactgattaccacaatcgaagacatcgcgtttcgctgtagtggcattcacaacctgatcgttaccgtatctgaaccaacctttgccgccaccgaacagatgatggcgcaccctaaaatcagcgttctggcgattaccggcggcccggggatcgtcgccatgggaatgaaaagtggcaagaaagtgattggtgccggagcgggtaacccaccctgcattgtcgatgaaacagcggatattgtgaaagccgccgaggacatcatcaacggcgcttcatttgattacaacctgccgtgtatcgctgaaaaaagcctgattgtcgtggcatcagtggcagattatttaattcagcagatgcaaagctttggcgcacttcttcttaaccatgaacaaacggagaaattgcgtgcaatttgcctgccagacggtagcgccaacaaaaaactggttgggaaaagcccatcagccttgctggaagcagcgagcctccctttgcccgcaaaagcgccgcgcctactgattgctgttgttgacgccgatgatagttgggttacgtgtgaacaactgatgccaatgctgcccattgtgaaggtcaacgattttgacagcgctctcgccctggcgttgaaagtggaagacggcttgcaccacacggcaattatgcactcgcagaacgtctcacggctcaaccttgccgcgcgcgttatgcaaacctcaatctttgtcaaaaacggcccctcctgggcgggtattggcgtcggcggcgaaggctttacgacctttaccattgcaacaccgaccggagagggtacaacgtcagcacggacttttgcccgctcacgacgctgcgtgttaaccagcggcttttccattcgctag

SEQ ID NO: 3684 - DNA, 1113 bp, Escherichia coli
atgaaaactttttcactgcagacgcgtttatacagcggaacgggaagtctcaacatactgagccgtttcacgaataggcacatctggattatttgcgacgtctttctggcacactcaccactcattgacacgttgcatcaggcgctgcccgacagtaatcgtctcagtatttttagcgaaataacgcccgacccaactatccagaccgtggtgaaaggcattgcgcaaatgcagactttacgcccggatgtggttatcggttttggcggcggttctgccctggacgccgcaaaagcgattgtctggttcggtcgccagtgtggcattgaaattgaaacctgcgtagccattcctaccaccagcggtaccggttccgaagtgaccagtgcttgtgtcatcagcgatcctgagaaagggattaaatatccccttttcgataatgcactttatccggatatcgcgatccttgatccatctttggtcgtcagcgtgccaccagcgataacggccaataccgggatggatgttttaacccatgcgcttgaagcttatgtttctccccgcgccagcgacttcacggatgcactggtcgaaaaagccgtgcaaattgtttttcaatacctgcccactgcagtgaagaaaggcgattgtcttgccacccgtggcaaaatgcataatgcatcgacgcttgcaggaatagcctttagccaggccggactcggtttaaaccatgcaattgctcatcaactcggcggacagtttcatctgccgcacggcctggcgaatgcgctcctgctcacggcggttatccgctttaatgctggcgatccgcgcgcagccaaacgctacgcccggctggcgaaaacgtgccatttatgcccggacaacgccaatgacaccgccagcctgaatgcacttattcaacatattgaacagcttaaaacaacctgtacgctgccgactcttaccaatgcgctgaaagaaaaaaaagcagaatggtcagttcgcataccagatatggttcaggcggcactggcggatgcaacgttgcgtaccaacccgcgtgcggctgatgcctccgcgattgcagaactgctcgaggagttgttatga

SEQ ID NO: 3685 - DNA, 1344 bp, Escherichia coli
atgaacgtcgagttaacctcctgcgacgaccagaccatccgcgagcgagtacaagcagcaggtgtcgtgggtgctggcggcgcaggttttccaacccatattaagctacaagcgcgtgttgacacgttcctggtgaatgcggcggaatgcgaaccaatgttgaaagtggatcaacagttaatggtgcagcaagccagccgcctgcttcgcggtgttcactatgctatgaaagccaccggggccagtagcggaatcatcgcgctgaaagaaaaatatcaacgggcaataaacgcactcacaccactgttaccaccggatatccgcctgcatattttgcccgatgtttaccccgcaggagacgaagtgctgaccatctggatggcaactggtcgccgcgttccacccgctgcattacccgttagcgtcggtgtggtggtcaataatgttcaaaccgtacttaatattgccagagccgtcgagcaacagtatccagtgacgcgccgcacactcactattaatggtgcagtggcgaaaccaataacggtaaccgtccccatcggaatgtctttacgtgaagtcctggcgctggcgggcggcgcaacagtagatgcgcctggttttatcaatggcgggccgatgatgggaagtttgatcacatcgctcgacacccccgtcagcaaaaccactggcggcttgctggttttacccaactctcattcactgatccaacgtcgaatgcagaatgaccgcagcgtacttaccgtcgcgaaaactgtttgtgagcaatgccgcttgtgtaccgatctctgcccacgtcatttagtcggtcacgaactggccccccatttattagtacgtgcggttaactaccaacagctcgctacgccacaactgttactgacggcgctcacctgttcggagtgcaacgtctgcgccagcgtcgcctgtccggtaggaatttcaccaatgcgcataaaccgcctgcttaagcaggaattacgcgcacaaaatctccgctacgaaggtgccttaaatcctgctgatcccatggcaaattatcgactgattcccgtaaaacggctggtaaccagactgggcctaatcccgtggtatcaggatgcgccattgtctgaacaggtgcctcagcccgaaaaagtgacgttattgttacgccagcacatcggtgccagcgcaattgcgtgtgtacaaaaaggcgatcgcgtcgttcatgggcaatgtgtaggtcaaattccacacggcacattaggtgccccgattcatgccagtattgatggcatggtcagcgatgtgacagaaaacgcgattacgcttgtgagaggttaa

SEQ ID NO: 3686 - DNA, 555 bp, Escherichia coli
atgtcgaaagcggtaggtattttagaacttagcagtatcgcgaaagggatggaaaccggcgacgccatgctgaaaagcgcaaacgttgagttactggtcagcaaaacgctatgccccggaaaatttctgctgatgctcggtggcaatgtgggtgcggtgcaacaggccatcaacagcggtgcttcccttgctggtgaaatgctggtcgacagtcttgtcctgccgaatattcatcccagtctcctttctgcaatcagcggactgaaccatgttgagcagcaccgggctgtcggcgtagtcgaaacctggagtgtcgctgcctgcattgacgctgccgattgtgctgtcaaagctgcgaatgtcattctcgttcgcgtgcatatggcttttggcattggcggaaaatgctacatggtggttgctggcgatatttcagatgttaataacgcggtctctgtcgccagcgagcgtgcgggagaaaaaggtttgttggtctatcggtcggtgattgcccgtccacatgaagccatgtggcgtcagatggtggagggataa

SEQ ID NO: 3687 - DNA, 351 bp, Escherichia coli
atgacaactcagcacacaactggacggatgattcaggaatatgtccctggtaagcaggtcacgcaggcacatgtcatcgccaatcctgggaaggatctgtttaagaaattgggtttaccagacaccgtttctgctattggcattctgacgattacccccagcgaagcatctatcatcgcatgcgatatcgccacaaaatcaggcgctgtagagatcggttttcttgatcgttttaccggtgccgtagtgctgactggtgatgtttctgccattgaatatgcacttagccaggttacccgtacgctgggtgaaatgatgcgctttaccgcctgccccattacgcggacctga

SEQ ID NO: 3688 - DNA, 444 bp, Escherichia coli
atgcaacgtatgatgcttatcggccccagccagtgcggaaaaacgtcactcacgcaatgtctgcgtggcgaaaatatttattatcagaaaacgcaggctatcgtctggtccccggccaccattgatacacctggcgaatacctcgaaaaccgcagcctttacagtgcattgttggtcagtgcctgcgaagcagacattatcgcgctggtacttaatgcggacgcaccgtggtcacctttttcgccaagctttacctcgtcaatgaatcgcccggtcattggagtagtaaccaaagcagatttagccagtatggaacaaatatctttggtgaaatgttggttacgggaagctggagcgcacaacgtgttagtaaccagtgcggttaaaaacaatggagttacagaactttttgccttgctgcatacagaagaaggctgtcgctaa

SEQ ID NO: 3689 - DNA, 330 bp, Escherichia coli
atggaaactaccaagccttcattccaggacgtactggaatttgttcgtctgttccgtcgtaagaacaaactgcaacgtgaaattcaggacgttgagaaaaagatccgtgacaaccagaagcgcgtcctgttgctggacaacctgagcgattacatcaagccagggatgagcgttgaagcaatccagggcatcatcgccagcatgaaaggtgactatgaagatcgcgttgacgattacatcatcaaaaatgccgagctctccaaagaacgccgcgatatctccaaaaagctgaaagctatgggcgaaatgaaaaacggcgaagcgaagtaa

SEQ ID NO: 3690 - DNA, 1059 bp, Escherichia coli
gtgcgtgccgataagtcattaagcccgtttgaaatccgggtataccgccattaccgcattgtgcatggtactcgggtcgcgctggcattcctgctcacttttctcattatccgcctgtttactatcccggaaagcacctggccgctggtcaccatggtggtgattatggggccaatctcgttctgggggaacgttgtccctcgtgccttcgaacgtattggcggtacggtgttaggttcgattttaggtcttatcgctctgcaactggagttaatttcgttaccgctgatgttagtctggtgcgcggcggcgatgtttctttgcggttggctggcgctgggcaagaaaccgtatcaaggattattgattggggtgacgctggcaattgttgtgggttccccgacaggtgaaattgatacggcgttatggcgaagcggcgatgtgatcctcggctctttactggcaatgttgtttaccggtatctggccacaacgggcgttcatccactggcgcattcaactggcgaaaagtctgaccgagtataatcgggtctatcaatctgcattctcaccgaacttactcgaacgcccacgtttggaaagccatctacaaaaactcctgaccgatgccgtgaaaatgcgtgggctgattgcgcccgccagcaaagaaacccgtattcccaaatcgatatatgaaggtatccagaccattaatcgcaatctggtttgtatgctggagttgcaaatcaatgcatactgggccacgcgccccagccatttcgtgttattgaacgcgcaaaaacttcgtgatacccagcacatgatgcagcaaatactgctgagccttgttcatgcgctgtacgaaggtaatccgcagccggtttttgccaatacggaaaaattgaacgatgctgtggaagagctgcgtcagttgctcgataaccaccatgacctgaaggttgtggaaacaccaatctatggttatgtgtggctgaacatggaaacagcgcatcagcttgagttgctatcgaatctgatttgccgggccttgcgcaaataa

SEQ ID NO: 3691 - DNA, 474 bp, Escherichia coli
atgaactacgagattaagcaggaagataaacgtaccgttgcaggtttccatcttgttggcccgtgggagcagacggtaaagaaaggttttgagcagttgatgatgtggatagatagcaaaaatattgtgccgaaggagtgggttgctgtctattacgacaatccagatgaaacacccgccgaaaaattacgctgcgacaccgtcgtgacggtaccgaataactttacgctccccgaaaacagtgagggcgtcattctgacagaaatttcaggtggtcagtatgcggtggcggtggctcgtgtagtcggtgatgattttgctaaaccctggtatcagttctttaatagcctcttgcaggacaatgcttatgaaatgttaccaaagccctgcttcgaggtttacttgaacaatggcgcggaagatgggtactgggatatcgaaatgtatgttgcggtgcagccaaaacatcactaa

SEQ ID NO: 3692 - DNA, 1167 bp, Escherichia coli
ttgaaacgccgtcttattattgctgcttctttgttcgtttttaatttatcgtctggttttgcggcggaaaacattcctttttcacctcagcctccagagattcatgccgggtcctgggtattgatggattacaccaccggtcagattctcaccgcgggtaatgagcatcaacagcgcaatcccgccagcctgacaaagctgatgacgggctatgtcgtggatcgcgctatcgatagtcatcgcattacgccagacgatattgtcaccgtggggcgtgatgcgtgggcgaaagataatccggtgtttgtcggttcttcactgatgtttttgaaagagggcgatcgcgtatcggtacgtgatttaagccgtggtttaattgtggattccggaaatgacgcttgtgttgctctggctgactatattgccggtgggcaacggcagtttgttgaaatgatgaacaactatgccgagaagctgcatctcaaggatacgcattttgaaacagtgcatggtctggatgcacctggccagcatagctcggcttatgatttagccgtgctttctcgcgctatcatccacggcgagcccgagttttatcatatgtacagtgagaaaagcctcacctggaacggtatcacccagcaaaaccgtaacgggttattgtgggataaaaccatgaatgttgacggcctgaaaacgggccatacttctggtgccgggtttaatcttattgcttcggctgtagacgggcagcgtcgcctcattgcagtggtaatgggtgctgacagtgcaaaaggtcgtgaggaagaggcaagaaaattactgcgttgggggcaacaaaactttactacggtgcaaattttgcaccgtgggaaaaaggtcggtacggaacgcatctggtatggcgataaagaaaatatcgccctgggaacggaacaagagttctggatggtgctaccgaaagccgaaattccacatatcaaagccaaatatacccttgatggtaaagaactcaccgcgccaattagcgcccatcagcgggtaggggaaattgaactttacgaccgtgataaacaggtggcgcactggccgctggttaccctggaatctgtcggggaaggcagcatgttttcccgcctgagtgattatttccaccataaggcctga

SEQ ID NO: 3693 - DNA, 1428 bp, Escherichia coli
atgatgaatgacggtaagcaacaatctacctttttgtttcacgattacgaaacctttggaacgcaccccgcgttagatcgccctgcacagttcgcagccattcgcactgataacgaattcaatgtcatcggcgaacccgaagtcttttactgcaagcccgcggatgactatttaccccagcctggagcagtattaattaccggtattaccccgcaggaagcacgggcgaaaggagaaaacgaagccacgtttgccgcccgtattcactcgctttttaccgtaccgaagacctgtattctgggctacaacaatgtgcgtttcgacgacgaagtcacacgcaacgttttttatcgtaatttctacgatccttacgcctggagctggcagcatgataactcgcgctgggatttactggatgttatgcgtgcctgttatgccctacgcccggaaggaataaactggcctgaaaatgatgacggtctaccgagctttcgccttgagcatttaaccaaagcgaatggtattgaacatagcaacgcccacgatgcgatggctgatgtgtacgccactattgcgatggcgaaactggtaaaaacgcgtcagccacgcctgtttgattatctctttacccatcgtaataaacacaaactgatggcgttgattgatgttccgcagatgaaacccctggttcacgtttccggaatgtttggggcatggcgcggcaataccagctgggtggcaccgctggcgtggcatcctgaaaatcgcaatgccgtaattatggtggatttggcaggagacatttcgccattactggagctggatagcgacacattgcgcgagcgtttatataccgcaaaagccgatcttggcgataacgccgccgttccggttaagctggtacatatcaataaatgtccggtactggcccaggcgaatacgctacgcccggaagatgccgaccgactgggaattaatcgtcagcattgcctcgataacctaaaaattctgcgtgaaaatccgcaagtgcgtgaaaaagtggtggcgatattcgcggaagccgaaccgtttacgccttcagagaacgtggatgcacagctttataatggctttttcagtgacgccgatcgtgcagcaatgaaaattgtgctggaaaccgagccgcgtaatttaccggcactggatatcacttttgttgataaacgaattgaaaaactgttgttcaattatcgagcgcgcaacttcccggggacgctggattatgccgagcagcaacgctggctggagcaccgccgccaggtcttcacgccagagtttttgcagggctacgctgatgaattgcagatgctggcacaacagtatgccgatgacaaagagaaagtggcgctgttaaaagcgctttggcagtacgcggaagagatcgtctga

SEQ ID NO: 3694 - DNA, 1359 bp, Escherichia coli
atgtcgcataacgttactccaaacacctctcgcgtggaattgcgtaaaacgcttacgttagttccggttgtaatgatgggtctagcctatatgcagccgatgacgctgtttgatacatttggtatcgtttcaggcctcacggatggtcatgtgccgacagcctatgcgttcgcattgattgcgatcctgtttacggctctgagctacgggaagctggttcgccgctatccttctgctggctctgcatacacttacgcccagaaatccattagtccgactgtcggctttatggtgggttggtcttctctgctcgactatctgttcgcgccgatgatcaacattctgctggcgaaaatctattttgaagctctggtgccttccattccatcgtggatgtttgtggtggcgctggtggcctttatgaccgcctttaacctgcgtagtctgaaatccgtagcgaacttcaacactgtaatcgtcgtgttgcagatagtgctgatcgcggtgattctgggcatggtggtttatggcgtatttgaaggtgaaggcgctggtacgctggcgagcactcgtccgttctggtctggcgatgcgcatgttatcccgatgattaccggggcgacaatcctgtgcttctcctttaccggttttgacggcatcagcaacctgtcggaagaaaccaaagatgcagagcgcgtgatcccgcgtgcgattttcctgaccgcgctgatcggcggcatgatcttcatctttgcaacttacttcctgcagctgtacttcccggatatctctcgttttaaagatccggatgcgtcacagcctgaaatcatgctgtacgttgcgggtaaagcgttccaggttggcgcgctgatcttctccaccattaccgtactggcgtccggtatggcggcgcacgcaggcgttgcgcgtctgatgtacgtaatgggtcgtgacggcgtgttcccgaaaagcttcttcggttatgtacacccgaaatggcgtactccggcgatgaacatcatcctggttggcgcgattgccctgctggcaatcaacttcgacctggtaatggctacggcgctgattaactttggtgcgttggtggcgttcaccttcgttaacctgtcggtcatctcgcagttctggatccgtgagaagcgtaacaaaacgctgaaagatcacttccagtatctgttcctgccgatgtgtggtgcgctgaccgttggtgcgctgtgggttaacctggaagaaagctcaatggttctgggtctgatctgggctgctatcggtctgatttacctggcttgcgtaaccaagagtttccgtaacccggttccgcagtacgaagacgtagcgtaa

SEQ ID NO: 3695 - DNA, 951 bp, Escherichia coli
atgcactgcaagggggcgtgtatgaaaccactgctggatgtgttgatgatcctcgatgccttagaaaaagaaggcagttttgcggcggcgtcagccaaactctacaagacgccgtccgctctgagttacaccgttcacaagctggaaagcgaccttaatattcaattgcttgatcgtagcggacaccgcgctaaattcacccgtaccggaaaaatgttattagagaaagggcgggaagttctgcataccgtgcgagaactggaaaagcaggcgatcaaactgcatgaaggctgggaaaacgagctggtgattggcgtggacgacacgtttcctttttctctgcttgcgcctctcattgaagctttttatcaacatcatagcgtgacgcgcctgaagtttatcaatggcgtactcggtggttcctgggatgccctgactcaggggcgagccgatattatcgttggcgcgatgcatgagccaccatcttccagtgagtttggtttctcgcggttgggcgatcttgaacaagtctttgcggtcgcgcctcatcatccgttagcccaggaagaagaaccgttaaaccgtcgtatcattaaacgatatcgggcgattgtggtgggggacactgcgcaggcaggcgcttctacggcctcacaacttctcgacgaacaagaagccattaccgttttcgattttaaaaccaagctggagctgcaaattagcggccttggctgcggctatttaccccgttatctggcgcaacgttttctcgatagtggcgcgttaatcgagaagaaagtggtcgcccaaactctctttgaacctgtctggattggctggaatgaacagaccgcagggcttgccagcggctggtggcgagatgaaattttagcaaatagtgcgatcgccggtgtttatgcaaaatctgatgacggaaaatcagccatttaa

SEQ ID NO: 3696 - DNA, 825 bp, Escherichia coli
atgaaaaaggtcgcaattgtcgggttagggtggttaggcatgccgctggcgatgtcactttcagcgcgaggctggcaagtcaccgggagtaaaaccacacaagatggtgtcgaagcggcccgaatgagtggcattgatagctatctgcttcgcatggagcctgagttagtttgcgattctgacgatctggatgccctgatggatgccgatgcgctggtcattacgcttccggcacgtcgtagcggccccggcgatgagttctatttacaagcggtacaagagttagtggatagcgcgctggctcatcgtattccccgtattatttttaccagctcgacgtctgtctatggcgacgcacaaggcacggtgaaagaaaccaccccgcgtaatccggtaaccaacagtggacgagtattagaagaactcgaagactggctgcacaatttacccggtacttcggtcgatattctgcgtcttgcgggcctggtcggaccgggacgtcatcccggacgcttctttgccggaaaaaccgcccctgatggtgaacatggtgttaatttagtccatttagaagatgttattggcgctatcactctgttgttacaggcacctaaaggcggacacatctataatatatgtgcgccagctcaccctgcgcgtaatgttttctatccgcagatggcccgtttactggggctgcaacctccgcagttcagaaatagtctggacagcggcaaaggtaagattattgatggcagtcggatttgtaatgaactgggatttgaataccagtatcccgatccgctggtaatgccgctggagtaa

SEQ ID NO: 3697 - DNA, 255 bp, Escherichia coli
gtgaaactaatctggtctgaggaatcatgggatgattatctgtactggcaggaaacagataagcgaattgttaaaaagatcaatgaacttatcaaagatacccgcagaacaccatttgaaggtaaggggaaaccagagcccctgaaacataatttgtcaggtttctggtcccgacgcattacagaggagcaccgtctggtatacgcggttactgatgattcactgctcattgcagcatgtcgttatcattattga

SEQ ID NO: 3698 - DNA, 252 bp, Escherichia coli
atgcgtacaattagctacagcgaagcgcgtcagaatttgtcggcaacaatgatgaaagccgttgaagatcatgccccgatcctcattactcgtcagaatggagaggcttgtgttctgatgtcactcgaagaatacaactcgctggaagagacggcttatctactgcgttcccccgctaacgcccggagattgatggactcaatcgatagcctgaaatcaggcaaaggaacggaaaaggacattattgagtga

SEQ ID NO: 3699 - DNA, 900 bp, Escherichia coli
atgacagacaacactcgtttacgcatagctatgcagaaatccggccgtttaagtgatgactcacgcgaattactggcgcgctgcggcattaaaatcaatcttcacacccagcgcctgatcgcgatggcagaaaacatgccgattgatattctgcgcgtgcgtgacgacgacattcccggtctggtaatggacggcgtggtagatcttgggattatcggcgaaaacgtgctggaagaagagctgcttaaccgccgagcccagggtgaagatccgcgctactttaccctgcgtcgtctggatttcggcggctgccgactttcactggcaacgccggttgatgaagcctgggacggtccgctctccttaaacggtaaacgtatcgccacctcttatcctcacctgctcaagcgttatctcgatcagaaaggtatctcttttaaatcctgcttactgaacggttctgtcgaagttgcgccgcgtgccggactggcggatgcgatttgcgatctggtttccaccggtgccacgctggaagctaacggcctgcgcgaagtcgaagttatctaccgctcgaaagcctgcctgatccagcgcgatggcgaaatggaagaatccaaacagcaactgatcgacaaactgctgacccgtattcagggtgttatccaggcgcgcgaatcaaaatacatcatgatgcacgcaccgaccgaacgcctggatgaagtcatcgccctgctgccaggtgccgaacgcccaactattctaccgctggcgggtgatcaacagcgcgtagcgatgcacatggtcagtagcgaaaccctgttctgggaaacgatggaaaaactgaaagcgctgggtgccagttcaatcctggtcctgccgattgagaagatgatggagtga

SEQ ID NO: 3700 - DNA, 1305 bp, Escherichia coli
atgagctttaacacaatcattgactggaatagctgtactgcggagcaacaacgccagctgttaatgcgcccggcgatctccgcttctgaaagcattacccgcaccgttaacgatattctcgataacgtgaaaacgcgtggcgatgaggccctgcgtgaatacagcgcgaagtttgataaaaccacggttaccgcgctgaaggtgtctgctgaggagatcgccgccgccagcgaacgcctgagcgacgagctaaaacaggcgatggcggtggcagtaaagaatattgaaaccttccacactgcgcaaaaactgccgccggtagatgtagaaacgcagccaggcgtgcgttgccagcaggtcacgcgcccggtggcttcagtgggtttgtatattcctggcggctccgccccgctcttctcaacggtattaatgctggcgactccggcgcgtattgcgggctgtaaaaaagtggtgctgtgctcaccgccgccgattgccgatgagatcctttatgcggcgcagctgtgcggtgtgcaggacgtgtttaacgtcggcggcgcacaggccattgccgcgctggcgtttggtacggaatctgtgccgaaagtggacaaaatcttcgggccgggtaacgcctttgtcaccgaagcaaaacgccaggtaagccagcgtctggacggtgcggcgatcgatatgcccgcaggcccgtcggaagtgctggtgattgctgacagcggcgcaacgccggatttcgtggcttctgatttgctctcccaggctgaacacggcccggactcacaggtgattttactgacacctgatgctgatatggcgcgtcgcgttgccgaggccgtcgaacgccagttggcagaattgccgagagctgaaaccgcccgtcaggcactgagcgccagccgcctgatcgtaaccaacgatttagcgcagtgcgtagagatctccaatcagtacggtccggagcacctgatcattcagacccgcaacgcccgcgaactggtcgatagcatcaccagcgccggttcggtatttcttggtgactggtcaccggaatcggcaggtgactacgcctccggcaccaaccacgttctgccgacttacggttacaccgccacctgttccagcctcggactggcagatttccagaagcgcatgaccgtgcaggaactctcgaaagaaggtttctccgcgctggcttcgaccattgaaacactggccgccgccgagcgcctgactgcccacaaaaatgccgttactttgcgtgttaacgcccttaaggagcaagcatga

SEQ ID NO: 3701 - DNA, 1071 bp, Escherichia coli
atgaacaccgtgactattaccgatttagcgcgtgaaaacgtccgcaacctgacgccgtatcagtcagcgcgtcgtctgggcggtaacggcgatgtctggctgaacgccaacgaatatcccactgccgtggagtttcagctcactcagcaaacgctcaaccgctacccggaatgccaaccgaaagcggtgattgaaaattacgcgcaatatgcaggcgtaaaaccggagcaggtgttggtcagccgtggcgcggacgaaggtattgaactgctgattcgcgctttttgtgaaccgggtaaagacgccatcctctactgcccgccaacgtacggcatgtacagcgtcagcgctgaaaccattggcgtcgagtgccgcacagtgccgacgctggacaactggcaactggacttacagggcatttccgacaagctggacggcgtaaaagtggtctatgtttgcagccccaacaacccgaccgggcaactgatcaacccgcaggattttcgcaccctgctggagttaacccgcggtaaggcgattgtggttgccgatgaagcttatatcgagttttgcccgcaggcatcgctggctggctggctggcggaatatccgcacctggcgattttgcgcacactgtccaaagcttttgctctggcggggcttcgttgcggatttacgctggcaaacgaagaagtcatcaacctgctgatgaaagtgatcgccccctacccgctctcgacgccggttgccgacattgccgcacaggcgttaagcccgcagggaatcgtcgccatgcgcgaacgggtggcgcaaattattacagaacgcgaatacctgattgccgcactgaaagagatcccctgcgtggagcaggttttcgactctgaaaccaactacattctggcgcgctttaaagcctccagtgcggtgtttaaatctttgtgggatcagggcattatcttacgtgatcagaataaacaaccctctttaagtggctgcctgcgaattaccgtcggaacccgtgaagaaagccagcgcgtcattgacgccttacgtgcggagcaagtttga

SEQ ID NO: 3702 - DNA, 1068 bp, Escherichia coli
atgagtcagaagtatctttttatcgatcgcgatggaaccctgattagcgaaccgccgagtgattttcaggtggaccgttttgacaaactcgcctttgaaccgggcgtgatcccggagctgctgaagctgcaaaaagcgggatataagctggtgatgatcaccaatcaggatggtctgggaacacaaagtttcccgcaggcggatttcgatggcccgcacaacctgatgatgcagatcttcacctcgcaaggcgtacagtttgatgaagtgctgatttgtccgcacctgcccgccgatgagtgcgactgccgtaagccgaaagtaaaacttgtggagcgttatctggctgagcaagcgatggatcgcgctaacagttatgtgattggcgatcgcgcgaccgacattcaactggcggaaaacatgggcattaatggtttacgctacgaccgcgaagccctgaactggccaatgattggcgagcaactcactaaacgagaccgttacgcccatgtagtgcgcaacaccaaagagacgcaaattgacgtccaggtgtggctggatcgcgaaggtggcagcaagattaacaccggcgttggcttctttgatcacatgctggatcagatcgctacccacggcggtttccgtatggaaatcaacgtcaaaggcgacctctatatcgacgatcaccacaccgtcgaagataccggcctggcgctgggggaagcattaaaaattgctcttggcgacaaacgcggtatttgccgctttggttttgtgctgccgatggacgaatgccttgcccgctgcgcgctggatatctctggtcgcccgcacctggaatataaagccgagtttacctaccagcgcgtgggcgatctcagcaccgagatgatcgagcacttcttccgttcgctctcttacaccatgggcgtgacgttgcacctgaaaaccaaaggtaaaaacgatcaccaccgtgtagaaagcctgttcaaagcctttggtcgcaccctgcgccaggccatccgcgtggaaggcgacaccctgccctcgtcgaaaggagtgctgtaa

SEQ ID NO: 3703 - DNA, 591 bp, Escherichia coli
atgaacgtggtgatccttgataccggctgcgccaatctgaactcggtgaagtcagccattgcgcgccacggttatgaacccaaagtcagccgtgacccggacgtagtgttgctggccgataaactatttttacccggcgtaggcaccgcacaagcagcgatggatcaggtgcgtgagcgagaactgtttgatctcatcaaagcctgtacccaaccggtgctgggcatctgcttagggatgcaactgctggggcggcgcagcgaagagagcaacggcgtcgatttgctgggcatcatcgacgaagacgtgccgaaaatgaccgactttggtctgcccctgccgcatatgggctggaaccgcgtttacccgcaggcaggcaaccgcctgtttcaggggattgaagacggtgcgtacttttactttgttcacagctacgcaatgccagtcaatccgtggaccatcgcccagtgtaattacggcgaaccgttcaccgcggcggtacaaaaagataacttctacggcgtgcagttccacccggagcgttctggtgccgctggcgctaaattgctgaaaaacttcctggagatgtga

SEQ ID NO: 3704 - DNA, 738 bp, Escherichia coli
atgattattccggcattagatttaatcgacggcaccgtggtgcgtctccatcagggcgactacggcaaacaacgcgattacggtaacgacccgctgccgcgcttacaggattacgctgcgcaaggtgccgaagtgctgcacctggtggatctgaccggggcaaaagatccggctaaacgtcaaatcccactgattaaatccctggtcgcgggcgttaacgttccggtgcaggttggcggcggcgtgcgtagcgaagaagacgtggcggcgttactggaagcaggcgttgcgcgtgtggtggttggctccaccgcggtaaaatcaccagaaatggtgaaaggctggtttgaacgttttggtgccgatgccttagtgctggcgctggatgtccgtattgacgagcaaggcaacaagcaggtggcagtcagcggctggcaagagaactcgggcgtttcgctggaacaactggtggaaacctatctgcccgtcggcctgaaacatgtgctgtgtaccgatatctcgcgcgacggcacgctggcgggatctaacgtctctttatatgaagaagtgtgtgccagatatccgcaagtggcgtttcagtcctccggcggcattggcgacattaacgatgtggcggccctgcgtggtactggtgtgcgcggcgtaatagttggtcgtgcattactggaaggtaaattcaccgtgaaggaggctatcgcatgctggcaaaacgcataa

SEQ ID NO: 3705 - DNA, 777 bp, Escherichia coli
atgctggcaaaacgcataattccatgtctcgacgttcgtgatggtcaggtggtgaaaggcgtacagtttcgcaaccatgaaatcattggcgatatcgtgccgctggcaaaacgttacgccgaagaaggtgcagacgaactggtgttctacgatatcaccgcttccagcgatggccgtgtggtagataaaagctgggtatctcgcgtggcggaagtaatcgacattccgttttgtgtggcgggtgggattaagtctctggaagatgccgcgaaaattctttcctttggcgcggataaaatctccattaactcccctgcactggcagacccgacgttaattactcgcctggcggatcgctttggcgtgcagtgtattgtggtcggcattgatacctggtacgacgccgaaaccggtaaatatcatgtgaatcaatataccggcgatgaaagccgcacctgcgtcactcagtgggaaacactcgactgggtgcaggaagtgcaaaaacgcggtgccggagaaatcgtcctcaacatgatgaatcaggacggcgtgcgtaacggttacgacctcgaacagctgaaaaaagtgcgtgaagtttgccacgtcccgctgattgcctccggtggcgcgggcaccatggaacacttcctggaagccttccgcgatgccgacgttgacggtgcgctggcagcttccgtattccacaaacaaataatcaatattggtgaattaaaagcgtacctggcaacacagggcgtggagatcaggatatgttaa

SEQ ID NO: 3706 - DNA, 612 bp, Escherichia coli
atgttaacagaacaacaacgtcgcgaactggactgggaaaaaaccgacggtctgatgccggtgattgtgcaacacgcggtatccggcgaagtgctaatgctgggctacatgaacccggaagccttagacaaaaccatcgaaagcggtaaagtcaccttcttctcgcgcactaaacagcgactgtggaccaaaggcgaaacgtcgggcaatttcctcaatgtggtgagtattgccccggactgcgacaacgacacgttactggtgctggcgaatcccatcggcccgacctgccacaaaggcaccagcagctgcttcggcaacaccgctcaccagtggctgttcctttatcaactggaacaactgctcgccgaacgtaaatctgccgacccggaaacctcctataccgccaaactgtatgccagcggcaccaagcgcattgcgcagaaagtgggcgaagaaggcgtggaaactgcgctggcagcaacggtacatgaccgctttgagctgaccaacgaggcatctgacttgatgtatcacctgctggtgttgttgcaggatcaggatctggatttaacgacggtgattgagaacctgcgtaaacggcatcagtga

SEQ ID NO: 3707 - DNA, 978 bp, Escherichia coli
atgagagtagaaaataataatgtttctgggcaaaaccatgacccggaacagattgatttgattgatttactagtgcagttgtggcgtggcaagatgacaattatcatttccgtcattgtggctattgccctggctattggttatttggcagtagcgaaggagaaatggacgtcaacagcaattatcactcagcccgacgtggggcaaattgctggctataacaatgccatgaatgttatctatggtcaggctgcaccgaaagtatcggatttgcaggagacgttaattggtcgcttcagttctgccttctctgcattagcagaaacgctggataatcaggaagagccagaaaaacttaccatcgaaccttctgttaagaaccagcaattaccattgactgtttcttatgttgggcaaactgcagagggcgcacaaatgaagttggcccaatacattcagcaagttgatgataaagtgaatcaagagctagaaaaggatctcaaggacaacattgctctgggacggaaaaacttgcaggactctttaagaacccaggaagtggtcgcgcaggagcagaaagatctgcgtatccgtcagattcaggaagcgttgcagtatgcgaatcaggcgcaggtgacaaagccgcagattcaacagacacaggacgtaacccaggatactatgtttcttttggggagcgaagcgctggagtcgatgattaagcacgaagcgacccgtccgttggtgttctcatcaaactactatcagactcgtcaaaacctgctggatattgacaatcttgacgttgataaacttgatattcatgcttaccgctatgtaatgaaaccgacgttacctattcgtcgcgatagcccgaagaaagcaattaccttgattctggctgtgctgctgggcggcatggttggcgcggggattgtgcttgggcgtaacgcgctgcgtaattacaacgcgaaataa

SEQ ID NO: 3708 - DNA, 1167 bp, Escherichia coli
atgaaaatcaccatttccggtactggctatgtaggcttgtcaaacgggcttctaatcgcacaaaatcatgaggttgtggcattagatattttaccgtcacgcgttgctatgctgaatgatcggatatctcctattgttgataaggaaattcagcagtttttgcaatcagataaaatacactttaatgccacattagataaaaatgaagcctaccgggatgctgattatgtcatcatcgccactccaaccgactatgatcctaaaactaattatttcaatacatccagtgtagaatcagtaattaaagacgtagttgagataaatccttatgcggttatggtcatcaaatcaacggttcccgttggttttaccgcagcgatgcataagaaatatcgtactgaaaatattattttctctccggaattcctccgcgaaggtaaagccctttacgataatctccatccgtcacgtattgtcatcggtgagcgttcagaacgcgcagaacgttttgctgcgttgttacaggaaggcgcgattaagcaaaatatcccgaccctgtttaccgactccactgaagcagaagcgattaaacttttcgctaatacctatctggcgatgcgcgtagcatactttaatgaactggatagctatgcagaaagtttaggtctgaatactcgccagattatcgaaggcgtttgtctcgatccgcgtattggcaaccattacaacaatccgtcgtttggttatggtggttattgtctgccgaaagataccaagcagttactggcgaactaccagtctgtgccgaataacctgatctcggcaattgtcgatgcaaaccgcacgcgtaaagattttattgccgatgccattttgtcacgcaaaccgcaagtggtgggtatttatcgtctgattatgaagagcgggtcagataacttccgtgcgtcttctattcaggggattatgaagcgtatcaaggcgaaaggcgttgaagtgatcatctacgagccggtgatgaaagaagactcattcttcaactctcgcctggaacgtgatctcgccaccttcaaacaacaagccgacgtcattatctccaaccgtatggcagaagagcttaaggatgtggcagataaagtctacacccgcgatctctttggcagcgactaa

SEQ ID NO: 3709 - DNA, 1407 bp, Escherichia coli
atgtcaaagcaacagatcggcgtcgtcggtatggcagtgatggggcgcaaccttgcgctcaatatcgaaagccgtggttataccgtctctattttcaaccgttcccgtgaaaagaccgaagaagtgattgccgaaaatccaggcaaaaaactggttccttactatacggtgaaagagtttgttgaatctttggaaacgcctcgtcgcatcctgttaatggtgaaagcaggtgcaggcacggatgctgctattgattccctcaagccatacctcgataaaggtgacatcatcattgatggtggtaataccttcttccaggacaccattcgtcgtaaccgtgagctttctgccgaaggctttaacttcattggtaccggtgtctccggtggtgaagagggcgcgctgaaaggtccttctattatgcctggcgggcagaaagaggcttatgagctggttgcgcctatcctgagtaaaatcgctgccgtggcagaagacggcgagccatgcgttacttatattggtgccgacggcgcaggccattatgtgaagatggttcacaatggtattgaatacggagatatgcagctcattgctgaagcgtattctctgctcaaaggtggcctgaatctctctaatgaagaactggcccagactttcaccgagtggaataacggtgaacttagcagctacctgatcgacatcactaaagatatcttcaccaaaaaagatgaagacggtaactacctggttgatgtgattctggatgaagcagcaaacaaaggcaccggtaaatggaccagccagagcgcgctggatctcggcgaaccgctgtcgctgattaccgagtctgtgtttgcacgttatatctcttctctgaaagatcagcgcgttgccgcatctaaagttctctctggcccgcaagcgcagccagcaggcgacaaaggtgagttcatcgaaaaagttcgccgtgcgttgtatctgggcaaaatcgtttcttacgctcagggcttctctcagctgcgtgctgcgtctgaagaatacaactgggatctgaactacggcgaaatcgcgaagattttccgtgctggctgcatcatccgtgcgcagttcctgcagaaaatcaccgatgcttatgccgaaaatccgcagatcgctaacctgctgctggccccgtacttcaagcaaattgccgatgactaccagcaggcgctgcgcgatgtcgtcgcttatgcagtacagaacggtatcccggttccgaccttcgccgctgcggttgcctattatgacagctaccgtgccgctgttctgcctgcgaacctgatccaggcacagcgtgactatttcggggcgcatacttataagcgcattgataaagaaggtgtgttccatactgaatggctggattaa

SEQ ID NO: 3710 - DNA, 1533 bp, Escherichia coli
atgagaacgaaaaaagcattacacaactttaaagttgatttattaattacttttttattggttttgctagggttttatattcgaactgtttttgtttcaaaaatgggaagtgatattactggagtgatgttactattcacacagttgacagcatatctcaatttggcagaattaggtattggaattgcagctgccagcgtattatataaaccgctcagcgagaatgaatacaataaaataacttacataatatctttgctctcagtcatatacaaatatatatttgtgtttgttttgattcttggcgttgttataggtatctgtatttattactttattgattctgtaaaggttgtaaatggcgtttttttatattgggctttgttcgtttttaatacatcgttgacatatagttatgctaaatactccacattattaactgctaatcagcggtactcagcagtaagaaaaattcaaggtggcggaaaagttataataattgtatttcagatattaattttgtgctttacgcaaagtttcatactttatttgttagttgagactttaggtattttttctcaatatttgatttttaaaaaaataattgggaacggaaatcaatatctcagtaatgaggttttacttattgaaagcgataaacttttgataaaaaaagaattaaaaataagaataaaaaatatgttcttccataaaataggtgctgtgcttgtccttaatacagactacctgcttgtatcaaagtttctgacattaagttatgtgacaatttttggcagctatatgatggtatttcagatagtaactgttttgatgtcaagttttgttaatgctattactgcaggaatgggtaattacttaattaataaaagtaatttagaaattaaggaaattacacgtcaattttatgtgatatttatcgcctttgcaacattcatatcactaaatatgttttttcttgttaatgattttatcgcaaaatggataggtgttaattatacattaagtaacaccctagttgcattaatgattgttaacgtattcattagtgttgtcagggtaccttctgatatattaaaaaacgcaagtggacattttggtgatatttattatccattattagaaggtgtgctgaatattacgatatccatcattttggctatcattattggattacctggcattattatagggacaatagtatctaacttaatagtaataatgcttgcgaaaccattatatctttactctaagttatttaatcttagaaatccgacgagggtttattttgaatttatttctcggcctatgttatattcattatgtgtgattggggtgagctatttattgcgcgatgaaatatattcatttaaagtaagtacatggttggattttattaacaagctactcttagtctctactcctagcatattggtaatatgtgctattttctctacggatagtgactttagattatttttcagaaaaattatatatgtgattatgaagaaataa

SEQ ID NO: 3711 - DNA, 309 bp, Escherichia coli
gtgtgcctgaaaggaaaaacgctgggcgaactggtgcgcgaccggatggcggcgtttccggcaagcggtgagatcaacagaaaactggcgcaccctgttgaggcgattaaccgcgtggaacagcattttagccgtgaggtgctggcggtggatcgcaccgatggcatcagcatgacctttgccgactggcgctttaacctgcgctcttccaacaccgaaccggtggtgcgcctgaatgtggaatctcgcggtgatgttcaggttatggtaatccatactcaagaaatattatcaattttgacgtcataa

SEQ ID NO: 3712 - DNA, 573 bp, Escherichia coli
gtggcgaagagcgtacccgcaatttttcttgaccgtgatggcaccattaatgttgatcacggctatgtccatgagatcgacaactttgaatttatcgacggtgttattgacgccatgcgcgagctaaaaaaaatgggctttgcgctggtggtagtaaccaaccagtctggcattgctcgcggtaaatttactgaagcacagtttgaaacgctgaccgagtggatggactggtcgctggcggaccgcgatgtcgatctggatggcatctattattgcccgcatcatccgcagggtagtgttgaagagtttcgccaggtctgcgactgccgcaaaccacatccggggatgtttttgtcagcacgcgattatttgcatattgatatggccgcttcttatatggtgggcgataaattagaagatatgcaggcagcggctgcggcgagcgtgggaacaaaagtgctggtgcgtacgggtaaacctattacgcctgaagcagaaaacgcggcggattgggtgttaaatagtctggcagaccttccgcaagcgataaaaaagcagcaaaaaccggcgtga

SEQ ID NO: 3713 - DNA, 1032 bp, Escherichia coli
atgataaaactttcgaatatcaccaaagtgttccaccagggcacccgcaccatccaggcgttgaacaacgtcagcctgcatgtgccagctggacaaatttatggcgttatcggtgcctcaggcgcgggtaagagtacgcttatacgttgtgtaaacctgctggagcgcccaaccgagggtagcgtgctggttgatggccaggagctgaccacgctgtcagaatccgagttgactaaagctcgccgccagattggtatgattttccagcattttaacctgctctcttcgcgtactgtttttggcaacgtggctctgccgctggagctggacaacacgccgaaagacgaaatcaaacgtcgcgtgacggaattgctgtcattggttggtcttggtgataagcatgatagctatccgtcgaacctttccggtgggcagaaacagcgtgtggcgattgcccgtgcgttagccagcaatcctaaagtattgctgtgtgatgaagccaccagcgcgctggacccggcaacgacacgttctattctcgaactgcttaaagacatcaaccgccgtctgggtttgacgattctgttgatcacccacgaaatggacgttgtgaagcgcatttgtgattgcgtggcggttatcagtaatggcgaactgatcgagcaggacacggtaagtgaagtgttctcgcatccgaaaacgccgctggcgcagaagtttattcagtcgaccctgcatctggatatcccggaagattaccaggaacgtctgcaagcggagccatttactgactgcgtgccgatgctgcgtctggagtttaccggtcaatcggtcgatgccccactgctttctgaaaccgcgcgtcgtttcaacgtcaacaacaacattattagcgcgcagatggattacgccggtggcgttaagttcggcatcatgctgactgaaatgcacggcacacaacaagatacgcaagccgccattgcctggctgcaggaacaccatgtaaaagtagaggtactgggttatgtctga

SEQ ID NO: 3714 - DNA, 654 bp, Escherichia coli
atgtctgagccgatgatgtggctgctggttcgtggcgtatgggaaacgctggcaatgaccttcgtatccggtttttttggctttgtgattggtctgccggttggcgttctgctttatgtcacgcgtccggggcaaattattgctaacgcgaagttgtatcgtaccatttctgcgattgtgaacattttccgttccatcccgttcattatcttgctggtatggatgattccgtttacccgcgttattgtcggtacatcgattggattgcaggcagcgattgttccgttaaccgttggtgcagcaccgtttattgcccgtatggtcgagaacgctctgctggagatcccaaccgggttaattgaagcttcccgcgcaatgggggccacgccaatgcagatcgtccgtaaagtgctgttaccggaagcgttgccgggtctggtgaatgcggcaactatcaccctgattaccctggttggttattccgcgatgggtggtgcagtcggtgccggtggtttaggtcagattggctatcagtatggctacatcggctacaacgcgacggtgatgaatacggtactggtattgctggtcattctggtttatttaattcagttcgcaggcgaccgcatcgtccgggctgtcactcgcaagtaa

SEQ ID NO: 3715 - DNA, 816 bp, Escherichia coli
atggcgttcaaattcaaaacctttgcggcagtgggagccctgattggatcactggcactggtaggctgcggtcaggatgaaaaagatccaaaccacattaaagtcggcgtgattgttggtgccgaacagcaggttgcagaagtcgcgcagaaagttgcgaaagacaaatatggcctggacgttgagctggtaaccttcaacgactatgttctgccaaacgaagcattgagcaaaggcgatatcgacgccaacgccttccagcataaaccgtaccttgatcagcaactgaaagatcgtggctacaaactggtcgcagtaggcaacacttttgtttatccgattgctggttactccaagaaaatcaaatcactggatgaactgcaggatggttcgcaggttgccgtgccaaacgacccaactaaccttggtcgttcactgctgctgctgcaaaaagtgggcttgatcaaactgaaagatggcgttggcctgctgccgaccgttcttgatgttgttgagaacccaaaaaatctgaaaattgttgaactggaagcaccgcagctgccgcgctctctggacgacgcgcaaatcgctctggcagttatcaataccacctatgccagccagattggcctgactccagcgaaagacggtatctttgtcgaagataaagagtccccgtacgtaaacctgatcgtaacgcgtgaagacaacaaagacgccgaaaacgtgaagaaattcgttcaggcttatcagtctgacgaagtttacgaagcagcaaacaaagtgtttaacggcggcgctgttaaaggctggtaa

SEQ ID NO: 3716 - DNA, 405 bp, Escherichia coli
atgcgtgctttaccgatctgtttagtagcactcatgctaagcggctgttccatgttaagcagatcccctgtcgaacccgttcaaagcactgcaccccagccgaaagcggagcctgcaaaaccgaaagcgccgcgcgccacgccggtccgaatttataccaatgcagaagaattagtcggcaaaccgttccgcgatctcggtgaagtcagtggcgactcttgccaggcctctaatcaggactctccgccgagcattccaaccgcacgtaagcggatgcaaatcaacgcctcgaaaatgaaagccaatgcggtattactgcatagctgcgaagtcaccagcggtacgccaggttgctatcgtcaggctgtatgtatcggttctgcgcttaacatcacggcgaaatga

SEQ ID NO: 3717 - DNA, 708 bp, Escherichia coli
atgagcagtttccagttcgagcaaataggcgttattcgctcgccctataaagaaaaattcgccgttccgcgccagccaggtctggtaaaaagcgccaacggcgaactacatctcattgctccctacaaccaggccgacgccgttcgcggcctggaagcattcagccatttatggatccttttcgtctttcatcaaacgatggaaggcggctggcgtccgactgtgcgtccgcctcgtctcggcggtaatgccagaatgggtgttttcgctacgcgctccacttttcgccctaacccgattggtatgtcgctggtagagctgaaagaggttgtttgccataaagatagcgtgattctgaagctcggcagtctggatctggtcgatggtacgccggtagtggatatcaaaccgtatctcccctttgctgaatcgcttcccgatgccagtgccagctatgcgcaaagtgcgccagcggcagaaatggcggtgtgttttaccgcagaggtcgaaaagcagcttttgacgctgaagaagcgttatccgcagttaacgctgtttatccgcgaagtactggcgcaggacccgcgcccggcctatcgtaaaggtgaggaaacgggcaaaacctatgccgtctggctgcatgattttaacgttcgctggcgcgtcaccgacgcaggttttgaagtctttgcgctggaaccgcgttaa

SEQ ID NO: 3718 - DNA, 1719 bp, Escherichia coli
atgcgtactagccaatacctgctctccactctcaaggagacacctgccgacgccgaggtgatcagccatcagctgatgctgcgcgccgggatgatccgcaagctggcctccgggttatatacctggctgccgaccggcgtgcgcgttctgaaaaaagtcgaaaacatcgtgcgtgaagagatgaacaacgccggtgcgatcgaggtgttaatgccggtggttcagccatctgaactgtggcaagagagtggtcgttgggaacagtatggcccggaattgctgcgtattgctgaccgtggtgaccgtccgttcgtactcggcccaactcatgaagaagtgattacagacctgattcgtaacgagctgagctcttacaaacagctgccgctgaacttctatcagatccagaccaagttccgcgacgaagtgcgtccgcgttttggcgtcatgcgttcccgcgaattcctgatgaaagatgcttactctttccatacttctcaggaatccctgcaggaaacctacgatgcaatgtatgcggcctacagcaaaatcttcagccgcatggggctggatttccgcgccgtacaggccgataccggttctatcggcggtagcgcctctcacgaatttcaggtgctggcgcagagcggtgaagacgatgtggtcttctccgatacttctgactatgcagcgaacattgaactggcagaagctatcgcgccgaaagaaccgcgcgctgctgctacccaggaaatgacgctggttgatacgccgaacgcgaaaaccatcgcggaactggttgaacagttcaatctgccgattgagaaaacggttaagactctgctggttaaagccgttgaaggcagtagcttcccgctggttgcgctgctggtgcgcggtgaccacgagctgaacgaagttaaagcagaaaaactgccgcaggttgccagcccgctgacttttgcgaccgaagaagaaattcgtgccgtggttaaagccggtccgggttcactgggtccggtaaacatgccgattccggtggtgattgaccgtaccgttgcggcgatgagtgatttcgctgctggtgctaacatcgatggtaaacactacttcggtatcaactgggatcgcgatgtcgctaccccggaaattgctgatatccgcaacgtggtggctggcgatccaagcccggatggtcagggtacgctgctgatcaaacgtggtatcgaagtcggtcacatcttccagctgggtaccaagtactccgaagcactgaaagcctccgtacagggtgaagatggccgtaaccaaatcctgacgatgggttgctacggtatcggcgtaacgcgtgtggtagctgcggcgattgagcagaactacgacgaacgcggcatcgtatggcctgacgctatcgcgccgttccaggtggcgattctgccaatgaacatgcacaaatccttccgcgtacaggaacttgctgagaaactgtacagcgaactgcgcgcacaaggtatcgaagtgctgctggatgaccgcaaagagcgtccgggcgtgatgtttgctgatatggaactgatcggtattccgcacactattgtgctgggcgaccgtaacctcgacaacgataatatcgaatataaatatcgtcgtaacggcgagaaacagttaattaagactggtgacatcgtcgattatctggtgaaacagattaaaggctga

SEQ ID NO: 3719 - DNA, 825 bp, Escherichia coli
atggataaaccaaaggcgtactgccgcctgcttctcccctgctttcttttactttcggcctgtaccgttgatatcagccagccagactcatcagccacagtggtaaatgccgaggcgaaaacatgggctgttaaattccagcatcaaagctctttcaccgaacaatcaataaaagaaataacggaaccagatctcaaacccggcgatttgcttttctcctcaagccttggggtaacctcatttggtatccgcgtattcagcacttcctctgtgagtcacgttgcaatctatttgggagataataacgttgccgaagcgacaggcgctggcgtccagattgtttcccttaaaaaagccataaagcatagtgataagcttttcgtcttacgagtcccggatcttaccccgcaacaagccacagaaatcaccgcgttcgccaacaaaattaaagatagcggttacaactatcgcggcattgtcgaatttattccatttatggtgactcgccagatgtgctcactaaatccgttctccgaggattttcgtcaacagtgcgtcagcggcctggcgaaagcgcagttaagcagtgtgggcgaaggagacaaaaagtcgtggttttgttcggaatttgtcactgatgcatttgccaaagccgggcatccgcttacgctggcgcaatcaggctggattagccctgccgatctgatgcatatgcgtactggcgatatctctgcgtttaagccagaaacgcagttacagtatgttgggcacatgaagcctgggatttatatcaagacaggccgctttgttgggctgactcagtga

SEQ ID NO: 3720 - DNA, 711 bp, Escherichia coli
atggtgaaaaaagcgatagtgacagcgatggctgtaatcagcctctttactctgatgggatgtaataatcgggccgaagtcgacacgctttctccggagcaggctgccgaactgaaaccgatgccgcaaagttggcgcggcgtgctgccgtgtgctgattgcgaaggaatcgaaacctctctgttcctcgaaaaagacggaacctgggtgatgaatgagcgttatctgggggctcgtgaagaaccttcctccttcgcttcctacggtacatgggcgcgaaccgctgacaagctggtattaaccgatagcaaaggtgaaaagtcatattatcgcgcgaaaggagatgcgctggagatgctcgatcgtgaaggtaatccgattgaatcgcagttcaactatacgctggaaccggcacaatccagcttacccatgacaccgatgaccctgcggggcatgtatttttatatggctgatgcggcgaccttcactgattgcgcgaccggaaaacgtttcatggtggcgaataacgcagagctggagcgtggctacctggctgcgcgcggtaacagtgaaaaaccggtgttactgtcagtagaaggtcactttacgcttgaggctaatccggataccggtgcgccgaccaaagtattagcgcccgatacggcaggtaaattttacccaaaccaggattgcagtagtttggggctgtaa

SEQ ID NO: 3721 - DNA, 423 bp, Escherichia coli
atgattgtgatttcccgacatgttgctatctctgatggcgagtttgagatcaccgccattcgtgcgcagggtgcgggcgggcagcatgttaataagacctcaacggctattcgtctgcgttttgacattcgggcatccagcctgccagagtattacaaagagcgtctgctcgccgccagccatcatttgatcagcagtgacggagtgattgtcattaaggcacaggaataccgcagtcaggaactgaaccgcgaagcggcgctggcccggctggtggcagtgattaaagatttaacaacagaacaaaaagcccgacgacctacgcggcccacccgtgcatcaaaagagcgcaggatggcatcgaaagcacaaaaatcaagcgtgaaggcgatgcgcggcaaagtgcgcagcggtcgggaataa

SEQ ID NO: 3722 - DNA, 546 bp, Escherichia coli
atggcgcttaaagcgacaatttataaagcgacggttaatgtggccgatctcgaccgcaaccagtttctcgatgcctctctgacgctggcgcgccatccttcagaaacccaggagcgcatgatgctgcgcctgctggcgtggctaaaatatgccgatgaacgtctgcaatttacccgtggtttgtgtgccgatgatgagccggaagcgtggctgcgtaacgatcacctgggcattgatttgtggattgaactggggctgccggatgagcggcggattaagaaagcctgcacccaggccgcagaagtggcgctgtttgcctataatagtcgggcggcgcaaatctggtggcagcaaaatcagagcaaatgtgcgcagtttgccaatctttccgtctggtatctggacgacgagcagctggcgaaagtgagcgcctttgccgatcgtaccatgacgctgcaggcaacgattcaagatggtgttatctggttatcggatgataagaataatctggaagtgaacttaaccgtctggcaacaaccttcatga

SEQ ID NO: 3723 - DNA, 201 bp, Escherichia coli
gtggaaaaatattgtgagttaatacgcaagcggtacgcggaaatcgccagcggagacttaggatacgttccggacgcgctgggctgcgttttgaaagtgctgaatgaaatggctgccgacgacgccctttctgaggctgtcagggaaaaagcagcatacgctgcggcaaacttactggtgagcgattatgtcaatgaatga

SEQ ID NO: 3724 - DNA, 261 bp, Escherichia coli
atgtcaatgaatgatacgtatcaaccaatcaattgtgatgattacgataatcttgagctcgcctgccagcatcatttaatgctgacacttgagctgaaagatggcgaaaaattgcaggcgaaggccagcgatttagtctcccgcaaaaatgtggaatatctggtcgtcgaggccgctggtgcaacccgcgagctgcgtctggataaaattaccagctttagccacccggaaatcggtacggtggtggtgagcgagtcctga

SEQ ID NO: 3725 - DNA, 1299 bp, Escherichia coli
atgacactcacgctcaatagacaacttctctcctcacgccagattctggtggcctttagcggcggccttgattctactgtcttactgcatcaactggtgcagtggcggacggaaaatccgggcgtcactctgcgcgctatccatgtgcatcacggtttaagcgccaatgctgatgcctgggtgaaacattgtgaaaacatctgccaacagtggcaggtgccgctggtggtcgaacgtgtgcagcttgcgcaagaggggctaggtattgaggcccaggcgcggcaggcacgttatcaggcatttgcccgcaccttgttgcccggtgaagtgctggttacagcgcaacatctcgacgatcaatgtgaaacctttctgctggcgctaaaacgcggtagcggccctgccgggctttcggctatggcggaagtttcggagtttgccggaacacagcttatccgcccgttgcttgcccgcacgcggggggaactggagcagtgggcgttggcgcatggtttacgctggattgaagacgaaagtaatcaggatgatagctacgatcgtaactttctgcgcctgcgcgtagtgccgttattgcagcagcgttggccgcattttgccgaagcaacagcgcgcagcgccgcactttgcgctgaacaagagagcctgttagatgaactgctggcggatgatttagcgcactgtcaaacgccgcaggggacgctgcagattgcgccaatgctggcgatgagtgatgcccgtcgcgcggcgattatccgccgctggctggcagggctgaatgcaccgatgccttcccgcgacgcgttggtgaggatctggcaggaagtggcgctggcgcgggaagatgcctccccctgtttacgtttgggcgcgtttgaaatccgccgctatcagtcgcaactatggtggattaaatccgttgccgggcaaagcgaaaccattgtgccgtggcagacgtggctacaaccgctggaattaccggcggggctgggaagtgtacagcttactgcgggaggcgatattcgccctccgcgtgcagatgaggcggtcagcgtgcgtttcaaagcgccaggactgctgcatattgtcgggcgcaacggcggacgtaagctgaagaaaatctggcaagagttaggcgttccgccgtggctacgtgacaccacgccactgctgttttatggcgaaacgctgattgcggcggcaggggtatttgtgacgcaagaaggtgtggctgaaggtgagaatggcgtaagttttgtctggaagaaaacgcttagttaa

SEQ ID NO: 3726 - DNA, 390 bp, Escherichia coli
atgctgggtttaaaacaggttcaccatattgcgattattgcgacggattatgcgatgagcaaagctttctactgcgatattcttggtttcacgctgcaaagcgaagtctatcgcgaagcgcgcgactcgtggaaaggggatttggcgcttaatgggcaatatgtgattgagcttttctcatttccgttcccgccggagcgccccagccgaccggaagcttgcggcctgcgtcatctggcttttagcgttgatgatatcgatgcggcagtggcgcaccttgaaagccataacgtgaagtgtgaagccatccgtgtcgatccctacacgcaaaaacgcttcacgttctttaacgatccggacgggctgccgttggaactgtatgagcagtaa

SEQ ID NO: 3727 - DNA, 2142 bp, Escherichia coli
atgaacatcattgccattatgggaccgcatggcgtcttttataaagatgagcccatcaaagaactggagtcggcgctggtggcgcaaggctttcagattatctggccacaaaacagcgttgatttgctgaagtttatcgaacataacccacgaatttgcggcgtgatttttgactgggatgagtacagtctcgatttatgtagcgatatcaatcaacttaatgaatatctcccgctttatgccttcatcaacacccactcgacgatggatgtcagcgtgcaggatatgcggatggcgctctggttttttgaatatgcgctggggcaggcggaagatatcgccattcgtatgcgtcagtacaccaacgaatatcttgataacattacgccgccgttcacgaaagccttgtttacctacgtcaaagagcggaagtacaccttttgtacgccggggcatatgggcggcaccgcatatcaaaaaagcccggttggctgtctgttttatgattttttcggcgggaataccctcaaggcggacgtctctatttcggtcaccgagcttggttcgttgctcgaccacaccgggccacacctggaagcggaagagtacatcgcgcggacgtttggcgcggaacagagttatatcgttaccaacggaacatcgacgtcgaacaaaattgtgggtatgtacgccgcgccatccggcagtacgctgttgatcgaccgcaattgtcataaatcgctggcgcatctgttgatgatgaacgatgtagtgccagtctggctgaaaccgacgcgtaatgcgttggggattctgggtgggatcccgcgcggtgaatttactcgcgacagcatcgaagagaaagtcgctgccaccacgcaggcacaatggccggttcatgcggtgatcaccaactccacctatgatggcttgctctacaacaccgactggatcaaacagacgctggatgtcccgtcgattcacttcgattctgcctgggtgccgtacacccattttcatccaatctaccagggtaaaagtggtatgagcggcgagcgtgttgcaggaaaagtgatcttcgaaacgcagtcgacccacaaaatgctggcggcgttatcgcaggcgtcgctgatccacattaaaggtgagtatgacgaagaggcgtttaacgaagcctttatgatgcataccaccacctcgcccagttatcccattgttgcttctgttgagacggcggcggcgatgctgcgtggtaatccgggcaaacggctgattaaccgttcagtagaacgagctctgcattttcgcaaagaggtccagcggctgcgggaagagtctgacggctggtttttcgatatctggcaaccgccgcaggtggatgaagccgaatgctggcccgttgcgcctggcgaacagtggcacggctttagcgatgcggatgccaatcacatgtttctcgatccggttaaagtcactattttgacaccggggatggacgagcagggcaatatgagcgaggaggggatcccggcggcgctggtggcaaaattcctcgacgaacgtgggatcgtagtagagaaaaccggcccttataacctgctgtttctctttagtattggcatcgataaaaccaaagcaatgggattattgcgtgggttgacggaatttaagcgctcttacgatctcaacctgcggatcaaaaatatgctgcccgatctctatgcagaagatcccgatttctaccgcaatatgcgtattcaggatctggcgcaagggatccataagctgattcgtaaacacgatcttcccggtttgatgttgcgggcatttgataccttgccggagatgatcatgacgccacatcaggcatggcagagacagattaaaggcgaagtagaaaccattgcgctggaacaactggtcggtagagtatcggcaaatatgatcctgccttatccacccggcgtaccgctgctgatgccgggagaaatgcttaccgaagagagccgcacggtactcgattttctactgatgctttgttccgtagggcaacattaccccggttttgaaacggatattcacggcgcgaaacaggacgaagacggtgtttaccgcgtacgagtcctaaaaatggcaggataa

SEQ ID NO: 3728 - DNA, 960 bp, Escherichia coli
atgagtctgaatttccttgattttgaacagccgattgcagagctggaagcgaaaatcgattctctgaccgcggttagccgtcaggatgagaaactggatattaacatcgatgaagaagtgcatcgtctgcgtgaaaaaagcgtagaactgacgcgtaaaatcttcgccgatctcggtgcatggcagattgcgcaactggcacgccatccacagcgtccttataccctggattacgttcgcctggcatttgatgaatttgacgaactggctggcgaccgcgcgtatgcagacgataaagctatcgtcggtggtatcgcccgtctcgatggtcgtccggtgatgatcattggtcatcaaaaaggtcgtgaaaccaaagaaaaaattcgccgtaactttggtatgccagcgccagaaggttaccgcaaagcactgcgtctgatgcaaatggctgaacgttttaagatgcctatcatcacctttatcgacaccccgggggcttatccgggcgtgggcgcagaagaacgtggtcagtcggaagccattgcacgcaacctgcgtgaaatgtctcgcctcggcgtaccggtagtttgtacggttatcggtgaaggtggttctggtggtgcgctggcgattggcgtgggcgataaagtgaatatgctgcaatacagcacctattccgttatctcgccggaaggttgtgcgtccattctgtggaagagcgctgacaaagcgccgctggcggctgaagcgatgggtatcatcgctccacgtctgaaagagctgaaactgatcgactccatcatcccggaaccgctgggcggtgctcaccgtaacccggaagcgatggcggcgtctctgaaagcgcagctgctggcggatctggccgatctcgacgtgttaagcactgaagatttaaaaaatcgtcgttatcagcgcctgatgagctacggctacgcgtaa

SEQ ID NO: 3729 - DNA, 3483 bp, Escherichia coli
atgtctgaaccacgtttcgtacacctgcgggtgcacagcgactactcgatgatcgatggcctggccaaaaccgcaccgctggtaaaaaaggcggcggcgttgggtatgccagcactggcgatcaccgatttcaccaacctttgcggtctggtgaagttctacggagcgggacatggcgcagggattaagcccatcgtcggggcggattttaacgtccagtgcgacctgctgggtgatgagttaacccacctgacggtgctggcggcgaacaataccggctatcagaatctgacgttgctgatctcaaaagcgtatcagcgcgggtacggtaccgccgggccgatcatcgatcgcgactggcttatcgaattaaatgaagggttgatccttctttccggcgggcgcatgggcgacgttggacgcagtcttttgcgtggtaacagcgcgctggtagatgagtgtgtcgcgttttatgaagaacacttcccggatcgctattttctcgagctgatccgcaccggcaggccggatgaagaaagctatctgcacgctgcggtggaactggcggaagcgcgcggtttgcccgtcgtggcgactaacgatgtgcgctttatcgacagcagcgactttgacgcacacgaaatccgcgtcgcgatccacgacggctttaccctcgacgatcctaaacgcccgcgtaactattcgccgcagcaatatatgcgtagcgaagaggagatgtgcgagctttttgccgacattcccgaagcccttgccaacaccgttgagatcgccaaacgctgtaacgtgaccgtgcgccttggtgaatacttcctgccgcagttcccgaccggggacatgagcaccgaagattatctggtcaagcgtgcaaaagagggcctggaagagcgtctggcctttttattccctgacgaggaagaacgtcttaagcgtcgtccggagtatgacgaacgtctggatactgaacttcaggttatcaaccagatgggcttcccgggttacttcctcatcgttatggaatttatccagtggtcgaaagataacggtgtaccggtagggccaggccgtggttctggtgcagggtcactggtggcctacgcgttaaaaatcaccgatctcgatccgctggaatttgacctgctgttcgaacgtttccttaacccggaacgtgtctccatgcctgacttcgacgttgacttctgtatggagaaacgcgaccaggttatcgagcacgtagcggacatgtacggtcgtgatgcggtatcgcagattatcaccttcggtacgatggcggcgaaagcggtgatccgcgacgtaggccgcgtgctggggcatccgtacggctttgtcgaccgtatctcgaaactgatcccgcccgatccggggatgacgctggcgaaagcgtttgaagccgagccgcagctgccggaaatctacgaagcggatgaagaagttaaggcgctgatcgacatggcgcgcaaactggaaggggtcacccgtaacgccggtaagcacgccggtggggtggttatcgcaccgaccaaaattaccgattttgcgccgctttactgcgatgaagagggcaaacatccggtcacccagtttgataaaagcgacgttgaatacgccggactggtgaagttcgacttccttggtttgcgtacgctcaccatcatcaactgggcgctggagatgatcaacaagcggcgggcgaagaatggcgagccgcctctggatatcgccgcgatcccgctggatgacaagaaaagcttcgacatgctgcaacgctcggaaaccacggcggtattccagcttgaatcgcgcggcatgaaagacctgatcaagcgtctgcaacctgactgcttcgaagatatgatcgcactggtggcactgttccgccccggcccgttgcaatcagggatggtggataactttatcgaccgtaaacatggtcgcgaagagatctcctatccggacgtgcagtggcagcatgaaagcctgaaaccggtactggagccaacctacggcatcatcctgtatcaggaacaggtcatgcagattgcccaggtgctttctggttataccctcggtggcgcggatatgctgcgtcgtgcgatgggtaagaaaaagccggaagagatggctaagcagcgttctgtatttgctgaaggtgcagaaaagaacggaatcaacgccgaactggcgatgaaaatcttcgacctggtggagaaattcgcgggttacggatttaacaaatcgcactctgcggcctatgctttggtgtcatatcaaacgttatggctgaaagcgcactatccggcggagtttatggcggcggtaatgaccgccgatatggacaacaccgagaaggtggtgggcctggtggatgagtgctggcggatggggctgaaaatcctgccaccagatataaactccggtctttaccatttccacgtcaacgacgacggcgaaatcgtgtatggtattggcgcgatcaaaggggtaggtgaaggcccgattgaggccatcatcgaagcccgtaataaaggcggctacttccgcgaactgtttgatctctgcgcccgtaccgacaccaaaaagttaaaccggcgggtgctggaaaaactgatcatgtccggggcgtttgaccgtcttgggccacaccgcgcggcgctgatgaactcgctgggtgatgcgttaaaagcggcagaccaacacgcgaaagcggaagctatcggtcaggccgatatgttcggcgtgctggccgaagagccggaacaaattgaacaatcctacgccagctgccaaccgtggccggagcaggtggtgttagatggggaacgtgaaacgttaggtctgtacctcacgggacaccctatcaaccagtatttaaaagagattgagcgttatgtcggaggcgtaaggctgaaagacatgcacccgacagaacgtggtaaagtcatcacggctgcggggctcgttgttgccgcgcgggttatggtcaccaagcgcggcaatcgtatcggtatctgcacgctggatgaccgttccgggcggctggaagtgatgttgtttactgacgccctggataaataccagcaattgctggaaaaagaccgcatacttatcgtcagcggacaggtcagctttgatgacttcagcggtgggcttaaaatgaccgctcgcgaagtgatggatattgacgaagcccgggaaaaatatgctcgcgggcttgctatctcgctgacggacaggcaaattgatgaccagcttttaaaccgactccgtcagtctctggaaccccaccgctctgggacaattccagtacatctctactatcagagggcggatgcacgcgcgcgattgcgttttggcgcgacgtggcgtgtctctccgagcgatcgtttattaaacgatctccgtggcctcattggttcggagcaggtggaactggagtttgactaa

SEQ ID NO: 3730 - DNA, 597 bp, Escherichia coli
atgatcgaatttgtctatccgcacacgcagctggttgcgggtgtggatgaagtcggacgcgggccgttagttggcgcggtcgtcaccgctgcggtgatccttgacccggcgcgcccaattgccgggctgaatgattccaaaaagctgagcgaaaaacgccgtctggcgctctgtgaagagatcaaagagaaagcgttgagctggagtctgggccgtgcggaacctcacgaaatcgacgaactgaatattttacatgcgactatgctggcgatgcagcgtgccgtcgctggactgcatattgcgccggaatatgtgttgattgatggtaaccgctgcccgaaattaccgatgccttcgatggctgtggtgaaaggcgatagccgcgtaccggaaatcagtgccgcgtctatcctggcgaaagtgacgcgtgacgccgaaatggcggcgctggatattgttttcccgcaatatggttttgcccaacacaaagggtatccaaccgcttttcatctggaaaaactggctgaacacggcgcgaccgaacaccatcggcgcagctttgggcctgtcaaacgcgcactgggacttgcgtcctga

SEQ ID NO: 3731 - DNA, 1149 bp, Escherichia coli
atgactgaacagcgtccattaacgattgccctggtcgccggagaaacctccggcgatatcctgggggccggtttaatccgcgctctgaaagaacgtgtgcccaacgcccgctttgttggtgttgccgggccacgaatgcaggctgaaggctgcgaagcctggtacgaaatggaagaactggcagtgatgggcattgttgaagtgctcggtcgtctgcgtcgcttactacatattcgtgccgatctgacaaagcgttttggcgaactgaagccagatgtttttgttggtattgatgcgcctgacttcaatattactcttgaaggtaacctcaaaaagcagggtatcaaaaccattcattacgtcagtccgtccgtctgggcgtggcgacagaaacgcgttttcaaaataggcagagccaccgatctggtgctcgcatttctgcctttcgaaaaagcgttttatgacaaatacaacgtaccgtgccgctttatcggtcataccatggctgatgccatgccattagatccagataaaaatggtgcccgtgatgtgctggggatcccttacgatgcccactgtctggcattgttgccgggcagccgtggtgcagaagtcgaaatgcttagtgccgatttcctgaaaacggcccagcttttgcgccagacatatccggatctcgaaatcgtggtgccgctggtgaatgccaaacgccgcgagcagtttgaacgcatcaaagctgcagtcgcgccagacctgtcggttcatttgctggatggaatgggccgtgaggcgatggtcgccagtgatgcggcgctactggcgtcgggtacggcagcactggagtgtatgctggctaaatgcccgatggtagtgggatatcgcatgaagcctttcaccttctggctggcgaagcgactggtgaaaactgattatgtctcgctgccaaatctgctggcgggcagagagttagtcaaagagttattgcaggaagagtgtgagccgcaaaaattggctgcggcgctgttaccgctgttggcgaacgggaaaaccagccatgcgatgcacgacaccttccgcgagctgcatcagcagatccgctgcaatgccgatgagcaggcggcacaagccgttctggagttagcacaatga

SEQ ID NO: 3732 - DNA, 789 bp, Escherichia coli
gtgattgataaatccgcctttgtgcatccaaccgccattgtggaagagggcgcgtcgattggcgcgaacgctcacattggtcctttttgtatcgttggaccccatgtcgaaattggtgagggtaccgtactgaaatctcacgttgtcgtgaatggtcatactaaaattggccgcgataatgagatttatcagttcgcctccatcggcgaagttaaccaggatctgaaatatgctggcgaaccgacccgcgtggaaatcggcgatcgtaaccgcattcgcgaaagcgtcaccattcatcgtggcacagtccagggcggtggattgacgaaggtgggcagcgacaacttactgatgatcaatgcgcacattgcgcacgattgtacggtaggtaaccgctgcatcctcgccaacaacgcaacgctggcgggtcacgtatcggttgacgacttcgcgatcatcggcggcatgaccgcagtccatcagttctgcatcattggtgcgcatgtgatggttggcggctgctccggtgtggcgcaggacgtccctccttatgtcattgcgcagggtaaccacgcaacgccgttcggtgtcaatatcgaagggctgaagcgccgcggattcagccgtgaggcgattaccgctatccgcaatgcgtataagctgatttatcgtagcggtaaaacgctcgatgaagtgaaaccggaaattgctgaactggcggaaacatatccggaagtgaaagcctttaccgatttctttgcacgctcaacgcgcggtctgattcgttaa

SEQ ID NO: 3733 - DNA, 456 bp, Escherichia coli
ttgactactaacactcatactctgcagattgaagagattttagaacttctgccgcaccgtttcccgttcttactggtggatcgcgtgctggattttgaagaaggtcgttttctgcgcgcagtaaaaaatgtctctgtcaatgagccattcttccagggccatttccctggaaaaccgattttcccgggtgtgctgattctggaagcaatggcacaggcaacaggtattctggcgtttaaaagcgtaggaaaactggaaccgggtgagctgtactatttcgctggtattgacgaagcgcgcttcaagcgcccggtcgtgcctggcgatcaaatgatcatggaagtcactttcgaaaaaacgcgccgcggcctgacccgttttaaaggggttgctctggtcgacggtaaagtagtttgcgaagcaacgatgatgtgtgctcgtagccgggaggcctga

SEQ ID NO: 3734 - DNA, 1026 bp, Escherichia coli
atgccttcaattcgactggctgatttagcgcagcagttggatgcagaactacacggtgatggcgatatcgtcatcaccggcgttgcgtccatgcaatctgcacaaacaggtcacattacgttcatggttaacccaaaataccgtgagcatttaggcttgtgccaggcgtccgcggttgtcatgacccaggacgatcttcctttcgcgaaaagtgccgcgctggtagtgaagaatccctacctgacttacgcgcgcatggcgcaaattttagataccacgccgcagcccgcgcagaacattgcacccagtgcggtgatcgacgcgacggcgaagctgggtaacaacgtatcgattggcgctaacgcggtgattgaatccggcgttgaactgggcgataacgtgattatcggtgccggttgcttcgtaggtaaaaacagcaaaatcggtgcaggttcgcgtctctgggcgaacgtaaccatttaccatgagatccagatcggtcagaattgcctgatccagtccggaacagtggtaggcgcagacggctttggttatgccaacgatcgtggtaactgggtgaagatcccacagattggtcgcgtaattattggcgatcgcgtggagatcggtgcctgcacaaccatcgatcgcggcgcgctggatgacactgttattggcaatggcgtgatcattgataaccagtgccagattgcacataacgtcgtgattggcgacaatacggcagttgccggtggcgtcattatggcgggcagcctgaaaattggtcgttactgcatgatcggcggagccagcgtaatcaacgggcatatggaaatatgcgacaaagtgacggttacgggcatgggtatggtgatgcgtcccatcactgaaccaggcgtctattcctcaggcattccgctgcaacccaacaaagtctggcgcaaaaccgctgcactggtgatgaacattgatgacatgagcaagcgtctgaaatcgcttgagcgcaaggttaatcaacaagactaa

SEQ ID NO: 3735 - DNA, 486 bp, Escherichia coli
gtgaaaaagtggttattagctgcaggtctcggtttagcactggcaacatctgctcaggcggctgacaaaattgcaatcgtcaacatgggcagcctgttccagcaggtagcgcagaaaaccggtgtttctaacacgctggaaaatgagttcaaaggccgtgccagcgaactgcagcgtatggaaaccgatctgcaggctaaaatgaaaaagctgcagtccatgaaagcgggcagcgatcgcactaagctggaaaaagacgtgatggctcagcgccagacttttgctcagaaagcgcaggcttttgagcaggatcgcgcacgtcgttccaacgaagaacgcggcaaactggttactcgcatccagactgctgtgaaatccgttgccaacagccaggatatcgatctggttgttgatgcaaacgccgttgcttacaacagcagcgatgtaaaagacatcactgccgacgtactgaaacaggttaaataa

SEQ ID NO: 3736 - DNA, 2433 bp, Escherichia coli
atggcgatgaaaaagttgctcatagcgtcgctgctgtttagcagcgccaccgtatacggtgctgaagggttcgtagtgaaagatattcatttcgaaggccttcagcgtgtcgccgttggtgcggccctcctcagtatgccggtgcgcacaggcgacacggttaatgatgaagatatcagtaataccattcgcgctctgtttgctaccggcaactttgaggatgttcgcgtccttcgtgatggtgatacccttctggttcaggtaaaagaacgtccgaccattgccagcattactttctccggtaacaaatcggtgaaagatgacatgctgaagcaaaacctcgaggcttctggtgtgcgtgtgggcgaatccctcgatcgcaccaccattgccgatatcgagaaaggtctggaagacttctactacagcgtcggtaaatatagcgccagcgttaaagctgtcgtgaccccgctgccgcgcaaccgtgttgacctaaaactggtgttccaggaaggtgtgtcagctgaaatccagcaaattaacattgttggtaaccatgctttcaccaccgatgaactgatctctcatttccaactgcgtgacgaagtgccgtggtggaacgtggtaggcgatcgtaaataccagaaacagaaactggcgggcgaccttgaaaccctgcgcagttactatctggatcgcggttatgcccgtttcaacatcgattctacccaggtcagtctgacgccagataaaaaaggtatttacgtcacggtgaacatcaccgaaggcgatcagtacaagctttctggcgttgaagttagcggcaatcttgccgggcactccgctgaaattgagcaactgactaagatcgagccgggcgagctgtataacggcaccaaagtgaccaaaatggaagatgacattaaaaagcttcttggtcgctatggttatgcctatccgcgcgtacagtcgatgcctgaaattaacgatgccgacaaaaccgttaaattacgcgtgaacgttgatgcgggtaaccgtttctatgtgcgtaagatccgttttgaaggtaacgatacctcgaaagatgccgtcctgcgtcgcgaaatgcgtcagatggaaggtgcatggctggggagcgatctggtcgatcagggtaaggagcgtctgaaccgtctgggcttctttgaaactgtcgataccgatacccaacgtgttccggggagcccggatcaggttgatgtagtttacaaggtgaaagaacgtaacactggtagcttcaacttcgggattggttacggtactgaaagtggcgtgagcttccaggctggcgtgcaacaggataactggttaggtacaggttatgctgttggtatcaacgggaccaaaaacgattaccagacctatgctgaactgtcggtaaccaacccgtacttcaccgtagatggtgtaagcctcggtggtcgtctcttctataatgacttccaggcagatgacgccgacctgtccgactataccaacaagagttatggtacagacgtgacgttgggcttcccgatcaacgaatataactcgctgcgtgcaggtctgggttatgtacataactccctgtccaacatgcagcctcaggttgcgatgtggcgttatctgtactctatgggtgaacatccgagcacctctgatcaggataacagcttcaaaacggacgacttcacgttcaactatggttggacctataacaagcttgaccgtggttacttcccgacagatggttcacgtgtcaacctgaccggtaaagtgaccattccgggatcggataacgaatactacaaagtgacgttagacacggcgacttatgtgccgattgatgacgatcacaaatgggttgttctgggtcgtacccgctggggttatggtgatggtttaggcggcaaagagatgccgttctatgagaacttctatgccggtggttccagcaccgtgcgtggcttccagtccaataccattggtccgaaagcagtttacttcccgcatcaggccagtaattatgatccggactatgattacgaatgtgcgactcaggacggcgcgaaagatctgtgtaaatcggatgatgctgtaggcggtaacgccatggcggttgccagcctcgagttcatcaccccgacgccgtttattagcgataagtatgctaactcggttcgtacttccttcttctgggatatgggtaccgtttgggatacaaactgggattccagccaatattctggatatccggactatagtgatccaagcaatatccgtatgtctgcgggtatcgcattacaatggatgtccccattggggccgttggtgttctcctacgcccagccgttcaaaaagtacgatggagacaaggcagaacagttccagtttaacatcggtaaaacctggtaa

SEQ ID NO: 3737 - DNA, 1353 bp, Escherichia coli
atgctgagttttctctgggatttggcttcgttcatcgttgcactgggtgtacttatcaccgtgcatgaatttggtcatttctgggttgcccggcgttgtggtgttcgcgttgagcgtttctcaatagggtttggtaaggcgctctggcggcgaactgataagctcggcaccgaatatgttatcgccctgatcccgttgggcggttatgtcaaaatgctggatgagcgcgcagaaccggtcgttccggaactccgccaccatgccttcaataataaatctgtcggccaacgagcggcgattattgccgcaggtccggttgcaaacttcatttttgctatctttgcctattggctggtttttattattggtgtgcctggcgtacgtccggtggttggtgaaatagcagacaattcgatagctgcggaagcacaaattgcaccaggtacggaactaaaagccgtagatggtatcgaaacgcctgattgggatgccgtgcgtttgcagttggtcgataaaattggcgatgaaagcaccaccattacggtagcgccatttggcagcgaccaacggcgggatgtaaagctcgatttacgtcactgggcgtttgagcctgataaagaagatccggtatcttcgttggggattcgtcctcgtgggccgcaaattgaacctgtactggaaaatgtgcagccaaactcggcggcaagcaaggcaggtttgcaagcaggcgacaggatcgttaaagtcgatggtcagcccttaacgcagtgggtgacctttgtgatgcttgtccgggataacccgggtaaatccttagcgttagaaatcgaaaggcaggggagtcccttgtctttgacattaatcccggagagtaaaccgggtaagggtaaagcgattggttttgtcggtattgagccgaaagtcattcctttgccagatgagtataaagttgtacgccagtatgggccgttcaacgctatcgtcgaagccacggacaaaacgtggcagttgatgaagctgacggtcagtatgctgggaaaattgatcaccggtgatgtgaaactgaacaacctcagtgggccgatctctatcgccaagggggctgggatgacagcggaactcggggtagtttattacctgccgtttcttgcgcttattagcgtgaacttagggataattaacctgtttccgttgcccgtacttgacggggggcatctgctgttccttgcgatcgaaaagatcaagggcggaccggtatccgagcgggttcaagacttttgttatcgcattggctcgattctgctggtgctgttaatggggcttgcacttttcaatgatttctctcggttatga

SEQ ID NO: 3738 - DNA, 750 bp, Escherichia coli
atgctggcagcgtgggaatggggacagcttagcggttttaccactcgttcgcagcgagtatggttggcggtgttatgcgggttattgttggcgctgatgctttttctgttgccggaatatcaccgaaatattcatcaaccgctggttgaaatctcactttgggcttcgctgggttggtggattgtcgcgctattgctggtgctgttttacccaggttccgcagcaatctggcgtaactctaaaacattgcgcattatttttggcgtgctaaccattgttcccttcttctggggcatgctggcgttacgggcctggcactacgacgagaatcattacagtggcgcaatatggctgctctatgtcatgatcctggtatggggcgctgactctggcgcatatatgtttggcaaattgtttggtaaacataaactggcaccgaaggtttctccgggtaaaacctggcaaggctttatcggtggactcgcgaccgcagcggtaatctcatggggttatggcatgtgggtgaatctcgacgtcgctcccgtcaccttactcatttgctctattgtcgcagcgttagcctcagtgctcggcgatctgaccgaaagtatgtttaagcgtgaagcaggaattaaggacagcggtcatttaattccaggacacggtggtattttagatcgtattgatagcctgacggctgcggtaccggtctttgcttgcttgttgttactggtattcaggacgctttaa

SEQ ID NO: 3739 - DNA, 153 bp, Escherichia coli
atgggggtcgcttttgctgaagtatcgcctgatatctgcttttgtgttaatacccgtcgtcatcgcggcgttgtttctgttgccgccggtggggttcgccattgtaacgctggtggtctgtatgctggcagcgtgggaatggggacagcttag

SEQ ID NO: 3740 - DNA, 759 bp, Escherichia coli
atgttgtctgctactcaaccacttagcgaaaaattgccagcgcatggctgtcgtcatgttgcgatcattatggacggcaatggtcgctgggcaaaaaagcaagggaagattcgtgcctttgggcataaagccggggcaaaatccgtccgccgggctgtctcttttgcggccaacaacggtattgaggcgttaacgctgtatgcctttagtagtgaaaactggaatcgaccagcgcaggaagtcagtgcgttaatggaactgtttgtgtgggcgctagatagcgaagtaaaaagtctgcaccgacataacgtgcgtctgcgtattattggcgataccagtcgctttaactcgcgtttgcaagaacgtattcgtaaatctgaagcgctaacagccgggaataccggtctgacgctgaatattgcggcgaactacggtggacgttgggatatagtccagggagtcaggcaactggctgaaaaggtgcagcaaggaaacctgcaaccagatcagatagatgaagagatgctaaaccagcatgtctgtatgcatgaactggcccctgtagatttagtaattaggactgggggggagcatcgcattagtaactttttgctttggcaaattgcctatgccgaactttactttacagatgttctctggcccgatttcgatgaacaagactttgaaggggcgttaaatgcctttgctaatcgagagcgtcgtttcggcggcaccgagcccggtgatgaaacagcctga

SEQ ID NO: 3741 - DNA, 1197 bp, Escherichia coli
atgaagcaactcaccattctgggctcgaccggctcgattggttgcagcacgctggacgtggtgcgccataatcccgaacacttccgcgtagttgcgctggtggcaggcaaaaatgtcgctcgcatggtagaacagtgcctggaattctctccccgctatgctgtaatggacgatgaagcgagtgcgaaacttcttaaaacgatgctacagcaacagggtagccgcaccgaagtcttaagtgggcaacaagccgcttgcgatatggcagcgcttgaggatgttgatcaggtgatggcagccattgttggcgctgctgggctgttacctacgcttgctgcgatccgcgcgggtaaaaccattttgctggccaataaagaatcactggttacctgcggacgtctgtttatggacgccgtaaagcagagcaaagcgcaattgttaccggtcgatagcgaacataacgccatttttcagagtttaccgcaacctatccagcataatctgggatacgctgaccttgagcaaaatggcgtggtgtccattttacttaccgggtctggtggccctttccgtgagacgccattgcgcgatttggcaacaatgacgcccgatcaagcctgccgtcatccgaactggtcgatgggacgtaaaatttctgtcgattcggctaccatgatgaacaaaggtctggaatacattgaagcgcgttggctgtttaacgccagcgccagccagatggaagtgctgattcacccgcagtcagtgattcactcaatggtgcgctatcaggacggcagtgttctggcgcagctgggggaaccggatatgcgtacgccaattgcccacaccatggcatggccgaatcgcgtgaactctggcgtgaagccgctcgatttttgcaaactaaatgcgttgacatttgccgcaccggattatgatcgttatccatgcctgaaactggcgatggaggcgttcgaacaaggccaggcagcgacgacagcattgaatgccgcaaacgaaatcaccgtggctgcttttcttgcgcaacaaatccgctttacggatatcgctgcgttgaatttatccgtactggaaaaaatggatatgcgcgaaccacaatgtgtggatgatgtgttatctgttgatgcgaacgcgcgtgaagtcgccagaaaagaggtgatgcgtctcgcaagctga

SEQ ID NO: 3742 - DNA, 558 bp, Escherichia coli
gtgattagcgatatcagaaaagatgctgaagtacgcatggataaatgcgtagaagcgttcaaaacccaaatcagcaaaatacgcacgggtcgtgcttctcccagcctgctggatggcattgtcgtggaatattacggcacgccgacgccgctgcgtcagctggcaagcgtaacggtagaagattcccgtactctgaaaatcaacgtgtttgatcgttcaatgtctccggccgttgaaaaagcgattatggcgtccgatcttggcctgaacccgaactctgcgggtagcgacatccgtgttccgctgccgccgctgacggaagaacgtcgtaaagatctgaccaaaatcgttcgtggtgaagcagaacaagcgcgtgttgcagtacgtaatgtgcgtcgtgacgcgaacgacaaagtgaaagcactgttgaaagataaagagatcagcgaagacgacgatcgccgttctcaggacgatgtacagaaactgactgatgctgcaatcaagaaaattgaagcggcgctggcagacaaagaagcagaactgatgcagttctga

SEQ ID NO: 3743 - DNA, 726 bp, Escherichia coli
atggctaccaatgcaaaacccgtctataaacgcattctgcttaagttgagtggcgaagctctgcagggcactgaaggcttcggtattgatgcaagcatactggatcgcatggctcaggaaatcaaagaactggttgaactgggtattcaggttggtgtggtgattggtgggggtaacctgttccgtggcgctggtctggcgaaagcgggtatgaaccgcgttgtgggcgaccacatggggatgctggcgaccgtaatgaacggcctggcaatgcgtgatgcactgcaccgcgcctatgtgaacgctcgtctgatgtccgctattccattgaatggcgtgtgcgacagctacagctgggcagaagctatcagcctgttgcgcaacaaccgtgtggtgatcctctccgccggtacaggtaacccgttctttaccaccgactcagcagcttgcctgcgtggtatcgaaattgaagccgatgtggtgctgaaagcaaccaaagttgacggcgtgtttactgctgatccggcgaaagatccaaccgcaaccatgtacgagcaactgacttacagcgaagtgctggaaaaagagctgaaagtcatggacctggcggccttcacgcttgctcgtgaccataaattaccgattcgtgttttcaacatgaacaaaccgggtgcgctgcgccgtgtggtaatgggtgaaaaagaagggactttaatcacggaataa

SEQ ID NO: 3744 - DNA, 852 bp, Escherichia coli
atggctgaaattaccgcatccctggtaaaagagctgcgtgagcgtactggcgcaggcatgatggattgcaaaaaagcactgactgaagctaacggcgacatcgagctggcaatcgaaaacatgcgtaagtccggtgctattaaagcagcgaaaaaagcaggcaacgttgctgctgatggcgtgatcaaaaccaaaatcgacggcaactacggcatcattctggaagttaactgccagactgacttcgttgcaaaagacgctggtttccaggcgttcgcagacaaagttctggacgcagctgttgctggcaaaatcactgacgttgaagtactgaaagcacagttcgaagaagaacgtgttgcgctggtagcgaaaattggtgaaaacatcaacattcgccgcgttgctgcgctggaaggcgacgttctgggttcttatcagcacggtgcgcgtatcggtgttctggttgctgctaaaggcgctgacgaagagctggttaaacacatcgctatgcacgttgctgcaagcaagccagaattcatcaaaccagaagacgtatccgctgaagtggtagaaaaagaataccaggtacagctggatatcgcgatgcagtctggtaagccgaaagaaatcgcagagaaaatggttgaaggccgcatgaagaaattcaccggcgaagtttctctgaccggtcagccgttcgttatggaaccaagcaaaactgttggtcagctgctgaaagagcataacgctgaagtgactggcttcatccgcttcgaagtgggtgaaggcatcgagaaagttgagactgactttgcagcagaagttgctgcgatgtccaagcagtcttaa

SEQ ID NO: 3745 - DNA, 726 bp, Escherichia coli
atggcaactgtttccatgcgcgacatgctcaaggctggtgttcacttcggtcaccagacccgttactggaacccgaaaatgaagccgttcatcttcggtgcgcgtaacaaagttcacatcatcaaccttgagaaaactgtaccgatgttcaacgaagctctggctgaactgaacaagattgcttctcgcaaaggtaaaatccttttcgttggtactaaacgcgctgcaagcgaagcggtgaaagacgctgctctgagctgcgaccagttcttcgtgaaccatcgctggctgggcggtatgctgactaactggaaaaccgttcgtcagtccatcaaacgtctgaaagacctggaaactcagtctcaggacggtactttcgacaagctgaccaagaaagaagcgctgatgcgcactcgtgagctggagaaactggaaaacagcctgggcggtatcaaagacatgggcggtctgccggacgctctgtttgtaatcgatgctgaccacgaacacattgctatcaaagaagcaaacaacctgggtattccagtatttgctatcgttgataccaactctgatccggacggtgttgacttcgttatcccgggtaacgacgacgcaatccgtgctgtgaccctgtacctgggcgctgttgctgcaaccgtacgtgaaggccgttctcaggatctggcttcccaggcggaagaaagcttcgtagaagctgagtaa

SEQ ID NO: 3746 - DNA, 795 bp, Escherichia coli
atggctatctcaatcaagaccccagaagatatcgaaaaaatgcgcgtcgctggccgactggctgccgaagtgctggagatgatcgaaccgtatgttaaaccgggcgtcagcaccggcgagctggatcgcatctgtaatgattacattgttaatgaacaacacgcggtttctgcctgcctcggctatcacggctatccgaaatccgtttgcatctctattaatgaagtggtgtgccacggtatcccggacgacgccaagctgctgaaagatggcgatatcgttaacattgatgtcaccgtaatcaaagatggtttccacggcgatacctcgaaaatgtttatcgtcggtaagccgaccatcatgggcgaacgtctgtgccgcatcacgcaagaaagcctgtacctggcgctacgcatggtaaaacctggcattaatctgcgcgaaatcggtgcggcaattcagaaatttgtcgaagcagaaggcttctccgtcgttcgtgaatattgtggacacggtattggtcgcggcttccacgaagaaccgcaggtgctgcactatgactcccgtgaaaccaacgtcgtgctgaaaccggggatgacgttcaccatcgagccaatggtcaacgcgggtaaaaaagagatccgcaccatgaaagatggctggacggtaaaaaccaaagatcgcagcttgtctgcacaatatgagcatactattgtggtgactgataacggctgcgaaattctgacgctacgcaaggatgacaccatcccggcgataatctcgcacgacgaataa

SEQ ID NO: 3747 - DNA, 2673 bp, Escherichia coli
atgaatacccttccagaacagtacgcaaacaccgctctccccaccctgcacggtcaaccgcaaaatccatgcgcctggccccgtgatgaattaaccgtcggtgggataaaagcccatatcgatactttccagcgttggctgggtgatgcctttgacaatggtatctccgcagaacagttgattgaggcgcgtaccgagtttatcgaccagcttcttcaacgattatggattgaagcgggattcagccagattgccgacctggcattggtcgccgtcggtggctacggtcgtggcgagctgcatccactttctgacatcgatttactgattttaagccgtaaaaagctcccggacgatcaggcgcaaaaagtgggcgagctgttaacgctgctctgggatgtaaagctggaagtaggtcatagcgtgcgcacgcttgaagagtgcatgctggaagggttatcggatttaaccgtcgccaccaatttaatcgaatcccgcttattaattggcgatgttgcgctgttcctcgaactgcaaaaacatatttttagcgaaggattctggccttccgacaagttctacgcggcgaaagttgaagaacagaaccagcgccatcagcgttaccacggcaccagctacaaccttgaaccagacatcaaaagtagccccggcggcttgcgcgatatccacactctgcaatgggtggcccgccgtcattttggagcaacatcgctggatgaaatggtagggtttggcttcttaacctctgcggagagagcggaattaaacgaatgcctgcatatattgtggcgcattcgctttgccctgcatctggtcgtcagtcgttacgataatcgcctgttattcgatcgccagcttagcgtcgcccagcgtttgaattacagtggtgaaggtaacgaaccggtcgagcggatgatgaaggattacttccgcgttacacgccgcgtcagtgaactcaaccagatgctgctgcaactgttcgatgaagccatcctcgcccttcccgccgacgaaaaaccacgtccaatcgacgatgagtttcagctacgcggaacgctgatcgacctgcgtgatgaaacactatttatgcgccagccggaagccatcttgcgtatgttctacaccatggtgcgcaacagtgcgatcaccggcatttactccaccacgctacgccagttacgccacgcccgtcgccatctgcaacaacctctgtgtaatattccggaagcgcgaaaactgtttttgagcattctgcgtcaccccggagcggtgcggcgcgggctattgccaatgcatcgccatagcgtgctcggcgcgtatatgccgcaatggtcgcatatcgtcgggcagatgcagtttgacctgttccatgcctacacggtggatgaacatactatccgcgtgatgctgaaactggagagttttgccagtgaagaaacgcgccagcgccatccgttgtgtgtggacgtctggccgcgcctgccgtcaactgagctgattttcatcgccgcgctgtttcacgatatcgccaaaggacgcggcggcgaccactccattctcggtgctcaggatgtagtgcattttgccgaactccacgggctgaactcacgcgaaacacagctggtcgcatggctggttcgccagcacttgctgatgtcggtgaccgctcagcgccgcgatattcaggacccggaagtcatcaagcagtttgccgaagaagttcaaacggaaaatcgtctgcgctatctggtatgcctgacagtggctgacatttgcgccaccaacgaaacactgtggaatagctggaagcaaagtctgttgcgcgaactctattttgccaccgaaaagcagctacgacgcggaatgcaaaacacgccggatatgcgcgaacgggttcgccatcaccaactccaggcgctggcactactgcgcatggataacatcgacgaagaggcgctgcaccaaatttggtcacgctgtcgcgctaactattttgtccgccatagcccaaatcaactggcctggcacgcacgccatttattacagcatgatttaagcaaaccgctggtactgcttagcccgcaggctacgcgtggaggcaccgagatttttatctggagcccggaccgcccctatctgtttgccgccgtctgtgccgaattagaccgccgcaatttaagtgttcacgacgcacaaattttcaccactcgcgacggtatggcgatggatacctttatagtgctggaacccgatggtagcccgctatccgcagatcgtcatgaggttattcggtttggtctggagcaagtactgacacaaagtagctggcagccaccgcagccccgtcgccaacccgccaaattgcgccattttactgttgaaaccgaagtgacgtttttgccgacccataccgaccgcaaatcgttcctcgaactgatcgccctcgaccaacctggactgctggcgcgagtcgggaaaatttttgccgatctgggaatttcgcttcatggcgcccgaattacaaccattggcgagcgagtagaagatttattcataattgccaccgctgaccggcgtgcgcttaataacgagttgcagcaggaagtgcatcagcggttgacagaggccctcaatccaaacgataaagggtga

SEQ ID NO: 3748 - DNA, 825 bp, Escherichia coli
atgcagcagttacagaacattattgaaaccgcttttgaacgccgtgccgagatcacgccagccaatgcagacaccgttacccgcgaagcggtaaatcaggtgatcgccctgctggattccggcgcactgcgtgtagcggaaaaaattgacggtcagtgggtgacgcatcagtggttgaaaaaagcggtgctgctctctttccgtattaatgataatcaggtgatcgaaggggcagaaagccgctacttcgacaaagtgccgatgaaattcgctaactacgatgaagcacgtttccagaaagaaggcttccgcgtcgtgccaccagcggcagtgcgtcagggcgcgttcattgcccgtaacacagtgctgatgccgtcttacgtcaacatcggcgcatatgttgatgaaggcaccatggttgatacctgggcgaccgtcggttcctgtgcgcagattggtaaaaacgtccacctttccggtggcgtgggtatcggcggcgtgctggagccgctgcaggctaacccgaccattattgaagataactgcttcatcggcgcacgctctgaagtggttgaaggggtgattgtcgaagaaggttccgtcatctctatgggcgtatacattggtcagagcacccgtatttacgaccgtgaaaccggcgaaatccactacggtcgcgttccggcgggatctgtggttgtttcaggtaatctgccgtcgaaagatggcaaatacagcctctactgtgcggttatcgttaagaaagttgacgcgaaaactcgcggcaaagttggtattaacgaactgctgcgtaccatcgactaa

SEQ ID NO: 3749 - DNA, 387 bp, Escherichia coli
atgtacgacaatctgaaaagtctgggtattaccaatcctgaagaaattgatcgttacagcctccggcaggaagccaacaacgatattctgaaaatctatttccagaaagacaaaggcgagtttttcgccaagagcgtgaagtttaaatacccgcgtcagcgtaaaacggtcgtcgctgatggtgtgggtcagggttataaagaagtccaggaaattagcccgaatctacggtatatcattgatgagcttgatcaaatctgccagcgtgaccgcagcgaagttgatcttaagcgtaagatcctcgacgacttacgtcacctggagtcagtagtaaccaataagatcagcgagattgaagccgatctggaaaaactgacgcgtaaataa

SEQ ID NO: 3750 - DNA, 1158 bp, Escherichia coli
atggctggctggcatcttgataccaaaatggcgcaggatattgtggcacgtaccatgcgcatcatcgataccaatatcaacgtaatggatgcccgcgggcgaattatcggcagcggcgatcgtgagcgtattggtgaattgcacgaaggagcattgctggtactttcacaaggacgagtcgtcgatatcgatgacgcggtggcacgtcatctgcacggtgtgcggcaggggattaatctaccgttacggctggaaggtgaaattgtcggcgtaattggcctgacaggtgaaccagagaatctgcgtaaatatggcgaactggtctgcatgacggctgaaatgatgctggaacagtcgcggttgatgcacctgttggcgcaggatagccgtttgcgggaagaactggtgatgaacctcattcaggctgaggagaatactcccgcacttactgaatgggcgcaacggctggggatcgatctcaatcaaccgcgagtggtggctattgttgaggtcgacagcggtcagcttggcgtggacagcgcaatggcggagttacagcaactgcaaaatgcgctgactacgcccgagcgtaataatctggtggcgattgtctcgctaaccgaaatggtggtgttgaaaccggcgttgaactcttttgggcgctgggacgcagaagatcatcgtaagcgagttgaacaactgattacccgcatgaaagagtatggccagttgcgttttcgcgtttcgctgggcaactattttaccggtcctggcagtattgcccgatcctatcgtacggcgaaaacgacgatggtagtggggaaacagcggatgccagaaagtcgctgctatttttatcaggatctgatgttacctgtgttactcgacagtttgcgtggcgactggcaggccaacgaactggcgcgaccgctggcgcggctgaaagcgatggacaataacggcttgctgcggcgaacgctggcggcgtggtttcgccacaatgtgcaaccgctggcaacgtcaaaggcgttgtttattcatcgtaatactctggaatatcggcttaatcgtatatcggaactgaccgggcttgatttgggcaattttgatgacaggttgctgctgtatgtggcgttacaactggatgaagagcggtag

SEQ ID NO: 3751 - DNA, 1425 bp, Escherichia coli
atgaaaaaaaccacattagcactgagtgcactggctctgagtttaggtttggcgttatctccgctctctgcaacggcggctgagacttcttcagcaacgacagcccagcagatgccaagccttgcaccgatgctcgaaaaggtgatgccttcagtggtcagcattaacgtagaaggtagcacaaccgtcaatacgccgcgtatgccgcgtaatttccagcagttcttcggtgatgattctccgttctgtcaggagggttctccgttccagagctctccgttctgccaggggggcctgggcggtaatggcggcggccagcaacagaaattcatggcgctgggttccggcgttatcattgatgccgataaaggctatgtcgtcaccaacaaccacgttgttgataacgcgacggtgattaaagtccaactgagcgatggtcgtaagttcgacgcgaagatggttggcaaagatccgcgctctgatatcgcgctgatccagatccagaacccgaaaaacctgaccgcaattaagatggcggattctgatgcgctgcgcgtgggtgattacaccgtagcaattggtaacccgttcggcctgggcgagacagtaacttccgggattgtctctgcgctgggacgtagcggcctgaacgctgaaaactacgaaaacttcatccagaccgatgcagcgatcaaccggggtaactcaggtggtgcgttggttaacctgaacggcgaactgatcggtatcaacaccgcgatcctcgcaccggacggcggaaacatcggtatcggttttgctatcccgagcaacatggtgaaaaacctgacctcgcagatggtggaatacggccaggtgaaacgtggtgagttgggtattatgggcactgagctgaactccgatctggcgaaagcgatgaaagttgacgcccagcgcggtgctttcgtaagccaggttctgccgaattcttccgccgcgaaagcgggcattaaagcgggggatgtgatcacctcactgaacggtaagccaatcagcagctttgccgcactgcgtgctcaggtgggcactatgccggtaggtagcaaactgaccctgggcttactgcgcgatgggaagcaggttaacgtgaacctggaacttcagcagagcagccagaatcaggttgattccagcaccatcttcaacggcattgaaggcgctgagatgagcaacaaaggcaaagatcagggcgtggtggtgaacaacgtgaaaacgggcactccggctgcgcagatcggcctgaagaaaggtgatgtgattattggcgcgaaccagcaggcagtgaaaaacatcgctgaactgcgtaaagttctcgacagcaaaccgtctgtgctggcactgaacattcagcgcggcgacagcaccatctacctgttaatgcagtaa

SEQ ID NO: 3752 - DNA, 1518 bp, Escherichia coli
atggcacagattgatttccgaaaaaaaataaactggcatcgtcgttaccgttcaccacagggcgttaaaaccgaacatgagatcctgcggatcttcgagagcgatcgcgggcgtatcatcaactctccggcaattcgtcgtctgcaacaaaagacccaggtttttccactggagcgcaatgccgccgtgcgcacgcgtcttacccactcgatggaagtccagcaggtggggcgctacatcgctaaagagattttaagccgcctgaaagagcttaaattactggaggcgtatggtctcgatgaactgaccgggccctttgaaagcattgttgagatgtcatgcctgatgcacgatatcggcaatcctccgtttggtcattttggcgaagcggcgataaatgactggtttcgccagcgtttgtacccggaagatgccgaaagccagcctctgactgacgatcgctgcagcgtggcggcactacgtttacgggacggggaagaaccgcttaacgcgctgcggcgcgagattcgtcaggacttatgtcattttgaaggtaacgcacagggtattcgtttggtgcatacattgatgcggatgaatctcacctgggcacaggttggcggtattttaaaatatacccgtccggcgtggtggcgtggtgaaacgcctgagacacatcactatttaatgaaaaagccgggctattatctttccgaagaagcctatattgcccggttgcgtaaagaacttaatttggcgctttacagtcgttttccgttaacgtggattatggaagctgccgacgacatctcctattgtgtggcagaccttgaagatgcggtagagaaaaggatatttaccgttgagcagctttatcatcatttgcacgaggcgtggggccagcatgagaaaggttcgctcttttcgctggtggttgaaaatgcctgggaaaaatcacgctcaaatagtttaagccgcagtacggaagatcagttttttatgtatttacgggtaaacaccctaaataaactggtaccctacgcggcacaacgatttattgataatctgcctgcgattttcgccggaacgtttaatcatgcattattggaagatgccagcgaatgcagcgatcttcttaagctatataaaaatgtcgctgtaaaacatgtgtttagccatccagatgtcgagcagcttgaattgcagggctatcgggtcattagcggattattagagatttatcgtcctttattaaacctgccgttatcagactttactgaactggtagaaaaagaacgggtgaaacgtttccctattgaaacgcgcttattccacaaactctcgacgcgccatcggctggcctatgtcgaggctgtcagtaaattaccgtcagattctcctgagtttccgctatgggaatattattaccgttgccgcctgctgcaggattatatcagcggtatgaccgacctctatgcgtgggatgaataccgacgtctgatggccgtagaacaataa

SEQ ID NO: 3753 - DNA, 699 bp, Escherichia coli
atgaaaatcggcatcattggtgcaatggaagaagaagttacgctgctgcgtgacaaaatcgaaaaccgtcaaactatcagtctgggcggttgcgaaatctataccggccaactgaatggaaccgaggttgcgcttctgaaatcgggcatcggtaaagtcgctgcggcgctgggtgccactttgctgttggaacactgcaagccagatgtgattattaacaccggttctgccggtggcctggcaccaacgctgaaagtgggcgatatcgttgtctcggacgaagcgcgttatcacgacgcggatgtcacggcatttggttatgaatacggtcagttaccaggctgcccggcaggcttcaaagctgacgataaactgatcgctgccgctgaggcctgcattgccgaactgaatcttaacgctgtacgtggcctgattgttagcggcgacgctttcatcaacggttctgttggtctggcgaaaatccgccacaacttcccacaagccattgctgtagagatggaagcgacggcaatcgcccatgtctgccacaatttcaacgtcccgtttgtcgtagtacgcgccatctccgacgtggccgatcaacagtctcatcttagcttcgatgagttcctggctgttgccgctaaacagtccagcctgatggttgagtcactggtgcagaaactggcacatggctaa

SEQ ID NO: 3754 - DNA, 801 bp, Escherichia coli
atggctaagtcactgttcagggcgctggtcgccctgtcttttctcgcgccgctgtggctcaatgccgcgccgcgcgtcatcacgctttctcccgccaacactgaacttgcctttgccgccgggatcacgccggttggggtcagcagctattccgactatcctccacaagcgcaaaagattgagcaggtttccacctggcaggggatgaatctggaacgcattgtcgcgctgaaacccgatctggtgattgcctggcgtggaggtaatgccgagcggcaggttgaccagctggcttcgctgggaataaaagtgatgtgggtcgatgcgacaagcattgaacaaattgccaatgcgttacgtcaactggccccctggagtccgcaaccggataaggccgaacaagccgcgcaatccctgctggatcagtacgcgcaattgaaagcgcaatatgctgataaacctaaaaaacgtgtttttctgcaattcggcattaatccgccatttaccagtggaaaagagtcgattcagaaccaggtactcgaagtttgtggcggagaaaacatctttaaagacagccgggttccctggccgcaagttagccgcgaacaggtgttagcacgctcgccacaggcgattgtcattacaggcggaccggaccaaattcctaaaatcaaacaatactggggtgaacagctcaaaattcccgttattcctctcacgagtgactggtttgaacgtgcaagcccacgtattatcctcgctgcacaacagctctgtaatgcgctttcacaggtagattag

SEQ ID NO: 3755 - DNA, 624 bp, Escherichia coli
atgctcgtctattggctggatatagtcggcacagcggtatttgctatctctggcgttttgttagccggaaaattgcgtatggacccttttggtgttctggtattgggcgtggttaccgcagtaggcggcggaacaattcgcgacatggcgctggatcacggcccggtattttgggtgaaagatcccaccgatctggtcgttgcaatggtcaccagcatgctgaccatcgtgctggtgcgccagccaagacgcttaccaaaatggatgttgccggtgctggacgccgttggtctggcggtgtttgtcggcattggcgtgaataaagcctttaatgcggaagccggtccgttaatcgcggtttgtatgggcgtcattactggcgttggcggcgggatcattcgtgatgtactggcccgcgaaatccccatgattttacgtacagaaatctacgcaactgcctgtattatcggcggtattgtccacgctacggcttattacacattttccgtaccactggaaacagccagtatgatgggcatggtcgtgacgctattgattcggctggcggctattcgttggcatcttaagctaccgacgtttgcgctggatgagaatggtcgttga

SEQ ID NO: 3756 - DNA, 345 bp, Escherichia coli
atgagtgatgacgtagcactgccgctggagtttaccgacgcagcagccaacaaagttaaaagcctgatcgctgacgaagataacccgaatctgaaattacgcgtgtatatcaccggtggcggttgcagcggcttccagtatggtttcacctttgatgatcaggtgaacgaaggcgatatgaccatcgaaaaacagggcgttggcctggtggttgatccgatgagcctgcaatatctggtcggcggttccgttgactataccgaaggtctggaaggttctcgtttcatcgtgaccaacccgaacgcgaaaagtacctgcggttgcggttcttcctttagtatctaa

SEQ ID NO: 3757 - DNA, 1422 bp, Escherichia coli
atgaaaactgatactccctctttagaaacaccgcaggccgcgcgcctgcgacgcagacaactgattcgccaacttcttgagcgcgataaaaccccgttagccattttgtttatggcggcagtcgtcggcacgcttgtcgggctggctgcggttgcttttgacaaaggtgtcgcctggttgcagaaccaacgtatgggggcactggtacatactgctgataattatccgcttctgttaaccgtcgcttttctctgttcggcggtgctggcgatgttcggctactttttggtgcgcaaatacgcgccggaagcaggtggttcggggatcccggaaattgaaggggcgctggaagatcaacgtcccgttcgctggtggcgtgtgttgccggtgaaattctttggcgggctgggaacactcggcggaggcatggtgttagggcgcgaagggccaaccgtgcagataggcggcaatatcgggcggatggtactcgatgttttccgcctgaaaggtgacgaagctcgtcatacgctgttggcaaccggtgctgctgcggggctggctgcggcctttaacgcgccgctggcgggtattttgtttattatcgaagagatgcgtccgcagtttcgctatacgttaatttcgattaaagcggtatttattggcgtcattatgtcgaccattatgtaccggatttttaatcatgaagttgcgttgattgacgtcggtaaactttctgatgcgccgcttaatacgctgtggctttatctgatcctcggtattatttttggcattttcggccctatttttaataaatgggtgctggggatgcaggatttgctgcaccgtgtgcacggtggcaatattaccaaatgggtactgatgggcggtgcgattggcggtctgtgtggattgctggggtttgtggcaccagcaacttcgggcggcggttttaacctgattcctatcgctaccgcggggaatttcagcatgggaatgctggtgtttatcttcgtcgcgcgggtcattaccactttactctgcttctcttccggcgcgccgggcggtatttttgccccgatgctggcgctgggtactgtgctgggaaccgctttcggaatggttgccgttgagttgtttccgcaatatcaccttgaggcggggacgtttgctattgccggaatgggggcgttactggcggcatctattcgcgcgccgttaacggggatcattctggttctggaaatgaccgataactaccagctcattttgccaatgattattaccggtcttggcgcaacactattagcacaatttaccggtgggaaaccgctatactcggcgattcttgcgcgtacgctggcaaaacaggaagctgagcaactggcgcgaagcaaggccgcatcagccagcgagaatacttga

SEQ ID NO: 3758 - DNA, 1281 bp, Escherichia coli
atgagtaagtctgaaaatctttacagcgcagcgcgcgagctgatccctggcggtgtgaactcccctgttcgcgcctttactggcgtgggcggcactccactgtttatcgaaaaagcggacggcgcttatctgtacgatgttgatggcaaagcctatatcgattatgtcggttcctgggggccgatggtgctgggccataaccatccggcgatccgcaatgccgtgattgaagccgccgagcgtggtttaagctttggtgcaccaaccgaaatggaagtgaaaatggcgcaactggtgaccgaactggtcccgaccatggatatggtgcgcatggtgaactccggcaccgaggcgacgatgagcgccatccgcctggcccgtggttttaccggtcgcgacaaaattattaaatttgaaggttgttaccacggtcacgctgactgcctgctggtgaaagccggttctggcgcactcacgttaggccagccaaattcgccgggcgttccggcagatttcgccaaacataccttaacctgtacttataacgatctggcctctgtacgcgccgcgtttgagcaatacccgcaagagattgcctgtattatcgtcgagccggtggcaggcaatatgaactgcgttccaccgctgccagagttcctgccaggtctgcgcgcgctgtgcgacgaatttggcgcgttgctgatcatcgatgaagtgatgaccggtttccgcgtagcgctagctggcgcacaggattattacggtgtggaaccggatctcacctgcctcggcaaaatcatcggcggtggaatgccggtaggcgcattcggtggtcgtcgtgatgtaatggatgcgctggccccgaccggtccggtctatcaggcgggtacgctttccggtaacccgattgcgatggctgctggtttcgcctgtctgaatgaagtcgcacagccgggcgttcacgagacgctggatgagctgacaacacgtctggcagaaggtctgctggaagcggcagaagaagccggaattccgctggtggtaaaccacgttggcggcatgttcggtattttctttaccgacgccgagtccgtgacgtgctatcaggatgtgatggcctgtgacgtggaacgctttaagcgtttcttccatatgatgctggacgaaggtgtttatctggcaccgtcagcgtttgaagcgggctttatgtccgtggcgcatagcatggaagatatcaataacaccatcgatgctgcacgtcgggtgtttgcgaagttgtaa

SEQ ID NO: 3759 - DNA, 1983 bp, Escherichia coli
gtgagtaaacgaattgcgctttttccggcgttattgctggcgctgttagtgattgtcgctacggcgctcacctggatgaacttctcgcaggcgctgccgcgtagccagtgggcgcaggctgcctggtcgccggatattgacttcatcgagcagatgatttttcactacagcttgctgccgcgtctggcgatttcgctgctggtgggcgcgggcctggggctggtgggtgtgctgtttcagcaagtgctgcgtaacccgctggcggaaccgacgacgttgggtgttgcaacaggcgcgcaactggggattaccgtcaccacgctctgggcgatccctggtgctatggcgagccagtttgctgcgctggcaggggcttgtgttgttggcttaatcgtctttggcgtcgcatgggggaaacggctgtcgccggtaacgctgatcctcgcggggctggtagtgagcctttattgcggcgcaatcaatcagttactggttatcttccatcatgaccaactgcaaagcatgttcctgtggagcaccggaacgctgacgcaaaccgactggggcggcgttgaacgtttatggccgcagctactgggcggcgtgatgctgacgttattgctacttcgcccgttaactctgatggggcttgatgatggcgtggcgcgcaatctcgggctggccttgtcgctcgctcgtctggcggcgttgtcgctggcgattgtcatcagtgcgctgctggtgaacgcggtggggattatcggctttatcgggttgttcgcgccactgctggcgaaaatgctgggggcgcggcgtttgttgccacggttgatgctggcatcgctgattggtgcgttaattctgtggctttctgatcaaatcatcctctggctgactcgcgtgtggatggaagtgtccaccggttcggtcactgcgttgatcggtgcgccgctgctactgtggttgctgccgcgtttacgcagcattagcgcgccggatatgaaggtgaacgatcgtgtcgcgactgaacgccaacacgtgctggcgtttgccctcacgggcggcgtgctgctgttgatggctgtggtggtggcgctgtcgtttggtcgtgatgcgcacggctggacgtgggcgagcggggcgttgctcgaggatttgatgccctggcgctggccgcgaattatggcggcgctgtttgcgggcgtcatgctggcggtggcgggctgtattattcagcggctgaccggaaacccgatggcaagcccggaagtgctggggattagctccggcgcggcgtttggcgtggtgttaatgctgtttctggtgccgggtaatgcctttgtctggttgttacccgcaggcagtctcggggcggcggtgacgctgttgatcattatgatcgccgccggacgcggtggattttccccacaccgcatgttactggcggggatggcgttaagtaccgcgttcaccatgcttttgatgatgttgcaggcaagtggtgacccgcgaatggcgcaagtgctgacctggatttccggttcgacctacaacgcgaccgatgcgcaggtctggcgtaccggaattgtgatggtgattttgctggcggttaccccgctgtgccgccgctggctgaccattttaccgctgggaggtgataccgcacgagccgtggggatggcgctgacgccgacgcgaattgcgctgctgctgttagcggcttgcctgacagcgactgcgacaatgaccattggaccgttgagttttgttggtttaatggcaccgcatattgcgcggatgatgggctttcgacggacgatgccacacatcgtaatttcggcgctggtgggtggtttactgctggtgttcgctgactggtgtgggcggatggtattgtttccattccagatcccggcggggctgctgtcgacctttatcggcgcgccatattttatctatttgttgagaaagcagagccgttaa

SEQ ID NO: 3760 - DNA, 891 bp, Escherichia coli
atgagcggcttacctcttatttcgcgccgccgactgttaacggcgatggcgctttctccgttgttatggcagatgaataccgcccacgcggcagttattgatcccaatcgtattgtggcactggagtggttgccggtggagttactgctggcgctcggcatcgtgccttacggcgtggcggacaccatcaactatcgcctgtgggtcagcgaaccgccattgccggactcagtgattgacgttggtttgcgtacagaacccaaccttgaactgctgaccgaaatgaaaccgtcgtttatggtctggtctgcaggatatggcccttcaccagaaatgctggcacgtattgcgccggggcgcggatttaacttcagtgacggcaaacagccgctggcgatggcgcgtaaatcgctgacggaaatggcagatttacttaacctgcaaagcgcagcggaaacgcatttagcgcaatacgaagactttatccgcagcatgaaaccccgctttgtgaagcgtggtgcacgcccgttattgctgacgacgcttatcgatccgcgccatatgttggtcttcggtccaaacagcttgttccaggaaattctcgatgagtacggcatcccaaatgcctggcaaggggaaaccaacttctggggcagtaccgccgtcagtatcgatcgtctggcggcgtataaagacgttgatgtgctctgttttgatcacgacaacagcaaagacatggatgcgctaatggcaaccccgctgtggcaggccatgccgtttgtccgcgccggacgctttcagcgcgtacctgcagtctggttttatggtgcgacgctctcggcaatgcactttgtgcgcgttctggataacgccatcggaggtaaagcgtga

SEQ ID NO: 3761 - DNA, 798 bp, Escherichia coli
atgcaggaatacacgaatcattccgataccacttttgcactgcgtaatatctcctttcgtgtgcccgggcgcacgcttttgcatccgctgtcgttaacctttcctgccgggaaagtgaccggtctgattggtcacaacggttctggtaaatccactctgctcaaaatgcttggccgtcatcagccgccgtcggaaggggagattcttcttgatgcccagccgctggaaagctggagcagcaaagcgtttgcccgcaaagtggcttatttgccgcagcagcttcctccggcagaagggatgacggtgcgtgaactggtggcgattggtcgttacccgtggcatggcgcactagggcgctttggtgcggcagatcgcgaaaaggtcgaggaagctatctcgctggttggcttaaaaccgctggcgcatcggctggtcgatagcctttctggcggcgaacgtcagcgggcgtggatcgccatgctggtggcgcaggatagccgctgtctgttgctcgacgaaccgacttcggcgctggatatcgcccaccaggttgatgtactggcgctggtgcatcgtttaagtcaggagcgtggcctgacggtcattgccgtgctgcacgatatcaatatggctgcgcgctactgtgattatctggtcgccctgcgcggcggtgaaatgattgctcagggaacgcctgcggaaattatgcgcggcgaaaccctcgaaatgatttatggcatcccgatgggtattctgccgcatccggcgggtgctgcacctgtgagttttgtttattga

SEQ ID NO: 3762 - DNA, 2244 bp, Escherichia coli
atggcaccttccaaaactgctcagccaaaacactcactgcgtaaaatcgcagttgtagtagccacagcggttagcggcatgtctgtttatgcacaggcagcggttgaaccgaaagaagacactatcaccgttaccgctgcacctgcgccgcaagaaagcgcatgggggccggctgcaactattgcggcgcgacagtcagctaccggcactaaaaccgatacgccgattcaaaaagtacctcaatctatttctgtcgtcaccgctgaagagatggcgctgcatcagcctaagtcggtgaaagaagcgcttagctatacgccgggtgtctctgttggtacgcgtggcgcatccaacacctatgaccacctgatcattcgcggttttgcggcagaaggccaaagccagaataactatctgaatggcctgaagttgcagggcaacttctataacgatgcggtcatcgacccgtatatgctggaacgtgctgaaattatgcgtggcccggtttccgtgctttacggtaaaagcagtcctggcggtctgttgaatatggtcagcaagcgtccgaccaccgaaccgctgaaagaagttcagtttaaagccggtactgacagcctgttccagaccggttttgacttcagcgatgcgctggatgatgacggcgtttattcttatcgcctgaccggtcttgcgcgttctgccaatgcccagcagaaagggtcagaagagcagcgttatgctattgcaccggcgttcacctggcgtccggatgataaaaccaatttcaccttcctttcttacttccagaacgagccggaaactggttattacggctggttgccgaaagagggaaccgttgagccgctgccgaacggtaagcgtctgccgacagactttaacgaaggggcgaagaacaacacctattctcgtaacgagaagatggtcggctacagcttcgatcacgaatttaacgatacctttactgtgcgtcagaacctgcgctttgctgaaaacaaaacctcgcaaaacagcgtttatggttacggcgtctgctccgatccggcgaatgcttacagcaaacagtgtgcggcattagcgctagcggataaaggccattatctggcacgtaaatacgtcgttgatgatgagaagctgcaaaacttctccgttgatacccagttgcagagcaagtttgccactggcgatatcgaccacactctgctgaccggtgtcgactttatgcgtatgcgtaatgacatcaacgcctggtttggttacgacgactctgtgccactgctcgatctgtacaatccggtaaataccgatttcgacttcaatgcgaaagacccggataactccggtccgtaccgcattctgaataagcagaagcaaacgggcgtttatgttcaggatcaggcgcagtgggataaagtgctggtcaccctgggcggtcgttacgactgggcagatcaagaatctcttaaccgcgtagcgggaacgaccgataaacgtgatgacaaacagtttacctggcgtggtggtgttaactacctgtttgataatggtgtaacaccatacttcagctatagcgaatcgtttgaaccttcttcgcaagttgggaaggatggtaatattttcgcaccgtctaaaggtaagcagtatgaagtcggcgtgaaatatgtaccggaagatcgtccgattgtagttactggtgccgtgtataatcttactaaaaccaacaacctgatggcggaccctgagggttccttcttctcggttgaaggtggcgagatccgcgctcgtggcgtagaaatcgaagcgaaagcggcgctgtcggcgagtgttaacgtagtcggttcttatacttacaccgatgcggaatacactaccgatactgcctacaaaggcaatacgcctgcacaggtgccaaaacacatggcttcgctgtgggctgactataccttctttgacggtccgctttcaggtctgacgctgggcaccggtggtcgttatactggctccagctatggtgatccggctaactcctttaaagtgggaagttatacggtcgtggatgcgttagtgcgttatgatctggcgcgagtcggcatggcgggctccaacgtggcgctgcatgtcaacaacctgtttgatcgtgaatacgtcgccagctgctttaacacttatggctgcttctggggcgcagaacgtcaggtcgttgcaaccgcaaccttccgtttctaa

SEQ ID NO: 3763 - DNA, 2541 bp, Escherichia coli
atggccgggaatgaccgcgagccaattggacgcaaagggaaaccgacgcgtccggtcaaacaaaaggtaagccgtcgtcgttacgaagatgacgatgattacgacgattatgatgactatgaggatgaagaaccgatgccgcgcaaaggtaagggcaaaggcaaagggcgtaagcctcgtggcaaacgcggctggctatggctgctgctaaaactggctatcgtttttgccgtgctgatcgccatttacggcgtttatctcgatcaaaaaattcgtagccgtattgatggcaaggtctggcaattgcccgcggcagtttatggccgaatggtcaaccttgagccagacatgaccatcagcaagaacgagatggtgaagctgctggaggcgacccagtatcgccaggtgtcgaaaatgacccgtcctggcgagtttaccgtacaggccaacagcattgagatgatccgccgtccgtttgatttcccggacagcaaagaagggcaggtgcgcgcgcgtctgacctttgatggcgatcatctggcgacgatcgtcaatatggagaacaaccgtcagttcggtttcttccgtcttgatccgcgcctgatcaccatgatttcttcgccaaacggtgagcagcgtctgtttgtgccgcgcagtggtttcccggatttgctggtggatactttgctggcgacagaagaccgtcatttctacgagcatgatgggatcagtctctactcaatcggacgtgcggtgctggcaaacctgactgccggacgcacggtgcagggggcgagtacgctgacgcaacagttggttaaaaacctgttcctctccagcgagcgttcttactggcgtaaagcgaacgaagcctacatggcgctgatcatggacgcgcgttacagcaaagaccgtattcttgagctgtatatgaacgaggtgtatctcggtcagagcggcgacaacgaaatccgcggcttcccgctggcgagcttgtattactttggtcgcccggtagaagaattgagcctcgatcagcaggcgctgttggtgggtatggtgaaaggggcgtccatctacaacccgtggcgtaacccgaaactggcgctggagcgacgtaacctggtactacgtttgctgcaacagcaacaaattattgatcaagaactctacgacatgctgagtgcgcgtccgctgggtgttcagccgcgcggtggggtgatctctcctcagccagcctttatgcagctggtgcgtcaggagctgcaggcgaaattaggcgataaggtaaaagatctctccggcgtgaagatcttcactacctttgactcggtggcccaggacgcggcagaaaaagccgccgtggaaggcattccggcactgaagaaacagcgtaagttgagcgatcttgaaaccgcgattgtggttgttgaccgctttagcggtgaagttcgtgcgatggtcggtggttctgagccgcagtttgcgggctacaaccgtgcgatgcaggcgcgtcgttcgattggttcccttgcaaaaccagcgacttatctaacggccttaagccagccgaaaatctatcgtttgaatacgtggattgccgatgcgccaatcgcgctgcgtcagccgaatggccaggtctggtcaccgcagaacgatgatcgtcgttatagcgaaagtggcagggtgatgctggtagatgcgttgacccgttcgatgaacgtgccgacggtgaatctgggcatggcgttggggctgcctgcggttacggagacctggattaaactgggtgtgccgaaagatcaactgaatccagttccagcaatgttgttgggggcgttgaacttaacgccaatcgaagtggcgcaggccttccagactatcgccagcggtggtaatcgtgctccgctttccgcgctacgttcagtcatcgcagaagacggcaaggtgttgtatcagagcttcccgcaggcggaacgcgctgttccggcgcaggcggcgtatctgacactatggaccatgcagcaggttgtacaacgcggtacgggacgtcagcttggggcgaaatatccgaacctgcatctggcagggaaaacagggactaccaacaataacgtagatacctggtttgcgggcattgatgggagcacggtgaccatcacttgggtcggccgtgataacaaccagccgaccaaactgtatggtgccagcggggcaatgtcgatttatcagcgttatctggctaaccagacgccaacgccgctgaatcttgttccgccagaagatattgcagatatgggcgtggactacgacggcaactttgtttgcagcggtggcatgcgtgtcttgccggtctggaccagcgatccgcaatcgctgtgccagcagagtgagatgcagcagcaaccgtcaggcaatccgtttgatcagtcttctcagccgcagcaacagccgcaacagcaacagcaacctgctcagcaagagcagaaagacagcgacggtgtagccggttggattaaagatatgtttgggagtaattaa

SEQ ID NO: 3764 - DNA, 2430 bp, Escherichia coli
gtgtcgtcgttgcccgttgctgccgtcttacctgagttacttgctgccctcgatggtgcatcgcaggtgttattaagtgcgccgaccggggccgggaaatcaacctggctgccgctgcaactgctggcgcatcccggcattaacgggaaaattatcctgctggagccgcgtcgtctggcggcgcgtaacgttgcgcaacgactggcggagctgcttaacgaaaagccaggcgataccgttggctaccggatgcgtgcgcaaaactgcgtcgggccgaatacccgcctggaagtggttaccgaaggcgtgctgacgcggatgatccagcgtgacccggaactgagcggtgttggattggtgatccttgatgaatttcatgagcgcagcttgcaggcggatttggcgttggcgctgttactcgatgtgcaacaaggtctgcgtgatgaccttaaactgctgattatgtcggctacgctggacaacgaccgcttgcagcaaatgctgccagaagcgcccgtcgtcatctcagaagggcgctcgtttccggttgaacgccgttatttgccgctgcccgctcatcagcgttttgacgaagccgtcgcggttgccaccgccgaaatgctgcgtcaggaaaatggatcattactgttatttttacctggcgtcggagaaattcagcgtgtgcaggaacaactggcttcgcgcatcggcagtgatgtgttgctctgcccgctgtatggcgcgttgtcgctgaacgatcagcgaaaagcgatcctcccggcaccgcaagggatgcgcaaagtggtgctggcgaccaatattgctgaaacaagtttaaccatcgaaggtattcgtctggtggtggattgtgcccaggaaaggggggcgcgttttgatccgcgtacagggcttacgcggttgattactcaacgcgttagtcaggcgtcgatgacgcaacgtgccgggcgtgccgggcgtctggaaccgggtatctgcctgcatttaatcgccaaagaacaagcagaacgcgctgccgcacaaagtgaaccggagatcttacaaagcgatctttccggtttgctgatgaaattactgcaatggggatgcagcgatccggcgcagatgagctggctggatcaaccgccaacggtgaatctactggccgcgaaacgcctgttacggatgctgggggcgctggacggtgaacggcttagtgcgcaagggcaaaaaatggcaacgctgggtaacgatccgcgtttagcggcaatgctggttagcgcgaagaacgacgacgaagctgctaccgcggcaaaaattgccgccattctcgaagagccgccacggatgggcaatagtgacctgggcgtggcgttttcgcgcaatcaacccgcctggcagcaacgtagtcagcaactgttaaaacgcttaaacgtacgcggcggtgaggcagacagttcgcttatcgcgccgctacttgccagagcgtatgccgatcgcattgctcgtcgccgtgggcaagatgaacgctatcaactggcgaacggcatgggggcgatgctcgatgccgacgatgcgctaagccgccacgaatggttgatcgcaccgttattattgcagggcagcgcctcaccggatgcacggattttactggcgctgccggtcgatattgatgagttagtacaacgctgcccgcagctggtacagcaatcggacaccgtggagtgggatgacgcgcaaggtacgctgaaagcctggcgtcggctgcaaattggtcagttgatggttaaagtgcaaccgctggcgaaaccctcggaagacgagttgcatcaggcgatgcttaacggcattcgtgataaaggtttaagcgtgctcaactggacggcggaagcggaacagctacgcttgcgtttgttatgcgccgcaaagtggttgccggaatatgactggccagcggttgatgatgaaagtttgttggcgacgctggaaacgtggctactgccgcatatgacaggcgtacattcgctacgcggcctgaaatcactcgatatttatcaggcactgcgtggattacttgattgggtaatgcagcaacgtctggatagtgaattgcctgcgcattacactgtgccgacgggaagccggatcgccattcgttaccatgaagataacccgcccgcgctggcggtgagaatgcaggagatgtttggtgaggccactaatccgactatcgcccaggggcgcgtaccgttggtgctggagttgctttcccctgcccaaaggccgctgcaaatcacgcgtgatttgagcgccttctggaaaggagcgtaccgtgaggtgcaaaaagagatgaaagggcgttatcccaaacatgtctggccggacgacccggcaaacaccgcaccgacgcgacgaacgaaaaagtattcgtga

SEQ ID NO: 3765 - DNA, 531 bp, Escherichia coli
atgtctgaaccgcaacggctgttctttgctatcgacttacctgcagaaatccgcgaacagattatccgctggcgcgccacacacttcccacctgacgcgggacgtccggtcgccgccgataatttgcatctgactctggcatttttaggcgaagtgagcgcagagaaagagaaggcgctttctcttttagccggacggattcgtcaacctggtttcacactcacgcttgatgacgccggtcaatggctgcgttcgcgtgtggtgtggttagggatgcgacagccgccacgcggcttaatccagctggcgaatatgctccgttcacaggctgcccgcagcggttgttttcaaagcaatcgtccgtttcatccacatattaccttattgcgcgacgccagcgaggcggtgacaatcccgccgccaggttttaactggtcgtatacggtgacggagttcaccctttacgcctcctcgtttgcccgtggacgcacacgctacacgccgctaaaacgctgggcgctaacgcaataa

SEQ ID NO: 3766 - DNA, 705 bp, Escherichia coli
atggaattttctccccctctacagcgcgcgacgctaattcagcgctacaaacgttttttagccgatgtgatcacacccgatggtcgcgaattaacgctacactgcccgaatacgggtgcgatgaccggttgtgcaacgcctggcgataccgtctggtattcgacttcagacaacaccaaacggaaatacccacacacctgggaattaactcaaagccagagcggcgcaattatttgcgtcaatacgctttgggctaacaggttgacgaaagaggctatccttaatgaatcaatttcagagctggcaggctatagctcgctgaaaagcgaagtaaaatacggcgccgaacgcagccgtattgactttatgttgcaggcggattcgcgtccagactgctatattgaagtgaaatcggttacgttagcggagaacgaacagggatattttcccgatgcggtcactgaacgaggtcagaaacaccttcgggagttgatgagcgtagcggctgaaggccagcgtgcggttatctttttcgccgtgctgcattcagccattacacggttttcacccgcgcgccacatcgatgagaaatacgcgcaactattgtcagaagctcaacagaggggggtagaaattctggcttacaaagcggaactttctgccaaaggcatggctcttaaaaaatcactaccggttacattgtag

SEQ ID NO: 3767 - DNA, 456 bp, Escherichia coli
atgcaagaagggcaaaaccgtaaaacatcgtccctgagtattctcgccatcgctggggtggaaccatatcaggagaagccgggcgaagagtatatgaatgaagcccagctggcgcacttccgtcgtattctggaagcatggcgtaatcaactcagggatgaagtcgatcgcaccgttacacatatgcaggatgaagcagccaacttcccggacccggtagaccgtgcagcccaggaagaagagttcagcctcgaactgcgtaaccgcgatcgcgagcgtaagctgatcaaaaagatcgagaagacgctgaaaaaagtggaagacgaagatttcggctactgcgaatcctgcggtgttgaaatcggtattcgccgtctggaagcgcgcccgacagccgatctgtgcatcgactgcaaaacgctggctgaaattcgcgaaaaacagatggctggctaa

SEQ ID NO: 3768 - DNA, 927 bp, Escherichia coli
atgctcccgccttattttttgttcaaagagatgacagacacacactatattggtcgcttcgccccctctccttccggcgagcttcattttggctctctgattgccgcgcttggcagctatttacaggctcgcgcccggcaaggtcgctggctggtacgcattgaagatatcgacccgcctcgtgaagttcccggtgccgcagaaactatcctgcgccagctggaacattacggcctgtactgggacggcgacgttctctggcaatcgcaacgtcaccacgcctatcgcgaagcactcgcctggttacatgagcaaggactaagttattactgcacctgcacgcgtgcgcgtattcaaagcattggcggtatttacgacggtcattgccgggatttgcatcatggaccagacaacgccgcagtacgtatccgccagcagcatccggtcacccagtttactgacctgctgcgaggcattattcacgccgacgaaaaactggcacgggaagattttattattcatcgccgtgatggtttgtttgcctataacctggcggtggtggtggatgatcacttccagggcgtgagcgaaattgtccgcggggcagatttgatcgaaccgacggtgcggcaaatctcgctgtaccagctttttggctggaaagtgccagattacatccatttaccgctggcgcttaatccacaaggcgctaaactttccaagcagaatcatgcgcctgcgttgccgaaaggcgatccgcgcccggtgttaatcgcggcacttcattttctgggtcagcaggtagaaacacactggcaggatttcagcgtcgagcaaatccttcagtcagccgtcaaaaactggacgctgaccgccgtgcctgagtcggcaattgtaaattcaacattctcaaatgcgtcatgctga

SEQ ID NO: 3769 - DNA, 1365 bp, Escherichia coli
gtgctaagccgcgaggaaagcgaggctgaacaggcagtcgcccgtccacaggtgacggtgatcccgcgtgagcagcatgctatttcccgcaaagatatcagtgaaaatgccctgaaggtaatgtacaggctcaataaagcgggatacgaagcctggctggttggcggcggcgtgcgcgacctgttacttggcaaaaagccgaaagattttgacgtgaccaccaacgccacgccagagcaggtgcgcaaactgttccgtaattgccgcctggtgggtcgccgtttccgtctggctcatgtgatgtttggcccggagattatcgaagttgcgaccttccgtggacatcacgaaggtaacgtcagcgaccgcacgacctcccaacgcgggcaaaacggtatgttgctgcgcgacaacattttcggctccatcgaagaagacgcccagcgccgcgatttcactatcaacagcctgtattacagcgtggcagattttaccgtccgagattacgttggcggcatgaaggatctgaaagacggcgttatccgtctgattggtaacccggaaacgcgctaccgtgaagatccggtacgtatgctccgcgcggttcgttttgccgccaaattgggcatgcgcatcagcccggaaaccgccgagccgatcccacgcctggcaaccttactgaacgatatcccaccggcacgtctgtttgaagaatcgctgaaactgttgcaagcgggctacggttacgaaacctataagctgctgtgtgaatatcatctgttccagccgctgttcccgaccattacccgctacttcacggaaaatggcgacagcccgatggaacgcattattgagcaggtactgaagaataccgatacgcgtatccataacgatatgcgcgtgaacccggcgttcctgtttgccgccatgttctggtacccattgctggagacggcacagaagatcgcccaggaaagcggcctgacctatcacgacgctttcgcactggcgatgaacgacgtgctggacgaagcctgccgttcactggcgatcccgaaacgtctgaccacgctaacccgcgatatctggcagttgcagttgcgtatgtcccgtcgtcagggtaaacgcgcatggaaactgctggagcatcctaagttccgtgcggcatacgacctgttggccttacgagccgaagttgagcgtaacgctgaactgcaacgtctggtgaaatggtggggtgagttccaggtttccgcgccaccagaccaaaaagggatgcttaacgaactggatgaagaaccgtcaccgcgtcgtcgtactcgtcgtccacgcaaacgcgcaccgcgtcgtgagggtaccgcatga

SEQ ID NO: 3770 - DNA, 480 bp, Escherichia coli
atgacagtggcgtatattgccataggcagcaatctggcctctccgctggagcaggtcaatgctgccctgaaagcattaggcgatattccagaaagccgcattcttgctgtttcttcgttttaccgcaccccaccgctggggccgcaagatcaacccgattacttaaatgccgccgtcgcgctgaaaaccactcttgcccctgaagagctactcaatcacacacagcgtatcgaattgcagcaaggtcgcgtccgtaaagctgaacgctggggaccgcgcacgctggatctcgacatcatgctgtttggtaatgaagtaataaataccgaacgtctgaccgttccgcactacgatatgaaaaatcgtggctttatgctgtggccactgtttgaaattgcgccgggactggtatttcctgatggcttatcattagttgaagctctacaggcaaaaggctttaatgaattagataagtggtaa

SEQ ID NO: 3771 - DNA, 591 bp, Escherichia coli
atgtctaaaaaattaggttttgtgctgtccggtattatgttggcaatggctgctggtactgcatttgctgctaacgatatggacggtggtcagttaaatattagcggcctggtcgttgataacacctgtgaagctcgtgttgatggcggtaacaaagacggtctgatcctgctgcaaactgctaccgttgctgaaatcaccgatggtgtactggataccaccgtaggtgctaaagctaaaccattcagcattactattgactgtagcaaagctaacccggctccgggtactactgcaaaaatgaccttcggttctgttttctttggtaacagcaaaggaacactgaacaacgacatgtctattaacaccccgtctgacggcgtaaatatcgctctgcacaatattgatggttctgctattaaacaggttcaggtcaataatccgggtgatgtttacagcaaaactctggattcaacgtctaaatctgcaacctacgattttaaagcatcctatgttcgtgcggatgcaagcaaagcagctactgccggttatgtaaaaaccaactcagcatataccattacttaccagtaa

SEQ ID NO: 3772 - DNA, 741 bp, Escherichia coli
atgttttttaatactaaacataccgcagcattgtgcttagcgagctggatggcttttagctcatcagctattgcagacatcgtaatttcaggtacacgcgtagtttataaaagcgaacaaaaaaacgtcaatgtacgtctggaaaataaaggcaataacccattgctggttcagagttggttagatactggcgatgacaacgctgaaccaggcagtattactgtcccctttaccgctacgccgccagtatcacgtattgatgctaaacgtggccaaacaatcaaactgatgtacaccgccagcagtgctctgccaaaagacagagaaagtgtgttctggtttaacgtactggaagtacctccaaaaccagatgcagcaaaagcagcaaaccaaagcctgctacaactggcatttcgcacacgtataaaactgttctatcgcccggaaggattgagtggaatttcatctgatgcaccattggctctgaagtggtcctgggcaacatctgaaggcaaagcagcattacgcgttgataaccctacgccctactatgtctcttttagcagtggtgatttagaagccaacggcaaacgctaccccctggatatgacaatgattgcgccgttcagtaacgacgtcatcaaggtaaatgggatgagtggcagaacaagctctgcaaaagtgcattttttcgccattaatgattttggtggatctattgaaggcaacgccaacctttaa

SEQ ID NO: 3773 - DNA, 2589 bp, Escherichia coli
gtgactattaaatctactaatcaccttacccacatcgccacgttttgcgctctgctgtatagcaatagtgctttatgcgctgaactcgtcgaatatgaccatacatttctgatgggaaaggatgcttcaaatatcgaccttagtcggtatacagaaggcaatcccacactacctggcatttacgatgtcagtgtgtatgttaacgatcaacccatcatgagccaaagcattgcttttgctgttattgaaggtaaaaagaacgctcaggcctgcattacgcagaaaaatttattgcaattccatatcagttcaccagacaagaatagcgaaaaagccattttgcttaagcgagacgaagatcttggtgattgcctcaatctggctgaaatgatccctcaatcatccattcgttacgatgttaacgatcaacgcctggatatcgatgtcccccaggcatggattatgaagaattatcaaaactatgttgatccctctttgtgggaaaatggcattaatgcagccatgctttcctacaacctcaatggatatcacagtgaaagtccaggcagaacaaatgacagtatctatgcggcattcaacggtgggataaacttaggcgcgtggcggttacgtgcctcaggtaactacaactggatgaccaatgtccatagcgattacgattttcagaatcgctatttacaacgcgatcttgcgtcactacgttcacaactggttattggtgaatcttacacgaccggcgagaccttcgattcagtcagcattcgcggtattcgcttatacagtgacagtcgaatgctgcctccggtattagccagttttgcgccaatcattcatggcgtagcgaataccaatgccaaagtaaccgttatgcaaaatggttataaaatctatgaaacgacggtgccgccaggggcctttgccattgacgatcttagcccgtcaggttatggcagcgatctcattgtgactatcgaagaagctgatggcacaaaacggacgttctctcagccattttcatctgttgtgcaaatgctgcgccctggcgttggtcgctgggatattagcgccggtcaggttttaaaagacagtatccaggatgagcctaatttatttcaagccagctactactatggtttgaataactacctgacaggatataccggtattcagctaactgataataactacaccgccggattgctggggcttggtatgaatacccccgtgggggctttttctgtcgatgttactcactcaaatgtcagcattccggacgataaaacctatcaaggacaaagctaccgtatttcctggaacaagttatttgaaaataccagtacatcattaaatatcgcggcctatcgctactccacccagcattatctgggcctcaatgatgcgctgacgctgattgatgaagtagaacatcctgagcaagatcttgagcctaaatccatgcgcaattactcgcgcatgaaaaatcaggtcacggtcagtatcaaccaaccgctgaaatttgagaaaaaggattacggttcattttatctctcgggaagctggtcagattactgggcctccgggcaaaacagtactaattactctattggttatagcaatagtgcgtcctggggcagttacagtatcagtgctcaacgttcgttgaatgaagatggtcaaaccgacgatagcatttatctcagcttcacaattccaatagaaaatttactgggtacggaacaccgcagctccggcttccagagtattgatacacaattaaacagcgactttaagggtaataaccaactcaatatcagcagtagtggttacagcgataccaatcgtatcagctacagcgtaaacacgggttatatgatgaataaatccagtgatgatttgagttatatcggcggttatgccagttatgaatcgccgtggggaacgctgtcaggttcagcttcagcaagcagtgataatagtcgccaattctctctcaatactgatggtggatttgtgttacatagcggcggactgacgttcagtaatgacagttttagtgattccgacactctggctgtcattcaggcaccaggagcaaaaggcgctcgtattaactacggaaacagcaccgtagaccgctggggttatggtgttaccagcgccctttcgccataccatgaaaaccgtatcgcactggacattaacgatctggaaaacgatgttgaattgaaaagcaccagtactgtcgccgtcccgcgccagggagccgtcgtctttgctgattttgaaacagttcagggacaatcggcaattatgaatatcgtgcgaagcgatggtaaaaatatcccatttgcagcggatatttatgatgaacaaaacaatatcatcggcaacgtaggtcagggtggtcaggcctttgttcgcggtatcgaacagcaaggaaatatacgaattacctggattgaagagggcaaaccagtcagttgttttgctcattaccaacaaaatatgacatcagaaaaaatagcacaatctattattcttaacgggcttcgttgtcagatacagtaa

SEQ ID NO: 3774 - DNA, 567 bp, Escherichia coli
atgataaaaatcacaccacataaaataacaatactcatggggctattattatcgccttcggtatttgcaacggatgttaatgtcgattttaccgctaccgtgaaagcaacaacctgtaatattacacttaccggaaccaatgtcactgataatggaaatgataagtacaccttagttattccctcgatgggaatggataaaatagccaataaaacagcacaatctgaagccaactttaaattggtagccaatggatgcagcagtggaattagctggattgatacaaccctgacaggaaatcaatcaggaagttcacccgcgctaattatccccctggccagtgatacaacctccaccacaagctatatcggaatgggatttaaaaggaaggcgacttcaggcgatacatttctgaaacccaatagcacagaatacatacgctggagtgcatcagaaattagcaccgatggacttgagatgactgtcgcactgcgtgaaacaggtgtagggaaaggtgttccaggcaagtttcgcgcactggcaacttttaacttcagctatcaataa

SEQ ID NO: 3775 - DNA, 609 bp, Escherichia coli
atgatgatattaaaaaaattatgttatggattatcgggtagtctatttctggcttcatcactgttaaccatttcctcacatgcggccactgacagtattggcctgactgttactactgacatagaaatgggtacctgtacatcaatgttgactgatgatggtacagctaaactctctgccatcaatttcggagatgtatatatatctgaaattaatgccgaaactaaaattaaaaccttcaaattgcagttcaaagactgtgcggggattcccgggaaaacggccaaaataaaattgactccacgagcgttatgtgaaggaaattctaataatggtcctggatttgctaacgcatcaacggcagcagcaaaagcagcggcggtcgccgttgaggtctggagcacatctacaccaggtaagaacggcgctaaacaattcagttgtgtcacccccgcaacagaagaagtcagtattgctaatgcgacaggaagtaatgttgtcgattacccaatgagtgcggtgttggtggtcgcaaaagataaaaccgttacagatgtcaccgcgggtgatttcactgccccggcaacattcaccgtgacttacaactaa

SEQ ID NO: 3776 - DNA, 597 bp, Escherichia coli
atgcgtcccactcaacgtaatctgatgaaaaaatcaattctgcttctgtcgttgctattcagcgccacttcccctgtggttgcaggacaggatgttgacattgttgcaaatataaaaaataacacctgccaaagtggaatcagcaacaacggaaatattgatttaggtgtcgttggcgtgggcgattttaccggaaacgtttcagccgaaaattatcaccccggtggaaaagtgttcacgattacagtacaggactgcacacttcagggcacagggaatgtgttaaatcagttacatattaattttcgcgcacttagtggcgtaatggcgacaggttacagtcaaatattcgctaatgaagacaacgccggggctaaaaatgttggggtagttatattttctattcaggacccggcaaataccttcaacgttctcggcgccactggtagctcacgttccgtttatccggtcatgtcatcagcactaaacaattcatcctggaaatttagcacccgaatgcaaaaaatcgatccagcgctgaatgtcacctctggcccactgataagccatgtgttagtggatatttactacgaataa

SEQ ID NO: 3777 - DNA, 1263 bp, Escherichia coli
atgaagacattcttcagatactttctttttttagcactatgctcttgttgttatacagcaagcgccggcaccgatgattacgtcggctatattgttgggaataattacggtgttgggcctggagaccaaaaatggcgcgaaacaggccccgatggagatgttaccgtcacattccggtatggttcaggcaccaataatttagttttttataaaccaacccaacttggcccaaccggggtgtcattaaaatgggagcagttagattccgcttcgggtggaggtttcctttactgtaacaggagtgataactcaaccggcgcaccaatgaatattgaacataaaatggttgattccggtaaaagttatggtggacataaactctttaatacatctgttccaggtctgtattatacattagcaatatcaaatatttggtcagcatatacatatactgatatcaactcatcaggcatatatattggcgattctacgaaccaatcttttaactggcgcggcgaaagcgagcaaacactatattggtcttgcaacaacgcgaatagcagcaaaaaatactgggccgttggtggcgttatgcaaacgctcacgattgagttttataccgataccgactttaacccgacaacgaatcaacgggtaacattgcccaaaacagatggttatctctactcattcaaaacatataatgctggcactggtatcaagagttattttcttaaaatcgactttgacctgacagatatcgtattaaccaaccccacctgctttactgctgtacttaccggaaaatcagtaagtggttcgacggtaaaaatgggagaatatgcaccaggacagataaaaaatggcgcgactccggttccttttgatatttctctcaaaaactgtgttcgcgttggcgatatagagacaaagctatcttcagggaagttaggtacagaaaacaagcaacttctgggtaacacactcactggaagcgacacagcaaaaggcgttggggtattgattgaaggattagaaaacagtaaaagtgccttaatgatactgaaacctaatgatccaagttctgtttataaagataatacgggtcagactcaggataacgattcagatgcgatttacccggaagctgacggtataacttatccacttcatttccaggctacattaaaacaagacggtaatattgctatagaaccgggggattttaaagccaccagcacttttcaggttacctacccctga

SEQ ID NO: 3778 - DNA, 795 bp, Escherichia coli
atgaaaccaaccacgattgcttcattgcagaaatgcaagcaggacaaaaaacgtttcgcaaccatcaccgcttacgactatagcttcgcaaaactgtttgccgaagaaggacttaacgtcatgctggtcggcgactcactgggcatgacggttcaggggcatgattccacgctaccggttaccgttgccgatatcgcctatcacaccgccgctgtgcgtcgcggcgcgccaaactgccttctgctggctgacctgccatttatggcgtatgccacgccggaacaagcctttgaaaacgccgcaacggtaatgcgtgccggagccaacatggtcaaaattgaaggcggtgagtggctggtggaaaccgtacaaatgctgaccgaacgtgccgttccagtttgtggtcatttaggcctaaccccacagtcagtgaatattttcggtggctacaaagtccaggggcgcggcgatgaagcgggcgatcgactgctcagcgatgcattagccttagaagctgctggggcacaactgctggtactggagtgcgtgccggttgaactggcaaaacgcattaccgaagcactggcaatcccggttatcggtattggcgcaggcaacgtcactgacgggcaaattctcgtgatgcacgacgcgttcggcattaccggcggtcatattcctaaattcgccaaaaatttcctcgccgaaacgggcgacatccgcgcggctgtgcggcagtatatggctgaagtggagtccggcgtttacccgggcgaagaacacagtttccattaa

SEQ ID NO: 3779 - DNA, 852 bp, Escherichia coli
gtgttaattatcgaaaccctgccgctgctgcgtcagcaaattcgccgcctgcgtatggaaggtaagcgcgtggcgctggtgcccaccatgggtaacctgcacgatggccatatgaagctggtcgacgaagccaaagcccgcgccgatgtggtcgtcgtcagtattttcgttaacccaatgcagtttgaccgcccggaagatctggcacgttatccacggaccttgcaagaggactgcgaaaagctgaacaaacgtaaagtggatttagttttcgcgccttcggtaaaagagatctacccgaacggtactgaaacccacacctatgttgatgttcccggtctttccaccatgctggaaggtgccagccgtccgggacattttcgcggcgtttcgactattgtcagcaagctgttcaacctgatccagccagatatcgcctgcttcggtgaaaaggattttcagcaactggcactgatccgcaaaatggttgccgatatgggcttcgatattgagattgtcggagtgccgattatgcgcgcgaaagacggtctggcgctcagttcccgtaacggctatctgacggcggaacaacgtaaaattgcgccgggtctctacaaagtcttaagttcaattgccgacaaattgcaggctggcgaacgggatctcgatgaaattattgctattgccgggcaagaactgaatgaaaaaggtttccgttccgatgatattcagattcgcgatgccgacaccttgctggaaatctctgaaaacagcaaacgagcggtgattctggtagccgcctggcttggcgatgctcgcctgatcgacaacaaactggtcgaactggcgtaa

SEQ ID NO: 3780 - DNA, 885 bp, Escherichia coli
atggatgcaccgagtaccacaccgcatgatgcggtgtttaaacaatttttaatgcatgcggaaacggctcgcgactttctggatatccatttgccagcggagctacgcgaactgtgtgacctcgacacgctgcatcttgagtcggggagttttattgaagaaagcctgaaagggcacagcactgacgtgctttattccgtgcaaatgcagggcaaccccggttatttgcatgttgtgattgaacatcaaagcaagccggataagaaaatggcctttcgcatgatgcgttattctattgctgccatgcaccggcatctggaggctgaccacgataagctgccgctggtggtgccaattctgttttatcagggcgaggccacaccttatccgctatcaatgtgctggtttgatatgttttactcaccggaactggcgcgacgcgtctataacaatcctttcccgctggtggatatcactatcacaccggatgacgaaatcatgcaacatcggcggattgcgattctcgaactgctgcaaaaacatattcgccagcgcgacttaatgttattgctggagcaactggtcacgctgattgacgaagggtacactagcggaagtcagttagttgccatgcaaaactatatgctgcaacgcggtcatactgaacaagcggatttgttttatggtgtggtgagagacagggaaacgggaggggagtctatgatgacgctggcgcagtggtttgaagagaaggggattcagcagggaagacaggaagtaagtcaggaattcgccctgcgtcttctgagtaaaggaatgtctcgggaagacgttgcagagatggtaaatttacctcttgctgagattgataaaatgattaactaa

SEQ ID NO: 3781 - DNA, 381 bp, Escherichia coli
atgattcgcacgatgctgcagggcaaactccaccgcgtgaaagtgactcatgcggacctgcactatgaaggttcttgcgccattgatcaggattttcttgacgcagccggtattctcgaaaacgaagccattgatatctggaatgtcaccaacggcaagcgtttctccacctatgccatcgcggcagaacgcggttcgagaattatttctgttaacggtgcggcggcccactgcgccagcgtcggcgatattgtcatcatcgccagcttcgttaacatgccagatgaagaagctcgcacctggcgacccaacgtcgcctattttgaaggcgacaacgaaatgaaacgtaccgcgaaagcgattccggtacaggttgcctga

SEQ ID NO: 3782 - DNA, 1230 bp, Escherichia coli
atgtacaaacaagctgttattctcctactgatgctgtttaccgcaagcgtcagtgccgcattacctgctcattatatgcaaaccatcgaaaatgctgcggtctgggcgcaaattggcgacaaaatggtgacggtagggaatattcgggccgggcaaatcattgccgtggagcccactgccgcaagttattacgtatttaattttggctttggtaaagggtttatcgataaaggccatctcgagccggttcaggggcgacaaaaagttgaagatggtttgggtgacctcaacaagccgctgagtaatcagaacttaataacctggaaagatacgccggtttataacgcgccgagtgtgggcagtgcgccatttggagtactggcggacaatttgcgctacccgattttgcataaactgaaagacaggttaaatcaaacctggtatcagatccgcattggcgatcgactggcctatatcagcgcgctggatgcccaacccgataatggcttgccggtgctaacctatcaccatattttgcgcgacgaagaaaacacccgttttcgccatacttcgacgaccacctcggtacgcgctttcaataaccagatggcctggctgcgcgacaggggatacgcgacactgagcatggcgcagctggaaggttacgtgaagaataagatcaatctccctgcgcgagcggtggtaattacctttgatgatggcctcaagtcggtgagccgctatgcgtatcctgtgttgaaacaatatggtatgaaggcgacggcgtttattgttacctcgcgcatcaaacgtcacccgcagaaatggaacccaaaatcgctgcaatttatgagcgtttctgaacttaacgaaattcgcgatgtatttgatttccagtcacatactcattttttgcatcggatagatggttatcggcggcctatattgctgagccgtagtgagcacaatattctgtttgattttgcacgttcacgccgcgctctggcgcaatttaatccacatgttttgtatctttcttatccatttggcggatttaatgacaaagccgtgaaggcagcaaaagaagccggatttcacctggcggtgacgaccatgaaaggcaaagtaaaaccgggggataatccgttgttactaaaacgactttatatcttaagaacggattcgctggagacgatgtcgcggctggtgagtaaccagccgcagggataa

SEQ ID NO: 3783 - DNA, 441 bp, Escherichia coli
atgttaggttgggtaattacctgtcacgatgaccgggcgcaagagatactggatgcgctggagaaaaaacatggggcacttcttcagtgccgggccgtgaatttctggcgcggattaagctctaatatgctcagccgcatgatgtgcgatgccttgcatgaaacggactctggtgagggcgttatctttttaaccgatatagccggagcgccaccgtaccgcgtggcttcattattaagccacaaacactcccgttgcgaagtgatttctggtgtcacgttaccgttaattgaacagatgatggcttgccgtgaaaccatgaccagttcagcgtttcgcgagcgtattgtcgaactgggtgcgccggaggtgagtagtctttggcaccagcaacaaaaaaatccgcctttcgtcctcaaacataatttgtatgagtattaa

SEQ ID NO: 3784 - DNA, 771 bp, Escherichia coli
atgatgcatctttactgggtggcgctaaaaagcatctgggcgaaagagatccatcgctttatgcgtatctgggtgcagacgctggtgccgccagtcatcaccatgaccctttactttattatcttcggtaacctgattggttcgcgtattggcgatatgcatggcttcagctacatgcagttcatcgtaccggggctgatcatgatgtcggtgatcaccaacgcctacgctaacgtcgcgtcatcattttttggtgccaagttccagcgtaatattgaagagctgctggtagcgccggttccgactcatgtcattattgccggatatgtcggtggtggcgtggcgcgtggtctgtttgttggtattttggtgacggcaatttcactgttttttgtgccgtttcaggtgcattcgtgggtattcgttgccttaaccctggtgctcactgcggtgctattctcccttgcgggtttgctgaacggcgtgtttgccaaaacgttcgatgacatcagcctggtgccaacctttgtgttaacgccactcacgtatttgggcggggtgttttactccctgactttgttgccgccgttctggcaagggctgtcgcacctgaacccaatcgtttatatgatcagtggtttccgctacggcttcctcggtatcaatgatgttccgctggtcactacctttggcgtactggtggtctttattgtggcgttttatttgatctgttggtcgctgatccaacgtggacgtggtttgcgtagctaa

SEQ ID NO: 3785 - DNA, 927 bp, Escherichia coli
atgaccattgcactggaacttcaacagcttaaaaaaacctatccaggcggcgttcaggcgcttcgtggaatcgatttgcaggtcgaagcgggtgatttttatgcgcttctcgggccgaacggggccggaaaatcgaccactatcggtattatcagctctctggtaaataaaacctccgggcgggtcagcgtatttggttacgatctcgagaaagatgtcgtaaacgctaaacgtcagttgggtctggtgccacaggaatttaacttcaacccgtttgaaaccgtgcagcaaattgtggtgaatcaggcagggtactacggtgtggagcgcaaagaagcgtacattcgcagcgaaaagtatcttaaacaactcgatctatggggaaaacgcaacgaacgtgcgcgtatgttatctggcgggatgaagcgccgtttaatgattgcccgtgcgttaatgcatgaacctaaactactgattctcgacgaaccgaccgcaggcgtggatattgaacttcgccgctcaatgtggggctttttgaaggatttaaacgacaaaggcaccaccatcattctcaccacacactacctggaagaagcagaaatgctgtgccgcaatatcggcattattcaacacggtgagttggtggaaaatacttcgatgaaggcgctgctggcgaagctgaaatcagaaacctttattctcgatctcgcaccgaaaagtccgttaccgaagctcgatggctatcagtatcgactggtagataccgccacgctggaagttgaagtgctgcgtgagcagggcatcaacagcgtatttacgcagttaagtgagcagggcattcaggtattaagtatgcgtaacaaagctaaccgtctggaagagctgtttgtttcactggttaatgaaaaacaaggagatcgcacatga

SEQ ID NO: 3786 - DNA, 663 bp, Escherichia coli
atgaaagacatagatacactcatcagcaacaatgcactatggtcaaaaatgctggtggaagaggatcccgggttttttgagaaactggcacaagcgcaaaaaccgcgctttctatggattggatgttccgacagtcgcgttcctgcagaacgtttaaccggtcttgagccgggcgaactctttgttcaccgtaatgttgctaacctggtcattcacaccgacctgaactgcctttccgtggttcagtatgcagtggatgtactcgaagttgaacacattattatctgtggccactacggttgcggcggcgtacaagccgcagttgaaaacccagaactggggcttatcaacaactggctgctgcatatccgcgatatctggttcaaacatagctcattgctcggcgaaatgccgcaagagcgccgtctggataccttgtgtgaactgaacgtcatggaacaggtgtataacctgggccactccaccattatgcaatcagcgtggaaacgcgggcagaaagttaccattcacggctgggcctacggcattcacgacggcttgctgcgtgatctggatgtcacagcgactaaccgcgaaacccttgagcaacgttaccgtcacgggatctccaacctcaagctgaagcacatcaatcacaaataa

SEQ ID NO: 3787 - DNA, 549 bp, Escherichia coli
atggttatagatatgaaacatactgtagaagtaatgatccccgaagcggagattaaagcgcgtatcgccgaactgggtcgtcagattactgagcgttacaaagacagcggcagcgatatggtgctggtgggtctgctgcgtggctcatttatgtttatggcggacctgtgccgtgaagttcaggtatctcatgaagtcgactttatgaccgcctccagctacggtagcggcatgtccaccacccgtgatgtgaaaatcctcaaagacctggatgaagatatccgtggcaaggacgtgctgattgttgaagatatcatcgactcggggaatacactgtcgaaagtgcgtgagatcttaagcctgcgcgaaccgaagtcgttggcgatttgtacgctgctggataaaccgtcccgtcgtgaagtgaacgtcccggtagaatttatcggtttctcgatcccggatgagtttgtggtgggttacggcattgattacgcacagcgttaccgtcatctgccgtatatcggcaaagtgattctgctggacgagtaa

SEQ ID NO: 3788 - DNA, 2391 bp, Escherichia coli
atggcaattaacaataccggctcgcggcgattactcgtcacgctaacagccctttttgcagcactttgcgggctgtatctactcattggcggaggctggctggtcgcgattggcggctcctggtactaccccatcgctggccttgtgatgctcggcgtcgcctggatgctgtggcgcagtaaacgcgccgcgctttggctgtacgcagccctgctgctcggcactatgatttggggcgtctgggaagttggtttcgacttctgggcgctgactccgcgcagcgacattctggtcttcttcggcatctggctgatcctgccgtttgtctggcgtcgcctggtcattcctgccagcggcgcagttgccgcactggtggtcgcactgctgattagcggtggtatcctgacctgggccggatttaacgatccgcaggaaatcagcggcaccttaagcgccgataccacgccagcagaagccatctcccccgttgccgatcaggactggcctgcctatggtcgcaatcaggaaggtcaacgcttttcaccactgaagcaaattaacgctgataacgtccacaagctgaaagaagcctgggtgttccgtactggcgatgtgaagcagccgaacgatccgggcgaaatcaccaatgaagtgacgccaattaaagtgggcgacaccctttacctgtgtaccgcgcatcaacgtctgtttgcgctggatgccgccagcggtaaagagaaatggcattacgatcctgagctgaaaaccaacgagtccttccagcatgtaacctgccgtggcgtctcttatcatgaagccaaagcagaaactgcttcgccggaagtgatggcggattgcccgcgtcgtatcattcttccggtcaatgatggtcgtctgattgcaattaacgctgaaaacggcaagctgtgcgaaaccttcgccaataaaggcgtgctcaatctgcaaagcaatatgccggacaccaaaccgggtctgtatgagccgacttcgccgccgattatcaccgataaaaccatcgtgatggccggttcagtcaccgacaacttctcaacccgcgaaacgtctggcgtgatccgtggttttgatgtcaacaccggggagctgctgtgggcttttgatccgggcgcgaaagatccgaatgcgatcccgtctgacgaacacacctttacctttaactcaccaaactcgtgggcaccagcggcctatgacgcgaagctggatctggtctatctgccgatgggcgtgaccacgccagatatctggggcggtaatcgcacaccggaacaggaacgttatgccagctcgattctggcgctgaatgccactaccgggaaactggcgtggagctaccagaccgttcaccacgacctgtgggatatggatcttccggcacagccgacgctggcggacatcaccgttaatggtcagaaagtgccggtcatttatgctccggcgaaaaccggcaacatttttgtgctcgatcgtcgcaatggtgaactggtggttcctgccccggaaaaaccggttccccaaggtgctgctaaaggcgattacgtgacccctactcaacccttctcggaactgagcttccgtccgacgaaagatttgagcggtgcggatatgtggggagccaccatgtttgaccagttggtgtgccgcgtgatgttccaccagatgcgctatgaaggcattttcacgccgccatctgaacagggtacgctggtcttcccgggtaacctggggatgttcgaatggggcgggatttccgttgatccgaatcgtgaagtggcgattgccaacccaatggcactgccgtttgtttcgaaactgatcccacgcggtcctggtaacccgatggaacagccgaaagatgccaaaggcacgggtacggaatccggcatccagccgcagtacggtgtaccgtatggcgtcacgctcaacccgttcctctcaccgtttggtctgccatgtaaacagccagcatggggctatatctcagcattggatctgaaaaccaatgaagtggtgtggaagaaacgtattggtacgccgcaggacagtatgccattcccaatgcctgtaccggtgccgttcaatatgggtatgccgatgcttggcgggccaatctccacggcgggtaacgtgctgtttatcgccgctacggcagataactacctgcgcgcttacaacatgagcaacggtgaaaaactgtggcagggtcgtttaccagcgggtggtcaggctacgccaatgacctatgaagtgaatggcaagcagtatgtggtgatctccgcaggcggtcacggttcatttggtacgaagatgggcgactatattgtggcttatgcgctgccggatgatgtgaagtaa

SEQ ID NO: 3789 - DNA, 1551 bp, Escherichia coli
atgcaacgtcgtgatttcttgaaatattccgtcgcgctgggtgtggcttcagccttgccgctgtggagccgcgcagtatttgcggcggaacgcccaacgttaccaatccctgatttgctcacgaccgatgcccgtaatcgcattcagttaactattggcgcaggtcagtccacctttggcgggaaaaccgcaactacctggggctataacggcaatctgctggggccggcggtgaaattacagcgtggcaaagcggtaacggttgatatctacaaccaactgacggaagagacgacgttgcactggcacgggctggaagtaccgggtgaagtggacggcggcccgcagggaattattccgccaggtggcaagcgctcggtgacgttgaacgttgatcaacctgccgctacctgctggttccatccacatcaacatggcaagaccggacgtcaggtggcgatggggctggctggtttggtggtgattgaagatgacgagatcctgaaattaatgctgccaaaacagtggggtattgatgatgtcccggtgattgttcaggataaaaaatttaacgctgacgggcagattgattatcaactggatgtgatgaccgccgctgtgggttggtttggcgatacgttgctgaccaacggtgcaatctacccgcaacacgctgccccgcgtggctggctgcgcctgcgtttgctcaatggctgtaatgcccgctcgctcaatttcgccaccagcgacaatcgcccgctttatgtgattgccagcgacggcggtctgctacctgaaccggtgaaggtgaacgagctgccagtgctgatgggcgagcgttttgaagtgctggtggaggttaacgacaacaaaccctttgacctggtgacgctgccggtcagccagatggggatggcgattgcgccgtttgacaagccgcatccggtaatgcggattcagccgattgccattagtgcctctggtgctttgccagacacattaagtagcctgcctgcgttaccttcgctggaagggctgacggtacgcaagctgcaactttctatggacccaatgctcgatatgatggggatgcagatgctgatggagaaatatggcgatcaggcgatggccgggatggatcacagccagatgatgggccatatggggcacggcaatatgaatcatatgaaccacagcgggaagttcgatttccaccatgccaacaaaatcaacggtcaggcgtttgatatgaataagccgatgtttgcggcggcgaaagggcagtacgaacgttgggttatctctggcgtgggcgacatgatgctgcatccgttccatatccacggtacgcagttccgtatcttgtcagaaaatggcaaaccgccagcgacgcatcgcgcaggctggaaagataccgttaaggtagaaggtaatgtcagcgaagtgctggtgaagtttaatcacgatgcaccgaaagaacatgcttatatggcgcactgccatctgctggatcatgaagatacggggatgatgttagggtttacggtataa

SEQ ID NO: 3790 - DNA, 309 bp, Escherichia coli
atggccgtttgcgcaaacagttacgcgctcagcgagtctgaagccgaagatatggccgatttaacggcagtttttgtttttctgaagaacgattgtggttaccagaacttacctaacgggcaaattcgtcgcgcgctggtctttttcgcccagcaaaaccagtgggatctcagtaattacgacaccttcgacatgaaagccctcggtgaagacagctaccgcgatctcagtggcattggcattcccgtcgctaaaaagtgcaaagccctggcccgcgattccttaagcctgcttgcctacgtcaaataa

SEQ ID NO: 3791 - DNA, 867 bp, Escherichia coli
atggccgaaaaaaaacactggcatgaaacgctacacgaccagtttgggcagtactttgcggtagataacgttctgtatcatgaaaagaccgatcaccaggatctgatcatttttgagaacgccgcatttggtcgcgtaatggcgctggatggcgtagtacaaactaccgagcgcgacgagtttatctatcatgagatgatgacccatgttccgctactggcccacggtcacgcgaaacatgtgctgattatcggcggcggcgacggtgccatgctgcgtgaagtaacccgacataaaaacgttgagtcaatcacgatggtggaaatcgatgcgggtgtcgtgtcgttctgccgtcagtatcttcccaaccataacgccggtagttacgacgatccgcgctttaaactggtgatcgacgatggtgtcaatttcgttaatcaaaccaaccagacctttgatgtcattatctccgactgcaccgatcctatcggtcccggcgaaagtctgtttacttctgcattttatgaaggctgcaaacgttgcctgaatcctggcggtatcttcgtcgcacaaaacggcgtctgctttttacagcaggaagaggccatcgacagtcatcgcaaactcagccattacttcagcgatgttggcttttatcaggcggcgatcccgacctattacggcggcatcatgacctttgcatgggcgacagataacgacgccttacgccatctctcaaccgaaattattcaggcgcgttttctcgcttctggcctgaaatgccgttattacaatccggcagtccatacggcagcttttgccttaccccagtatctgcaagatgcactggcttcacagccgtcctaa

SEQ ID NO: 3792 - DNA, 795 bp, Escherichia coli
ttgaaaaaactgaaactgcatggctttaataatctgaccaaaagtctgagtttttgtatttacgatatctgctacgccaaaactaccgaagagcgcgacggttatattgcttatatcgatgaactctataatgccaaccgtctgaccgaaatcctgtcagaaacctgttccattatcggggccaatattcttaacatcgcccgccaggattacgagccacaaggtgccagcgtcactattctggtgagtgaagaaccggttgacccgaaactcatcgacaaaacagaacaccccgggccactgccagaaacggtcgttgcccatctcgataaaagtcatatttgcgtacatacctacccggaaagtcatcctgaaggcggtttatgtaccttccgcgccgatattgaagtctctacctgcggcgtgatttctccgctgaaggcgctgaattacctgatccaccagcttgagtccgatattgtgactattgattatcgcgtgcgcggttttacccgcgacattaacggtatgaagcactttatcgaccatgagattaattcgattcagaactttatgtccgaagatatgaaggcgctgtatgacatggtggatgtaaacgtctatcaggagaatatcttccataccaagatgttgcttaaagagttcgaccttaagcactacatgttccacaccaaaccggaagatttaaccgacagcgagcgccaggaaattaccactgcgctgtggaaagaaatgcgcgagatttattacgggcgcaatatgcccgctgtttaa

SEQ ID NO: 3793 - DNA, 363 bp, Escherichia coli
atggattacgaatttctgcgcgatattaccggagtggtaaaggtgcgcatgtccatggggcatgaagtggtcgggcactggtttaatgaagaggtgaaagaaaacctggccttgcttgatgaagtagaacaagcggcgcacgcattgaaaggtagcgaacgttcctggcaacgggcagggcatgaatacacgctatggatggatggtgaagaggtgatggttcgcgccaatcaactggaattcgctggcgatgaaatggaagaggggatgaactactacgatgaagagagcttgtcgctgtgcggcgttgaggattttcttcaggtggtggcggcttaccgtaatttcgtgcagcagaagtaa

SEQ ID NO: 3794 - DNA, 2598 bp, Escherichia coli
gtgctagaagaataccgtaagcacgtagctgagcgtgccgctgaggggattgcgcccaaacccctggatgcaaaccaaatggccgcacttgtagagctgctgaaaaacccgcccgcgggcgaagaagaattcctgttagatctgttaaccaaccgtgttccccctggcgtcgatgaagccgcctatgtcaaagcaggcttcctggctgctgtcgccaaaggcgaagctaaatccccgctgctgactccggaaaaagccattgaactgctgggcactatgcagggtggttacaacattcatccgctgatcgacgcgctggatgatgccaaactggcaccgatcgctgccaaagcactttctcacacgctgctgatgttcgataacttctatgacgtagaagagaaagccaaagcaggcaacgaatatgcgaagcaggtaatgcagtcctgggcggatgccgaatggttcctgaatcgcccggcgctggctgaaaaactgaccgttaccgtcttcaaagtcactggcgaaaccaacaccgatgacctctctccggcaccagatgcgtggtcacgcccggatatcccactgcacgcgctggcgatgctgaaaaacgcccgtgaaggtattgagccagatcagcctggtgttgttggcccgatcaaacagattgaagctctgcaacagaaaggtttcccgctggcgtacgtcggtgacgttgtgggtacgggttcatcgcgtaaatccgccacgaactccgttctgtggtttatgggcgatgatattccacatgtgccgaacaaacgcggcggtggtttgtgcctcggcggtaaaattgcaccaatcttttttaacacgatggaagatgcgggtgcactgccaatcgaagtcgacgtctctaacctgaacatgggcgacgtaattgacgtttacccgtacaaaggtgaagtgcgtaaccacgaaaccggcgaactgctggcaaccttcgaactgaaaaccgacgtgctgattgatgaagtgcgtgctggcggccgtattccgctgattatcgggcgtggcctgaccaccaaagcgcgtgaagcacttggcctgccgcacagcgatgtgttccgtcaggcgaaagatgtcgctgagagcgaccgtggcttctcgctggcgcagaaaatggtgggccgagcctgtggcgtgaaaggcattcgtccgggcgcgtactgtgaaccgaaaatgacttctgtaggttcccaggacaccaccggcccgatgacccgtgatgaactgaaagacctggcgtgcctgggcttctcggctgacctggtgatgcagtctttctgccacaccgcggcgtatccgaagccagttgatgtgaacacgcaccacacgctgccggacttcattatgaaccgtggcggtgtgtcgctgcgtccgggtgacggcgtaatccactcctggctgaaccgtatgctgctgccggataccgtcggtaccggtggtgactcccatacccgtttcccgatcggtatctctttcccggcgggttctggtctggtggcatttgcagccgcaacaggcgtaatgccgctggatatgccagaatccgttctggtacgcttcaaaggcaaaatgcagccgggtatcaccctgcgcgatctggtacatgccattccgctgtatgcaatcaaacaaggtctgctgaccgttgagaagaaaggtaagaaaaacatcttctctggccgcattctggaaattgaaggtctgccggatctgaaagttgagcaggcatttgagctgaccgatgcgtctgccgagcgttctgctgccggttgtaccatcaagctgaacaaagaaccgatcattgaatacctgaactctaacatcgtcctgctgaagtggatgatcgcggaaggttacggcgatcgtcgtaccctggagcgtcgtattcagggcatggaaaaatggctggcgaatcctgagctgctggaagccgatgcagatgcggaatacgcggcagtgatcgacatcgatctggcggatatcaaagagccaatcctctgtgcaccgaatgacccggacgacgcacgtccgctgtctgcggtacagggcgagaagatcgacgaagtatttatcggttcttgcatgactaacatcggtcacttccgtgctgctggtaaactgctggatgcgcacaaaggtcagttgccgacccgcctgtgggtggcaccgccaacgcgtatggacgctgcgcagctgaccgaagaaggctactacagcgtcttcggtaagagtggtgctcgtatcgagatccctggctgttccctgtgtatgggtaaccaggcgcgtgtagcagacggtgcgacggtggtttccacctctacccgtaacttcccgaaccgtttgggtactggcgcgaatgtcttcctggcttctgcggaactggctgctgttgcggcgctgattggcaaactgccgacgccggaagagtaccagacctacgtggcgcaggtagataaaacagccgttgatacttaccgttatctgaacttcgaccagctttctcagtacaccgaaaaagcggacggggtgattttccagactgcggtttaa

SEQ ID NO: 3795 - DNA, 1758 bp, Escherichia coli
atgaaaatgactttgccgtttaaaccccatgtgctggcactaatttgcagtgccgggctttgtgccgcctctgccgggctatatataaaaagccgcacagtggaagcgcctgtggaagcgcaatcgacacaacagactgcgcctgacatctccgcagttacgcttcctgcaacggtttccgtgcctcctgtaacacctgccgtcgtcaaatctacattcagcactgcacaaatcgatcaatgggtcgcgcccgtcgcgctgtaccccgactctctgctttcacaagtgttaatggcatcaacctatccggcaaacgttgctcaagcagtgcaatggtcgcacgataacccacttaaacaaggcgatgctgctattcaggcggtatctggccagtcctgggacgccagcgtcaaatcactggtggcctttccacagttgatggcgttgatgggcgaaaacccgcaatgggtgcaaaacctgggcgatgcttttctggcgcagccgcaggacgtgatggactcggtacagcgattgcggcaactggcgcaacaaaccggctcgctgaagtcatcaactgaacaaaagatcatcacgacaacgaaaaaagtcgtaccggtaaatcagcccgccaacgcccctgccacacaatcaaataccgtttctacgtccagccccgtcgtcgcagaacctgcaccgaccgtaatagccattgagccagccaatccggatgtggtttatattccgaactacaacccaaacgtggtttacggcagttgggccaataccgcttatccgccagtttatctgccgccgccagccggagaaccgtttgttgacagctttgtgcgcggattcggctatagcatgggcgttgctaccacatacgcactattcagcagcatcgactgggacgacgacgatcatgaccatcatcatcatgacgatgatgattatcatcaccacgatggcggtcatcgtgacggtaatgactggcaacacaacggcgacaacatcaatatcgacgtcaacaatttcaaccgtatcaccggtgagcatcttactgataagaatatggcatggcggcacaatccgaattaccgcgatggtatgccttatcatgatcaggatatggcaaagcggtttcaccaaaccgatgttaaaggcggaatgagcgccacgccgctacctgctccaacacgcgacagccagcgtcaggcggcagcaagccagtttcagcaacgaacacacgccgcccccgtcattacgcgagatacccagcgtcaggctgcggcacagcggtttaatgaagcggaacactatggcaattatgacgacttccgcgacttcagccaccaccgaccactgacccagcagcaaaaggacgccgctcgtcagcgttatcagtcggcttctcctgagcagcgccaggcagtccgcgagaaaattcaggctaacccgcagaatcagcagagaagagaagcggcacgtcagcgtattcagtccgcgtcgcctgagcagcgccaggcggttcgcgagaaaatgcagactaacccgcagaatcaacagcaaagagatgcagcacgtcagcgtatccagtctgcctcgcctgagcagcgtcaggtttttcgagagaaagttcaggagagccgcccgcagcgtctaaacgacagtaaccatactgcccgattgaataatgagcaacggtcagcggtacgcgaacggttgtctgagcgtggagcaaggagactggaaaggtaa

SEQ ID NO: 3796 - DNA, 1425 bp, Escherichia coli
atgagtactgaaatcaaaactcaggtcgtggtacttggggcaggccccgcaggttactccgctgccttccgttgcgctgatttaggtctggaaaccgtaatcgtagaacgctacaacaccctcggcggtgtttgcctgaacgtcggctgtatcccttctaaagcactgctgcacgtagcaaaagttatcgaagaagccaaagcgctggctgaacacggtatcgtctttggcgaaccgaaaaccgatatcgacaagattcgtacctggaaagagaaagtgatcaatcagctgaccggtggtctggctggtatggcgaaaggccgcaaagtcaaagtggtcaacggtctgggtaaatttaccggggctaacaccctggaagttgaaggtgagaacggtaaaaccgtgatcaacttcgacaacgcgatcattgcagcgggttctcgcccgattcaactgccgtttattccgcatgaagatccgcgtatctgggactccactgacgcgctggaactgaaagaagtaccagaacgcctgctggtaatgggtggcggtatcatcggtctggaaatgggcaccgtataccacgcgctgggttcacagattgacgtggttgaaatgttcgaccaggtcatccccgcagctgataaagacatcgttaaagtctttaccaagcgtatcagcaagaaattcaacctgatgctggaaaccaaagttaccgccgttgaagcgaaagaagacggcatttatgtgacgatggaaggcaaaaaagcacccgctgaaccgcagcgttacgacgccgtgctggtagcgattggtcgtgtgccgaacggtaaaaacctcgacgcaggcaaagctggcgtggaagttgacgaccgaggtttcatccgcgttgacaaacagctgcgtaccaacgtaccgcacatctttgctatcggcgatatcgtcggtcagccaatgctggcacacaaaggtgttcacgaaggtcacgttgccgctgaagttatcgccggtaaaaaacattacttcgatccgaaagttatcccgtccatcgcctataccgaaccagaagttgcatgggtaggtctgactgagaaagaagcgaaagagaaaggcatcagctatgaaaccgccaccttcccgtgggctgcttctggtcgtgctatcgcttccgactgcgcagacggtatgaccaagctgattttcgacaaagaatctcaccgtgtgatcggtggtgcaattgtcggtactaacggcggtgagctgctgggtgaaatcggcctggcaatcgaaatgggttgtgacgctgaagacatcgcactgaccatccatgcgcacccgactctgcacgagtctgtgggcctggcggcagaagtgttcgaaggtagcattaccgacctgccgaacccgaaagcgaagaagaagtaa

SEQ ID NO: 3797 - DNA, 1893 bp, Escherichia coli
atggctatcgaaatcaaagtaccggacatcggggctgatgaagttgaaatcaccgagatcctggtcaaagtgggcgacaaagttgaagccgaacagtcgctgatcaccgtagaaggcgacaaagcctctatggaagtaccatctccgcaggcgggtatcgttaaagagatcaaagtctctgttggcgataaaacccagaccggcgcactgattatgattttcgattccgccgacggtgcagcagacgctgcacctgctcaggcagaagagaagaaagaagcagctccggcagcagcaccagcggctgcggcagcaaaagacgttaacgttccggatatcggcagcgacgaagttgaagtgaccgaaatcctggtgaaagttggcgataaagttgaagctgaacagtcgctgatcaccgtagaaggcgacaaggcttctatggaagttcctgctccgtttgcaggcaccgtgaaagagatcaaagtgaacgtgggtgacaaagtgtctaccggctcgctgattatgatcttcgaagtcgcgggtgaagcaggcgcggcagctccggcggctaaacaggaagcggctccggcagcggcccctgcaccagcagctggcgtgaaagaagttaacgttccggatatcggcggtgacgaagttgaagtgaccgaagtgatggtgaaagtgggcgacaaagttgccgctgaacagtcactgatcaccgtagaaggcgataaagcttctatggaagttccggctccgtttgcaggcgtcgtgaaggaactgaaagtcaacgttggcgataaagtgaaaactggttcgctgattatgatcttcgaagttgaaggcgcagcgcctgcggcagctcctgcgaaacaggaagcggcagcgccggctccggcagcaaaagctgaagccccggcagcagctccggctgcaaaagccgaaggcaaatctgaatttgctgaaaatgacgcttacgttcacgcgactccgctgatccgccgtctggcacgcgagtttggcgttaacctggcgaaagtgaagggcaccggccgtaaaggtcgtatcctgcgcgaagacgttcaggcttacgtgaaagaagctatcaaacgtgcagaagcagctccggcggcaactggcggcggtatcccaggcatgctgccgtggccgaaggtggacttcagcaagtttggtgaaatcgaagaagtggaactgggccgcatccagaaaatctctggtgcgaacctgagccgtaactgggtgatgatcccgcatgttactcacttcgacaaaaccgatatcaccgagctggaagcgttccgtaaacagcagaacgaagaagcggcgaaacgtaagctggatgtgaagatcaccccggttgtcttcatcatgaaagccgttgctgcagctcttgagcagatgcctcgcttcaacagttcgctgtcggaagacggtcagcgtctgaccctgaagaaatacatcaacatcggtgtggcggtggataccccgaacggtctggttgtcccggtattcaaagacgtcaacaagaaaggcatcatcgagctgtctcgcgagctgatgactatttctaagaaagcgcgtgacggtaagctgacagcgggcgaaatgcagggcggttgcttcaccatctccagcatcggcggcctgggtactacccacttcgcgccgattgtgaacgcgccggaagtggctatcctcggcgtttccaagtccgcgatggagccggtgtggaatggtaaagagttcgtgccgcgtctgatgctgccgatttctctctccttcgaccaccgcgtgatcgacggtgctgatggtgcccgtttcattaccatcattaacaacacgctgtctgacattcgccgtctggtgatgtaa

SEQ ID NO: 3798 - DNA, 2664 bp, Escherichia coli
atgtcagaacgtttcccaaatgacgtggatccgatcgaaactcgcgactggctccaggcgatcgaatcggtcatccgtgaagaaggtgttgagcgtgctcagtatctgatcgaccaactgcttgctgaagcccgcaaaggcggtgttaacgtagccgcaggcaccggtatcagcaactacatcaacaccatccccgttgaagaacaaccggagtatccgggtaatctggaactggaacgccgtattcgttcagctatccgctggaacgccatcatgacggtgctgcgtgcgtcgaaaaaagacctcgaactgggcggccacatggcgtccttccagtcttccgcaaccatttatgatgtgtgctttaaccacttcttccgtgcacgcaacgagcaggatggcggcgacctggtttacttccagggccacatctccccaggcgtttacgctcgtgctttcctggaaggtcgtctgactcaggagcagctggataacttccgtcaggaagttcacggcaatggcctctcttcctatccgcacccgaaactgatgccggaattctggcagttcccgaccgtatctatggggctgggtccgattggtgctatttaccaggctaaattcctgaaatatctggaacaccgtggcctgaaagatacctctaaacaaaccgtttacgcgttcctcggcgacggtgaaatggacgaaccggaatccaaaggtgcgatcaccatcgctacccgtgaaaaactggataatctggtcttcgttatcaactgtaacctgcagcgtcttgacggcccggtcaccggtaacggcaagatcatcaatgaactggaaggcatcttcgaaggtgctggctggaacgtgatcaaagtgatgtggggtagccgttgggacgaactgctgcgtaaagataccagcggtaaactgatccagctgatgaacgaaaccgttgacggcgattaccagaccttcaaatcgaaagatggtgcgtatgttcgcgaacacttcttcggtaaatatcctgaaaccgcagcactggttgcagactggactgacgagcagatctgggcactgaaccgtggtggtcacgatccgaagaaaatctacgctgcattcaagaaagcgcaggaaaccaaaggcaaagcgacggtaatccttgctcataccattaaaggttatggcatgggcgacgcggctgaaggtaaaaacatcgcgcaccaggttaagaaaatgaacatggacggcgtgcgtcatatccgcgaccgtttcaatgtgccggtgtctgatgcagatatcgaaaaactgccgtacatcaccttcccggaaggttctgaagagcatacctatctgcacgctcagcgtcagaaactgcacggttatctgccaagccgtcagccgaacttcaccgagaagcttgagctgccgagcctgcaagacttcggcgcgctgctggaagagcagagcaaagagatctctaccactatcgctttcgttcgtgccctgaacgtaatgctgaagaacaagtcgatcaaagacaggctggtaccgatcatcgccgacgaagcgcgtactttcggtatggaaggtctgttccgtcagattggtatttacagcccgaacggtcagcagtacaccccgcaggaccgcgagcaggttgcttactataaagaagacgagaaaggtcagattctgcaggaagggatcaacgagctgggcgcaggttgttcctggctggcagcggcgacctcttacagcaccaacaatctgccgatgatcccgttctacatctattactcgatgttcggtttccagcgtatcggcgatctgtgctgggcggctggcgaccagcaagcgcgtggcttcctgatcggcggtacttccggtcgtaccaccctgaacggcgaaggtctgcagcacgaagatggtcacagccatattcagtcgctgactatcccgaactgtatctcttacgacccggcttacgcttacgaagttgctgtcatcatgcatgatggtctggagcgtatgtatggtgaaaaacaagagaacgtttactactacatcactacgctgaacgaaaactaccacatgccggcaatgccggaaggtgctgaggaaggtatccgtaaaggtatctacaaactcgaaaccattgaaggtagcaaaggtaaagttcagctgctgggctccggttctatcctgcgtcacgtccgtgaagcggcagagatcctggcgaaagattacggcgtaggttctgacgtttatagcgtgacttccttcaccgaactggcgcgtgatggtcaggattgtgaacgctggaacatgctgcacccgctggaaactccgcgcgttccgtatatcgctcaggtgatgaacgacgctccggcagtggcatctaccgactatatgaaactgttcgctgagcaggtccgtacttacgtaccggctgacgactaccgcgtactgggtactgatggcttcggtcgttccgacagccgtgagaacctgcgtcaccactttgaagttgatgcttcttatgtcgtggttgcggcgctgggcgaactggctaaacgtggcgaaatcgataagaaagtggttgctgacgcaatcgccaaattcaacatcgatgcagataaagttaacccgcgtctggcgtaa

SEQ ID NO: 3799 - DNA, 765 bp, Escherichia coli
atggcctacagcaaaatccgccaaccaaaactctccgatgtgattgagcagcaactggagtttttgatcctcgaaggcactctccgcccgggcgaaaaactcccaccggaacgtgaactggcaaaacagttcgacgtctcccgtccctccttgcgtgaggcgattcaacgtctcgaagcgaagggcttgttgcttcgtcgccagggtggcggcacttttgtccagagcagcctatggcaaagcttcagcgatccgctggtggagctgctctccgaccatcctgaatcacagtatgacttgctcgaaacacgacacgccctggaaggtatcgccgcttattacgccgcgctgcgtagtaccgatgaagacaaggaacgcatccgtgaactccaccacgccatagagctggcgcagcagtctggcgatctggacgcggaatcaaatgccgtactccagtatcagattgccgtcaccgaagcggcccacaatgtggttctgcttcatctgctaaggtgtatggagccgatgttggcccagaatgtccgccagaacttcgaattgctctattcgcgtcgcgagatgctgccgctggtgagtagtcaccgcacccgcatatttgaagcgattatggccggtaagccggaagaagcgcgcgaagcatcgcatcgccatctggcctttatcgaagaaattttgctcgacagaagccgtgaagagagccgccgtgagcgttctctgcgtcgtctggagcaacgaaagaattag

SEQ ID NO: 3800 - DNA, 291 bp, Escherichia coli
atgtataattttaaagataaaatagaagattacacagagcgggaattcattgagttgcttggcgagtttacaaatccaaccggggataacgctcaattaaaaggggaagagcttgacaaatattgggatgatctagaagaacatcttaccagaattacacaacatccgttgatgagcgatcttatctactatcctgcaaagaagggagatgataagcctgaaaacatcctgaaaatcgtcaaagaatggcggcgttcgcaaggattgcctttgttcaaagattcagaatga

SEQ ID NO: 3801 - DNA, 294 bp, Escherichia coli
atgtttaaagaaaagctcgaagattataccgaggaggaatttcttaattttttaggcggattgagatcaactatgaaagatggaaagcccttaaaaggtaaggagctagaaatgtactgggattcattagtagatcattttattgaaattacacagcatccgtcagggagcgatctaattttctaccctaaaagtcaaggagatgataagcctgaaaacatcctgaaaattgtcaaagaatggcggcgttcacaggggctacccttgtttaaagactctaaacaaagtagataa

SEQ ID NO: 3802 - DNA, 291 bp, Escherichia coli
atgcgtgatttaaaagataaaatatatttttacacagaaggtgaatttcttgaaatgcttgaggagatagtaaatgcaactagcaaagataaatccctaaaagggaaaaaattagaaaaatatctcgataccttagtggatcatttcattaaaattactgaacatcctaaaaagggagatctcattttctatcctaattcccaagaagatggtgaacctgaaaacatcctgaaaatcgtcaaagaatggcggcgttcacaggggctacccttgtttaaagactctaaataa

SEQ ID NO: 3803 - DNA, 1782 bp, Escherichia coli
gtgggcgatattgtttacctgagaataatcggtgagaagcagggcgatatttcttcaggctgtgggacgtatgcgtcggttggtaatcgctggcaggttggccatgaagatgaaatttttgcctttgcactcaccaacgccattaccagtactggtaaaggcgttaatctacaggggctacaattttgcaaactcattgataaaagctcaccgctactgtctaatgccatcaatcagaatgagcggttatttattgaaatcgatttgtatcgtataaataaaagcgggcgctgggaacggtattattatattcagctaagaaatgcttcattaactgctattcatgtaaacatttctgacaataatcttcctaccgaatgtgtaaatgttaattatgactacatattatgcaaacatctaatagccaatacggaatttgactggttggcctttcctgctggctataatagcttatttattccacctaaaaacccacctgccagtaatcttaaccctgagccgctaccagttgttaaccttccactctctccaccagcggttaaaccggtctatgccaaatcctgtctgaaggagaagggatgtacagatgccggaacggcagaagaacccgctgaaaacttcgggcaagtagcgatttttgctctgccagtggttgatgactgctgtggataccaccatccggaggctaacgatgttgggcaacccgcagaagctcaaaccatgctactgtttccgggtagtgtgttggcggctcaaatatggggaaaatggtcgctcagtggcatactcagtgcaacccgcggctcttacatcggtgcgttggcatctgctttgtatattccctctgcgggcgagggcagtgctcgcgtgcccggacgtgatgagttctggtatgaggaagaactgcggcagaaagcactagcaggcagtaccgccaccacccgggtacgttttttctggggaactgacattcacggcaagcctcaggtgtatggtgttcatacgggtgaaggtacgccgtatgaaaacgtccgcgtggcgaacatgcagtggaacgagcagacgcagcgttatgaatttacccccgctcacgatgtcgatggccccctgattacctggacgccggaaaatccggaacatgggaatgttccgggccataccggtaacgacaggccgccgctggatcagcccaccattctggtgacgccgattccggacggcaccgatacctataccacgccgccattcccggttcctgatccgaaagaattcaacgattatattctggtttttccggcgggatccggtattaagcccatctatgtttacctgaaggaggatccgcgaaagctgcctggtgttgtaacagggcgcggcgtcccgctttcaccaggaactcgctggctggatatgtcggtatccaataacggcaacggcgcaccaatcccggcgcatattgctgataaattgcgcggacgggagtttaaaacctttgatgagtttcgcgaggcgctgtggctggaggtgagtaaagactcagtgttattggcgcagtttataaaaagtaatcagaataacgttagtcaaggatattccccctatgtccctgaggaggggtattattacggaccaaatgagatagttaagaaattccagatacatcatgtagttgctatagaacatggtggtggagtgtatgatattgataattttaggattgttacgccccgactacatgatgaaattcactacaggagataa

SEQ ID NO: 3804 - DNA, 1371 bp, Escherichia coli
atggaaggtcaacagcacggcgagcagctaaagcgcggccttaaaaaccgccatattcagcttatcgcgctgggtggcgcgatagggacagggctattcctgggtagcgcctccgtaatacagtccgcagggccagggattatcctgggttacgccattgctggttttatcgcctttctgatcatgcgtcagctaggtgaaatggtggtcgaagaacctgtcgcaggctcctttagccactttgcttataaatactggggcagttttgccggtttcgcctctggctggaactactgggtactgtacgttttagttgccatggcagagctgactgccgtgggtaaatacattcagttctggtatccggaaatcccaacctgggtttctgccgccgtgttctttgtggtgatcaacgccatcaacctgacaaacgtaaaagtgtttggcgagatggagttctggtttgccattatcaaagttatcgcggtggtagcgatgatcatcttcggcgcctggctgctattcagcggcaacggcggcccgcaggcgagcgttagcaacctgtgggatcagggtggtttcctgccacacggcttcaccggtctggtgatgatgatggcgattatcatgttctctttcggtggtctggaactggtggggatcaccgcagcagaagctgataacccggagcaaagtatcccgaaagcaactaaccaggttatctaccgcatcctgattttctatattggctcgttagccgttctgctctcactaatgccgtggacccgcgttaccgccgataccagtccgtttgtgctgatcttccacgagttaggcgatacctttgtagcgaatgcgctgaatatcgtggtactgactgctgcgctctccgtgtacaacagctgcgtatattgcaacagccgtatgctgttcggtctggcacaacaagggaacgcgccaaaagcgctggcgtctgtcgataaacgcggcgtaccggttaacactattctggtgtctgcgctggttacggcattgtgcgtactgattaactaccttgccccagagtccgctttcggactgttaatggcgctggtggtatctgcactggtcatcaactgggcgatgatcagtctggcgcatatgaaattccgtcgtgccaaacaagaacaaggcgtggtaactcgcttccctgccctgctttatccgctgggtaactggatctgcctgctgtttatggcggcggtactggtgattatgctgatgaccccaggaatggcgatttcggtatacctgatcccggtatggctgatcgtgttaggtatcggctatctgtttaaagagaaaaccgccaaagccgtaaaagcgcattaa

SEQ ID NO: 3805 - DNA, 855 bp, Escherichia coli
atgacgctatttacaaccttactggtgttaattttcgagcgcctgtttaagttgggcgagcactggcagcttgatcatcgtcttgaagcgttctttcggcgggtgaaacatttttctctcgggcgcacattaggcatgaccattattgcgatgggcgtgacttttttactgttacgcgcattgcagggagtattgttcaacgttcccacgctgctggtgtggctgctgattggtttgctgtgtattggcgcaggtaaagttcgtcttcattatcatgcttatctgacagctgcttcacgtaatgatagccatgcccgtgccacgatggctggcgaactcaccatgattcacggcgtcccggcaggctgcgatgaacgtgagtatttgcgtgagctgcaaaatgcattgctgtggattaactttcgtttttatcttgctccgctgttctggctgattgtggggggaacctggggacccgttacgctgatggggtatgcgtttttgcgtgcatggcaatactggctggcgcgataccagacgccgcatcatcgtttacagtccggcattgatggcgtgcttcatgtactggattgggtgccggttcgtcttgcgggtgtggtatatgccttgatcggtcatggtgagaaagcgttaccggcctggtttgcttcgctgggtgatttccatacttcgcaatatcaggtattaacgcgtctggcacagttctctctggcgcgtgaaccgcatgtcgataaggtggagacgccaaaggcagcggtttcaatggcgaagaaaacctcgttcgtggtcgtggtggtaattgcgctactgacgatttacggggcgttggtgtaa

SEQ ID NO: 3806 - DNA, 552 bp, Escherichia coli
atgttgttagaacaggggtggctggttggcgcgcgccgcgttccctcaccacattacgattgccgcccggatgacgaaacacccaccctgctggtggtgcacaatattagcctgccgccaggcgagtttggcggtccgtggatcgacgcattattcactggaactattgatccgcaggcgcatcctttctttgctgagatcgcccatttgcgcgtctccgctcactgtttgattcgccgtgatggtgaaatagtccagtatgttcctttcgataaacgtgcctggcatgcgggagtctctcagtatcaggggcgtgaacgctgcaatgatttttctattgggattgagctggaaggcaccgatacgctggcgtataccgatgcgcagtatcaacagcttgcggcggttacgcgggcactgattgatcgctatccagatatcgctaataacatgacgggccattgtgatattgcgccggatcggaaaaccgatcccggccctgcatttgattgggcacggtttcgtgcactggtcagcaaggagacaacatga

SEQ ID NO: 3807 - DNA, 894 bp, Escherichia coli
atgccgcctcgccgctataaccctgacacccgacgtgacgagctgctggaacgcattaatctcgatatccccggcgcggtggcccaggcgctacgggaagatttaggcggaacagtcgatgccaacaatgacattacggcaaaacttttaccggaaaactctcgctctcatgccacagtgatcacccgcgagaatggcgtattttgcggcaaacgctgggttgaagaggtgtttattcaactggcaggcgacgatgtcaccattatctggcatgtggatgacggcgatgtcatcaacgccaatcaacccttgttcgaacttgaaggcccatctcgcgtgctgttaaccggcgaacgcactgcgcttaattttgtgcaaactctttcaggagttgccagtaaggtacgccactatgtcgaattactggaaggcaccaacacgcagctgttggatacgcgtaaaaccttgcccggcctgcgttcagctctgaaatacgcggtactttgcggcggcggagcgaatcaccgcctggggctttctgatgccttcctgatcaaagaaaaccatattattgcctccggctcagtgcggcaggcggtcgaaaaagcgtcctggttgcacccggatgcgccagtagaagtcgaagtagagaatctggaagaacttgatgaagccctgaaagcaggtgccgatatcatcatgctggataacttcgaaacagaacagatgcgcgaagccgtcaaacgcaccaacggcaaggcgctactggaagtgtctggcaacgtcactgacaaaacactgcgcgaatttgccgaaacgggcgtggactttatctccgttggtgcgctaactaaacacgtacaggcactcgacctttcaatgcgttttcgctaa

SEQ ID NO: 3808 - DNA, 441 bp, Escherichia coli
atggacaagcaacgcggttttacacttatcgaactgatggtggttattggcatcattgccattttaagcgccattggtattcccgcttatcaaaactacctgcgcaaagccgcactcaccgacatgctacaaacctttgtgccttaccgtaccgccgtagagttgtgcgcgctggaacatggtggattaaatacctgcgacggtggcagcaatggcattccctcgcctaccaccacccgctatgtttcagccatgagtgtggcaaagggcgtggtgtcgctgaccgggcaagaaagtctcaatggactaagcgtcgtcatgacgccgggttgggataacgcaaacggcgtcaccggctggacgcgtaactgcaatattcaaagtgacagcgcattgcagcaagcctgcgaagatgtcttccgctttgatgacgccaactaa

SEQ ID NO: 3809 - DNA, 1386 bp, Escherichia coli
atgaatattccacagctcactgccctgtgtctgcgttatcagggagtcttgctggatgccagcgaagaggtggttcatgttgcggtagtcgatgcaccttcgcatgagctactggacgcattgcatttcgctaccaccaaacgtattgagatcacctgctggacacgccaacaaatggaaggtcacgccagtcgcacacaacagacattgcccgtagctgttcaggagaagcatcagcccaaagcagagttgctgactcgaacgttacaatctgcgctagaacaacgcgcgtctgatattcatatcgaaccagcggacaatgcctaccgcatccgcttgcgtatcgacggcgtattgcatcctttaccggacgtttcaccggatgccggagtcgcattaaccgccagattaaaagtgctgggaaacctggatattgcggaacatcgcctgccgcaggacgggcaattcactgtcgaactggcaggaaacgccgtctcatttcgtattgcgaccttagcatgtcggggtggtgaaaaggtggtattaaggttgttacagcaggtgaaccaggcactggatgttaacacgcttggaatgcagccgtcacaactggtggactttgctcatgccttgcaacaaccacagggactggtgctggtaactggccctacaggcagcggcaaaacggtcacgctttatagtgccctgcaaatgctgaataccgctgacattaatatttgtagcgtcgaagatccggttgagatccccatagccggactaaaccagacgcaaatccattcgcgtgccggactcacctttcagggcgttttgcgtgcgttattgcgccaggatcctgacgtcataatgatcggagagatccgcgatggcgaaacggcagaaattgccattaaagccgcgcaaaccggtcacctggtgttgtctaccctacacactaattccacctgcgaaacgctggtacgtttacagcaaatgggagtcgcccgctggatgctatcatcggcgcttacgctggtaatagcccagcgtctggtacgcaaactttgcccgcattgtcgccggcagcaaggggagcccatccatattccagacaatgtatggccgtcgccgctgccccactggcaggcacccggttgtgtacattgctaccacggtttttatggtcgcacggccttatttgaagttctgcccataacaccggtcatacgtcagcttatttccgctaataccgacgttgaatcgctggaaacgcacgcccgacaggcgggtatgcgaacgctttttgaaaacggctgcctggccgtggagcaaggcttaaccacctttgaagagttaatccgcgtattggggatgccgcatggcgagtaa

SEQ ID NO: 3810 - DNA, 1203 bp, Escherichia coli
atggcgagtaagcaactctggcgctggcatggcataaccggcgacggcaatgcgcaagatgggatgctatgggcagagagccgtgctttgctgctcatggcactacagcaacagatggttaccccactaagcctgaagcgaatcgccatcaattctgcgcagtggcgaggagataaaagcgcggaagtcattcatcaactggcgacgctactcaaagccgggttaacgctttctgaagggctggctctgctggcggaacagcatcccagtaagcagtggcaagcgttgctgcaatcactggcgcacgatcttgaacagggcgttgccttttccaatgccttattaccctggtcagaggtatttccgccgctctatcaggcgatgatccgcacgggtgaactgaccggtaagctggatgaatgctgctttgaactggcgcgtcagcaaaaagcccagcgtcagttgatcgacaaagtgaaatcagcgttacgttatcccattatcattttagcgatggcaatcatggtggttgtggcaatgctgcattttgtactgccggagtttgccgctatctataagacctttaacactccgctaccggcgctaacgcaggggatcatgacgctggcaagttttagtggcgaatggggttggttactggtgctattcggctttctgctggcgatagccaataagctgctgatgcgccacccaaccaggcttatcgcacggcagaaattgctgttacgcatcccgattatgggttcactgatgcggggacaaaaactcacgcagatctttacgattctgacactgacacaaagtgcaggcatttcttttttacagggcgttgagagcgtcagagaaacaatgcgctgcccgtactgggtgcaacttctgacacaaatccagcacgatatcagtaacggtcaccccatctggctggcgctaaaaaatgccggtgagtttagcccgctctgtttgcaattagtgagaacaggagaggcatccggctcgctggatctcatgttagacaacctcgcccatcatcatcgggataacacaatggcgctggcggataacctcgcagccttactggaaccggcgttgctgatcataacgggaggaattatcggtacgctggtggtggcaatgtatctgccaattttccatttaggcgatgcgatgagtggaatgggataa

SEQ ID NO: 3811 - DNA, 1044 bp, Escherichia coli
atgcgtattgaagaagatctgaagttaggttttaaagacgttctcatccgccctaaacgctccactcttaaaagccgttccgatgttgaactggaacgtcaattcaccttcaaacattcaggtcagagctggtccggcgtgccgattatcgccgccaatatggacaccgtaggcacattttctatggcctctgcgctggcttcttttgatattctgactgctgtgcataaacactattctgtcgaagagtggcaagcgtttatcaacaattcttccgctgatgtgctgaaacatgtgatggtttctaccggcacgtctgatgcggatttcgaaaaaactaaacagattctcgacctgaacccggcattaaatttcgtttgtattgacgtggcgaatggttattccgaacacttcgtgcagttcgttgcgaaagcgcgtgaagcgtggccgaccaaaaccatttgtgcaggcaacgtagtgactggtgaaatgtgtgaggagcttatcctctccggtgccgatatcgttaaagttggcattggcccaggttctgtttgtacaactcgcgtcaaaacaggcgtcggttatccgcaactttctgcggtgatcgaatgcgccgatgctgcgcacggtctgggcggaatgatcgtcagcgatggcggctgcaccacgccgggcgatgtcgcgaaagcctttggcggcggtgccgatttcgtaatgcttggcggcatgctggcgggccacgaagagagcggcggtcgcatcgttgaggagaacggcgagaaatttatgttgttctacggcatgagctcagagtctgcgatgaaacgtcacgttggcggcgttgcggaatatcgcgcagcagaaggtaaaaccgttaagctgccgctgcgaggcccggttgaaaataccgcgcgtgatattttgggcggcctgcgttcagcttgtacatacgttggggcttcacgcctgaaagaactgaccaagcgcaccacgtttatccgtgtgcaggaacaagaaaaccgcatcttcaacaacctgtaa

SEQ ID NO: 3812 - DNA, 621 bp, Escherichia coli
atgaggtatatagttgccttaacgggaggcattggcagtggcaagagtaccgttgccaatgcgtttgctgatctcggaattaacgtcattgatgccgatattattgcgcgtcaggtggttgaaccaggtgcacctgcgctacatgccattgctgatcactttggcgctaacatgattgctgctgatggaacattgcagcgccgggccttgcgcgagcggatcttcgccaacccggaagagaaaaactggcttaacgccctgctgcatccgctgattcagcaagagacgcaacaccagatccagcgagctacttccccctatgtactatgggttgtgccattgctggtagaaaactcactgtataaaaaagcgaatcgagtgctggtggtggatgtcagcccagaaacgcaacttaagcgcaccatgcagcgcgacgatgtaactcgcgagcatgtcgaacaaatccttgctgctcaggcaacgcgcgaagctcgccttgccgtggcagatgacgtcattgataataacggcgcaccggatgctatcgcatcggatgttgcccgcctgcacgcacactatttgcagcttgcgtcgcagtttgtctcacaggaaaaaccgtaa

SEQ ID NO: 3813 - DNA, 744 bp, Escherichia coli
atgcagacccaggtcctttttgaacatccactaaatgaaaaaatgcgtacatggctgcgcattgagtttttgattcagcaactcaccgttaatttacccatcgttgaccacgctggcgcgctgcatttcttccgtaatgtcagcgaattactggatgttttcgagcgcggcgaagtccgcactgagctgttgaaagaacttgaccggcagcaacgtaaactccagacctggattggcgtgcccggcgtggaccagagccgtattgaggcattaattcagcagttaaaagcggcggggagcgtattaatctccgcgccgcgtatcgggcaatttctacgtgaagatcgtttgattgctctggtgcgtcagcgactgagcatcccgggcggctgttgcagctttgatttacctacattgcacatttggctgcatctaccccaggcgcagcgcgacagccaggtagaaacctggattgccagcctgaacccgcttacccaggcacttaccatggtgctggatttaattcgccagtcggcccccttccgtaaacaaaccagcctgaatggtttttatcaggataacggtggcgatgccgacttgctgcgcctgaatatgtcgctcgattcacagctttatccgcaaatttccggtcataagagccgttttgccattcgttttatgccgctggacagtgaaaacggacaggtaccagaacgtctggatttcgaactggcctgttgctaa

SEQ ID NO: 3814 - DNA, 198 bp, Escherichia coli
atgtcagaaactattacggtgaattgcccaacctgcgggaaaacggtggtgtggggtgaaatcagcccgtttcggccattttgctccaaacgttgtcagctgattgacctcggagaatgggctgctgaagaaaaacgaatccccagcagtagcgatctttccgaaagcgatgactggagcgaagagccaaagcagtga

SEQ ID NO: 3815 - DNA, 546 bp, Escherichia coli
gtgaaaacattaattcttttctcaacaagggacggacaaacgcgcgagattgcctcctacctggcttcggaactgaaagaactggggatccaggcggatgtcgccaatgtgcaccgcattgaagaaccacagtgggaaaactacgaccgtgtggtcattggtgcttctattcgctatggtcactaccactctgcgttccaggaatttgtcaaaaagcatgcgacgcgactgaattcgatgccgagcgccttttactccgtaaacctggtggcgcgtaaaccggagaagcgtactccacagaccaacagctacgcgcggaagtttctgatgagttcacaatggcgtcccgatcgctgtgccgtcattgccggggcgctgcgttacccacgttatcgctggtacgaccgttttatgatcaagctgattatgaagatgtcaggcggtgaaacggatacgcgcaaagaagttgtctataccgattgggagcaggtggcgaatttcgcccgagaaatcgcccatttaaccgacaaaccgacgctgaaataa

SEQ ID NO: 3816 - DNA, 1452 bp, Escherichia coli
atgcattttcgcgccattacccgaatcgttggactactggtcatcttattttcagggaccatgattatccctgggctggtagcactcatctaccgggatggagcgggccgcgcttttacccagaccttttttgtcgccctcgccattggctctatgctttggtggccgaaccgcaaagagaagggcgaactgaaatcccgtgaggggtttctgatagtggtgctgttctggaccgtgctgggtagcgtcggtgcgctcccttttatcttctcggaaagcccgaacctcacgattaccgatgcgttttttgaatctttctctggcctgaccaccacgggggccactacgctggtggggctggattcgctccctcatgccatcctcttttatcgccagatgctgcaatggtttggcggtatggggatcatcgtgctggcggttgcgatactgcctatcctcggcgtgggtgggatgcagctctatcgcgcagaaatgcccggcccgctgaaagataacaaaatgcgcccgcgaattgcggaaacggcgaaaaccctgtggttgatttatgtcttgctgaccgtcgcctgtgcgctggcgttgtggtttgctggaatggatgcctttgatgccatcggccatagctttgcgaccatcgctattggcggcttctcgacacatgatgccagtatcggttatttcgacagcccgactattaacactatcattgctatcttcctgctgatctctggctgtaactacggtctgcacttttcactgttaagtgggcgtagtctgaaggtttattggcgcgatccggaatttcgcatgtttatcggcgtacagttttcactggtggttatttgtacactcgtactgtggtttcataatgtctacagttcggcgctgatgacaattaaccaggcgtttttccaggtggtgtcgatggcgacaaccgccgggtttacgactgacagcattgcccgctggccgctctttttgccggtactgctcttatgttcagcttttatcggcggttgtgccgggtcaacgggcggtggcctgaaagtgatccgcatcctgctgctgtttaagcaggggaaccgtgagctgaaacgactggtgcatccgaacgccgtctacagcattaagctggggaatcgcgcactgccggaacgtatcctcgaagccgtttggggatttttctccgcctatgcattggtgtttattgtcagtatgctggcgattatcgccacgggcgtggatgacttttctgcctttgcctcggttgttgcaacattgaataacctggggccagggcttggcgtggttgctgataactttaccagtatgaacccggtggctaaatggatcctgattgccaacatgctgtttggtcgtctcgaggtctttacattgctggtgctctttaccccgactttctggcgtgaatga

SEQ ID NO: 3817 - DNA, 528 bp, Escherichia coli
atggaaagctggttaattcctgcggcaccggtcacggtcgttgaagagatcaaaaagagccgcttcattacgctgttggcgcataccgatggcgttgaggcggcaaaagcgtttgttgaatcggtgcgggcagaacaccccgatgcccggcaccattgcgtggcgtgggtggcgggtgcgccggatgattctcaacagctgggtttctctgacgacggggagccggcgggaacggcaggtaaaccgatgctcgcccaactaatgggcagcggcgtgaatcaggcgctgcgccagctaacgacccaacgcaagacaccattaaccgaatatactttgcaatgtgaatatagtcagttaaccggcattgaagcgttgctggggcagtgtgacggcaaaattatcaacagtgattatcaggcattcgttctgctgcgggtggcgcttccggcggcgaaagtggctgaattttccgcaaagctggcggattttagccgtggttcattgcaattgttagcgattgaagaataa

SEQ ID NO: 3818 - DNA, 1332 bp, Escherichia coli
atggaatcactggcctcgctctataaaaatcatatagctaccttacaggaacggactcgcgatgcgctggcgcgcttcaagctggatgcgttacttattcactccggcgaactgttcaacgtttttctcgacgatcatccctatccgtttaaagtgaacccgcaattcaaagcgtgggtgccggtaactcaggtgccaaactgctggctgctggtggatggcgtgaataagccgaaactgtggttctatctgccggttgattactggcacaacgtcgaaccgctgccgaactccttctggactgaagatgtagaagtgatcgcgctgccgaaagccgatggcattggtagtctgttgcctgctgcgcgcggcaatatcggttatatcggtccggtgccagaacgtgcgctgcaactgggtattgaggccagcaatatcaacccgaaaggggtgatcgactacctgcattactatcgctccttcaaaaccgagtacgaactggcctgtatgcgtgaagcgcagaaaatggcggtcaacggtcatcgcgcggcagaagaagcgttccgttctggcatgagcgagttcgatatcaacattgcctatctgaccgcgaccggtcatcgtgataccgacgtaccttatagcaacattgtggcgcttaacgaacacgctgcggtgttgcattacaccaaactggaccaccaggcaccggaagagatgcgcagcttcctgctggatgccggggccgaatataacggctatgcggctgatctaacccgtacctggtcggcaaaaagcgacaacgactacgcacagctggtgaaagacgtaaatgatgagcaactggcgctgatcgccaccatgaaagcaggcgtcagctatgtggattaccatatccagttccatcagcgcatcgccaaactgctgcgtaaacatcaaatcatcaccgatatgagtgaagaagcgatggtcgaaaacgatctcaccggaccgtttatgccgcacggtatcggccatccgctgggcctgcaggtgcatgacgtagccggttttatgcaggatgatagcggtacgcacctcgcggcaccggcaaaatatccgtacctgcgctgcacccgtattctccagccgggcatggtgttaaccatcgaaccgggtatctacttcatcgaatcgcttctggcaccgtggcgtgaagggcagttcagcaaacacttcaactggcagaaaattgaagcactgaaaccgttcggcggcattcgtatcgaagacaacgtggtgattcacgaaaacaacgtggaaaacatgacccgggatctgaaactggcgtga

SEQ ID NO: 3819 - DNA, 2190 bp, Escherichia coli
atgctttacaaaggcgacaccctttaccttgactggctggaagatggcattgccgaactggtatttgataccccaggttcagttaataaactcgacactgcgaccgtcgccagcctcggcgaggccatcggcgtgctggaacagcaatcagatctaaaaggactgctgctacgttcgaacaaagcagcctttatcgtcggtgctgatatcaccgaatttttgtccctgttcctcgttcctgaagaacagttaagtcagtggctgcactttgccaatagcgtgtttaatcgcctggaggatctgccggtgccgaccattgctgctgtcaacggctatgcgctgggcggtggctgcgaatgcgtgctggcgaccgattatcgtctggcgacgccggatctgcgcatcggtctgccggaaactaaactgggcatcatgccgggctttggcggttctgtacgtatgccacgtatgctgggcgctgacagtgcgctggaaatcattgccgccggtaaagatgtcggcgcggatcaggcgctgaaaatcggtctggtggatggtgtagtcaaagcagaaaaactggttgaaggggcgatggcgattttacgccaggccattaacggcgacctcgactggaaagcgaaacgtcagccgaagctggaaccgctaaaactgagcaagattgaagccaccatgagtttcaccatcgctaaagggatggtcgcacaaacggcggggaaacattatccggcccccatcaccgcagtaaaaaccattgaagcggcggcccgttttgttcgtgaagaagccttaaatctggaaaacaaaagttttgtcccgctggcgcataccaacgaagctcgcgcactggtcggcattttccttaacgatcaatatgtaaaaggcaaagcgaagaaactcaccaaagacgttgaaaccccgaaacaggccgctgtgctgggcgcaggcattatgggtggcggcatcgcttaccagtctgcgtggaaaggcgtaccggttgtcatgaaagatatcaacgacaagtcgttaaccctcggcatgaccgaagccgcgaaactgctgaacaagcagcttgggcgcggcaagatcgatggtctgaaactggctggcgtgatctccacgatccacccaacgctcgactacgccggatttgaccgcgtggatgttgtggtagaagcggttgtcgaaaacccgaaagtgaaaaaagccgtgctggcagaaaccgagcagaaagtacgcccggataccgtactggcgtctaacacttcaaccattcctatcagcgaactggccaacgcgctggaacgtccggaaaacttctgcgggatgcacttctttaacccggtccaccgaatgccgttggtagaaattattcgcggcgagaaaagctccgacgaaaccatcgcgaaagtcgtcgcctgggcgagcaaaatgggcaaaacgccgattgtggttaacgactgtcccggcttcttcgtcaaccgtgtactgttcccctatttcgccggtttcagccagttgctgcgcgacggcgcggatttccgcaagatcgacaaagtgatggaaaaacagtttggctggccgatgggtccggcatatctgctggatgttgtgggcattgacaccgcgcatcacgcccaggcagtcatggcagcaggcttcccgcagcggatgcagaaagattatcgcgatgccatcgacgcgctgtttgatgccaaccgctttggtcagaagaacggactcggtttctggcgttataaagaagacagcaaaggtaagccgaagaaagaagaagatgtcgtcgttgacgacctgctggcaaaagtgagccagccgaagcgcgatttcagcgaggaagagattatcgcccgcatgatgatcccgatggtcaacgaagtggtccgctgtctggaagagggcattatcgccactccggcagaagcggatatggcgctggtctacggcctgggcttccctccgttccacggcggcgcgttccgctggctggacaccctcggcagcgcaaaatacctcgatatggcacagcaatatcagcacctcggcccgctgtatgaagtaccggaaggtctgcgtaataaagcacgtcataacgaaccgtactatcccccggttgagccagcccgtccggttggcgacctgaaaacggcttaa

SEQ ID NO: 3820 - DNA, 1164 bp, Escherichia coli
atggaacaggttgtcattgtcgatgcaattcgcaccccgatgggccgttcgaagggcggtgcttttcgtcacgtgcgtgcggaagatctctccgctcatttaatgcgtagcctgctggcgcgtaacccggcgctggaagcagcggccctcgacgatatttactggggttgtgtgcagcaaacactggagcagggttttaacatcgcccgtaacgcggcgctgttggcagaagtgccgcactctgtcccggcggtgaccgtcaatcgcttgtgtggttcatccatgcaggcactgcatgacgcagcacggatgattatgactggcgatgcgcaggcatgtctggttggcggcgtggagcatatgggccatgtgccaatgagccacggtgtcgattttcaccccggcctgagccgtaatgtcgccaaagcggcgggcatgatgggcttaacggcagaaatgctggcgcgtatgcacggtatcagccgtgaaatgcaggatgcctttgccgcgcgatcacatgctcgcgcctgggccgccacgcaatcaggcgcatttaaaaatgaaatcatcccgaccggtggtcacgatgccgacggcgtattgaagcagtttaattacgacgaagtgattcgcccggaaaccaccgtggaagccctcgccacactgcgtccggcgtttgatcccgtcagcggtacggtaacggcgggtacatcttctgcgctttccgatggcgcagctgccatgctggtgatgagtgaaagccgcgcccgtgacttaggtcttaagccgcgcgcctgcgtgcgttcgatggcggtcgttggttgtgacccatctattatgggttatggtccggttccggcctcgaagctggcgctgaaaaaagcggggctttctgccagcgatatcggcgtattcgagatgaacgaagcctttgccgcgcagatcctgccgtgtattaaagatctcgggctaatggagcagattgacgagaagatcaacctcaacggtggcgcgatcgcgctgggtcatccgctgggttgttccggtgcgcgtatcagcaccacgctgctgaatctgatggaacacaaagacgtccagtttggtctggcgacgatgtgtatcggtctgggtcagggcattgcaacggtgtttgagcgggtttaa

SEQ ID NO: 3821 - DNA, 702 bp, Escherichia coli
atgacaaccttaagctgtaaagtgacctcggtagaagctatcacggataccgtatatcgtgtccgcatcgtgccagacgcggccttttcttttcgtgctggtcagtatttgatggtagtgatggatgagcgcgacaaacgtccgttctcaatggcttcgacgccagatgaaaaagggtttatcgagctgcatattggcgcttctgaaatcaacctttacgcgaaagcagtcatggaccgcatcctcaaagatcatcaaatcgtggtcgatattccccacggagaagcgtggctgcgcgatgatgaagagcgtccgatgattttgattgcgggcggcaccgggttctcttatgcccgctcgattttgctgacagcgttggcgcgtaacccaaaccgtgatatcaccatttactggggcgggcgtgaagagcagcatctgtatgatctctgcgagcttgaggcgctttcgttgaagcatcctggtctacaagtggtgccggtggttgaacaaccggaagcgggctggcgtgggcgtactggcaccgtgttaacggcggtattgcaggatcatggtacgctgacagagcatgatatctatattgccggacgttttgagatggcgaaaattgcccgtgacctgttttgcagcgagcgtaatgcgcgggaagatcgcctgtttggcgatgcgtttgcatttatctga

SEQ ID NO: 3822 - DNA, 1494 bp, Escherichia coli
atggacgccatgaaatataacgatttacgcgacttcttgacgctgcttgaacagcagggtgagctaaaacgtatcacgctcccggtggatccgcacctggaaatcactgaaattgctgaccgcactttgcgtgccggtgggcctgcgctgttgttcgaaaaccctaaaggctactcaatgccggtgctgtgcaacctgttcggtacgccaaagcgcgtggcgatgggcatggggcaggaagatgtttcggcgctgcgtgaagttggtaaattattggcgtttctgaaagagccggagccgccaaaaggtttccgcgacctgtttgataaactgccgcagtttaagcaagtattgaacatgccgacaaagcgactgcgtggtgcaccctgccaacaaaaaatcgtctctggcgatgacgtcgatctcaatcgcattcccattatgacctgctggccggaagatgccgcgccgctgattacctgggggctcaccgtaacgcgcggcccgcataaagagcggcagaatctgggcatttatcgccagcagctaattggtaaaaacaaactgattatgcgctggctgtcgcatcgcggcggcgcgttggattatcaggagtggtgtgcggcgcatccgggcgaacgtttcccggtttctgtggcgctgggtgccgatcctgccacgattctcggtgcagtcacccccgttccggatacgctttcagagtatgcgtttgccggattgctgcgcggtaccaagaccgaagtggtgaagtgtatctccaatgaccttgaagtgcccgccagtgcggagattgtgctggaagggtatatcgaacaaggcgaaactgcgccggaagggccgtatggcgaccacaccggttactataacgaagtcgatagttttccggtatttaccgtgacgcatattacccagcgtgaagatgcgatttatcattccacctataccgggcgtccgccagatgaacctgcggtactgggtgtagcactgaacgaagtgttcgtgccgattctgcaaaaacagttcccggaaattgtcgatttttatctgccgccggaaggctgttcttatcgtctggcggtagtgacgatcaaaaaacagtacgccggacacgcgaagcgcgtcatgatgggcgtctggtcgttcttacgccagtttatgtacactaaatttgtgatcgtttgcgatgatgacgtcaacgcccgcgactggaacgatgtgatttgggcgattaccacccgtatggacccggcgcgggatactgttctggtagaaaatacgcctattgattatctggattttgcctcgcctgtctccgggctgggttcaaaaatggggctggatgccacgaataaatggccgggtgaaacccagcgtgaatggggacgtcccatcaaaaaagatccagatgttgtcgcgcatattgacgccatttgggatgaactggctatttttaacaacggtaaaagcgcctga

SEQ ID NO: 3823 - DNA, 489 bp, Escherichia coli
atgcaatcctggtatttactgtactgcaagcgcgggcaacttcaacgtgcccaggaacacctcgaaagacaggctgtgaattgcctggcaccgatgatcaccctggaaaaaatcgtgcgtggcaaacgtactgcagtcagtgagccattgttccccaactacttgtttgtggagttcgatccggaagtgattcataccacgactatcaacgcgacccgcggtgtcagccacttcgtgcgctttggcgcgtcgccagcgatagtcccatcggcggtgattcatcagttatcagtgtataaaccgaaagatattgtcgatccatcgacgccgtatcctggtgataaagtgattattactgaaggcgcattcgaaggttttcaggccattttcaccgagccagacggcgaggctcgctccatgctattgctgaatcttattaataaagagattaagcacagtgtgaagaacaccgagttccgcaaactctaa

SEQ ID NO: 3824 - DNA, 783 bp, Escherichia coli
atgtttgatatcggcgttaatttgaccagctcgcaatttgcgaaagaccgtgatgatgttgtagcgcgcgcttttgacgcgggagttaatgggctactcatcaccggtaccaatctgcgtgaaagccagcaggcgcaaaagctggcgcgtcagtattcgtcctgttggtcaacggcgggcgtacatcctcacgacagcagccagtggcaagctgtgactgaagaagcgattattgagctggccgcgcagccagaagtggtggcgattggtgaatgtggtctcgactttaaccgcaacttttcgacgccggaagagcaggaactcgcttttgttgcccagctacgcattgccgcagaattaaacatgccggtatttatgcactgtcgcgatgcccacgagcggtttatgacattgctggagccgtggctggataaactgcctggtgcggttcttcattgctttaccggcacacgcgaagagatgcaggcgtgcgtggcgcgtggaatttatatcggcattaccggttgggtttgcgatgaacgacgcgggctggagctgcgggaattgttgccgttgattccggcggagaaattgctgatcgaaactgatgcgccgtatctgctccctcgcgatctcacgccaaagccatcatcccggcgcaacgagccagcccatctgccccatattttgcaacgtattgcgcactggcgtggagaagatgccgcatggctggctgccaccacggatgctaatgtcaaaacactgtttgggattgcgttttag

SEQ ID NO: 3825 - DNA, 777 bp, Escherichia coli
atgtctgtagaagatactcaaccgcttatcacgcatctgattgagctgcgtaagcgtctgctgaactgcattatctcggtgatcgtgatattcctgtgtctggtctatttcgccaatgacatctatcacctggtatccgcgccactgatcaagcagttgccgcaaggttcaacgatgatcgccaccgacgtggcctcgccgttctttacgccgatcaagctgacctttatggtgtcgctgattctgtcagcgccggtgattctctatcaggtgtgggcgtttatcgccccagcgctgtataagcatgaacgtcgcctggtggtgccgctgctggtttccagctctctgctgttttatatcggcatggcgttcgcctactttgtggtctttccgctggcatttggcttccttgccaataccgcgccggaaggggtacaggtatccaccgacatcgcgagctatttaagcttcgttatggcgctgtttatggcgtttggtgtctcctttgaagtgccggtggcaattgtgctgctgtgctggatggggattacctcgccagaagacttacgcaaaaaacgcccgtatgtgctggttggtgcattcgttgtcgggatgttgctgacgccgccggatgtcttctcgcaaacgctgttagcgatcccgatgtactgcctgtttgaaatcggtgtcttcttctcacgcttttacgttggtaaagggcgaaaccgggaagaggaaaacgacgctgaagcagaaagcgaaaaaactgaagaataa

SEQ ID NO: 3826 - DNA, 516 bp, Escherichia coli
gtgtttgatatcggttttagcgaactgctattggtgttcatcatcggcctcgtcgttctggggccgcaacgactgcctgtggcggtaaaaacggtagcgggctggattcgtgcgttgcgttcactggcgacaacggtgcagaacgaactgacccaggagttaaaactccaggagtttcaggacagtctgaaaaaggttgaaaaggcgagcctcactaacctgacgcccgaactgaaagcgtcgatggatgaattacgccaggctgcggagtcgatgaagcgttcctacgttgcaaacgatcctgaaaaggcgagcgatgaagcgcacaccatccataacccggtggtgaaagacaatgaaactgcgcatgaaggcgtaacgcctgctgctgcacaaacgcaggccagttcgccggaacagaagccagaaaccacgccagagccggtggtaaaacctgctgcggacgctgaaccgaaaaccgctgcgccttccccttcgtcgagtgataaaccgtaa

SEQ ID NO: 3827 - DNA, 270 bp, Escherichia coli
atgggtggtatcagtatttggcagttattgattattgccgtcatcgttgtactgctttttggcaccaaaaagctcggctccatcggttccgatcttggtgcgtcgatcaaaggctttaaaaaagcaatgagcgatgatgaaccaaagcaggataaaaccagccaggatgctgattttactgcgaaaactatcgccgataagcaggcggatacgaatcaggaacaggctaaaacagaagacgcgaagcgccacgataaagagcaggtgtaa

SEQ ID NO: 3828 - DNA, 1641 bp, Escherichia coli
atgacgccaggtgaagtacggcgcctatatttcatcattcgtacttttttaagctacggacttgatgaactgatccccaaaatgcgtatcaccctgccgctacggctatggcgatactcattattctggatgccaaatcggcataaagacaaacctttaggtgagcgactacgactggccctgcaagaactgggaccggtatggatcaagttcgggcagatgttatcaacccgccgcgatctttttccgccgcatattgccgatcagctggcgttattgcaggacaaagtcgctccgtttgatggcaagctggcgaagcagcagattgaagctgcaatgggcggcttgccggtagaagcgtggtttgacgattttgaaatcaagccgctggcttctgcttctatcgcccaggttcataccgcgcgattgaaatcgaatggtaaagaggtggtgattaaagtcatccgcccggatattttgccggtcattaaagcggatctgaaacttatctaccgtctggctcgctgggtgccgcgtttgctgccggatggtcgccgtctgcgcccaaccgaagtggtgcgcgagtacgaaaagaccttgattgatgaactgaatttgctgcgggaatctgccaacgccattcagcttcgacgcaattttgaagacagcccgatgctctacatcccggaagtttaccctgactattgtagtgaagggatgatggtgatggagcgtatttacggcattccggtgtctgatgttgcgacgctggagaaaaacggcaccaacatgaaattgctggcggaacgcggcgtgcaggtgttcttcactcaggtctttcgcgacagctttttccatgctgatatgcaccctggcaacatcttcgtaagctatgaacacccggaaaacccgaaatatatcggcattgattgcgggattgttggctcgctaaacaaagaagataaacgctatctggcggaaaactttatcgccttctttaatcgcgactatcgcaaagtggcagagctacacgtcgattctggttgggtgccaccagataccaacgttgaagagttcgaatttgccattcgtacggtctgtgaacctatctttgagaaaccgctggccgaaatttcgtttggacatgtactgttaaatctgtttaatacggcgcgtcgcttcaatatggaagtgcagccgcaactggtgttactccagaaaaccctgctctacgtcgaaggggtaggacgccagctttatccgcaactcgatttatggaaaacggcgaagcctttcctggagtcgtggattaaagatcaggtcggtattcctgcgctggtgagagcatttaaagaaaaagcgccgttctgggtcgaaaaaatgccagaactgcccgaactggtttacgacagtttgcgccagggcaagtatttacagcatagtgttgataagattgcccgcgagcttcagtcaaatcatgtacgtcagggacaatcgcgttattttctcggaattggcgctacgttagtattaagtggcacattcttgttggtcagccgacctgaatggggcctgatgcccggctggttaatggcaggtggtctgatcgcctggtttgtcggttggcgcaaaacacgctga

SEQ ID NO: 3829 - DNA, 606 bp, Escherichia coli
atgccttttaaacctttagtgacggcaggaattgaaagtctgctcaacaccttcctgtatcgttcacccgcgctgaaaacggcccgctcgcgtctgttgggcaaagtgctgcgcgtggaggtaaaaggcttttcgacgtcattgattctggtgttcagcgaacgccaggtcgatgtactgggcgaatgggcaggcgatgctgactgcaccgttatcgcttacgccagtgtgttgccgaaacttcgcgatcgccagcagcttgccgcactgattcgcagtggtgagctggaagtgcagggtgatattcaggtggtgcaaaacttcgttgcgctggcagatctggcagagttcgaccctgcggaactgctggccccttataccggtgatatcgccgctgaaggtatcagcaaagccctgcgcggaggcgcaaagttcctgcatcacggcattaagcgccagcaacgttatgtggcggaagccattactgaagagtggcgtatggcacccggtccgcttgaagtggcctggtttgcggaagagacggctgccgtcgagcgtgctgttgatgccctgaccaaacggctggaaaaactggaggctaaatga

SEQ ID NO: 3830 - DNA, 756 bp, Escherichia coli
atggtggataagtcacaagaaacgacgcactttggttttcagaccgtcgcgaaggaacaaaaagcggatatggtcgcccacgttttccattccgtggcatcgaaatacgatgtcatgaatgatttgatgtcttttggcatacatcgtttgtggaaacgcttcacgattgattgcagtggcgtacgccgtggacaaactgtcctcgacctggcgggcggtacgggcgatctgacagctaaattctcccgcatggtgggcgaaaccggtaaagttgtccttgccgatatcaacgactcgatgctcaaaatgggccgcgaaaagctgcgcaatatcggtgtaattgggaatgtggaatatgtgcaggcaaacgccgaagcgctgccattcccggataacacctttgattgcattactatttcttttgggctgcgtaacgttaccgaaaaagagaaagcgctgcgttccatgtatcgcgtgctgaaacccggcggtcgcctgttggtgcttgaattctccaaacccattattgaaccgttaagcaaagcctacgacgcatattcattccatatcctgccgcgtatcggttcgctggtcgcaaatgatgccgatagctaccgttatctggcggaatccatccgtatgcatcctgatcaggatactctgaaagcaatgatggaagacgcaggctttgaaagcgttgactattacaacctgacggcaggtgttgtggcgctgcatcgtggttataagttctga

SEQ ID NO: 3831 - DNA, 1428 bp, Escherichia coli
gtggatatctcaatcatggtttacgcagttattgcgttggtgagcgtggcgattggctggctgattgccagttatcagcacgtgcagcaaaaggccgagcaattagccgaacgtgaagagatggtcgcggagttgagtgccgcaaaacagcaaattacccaaagtgagcactggcgtgctgagtgcgagttactcaataatgaagtgcgcagtctgcaaagcattaacacttcgctggaggccgatctgcgtgaagtaaccacgcggatggaagctgcgcagcaacatgctgacgataaaattcgccagatgattaacagtgagcagcgcctcagcgagcagtttgaaaacctcgccaaccgtattttcgagcacagcaatcgccgggttgatgagcaaaaccgtcagagtctgaacagcctgttgttgccgctacgtgaacaactggacggtttccgccgccaggtgcaggagagctttggtaaagaagcacaggaacgccatacgctggcgcatgaaatccgcaatctccagcagcttaatgcgcaaatggcccaggaagccattaacctcactcgcgccctgaaaggcgacaataaaacccagggcaactggggagaagtcgttctaacccgtgtgctggaggcgtctggtctgcgtgaagggtatgaatatcagactcaggtgagtatcgaaaccgacacgcgttcgcgaatgcaaccagatgtcattgtgcgcctgccgcagggcaaagatgtggtgatcgacgccaaaatgacgctggtcgcctatgaacgttatttcaacgccgaagatgactacacccgtgaaagcgcattgcaggaacatatcgcgtcggtgcgtaaccacatccgcttgctggggcgcaaagattatcaacaactgccagggctgcgaaccctggattacgtgctgatgtttatccctgttgagcccgcttttttactggcgcttgaccgccagccggagctgatcaccgaagcgttgaaaaacaatatcatgctggtaagcccgaccacgctgctggtggcgctgcgcactatcgccaacctctggcgctatgagcatcaaagtcgtaacgcccagaaaatagctgatcgcgccagcaagctgtacgacaaaatgcgcttgttcgtcgatgatatgtccgcgatcggtcaaagtctcgacaaagcgcaggacaactatcgtcaggcaatgaaaaaactctcttcaggtcgcggaaatgtgctggcgcaggcagaagcgtttcgcggtttaggggtagaaattaaacgcgagattaatcctgaattgactgatcaggcggtaaaccaggatgaggagtaccgtttacgatcagttccggagcagccgaatgatgaagcttatcaacgcgatgaagaatataatcaacagtcgcgctag

SEQ ID NO: 3832 - DNA, 768 bp, Escherichia coli
atggcagaaacctcttcaaccaccgctggcgcacaaacgttattacgcggactggcggttcttaatgctgtttataacggctgccatgacctgaaaagtatcggcgagttcaccggcacgacccggagcacaacccatcgtttagtcaccgttctggtggaacaacgctacctgcgccatgtcccaacgcagggctaccaactgggtgccaaactgatcgaattcggtgccagagcgctggaaagcacctcgctgtacgaagttgcccagcccgttttgcaacgccttgcccgttacaccctggacaccgtgcatcttgggatcgttgaaggcgacgaagtgctatatctggagaagatcaatagtcagcgcgggctggaaatgcgctcacgcccaggccatcgcatgccactggcgatcaccggcatcggcaaggcattgatcctcaaccgaacagaagaagagtggcgcacgctgtttaagacctgtggtgatgaaacaaaactgggcgaatttattcagagcatgcgtcgttatgccgccagtggttttgctcttgatctggaagagaacgaaccgactatccgttgcgttgcagcgccggtttacaacgcccgggatgagattgtggcggctatttctgtcgccagtaccactacgtatatgtcgctggcgcgtctggaagaactggcaccttacgtcaaatcctgtgcagaagagatatccgctgaactgggctggggtaagcacgtccgcaaagataaataa

SEQ ID NO: 3833 - DNA, 1005 bp, Escherichia coli
atgtcgggaaacacctcatttattgccctggactggggaacgtcatcgcttcgggcatggcgttttggcgactcaccaaatccacaagaaaaacgtgaattcccgtgggggatcatgaaattaccttcccaggcagcaacacgtgaggaagctttccacgatacatttttgcgtgtctgcggcgactggctggcacaaaccccatgcccggttctggcttgcggcatgatcggtagtgcgcaagggtggcaaccagcagcttatttaccttgcccggtcactctcgaggggttggcgaagcagttgacgcctgttatccaccagcagcagacaatgctgcacatcatccccggcgtgattaaagaaggtgaaatgcccgaagtgatgcgtggcgaagagacacaaatcttcggtgctatctcgatggaaccggccctgcaaaatgcgatccgtcagggtatgccagcgctgataggcttacccggcacacatgcgaaatgggcggtagttgaaaacaacaccattaccgatttccgaacctttatgacgggcgagttatttgatgttttatcccgccattcgattctcggtgccaccatgcatccgggagatgaaccgcactgggatgccttcgcccacgggctgacagcagcacaaaagcatcatcagaccggattattatcgacgctgttttcgacccgttcgcgcctgctgaccggtaatcttacgtcgtcctcacagggggattacctttccggattactgataggccatgaattatgtggtctggcatccagtttgctgcgtgatttacccgcgacaacaccgatcgccttaatcggtagcgccactctgaacagccgctattcacaagcattcagccacgtttttcccgacagacagctacacgccattcctaatgccactgaacagggattatggcgaatcgcccacgctgccgggctactctccaccaacgccagggaatgtacccatgccatttaa

SEQ ID NO: 3834 - DNA, 630 bp, Escherichia coli
atgccatttaatacgcttttgcaaaaaaccgggttagtcgccattttacgcggcgtgaaaccggatgagattgtcgccatcggtgaaaagctgtacgccgccggattccgcctgattgagatccccatgaactcgccggagccgttgcaaagtatcagtttgctgcgcgacgccctgcctaaggactgcctggtcggggccggcaccgtgctttcggtagagcaggtggtagcagttaaagaggctgggggccagataattgtgatgccgcattgcgatactgcggtgatccgtcgcgcccgtgcgctgggtatgtattgtgcgcctggcgtcgctacgcccaccgaagcttttgctgccattgaacatggcgccaatgccatcaagctgttcccggctgaacaaattacgccagaagtcaccaaagcctggcgtgcggttattccacaatccgttccgatgttaccggttggcggtatcacaccggaaaccatggcgcgttatctgagccacggcgcaaacggctttggcctcggttctgcgctatatcgccccggcatgacgccagagcaagtctatgaaaatgcagtactgtttatgaacgcatggaacaatttaaatagcaactaa

SEQ ID NO: 3835 - DNA, 975 bp, Escherichia coli
atgataaaacatcttaccttaccgaaaaaaatggctgcaatggtacttcttgcaggcgctgccctcagcattgcgcctgtacaggcggcttcctggccaaccaaacagatcgagttagtcgttccctacgcggccggaggcggtacggatctggttgcccgagcttttgctgatgccgccaaaaatcatttacccgtcagcatcggggttatcaataaacctggcggtggtggcgcaatcggcctgagtgaaatcgccgcagcccgccctaacggttacaaaatcggtttaggcacggttgaactgaccacccttcccagcctcggaatggtgcgttttaaaacaagcgacttcaaacccatcgcccgtctgaatgcggatccggcggctatcaccgtccgtgctgatgcgccgtggaatagctatgacgaatttatgacttacgccaaagcgaatcccggaaaagtacgcattggtaactcaggcaccggtgctatctggcatctggcggcggctgcactggaagacaaaacgggcgcgaagttttctcatgttccttatgacggcgcagcccctgccattacaggcctgttaggcgggcacattgaagcggtttccgtgagcccaggtgaagttatcaaccatgtgaaaggcggcaagctgaagacactggtggtgatggcggatgagcgaatgaaaaccatgcctgacgtaccgacgttaaaagagaagggcgttgatctctccatcggcacctggcgcggcctgattgtgtcgcaaaaaacgccgcaggatgtggtggatgttctggcgaaggcagcaaaagagacggctgaagagcctgcattccaggatgcactgcaaaagttgaatctcaactatgcatggcttgacgctgccagcttccagacccaaatcagcgaacaggaaaagtactttgacgagttgctgactcgcctgggcctgaaaaaataa

SEQ ID NO: 3836 - DNA, 507 bp, Escherichia coli
atgaacacaaaacagtctgttgctcaactcgccgtaccgcaccgcaagcgcctttcatctactgtggtggtggcgctgttactttgtgtggttgctggcgcggtgatgattaatgccgctgattttccagcaactgccattgaaacagaccccggtgcaagtgcctttcctaccttttatgcctgcgccctgattgtgctcgctgtcttactggtgatacgcgatcttttgctggcaaaaccagaaccttgcgccgacacgcaggaaaaaccggcattcaggaaaacggcaacaggaattgcggcaaccgcgttttatattgtggcgatgagctactgtggttatctcattaccacacctgttttcctcatcgccattatgacgttgatgggctacaggcgatgggtactcacaccgggtattgcgctgctgttaacggcaatcctctggttgctgtttgtcgaagcgttacaggtgccattgcctgtcggcacatttttcgaataa

SEQ ID NO: 3837 - DNA, 1491 bp, Escherichia coli
atgtttgaaagtgaacttttaacgcagggtttttcgacattactcaataatcctcaggcgctgctgtttgccacttttggggtgatgctgggtattgtgattggcgctctgcctggtctgacagcgaccatgggtgtggcgattttgctgcctttcacctacggcatggagcctgtttctggcttgttgatgatttgcggtgtcttttttggtggcgtctacggcggctctatcaccgcaattttgctcaaaattcccggaacgcctgccgccgctgccaccgctattgacggttatgagctaacgaaacagggaaaagccggactggcgttgagtgccgccacgttctcttcctttagtggcggaacgatcagtattatcgtgctgatgtttctctctccggtacttgccagttgggcgctgaaatttagtgcctcggagtccttcgccctggcaactttcgggctgagcattattgccagtatttccggtgagtcgttgattaaagggctgattgccggggttggcggattgctgatcgcaacgataggccttgatccaatgggcggttttccacggtttacaggtggatttgtggagctgatgaatgtgccatttatcccggtgatgattggtttatttgctgcttcagaagcattccgctctatggagcaaaatcagcaaattcgccagggtgcgaaggtggctatcggcagtctgttactgccctggcaaacactacgccgtatcgcattaactattttgcgctcatcaggattaggggtttttatcggcatgatccccggtgcgggggcggatattgcggcttttgttgcctataacgaaactcgtcgtttcagtaagacaccagaaaactttggtaagggggaaattaaggcggtggcctcctgtgaggcaggcgcgaatgcctgcaccggtggcgcattgttacctatgctgacgctggggatccctggcgatgcggtaaccgccatcatgctgggcgcgttaacattacaggggatgcagccaggcccactgatgtttaccgaccacggcgatatggtttatacgctgtttgtcggcatgatcttctgttacttcatgctgttagtgcttgggctgctctctttgaaagtcatcggcaacgtggtgaagatccccggcaatattctcacgccgatgatcctcgcactttgtgtggtcgggacttatgcactgaacaacagcctgtttgatgtcggcattatgttgattgcgggcgtagtgggctatttcatgcagaaaggaggatatccggcatcacccgtagtgctggcattgattatggggccaatggcggaaagtaattttcgccgtgcgctgtcgctttcagggggttcactggactttctgtatacccgaccgatcactctggcattgctaactctggcagcctttacgctactgacgccaataatccgcaaaataatgcgtttacggcgtcagtaa

SEQ ID NO: 3838 - DNA, 765 bp, Escherichia coli
atgtccaagtctgatgtttttcatctcggcctcactaaaaacgatttacaaggggctacgcttgccatcgtccctggcgacccggatcgtgtggaaaagatcgccgcgctgatggataagccggttaagctggcatctcaccgcgaattcaccacctggcgtgcagagctggatggtaaacctgttatcgtctgctctaccggtatcggcggcccgtctacctctattgctgttgaagagctggcacagctgggcattcgcaccttcctgcgtatcggcacaacgggcgctattcagccgcatattaatgtgggtgatgtcctggttaccacggcgtctgttcgtctggatggtgcgagcctgcacttcgcaccgctggaattcccggctgtcgctgatttcgaatgtacgactgcgctggttgaagctgcgaaatccattggcgcgacgactcacgttggcgtgacagcttcttctgataccttctaccctggtcaggaacgttacgatacttactctggtcgcgtagttcgtcactttaaagggtctatggaagagtggcaggcgatgggcgtaatgaactatgaaatggaatctgcaaccctgctgaccatgtgtgcaagtcagggcctgcgtgccggtatggtagcgggggttatcgttaaccgcacccagcaagagatcccgaatgctgagacgatgaaacaaaccgagagccatgcggtgaaaatcgtggtggaagcggcgcgtcgtctgctgaaataa

SEQ ID NO: 3839 - DNA, 810 bp, Escherichia coli
atggcaacaacacaacaatctggatttgcacctgccgcatcgcctctcgcttcgaccatcgttcagactccggacgacgcgattgtagcgggcttcacctctatcccttcacaaggggataacatgcctgcttaccatgccagaccaaagcaaagcgatggcccactgccagtggtcattgtagtgcaggaaatttttggcgtgcatgaacatatccgcgacatttgtcgccgtctggcgctggaggggtatctggctatcgcacctgaactttacttccgcgaaggcgatccgaatgattttgccgatatccccacgttgcttagcggtctggtagcaaaagtgcctgactcgcaggtgctggccgatctcgatcatgtcgccagttgggcttcccgcaacggcggcgatgttcatcgtttaatgatcaccggattctgctggggtggacgtatcacctggctgtatgccgcgcataatccacagctaaaagccgcagtggcgtggtacggcaaactgacgggcgataagtcgctgaattcaccgaaacaacctgttgatatcgcaaccgatcttaacgcgccggttctcggcttatatggcggccaggataacagcatttcgcaagagagcgtggaaacgatgcgccaggcgctgcgggcagcaaacgcgaaagcagagattatcgtgtacccggatgcagggcatgcgttcaacgccgattatcgcccgagctatcatgccgaatctgcgaaagacggctggcagcgaatgttggaatggtttacacagtatggtgttaaaaagtaa

SEQ ID NO: 3840 - DNA, 669 bp, Escherichia coli
atgacgcaatccatttttcaggctcaaccctttgaattaccttttgatccgcgcacaactgcactggtcatgatcgacatgcagcgtgactttgtcgaagcagggggcttcggtgaggcactgggcaatgatgtttcactggtacgcacggctatcgcaccatgtacagaggtgctggcagccgcacgtcaaaaaggaattatggttattcatactcgtgaaggccatcgtgcagacttaagcgactgcccgccagccaaactgacgcgcggcggaaaaacctttattggtgaaccaggaccgatgggacgcattctggtcagaggtgaagcaggtcatgacatcattcctgaactgtacccggtggcaggcgaaccggtgattgataagcctggcaaaggcgcgttttatcaaaccgacttacatctgattttgcaaaaccacggtatcaagacgctgatagtttgtggtgtaacaaccgaagtttgcgtaaccaccaccgtgcgcgaagcaaatgatcgtggctatgaatgcattatcccggaagattgtgtcggctcctatttcccggaattccagaaatacgcccttgagatgatcaaagcacaaggtgccattttcggttggattactgattccaaagccattattgcaggtctggaaggctaa

SEQ ID NO: 3841 - DNA, 861 bp, Escherichia coli
atggtacaggttacgctttgcgcatcgtcgttgggatatcttttcccgcagaatgaaacgcaagatttacgtctgcatagcgcttttaaacatgcggtaaatctgtattcagacgcgggaacattcatcactctgttgtgtgcgcaaacgtatctgaatctccctgatgctgccagagtctggctacctgaatgttgggactggcgaagagagattgcccattcagatcccattcagttaaccccaggcttgctgcggacacctcgattttgtgtggcgctcgataacgcaacgctctggcagtcgccatttgtggggagaatgctgacatttgaggcattccctttggttttccagcactacccaacgatggcatcgcaacggcttttattttgtctggagcataacgttcaaagcacattgcacctgccggatagtctcacgcaccagggattagcgattatggaacatccagatgcgctggaacgccaggtgccacaactgatcggctttggtaaaggcttaacgcccgatggagatgactatttgttgggctatctggcagcactctggttatggcaactccctgcaccacttgccgatcatcaataccggttgcagcaggcaattgatcaacatgcgcacaacaccacggatatcagtcgtcattatctggagcgtgcgcttcagggacatttttcagaaccgatttgccagttactcgcacaactggttgggagcgcatcggcaatgacaatcgcatcctgtgcagaacaggtcatgcaatttggcgcaacgtcaggagtagattgccttgcaggaatgctgcatggctttcgaaccctgaacaccatgaattga

SEQ ID NO: 3842 - DNA, 1560 bp, Escherichia coli
atgaaagttaaatataaagttttcagtaatctttatcaggactcagtttctctgatgcagatttccgcgcaaatcagcaagttgcccggtattcaacaggcctcggtcgtcatgggaacgcccaataatctcgaacaattgcgcgatgcgggtctgggtaacgaaatcaacgccagtcccaatgatttagtgattgcagtcatgggtgaagaagatatttgcaatgaagcactggcactggcccagcaacgtctgaccagcaaacccgatgatgaaacggatagtggcattaaaacaccggaaaaggtcagcctggaaatggcactggaagccgaacccgaagccaacctggcactcatttctgtaccgggagactacgccgccgccgaagcaattaaagcgttaaacctcggaatgaacgtgatgatgttcagcgataacgtcagtatcgggcaggaaaaatccatcaaaacgcttgcccgagaacgtcagcgcatcgtaatgggacctgactgtggaaccgccattgttaacggcattccgttaggcttcgctaatgtggtgaaacgcggagcaattggtgttattggcgcgtcaggcaccgggctacaggaagtgacttgccgaatcgaccagctcggagcgggtatttctcaggcgttgggaacaggcggacatgatctcagtgaagagattggtggaatatcgatgctcttcgctttagatgcgctggcgcaagacgatgaaactcgcgtgattgtgcttatatcaaaaccgccttcaccgatcgttgcccggactattctggagcgtgccgaggcttgtggaaaacccgtagtggtgaatttcctcggggcgaatccgcatgatctggaacgtcccaatatcactgcggccaccacacttgccagcgccgccgacatcgctgtggcgttactgaatgctcagccacttccggctgtcgaaaccgatgtaccctgcgacgatctcacaatgttacaaaacgcctgccagcgcctgccagcccatcgccaggcgatacgcggtgttttcgccggaggaaccttctgctacgaagcgcaacttatctgccaacaaaagggattcagcgcagcttccaatacgccagttgcgggtaatcgtgctctggcaaatatctggcaaagcgaagatcacacgttgatcgatatgggcgacgatgatttcacccgtggcaaaccgcatccaatgatcgacccaactctgcgcaatcaacgtctgctcaacgaactcaacgactcacacactgccgtcgtgttattcgacctggtacttggttatggcgcttccacgacgcctgccagcgaattactggaccaactttcacacatcgacatgaataacgcaccgttgctgattgcgcacgtttgcggaacggaagctgatccgcaaatacgcagtcagcagataagcgcactacaaaatgcaggggtcatcatcgccagcagcaatgcacaggcggcgctatgggccagcaccgttgcacagactcagttgcagaaaaaggggctaaacgcatga

SEQ ID NO: 3843 - DNA, 1476 bp, Escherichia coli
atgggccagcaccgttgcacagactcagttgcagaaaaaggggctaaacgcatgaataccttatttaatcagcctttgaaggttgtgaacgcgggactacacagttttgctgacaatattcaacatgccgggggaagcgcaattgcactcaactggcagccaccagcacaaggcgatattgacgctggattggatctggcatcgttgctacgtcatcccctggtagaaaatgccaaccaaatcgccatgacacgttatctcgaagcacaacccgtgctggtggatgtcatgcttgctaaagaggccattccagcaatggctgaacaaaaacgtattttgcactctggcccgccgattgcctgggaagagatgtgtggtccggtaaaaggggcgattattggtgccatgctgtacgaaggttgggccaccagccagcaagacgcagaaaaccagataaacgcaggcgaaatcgaccttgccccttgtcatcattatcacgcggttggcccaatggcaggcatcatcagcccgtcgatgccgttatgggtggtagaaaacaaaaccaacggccaccgtacttttagcaatttcaatgaaggtctgggtaaggttctccgttttggcgccaataacgatgaagttctcaatcgtctggcctggatgcgcgatgaactgacgccggcaatgaaagcagcaatcgcacaacacggcgagctggaactcaagccattaatggcgcaggcgctgcatatgggggatgaagttcataaccgcaatgctgccgctaccggtttgctgattaagcgcctgctcccggcattgctggcctgctctcttccacaggaacatatccagcgcgtcgtggcatttatcaccggtaacgatcacttcttcctcaatctgtcgatggccgcctgtaaagcaatgatggatgccgccgccaatgtaccgttcagttcaatggttacggtgatggcgcgtaacggggtgaattttggtattcggatttccggtactggcgatcgctggttccaggctcctgccaatgccgttgaaggtctgttcttccccggatttggcgttgacgacgctgctgctgacctgggtgatagcgcaattactgaaaccgcaggtgtgggtggcttcgcgatggcgtcgtctccggcgatcgtcaaatttgtgggaggcacccctgccgatgccaccaataacagccgtcggatgcaagcaatcaccctcggcggtaaccccgcatttacacttccagccctcaattttgcccccaccgcagcagggattgatgcgcgtaaagtgaccgatcgcggcattttaccggtcatcaatacgggtatcgcccacaaacaagcgggggtcgggcaaattggtgccgggatcaccactgcgccgatggcctgttttgtcgccgctgtacgtgcactggcggagatcgtcgcaaaggagaaccatcatggttaa

SEQ ID NO: 3844 - DNA, 957 bp, Escherichia coli
atggttaagccactggctgtcgtcgcggttggcggcaatgcgctcattcaggacgagcaacgcaatagtattcccgatcaatatgttgcagtgatggaaagcgtgcagcatatcgttgatatggttgaagccggatgggacctggtgctaacccacggtaatggcccgcaggtgggctttattctgcgccgctctgaactcgccagtaacgaagtttctccggttccacttgattacgccgtgggtgatacacaaggtgcaattggctacatgttccagaaagcgctgcataacgaattggctcgccgtggcataaacaaaccggtaattgccctggtgacacaaacgcgagtcagcccacatgacgatgctttcgccagccccagtaaaccaattggcgcgtttctcgatgaagcaacggcccaacaacgccaacaacaactcggctggacgctgatggaggacgccgggcgtggttggcggcgtacagttccctctcctgcaccactggaaattattgagcacgacaccatcgctcacctggtgcgccagggatatctggttattgcctgcggcggcggcggtattccggtggtgcgagacgggcaacaactgaaaggtgtagaagccgtgatcgataaagatctggcctccgcgctgctcgccagtcagttaggcgcagatctgctggtgatccccaccggtgtagaaaaaatggcgattaactttggtacaccacaacaacagtggctcgacgctatcagagttgccgaagcgcaaacgctgttgcgggaaggtcagtttggtgtcggcagtatgcaacccaaagtggaagccattgttgatttcatcaatgccagccagcaacaaggcaaacaggccagcggcctgattacttcaccgcaaaccataaaagcagccctggcgcatcagagcggtacatggataaccctttaa

SEQ ID NO: 3845 - DNA, 390 bp, Escherichia coli
atgactacaacgcttttagccgttaacggaacgctgatgcgcggcctggaactcaacccaaatatgcaaaaagcgggcggtatttttgtccgtgaagaccgaactgacgcccattaccggttgtggagtattaatgatcgccatccgggaatgattcgcgtgaatgaaggaggaacacacgtcgacgtagaaatttggcaattaccgctggccagttttgccgctctgttaatgagcgaacccgctgggctggcaattggcaaaatcaaacttgccgatggtagcgaagtgctgggcgtactggcagaaaactggctgaccgaaggccaacgggaaattacagaactgggtagctggcgcaaatacaccgggcattttcatactgtgtaa

SEQ ID NO: 3846 - DNA, 1224 bp, Escherichia coli
atgcgtaaaaaagaagagaatctgaatacggcatcaggattgcgtattgccatgattttgctgggtattgccgtcacacctgtactgttgtcatcctcaagcctcggcaatcaactttccagcagcagtttaattagcgtcgtattgttaggcggcgtcattctgaccttactttcagccatcaccattagcgtgggagaaaaagcccgcctgccaacgtatggcattgtgaaatattcgtttggcgaaaaaggggccatcgccattaacattttgatggcgataagtctgttcggctggattgccgttaccgccaatatgtttggtcattcggtacatgacttactggctcaacatggactggaagttccactggcactgttagtggcggctggctgtgtcatttttgtcgcctctacggcatttggctttgccgttctgggaaaaattgcccaggttgccgtgccggttatcgcgctggtgctgtgttacatcctctatgtggcaacccataccgaagtggcagtaccagcggcgattgtggagatgaatacaggtgtcgccgtttccaccgttgttggcaccattattgtgctggttgccacactgcctgatttcggtagttttgtgcataaccgcaaacatgcgctgattgccgcaggcgtgacgtttctggttgcctaccctctgctctactgggcgggtgcaacgccgagcgccattagtggtcagggatctttactgggtgcgatggcggtattcggtgcggttctgcctgcggcgctgttgttgattttcgcctgcgtcaccggtaacgcgggcaatatgttccagggcacgctggtggtttccacactgcttacccgctttcccaaatggcagattaccgtggcgctgggtatcctttccgccatcgtaggcagtatggatattatggcgtggtttattccgtttctgctgttcctgggtatcgccacgccacccgttgccggaatttatatcgctgactttttcctttatcgccgtaatggctatcaagagtcagtgttagcccaggagtcacagattaaagtgctgacattcgcagcatggatcataggcgcagcggttggctttatgaccgtaaaaggcttattcaccctgacgacgatcccttcggtagactcgattctggtggcatgtatcgcgtatgcgattctcagtcgggcaagtcaacaccgctaa

SEQ ID NO: 3847 - DNA, 906 bp, Escherichia coli
atgttcatctcagacgaaacgcttcgtgttattcatctggtcgccagacaccagagcattaccaccgcagccgagcagttaaataaagtcccttccgccatcagttacactatcaagaaagcggaagagagcctgggcgttgaactgttcattcgtaagggacgctatattgaattatcgccagcgggaagttacttcatcgaacatagcaaaactattcttggcgacctggaagcattaaagcgcaacacagtgctgattcacgatggtattgagcgtgaactgacaattgcggtgaacaatattattcctggtgatttgctggtggcatttattcgagattttgaacggcaattcacatcaacaacactgacggtagatcttgaggtatacaacggctgctgggatgcgctgtacagtaagcgtgctgatctggtctacggtgctcctcatgcagtaccaagcagtgaaggcatcattagcgaaccggtcggacaaatggaatgggattttgtcgtcagcccactccacccactggcagcgaagcggcatccattagaaaacagtgaattgcgtcactatccagcggtttgtatccgcgatacctccgttaacttccccccgatgcaagcctggttgttggaaggacaaaaacccatttttgttcctgacttcgctacggcaatcgccttaatagaacaaaacgtcggtattggttatattccacatcatctggcattgccgttattgaacagcggtaaattgcttaaaaagccaatgcgcgaacataaacacgccaccaagttatttcttgccgctcgttccgatggtatgggcaaagcctgtcagtggtgcatagaatatttaagaaacccacaattaatgacacaatttgtatttaattga

SEQ ID NO: 3848 - DNA, 846 bp, Escherichia coli
atgaataacataaccgtaaaaagtctgattcaaagcaattaccctacactgcatcaggcggaaaaaaaggtcgctgactatattcttagccacgcacatgaagtcgtgaactatagtgtcactgaactatcagaaaaaagccatgccagtgaagcgactatcgtacgcacctgtaagaaattaggttatcagggttattaccatttaaaaattgcattagcaaaagaagtcattaatcctgacaatagctatcctgataataccgattttaccgatataacgtcgctggccacatttttattaaaaaaacaggccgaagatttaatacaatcaacgcaattttttaatgccgaagtgcttgagtccattctcaaactacttgctaattgcgacactattttcttttttgctgccggaaattcaaaccctctggccgtttatggtgcttataaattcagccaactcggattaaaaaccgttgttcacgtcagcccggaaatgcaaattaatgcggcatattctatggggaaacgtgacctggcgattggtatttctaactctggcagcaccaacttaatggtcgatatctttaaagtggtgaaagagcgcggtgccaaatccgtttgtatcactaactatattaaatctccgttatcaaaactctccacccatcaactcaataccgcggtcagcgataaaatcttctttgaagccttcgactccactcgcgttccggcaatgggcgttattgatatgctggtgctgttgtttatgtataaaaacaaggcgcattacgagaaataccgcacccgtgaagagtttcttggctcccgtttcaaggggtaa

SEQ ID NO: 3849 - DNA, 1998 bp, Escherichia coli
atgaattcacaattactggctaacgccatccggatgttaagtgttgatgcgatccagaaagcgaactccggtcatccgggcgcgccgatggggatggcggatattgccgaagtggtctggcgtcgtcacctgcgtcataacccaaaaaatccgcagtggtttaaccgcgaccgctatgttcagtcgaacggtcacggctccatgttgatttacgctttgctgcatcttacaggctacgacctgtcgatggatgatattcgtgactttcgtcagctccactcccgcacgccgggtcatccagaatatggttatacgccgggtgttgaaaccaccaccggcccgttggggcagggcgtagctaatgccgtggggatggcgattgcggagaaggcgctggcggcagaatttaacaaaccgggctttaatattgttgatcatcacacatggctatttttgggtgatggctgcctgatggaagggatctcccacgaggcctgtggtcttgcaggaacgctgaagctcggcaatctgattgctatctgggacgataacggtatttcgatcgatggtcacgtagaaggctggttcgctgaagatacggctgcccgttttcgtgcctacggctggcatgtcattgaaggcgttgatggtcacgatccagaagcggtagatgctgcggtgcgtgaagcgaaaagcgtcacggataagcccagtctgctgtgctgcaaaacgattatcggttttggttcgccaaataaagccaacagccacgattgccacggctcggcgctgggtgcagatgaagtggcgctggtgcgtgaacgtctgcaatggccgtatgcccctttcgaaattcctggtgaaatttatgccgcatgggatgcgaccgagaaaggcgcgcaggttcaacaggaatgggatgcactgtttgctgactacgcgaagcagtggccggaactggcggcggagtttactcgtcgcatgaagggtgatttgcctgctggctgggccgagaatatgcagaaatatgtgcacgatctgcaatcccatccggcggcgctggcaacccgtcaggtcagccagaaatgcctcaatcacttcgcggatatgctgccggaactgatgggcggctcggcggacttgtcgccctctaacctgactcgccatcagaaatcggttgatttcaccggggaaaatccggcggggaattacatctcctatggcgtgcgtgaatttggtatgtcggccatcatgaacggtcttgcgctgcatggtgggtttatcccttacggcggtactttcctgatgtttatggaatatgcgcgtaatgcactgcgcatggcggcgctgatgaagatccgctcggtgtttgtttatacccacgataccatcggcctgggcgaagacggcccgacacatcagcccgttgagcaactggcgtcgctgcgtctgacgccgaatatggaaacctggcgcggttgcgatcaggtggaagtggcggtagcctggcaacaggcgattgagcgcaaagatggcccaacgtcgttggtattaacgcgccaacctctggcgcaacagccgcgcaccgctgcacagttggcagagattgcgcgtggtggttatgtactgagtgattgtgacggtcagcctgagatgatcctcatttctgcgggttcagagattgagttagtggtcagcgccgcaaaagcgttaacggaagaagggcgtaaagttcgcgtggtttccatgccgtgtaccgagcgtttcgataatcaggatgcggcgtacaaagagtcggtattgccaaaagctgtacgcaaacgtctggcggtagaagccagcatcgccggattctgggaacgctacgtcggcctggacggtaaagtgatcggcatgacgagctttggtgagtctgctccggcgaatgtgttgttcaaacactttggttttacgccggaaaatgtcctggcgcaggcgcgtgagctactgaacagctaa

SEQ ID NO: 3850 - DNA, 1509 bp, Escherichia coli
atgagcaaaaaaataacatccttgtttaacttcaagaagttgcagaaattttcttctgctctgatgttaccaatcgccattcttccggcggcgggtttgattttagccatcgggatttcatttaacattgagctgctggcgaattgcggcggcctgattttcgccaaccttcctttgctgttttgtgtcggtattgtgattggcctgacaggtgatggttcttcatcactttcagcgattatcagttacatgatcatgaatgccacgatgggaacgcaacttggcattaccgcggagtccgttgcagccagtaacggtgactatgcgatgatcctcggggtaccgacgttacaaacgggagtgtttggcggtttgattgtcgccatctttgtttatctgctctatacccgcttccacaatattgaattgcctcagtttcttggtttcttcggtggaaaacgctttgtacctattattacggcggtggcggcaattattgtcggctatttattgccgtggctgtggataccggtacaaaaaggtctggcgtcgctttcaacgctggtgaccagtgggcataacgcgaacttcgcggcctttatttacgccgttggcgaacgttcgctgattccttttggcctgcatcatatctggaacgtgccgttttattacaactttggcgactacatgaccaaatccgggcaactggtgacgggcgatattccggtgttctttgcccaattgcgcgacggtgttccgttgacggcggggctgtttatgacaggtcgtttcccaatcatgatgtttgcgttacctgccgccgcgttggcgatgtatcaggaagcaaaaccggaacgtaaggcgctgattaaaggccttttactctccggtgcgctgaccacatttgttaccgggattacggagccgctggaatatgcatttttgtttgcagctccggttctctacatcattcacatcttcttatatgccacttcatttgtgctgatgaacatcctgaatgtgcacattggtcatccttttgctggcggtcttattgatttcgtactgaatggcgttatgccaaaccgcacgccgtggtatctggtgttcctggcaggcgcgggctatgcagcgatttactacaccgtatttcgggtactgatccgcaagttgaatctgaaaacaccggggcgtgaggatgaagagattgccgttgcaaccacattaacgcgcgaagaacgtccataccaaatcatcgaggcagtaggtggtttcgacaatatcgaagatgtggatgcctgcgcaacacgcctgaggctggcgctggtagacgataagaaagtgaatgaaaaacggctgaaggagttgggggctgcgggtttagtgaaactgggtgatggcggtgtacaggtgatatttggcggcaaatcgcaaatcctgcgcgacgaaatcaaaaccgtaatgagcagaccgcgcccgacagaaatgacagtggcctgtgctaactaa

SEQ ID NO: 3851 - DNA, 558 bp, Escherichia coli
atggacgcaaagctgtacatcactgagatcatcaatgaattaaccttcgttaaggactctatccgtgaggatgactgcaccaaattgatcgacgctattcagcaaagccagcgcgttttctgctatggcctggggcgtgccggcttttccatgaaagccttcaccatgcgcctgatgcatatgggcaaagaggtttacttcctgacggaaaccattacgccgaactttgggcctggcgatctgtttatcgtttcttccgcttccggtgagacagcacaactggtggcactggcgaaaaaagcacgtcagtttggcggcgctgtggcggtgttaaccacgaatcgacacgccactatcaccgagtttgtcgacgtcatcgtgcaaatcaatgccccttccaaaaatcaaaaagattctgttttccgctcggcacagccgatggcgtcgttgtatgagcaagctttgctggtgattgccgatgcattagtgatgaagatggctgctgaaagcggtgcgccggaaagtgaactgtttaagcgccacgccaatctggaatag

SEQ ID NO: 3852 - DNA, 1134 bp, Escherichia coli
atgagtgatgaaatttacctgaccataaccggagaacaacaaggatgtatttcctctcgttgcggaacgagcgcatcaataggtaatcgccggcagattggccatgaagatgaaatcttcgcgttctcgctatctaatagtattacgaatacaggcaaagggtcacaattacatggccttagtttctgtaagttgattgacaaaagctccccgttacttattaacgctattaacaataacgagcagttgttcatggagtttgacttctatcggatcaatagatttggtcgatgggagaaatattacaacattcaactccgcggcgcgctcttatcagcaatcaatcacctgtttactgagaacaatctggatacagaaaccatcactgtcagttatgaatatatactctccaggcatctgattgctaatactgaatttagtcatttggcatttcccgataactacaaccgtctgtttataccacggcaaaaaactaaagatgataatggcctcaaaacactcaatagtaaagcggttggcagactgcttgctgctggcgccatatacaatgggaatatcgaaggattcagggaaacagcaaacaagttgggaggagatgcacctgctggttacgatcaatttatggataacaaagggttactcatcgctggtgcttcaatagttgctggagttgttctgggaagaatgagattccctgatttggaatcacttgagcatttcggagccagaggagcagtatcaggaagaccatttaatcccgaccttgccggtggtccaattgaaaacctgacgatagatggcgtaacaatcaacagggaaggtatcgctattgttgaaaagcatatctccagatttgatcatgatccagctaatgatgtaatgatttcaaggctaaagaaaatagcaaataaagaattgcttcctgaaaaatacgatctgaactactatactcatgaatgtcgcgagtatcagcgttattgtaatttaggatgggaaacaggtgaaccgaaaggtttagatggatatgaattatggaataatgtacatactgcaactctagaagactttaaaattaaagatactgacttatttcatccggatgcaaaaaaatga

SEQ ID NO: 3853 - DNA, 258 bp, Escherichia coli
atgacgattacgatagttgaatttaacgtgctgaaagttatggctgagaaagatattgactggagctggatggtgctggatcgtactttagctatacgaaatattccaggatttggcaacgtagcgaatatcgtaacaaagctggttaatcatgggttggttgatatcgtaaatggtgagggcaactctagaccacgctacagagtttctcaatatggattgaatcttatcaaagaacaacaagacaacctcttctga

SEQ ID NO: 3854 - DNA, 2262 bp, Escherichia coli
atgacaattcttaatcacaccctcggtttccctcgcgttggcctgcgtcgcgagctgaaaaaagcgcaagagagttattgggcggggaactccacgcgtgaagaactgctggcggtagggcgtgaattgcgtgctcgtcactgggatcaacaaaagcaagcgggtatcgacctgctgccggtgggcgattttgcctggtacgatcatgtactgaccaccagtctgctgctgggtaatgttccgccacgtcatcagaacaaagatagttcggtagatatcgacaccctgttccgtattggtcgtggacgtgcaccgactggcgaacctgcggcggcagcggaaatgaccaaatggtttaacaccaactatcactacatggtgccggagttcgttaaaggccaacagttcaaactgacctggacgcagctgctggaggaagtggacgaggcgctggcgctgggccacaaggtgaaacctgtgctgctggggccggttacctacctgtggctggggaaagtgaaaggtgaacagtttgatcgcctgagcctgctgaacgacattctgccggtttatcagcaagtgctggcagaactggcgaaacgcggcatcgagtgggtacagattgatgaacccgcgctggtactggaactgccgcaggcgtggctggacgcatacaaacccgcttacgacgcgctccagggacaggtgaaactgctgctgaccacctattttgaaggcgtaacgccaaatctcgacacgattactgtgctgcctgttcagggtctgcatgtcgatcttgtacatggtaaagatgacgttgctgaactgcacaagcgtctgccttctgactggctgctgtctgcgggtcttatcaatggtcgtaacgtctggcgcgccgatcttaccgagaaatatgcgcaaattaaggacattgtcggcaaacgtgatttgtgggtggcatcttcctgctcactgctgcacagtcccattgacctgagtgtggaaacacgtcttgatgcagaagtgaaaagctggtttgccttcgccctgcaaaaatgtcatgaactggcattgctgcgcgatgcgttgaacagtggtgatacggcagctctggcagagtggagcgctccgattcaggcgcgtcgtcactctactcgtgtacataatccggcagtagaaaagcgtctggcggcgatcaccgctcaggacagtcagcgtgcgaatgtctatgaagtgcgtgctgaagcccagcgtgcgcgttttaaactgcccgcgtggccgaccaccacgattggttccttcccgcaaaccacggagattcgtaccctgcgtctggattttaaaaagggtaatctcgacgccaacaactaccgcacaggcattgcggaacatatcaagcaggccattgttgagcaggaacgtttgggactggatgtgctggtacatggcgaggctgagcgtaatgacatggtggaatactttggcgagcatctggatggctttgtctttacgcaaaacggttgggtacagagctacggttcccgctgcgtgaagccaccgattgttattggtgacgttagccgcccggcaccgattaccgtggagtgggcaaaatatgcgcaatccctgactgataaaccggtgaaagggatgttgaccggcccggtgactattctctgctggtcgttcccgcgtgaagatgtcagccgtgaaaccatcgccaaacaaattgcgctggcgctgcgtgatgaagtcgcggacctggaagccgctggaattggcatcattcagattgacgaaccggcattgcgcgaaggtttaccactgcgtcgcagcgactgggatgcctatctccagtggggcgtggaggctttccgtatcaacgccgctgtggcgaaagatgacacacaaatccacactcacatgtgttactgcgagttcaacgacatcatggattcgattgcggcgctggacgcagacgtcatcaccatcgaaacctcgcgttccgacatggagttgctggagtcgtttgaagagtttgattatccaaatgaaatcggtcctggcgtctatgacattcactcgccaaacgtaccgagcgtggaatggattgaagccttgctgaagaaagcggcaaaacgcattccggcagagcgtctgtgggtcaacccggactgtggcctgaaaacgcgcggctggccagaaacccgcgcggcactggcgaacatggtgcaggcggcgcagaatttgcgtcggggatga

SEQ ID NO: 3855 - DNA, 954 bp, Escherichia coli
atgatcgaagtaaaacacctgaaaacgctacaagcgttgcggaactgcggctcactcgcagccgctgcggcgacgttgcatcaaacgcaatccgccctgtctcaccagtttagcgatctggaacaacgccttggcttccggctatttgtgcgtaaaagccagccgcttcgctttacaccgcagggagaaatcctgttgcaactggcaaatcaggtgctgccgcaaattagccaggcactgcaagcctgcaatgaaccgcagcagacgcgtctgcgcatcgccattgagtgccatagctgtattcagtggctgacgcccgcgttagaaaatttccataagaactggccgcaggtcgagatggactttaaatcgggcgtgacgtttgacccgcagcctgcgttgcaacagggcgagctggatctggtgatgacgtcagatattctgccgcgcagtggcctgcattattcgccgatgttcgactatgaagtgcgtctggtgttagcacctgaccatccactggcggcgaaaacgcgaattacaccggaagatctcgccagcgagacgctgttgatttatccggtacagcgtagccgactggatgtctggcggcattttcttcagccggcaggcgtcagcccgtcactgaaaagcgtcgataacaccttattgttgattcagatggttgccgcgcggatgggtattgccgcactaccgcattgggtggtggagagttttgagcgccagggtctggtggtgaccaaaaccctgggcgaaggcttgtggagccgactgtacgccgccgtgcgcgatggagagcagcgtcagccgattacagaagcatttattcgctcagcgcgcaatcacgcctgcgatcatctgccgtttgtgaagagcgcggagcgacccacttacgatgcacccacagtgaggccaggatcaccagcgcgcctgtaa

SEQ ID NO: 3856 - DNA, 900 bp, Escherichia coli
gtggcgctacttatcatcaccacgattctgtgggccttctcctttagcttttatggcgagtaccttgcggggcacgtcgatagctattttgcggtgctggtgcgcgttggcctggcggcactcgtttttctgccgtttctgcgtacccgtggcaatagcctgaaaacggtcggcctgtatatgctggtgggcgcgatgcagctcggtgtgatgtatatgctgagtttccgcgcctatctctacctgacggtctccgaactgttgctgttcaccgtactgacgccgctctacatcacgctgatttatgacatcatgagtaagcgccgtctgcgctggggctatgcttttagcgccttgctggcggtgattggtgccgggattattcgctatgatcaggtcaccgaccatttctggactggcttattgctggtgcaactctccaatatcacttttgccatcggcatggtgggttacaaacgtctgatggaaactcgcccgatgccgcagcataacgcctttgcgtggttctatcttggcgcgttcctggtggcagtgattgcatggttcttgctgggaaatgcgcagaaaatgccgcaaaccacgttgcaatggggcattctggtgtttcttggcgtggtggcttccgggattggctactttatgtggaactacggcgcgacgcaggtggacgccggaacgctgggcattatgaataatatgcacgttccggcagggctgctggtaaacctggctatctggcaccaacagccgcactggccaacgtttattacaggcgcgctggtgatcctggcctcactgtgggtgcatcgtaagtgggtcgctccgcgctcttcacaaacggcagatgatcgcaggcgtgattgcgcgctgagcgaataa

SEQ ID NO: 3857 - DNA, 801 bp, Escherichia coli
atgtaccaggttgttgcgtctgatttagatggcacgttactttctcccgaccatacgttatccccttacgccaaagaaactctgaagctgctcaccgcgcgcggcatcaactttgtgtttgcgaccggtcgtcaccacgttgatgtggggcaaattcgcgataatctggagattaagtcttacatgattacctccaatggcgcgcgcgttcacgatctggatggcaacctgatttttgctcataacctggatcgcgacattgccagtgacctgtttggcgtggtcaacgacaacccggagatcattactaacgtttatcgcgatgatgaatggtttatgaatcgccatcgcccggaagagatgcgctttttcaaagaagcggtgttcaattatgcgctgtatgagccgggattgctggagccggaaggcgtcagcaaagtgttcttcacctgcgattcccatgaaaaacttctgccactggagcaggcgattaacgctcgctggggcgatcgcgtcaatgtcagtttctctaccttaacctgcctggaagtgatggcgggcggcgtttcaaaaggccatgcgctggaagcggtggcgaagaaactgggctacagcctgcaagattgtattgcctttggcgatggaatgaacgatgccgaaatgctgtcgatggcggggaaaggctgcattatgggcagcgcgcaccagcgtctgaaagatctgcatccggagctggaagtgattggtactaacgccgaagacgcagtgccgcattatctgcgtaagctctatttatcgtaa

SEQ ID NO: 3858 - DNA, 1023 bp, Escherichia coli
atgtttcagcagcaaaaagactgggaaacaagagaaaacgcgtttgctgcttttaccatgggaccgctgactgatttctggcgtcagcgtgatgaagcagagtttactggtgtggatgacattccggtgcgctttgtccgttttcgcgcacagcaccatgaccgggtggtagtcatctgtccggggcgtattgagagctacgtaaaatatgcggaactggcctacgacctgttccatttggggtttgatgttttaatcatcgaccatcgcgggcagggacgttccggtcgcctgttaggcgatccacatctcgggcatgttaatcgctttaatgattatgttgatgatctggcggcattctggcaacaggaggttcagcccggtccgtggcgtaaacgctatatactggcacattcgatgggcggtgcgatctccacattatttctgcaacgccatccaggtgtatgtgacgccattgcgctaactgcgccaatgtttgggatcgtgattcgtatgccgtcatttatggcacggcagatcctcaattgggccgaagcgcatccacgtttccgtgatggctatgcaataggcaccgggcgctggcgcgcgttgccgtttgctatcaacgtactgacccacagcagacagcgatatcgacgtaacttacgtttctatgctgatgacccaacaattcgcgtcggtgggccgacctaccattgggtacgcgaaagtattctggctggcgaacaggtgttagccggtgcgggtgatgacgccacgccaacgcttctcttacaagctgaagaggaacgcgtggtggataaccgcatgcacgaccgtttttgtgaactacgcaccgctgcgggccatcctgtcgaaggaggacggccgttggtaattaaaggtgcgtaccatgagatcctttttgaaaaggacgcaatgcgctcagtcgcgctccacgctatcgttgattttttcaacaggcataactcacccagcggaaaccgctctacagaggtttaa

SEQ ID NO: 3859 - DNA, 621 bp, Escherichia coli
atgaccttagaatggtggtttgcctacctgctgacatcgatcattttaagcctgtcgccaggctctggcgcaatcaacaccatgaccacctcgctcaaccacggttatcgcggcgcggtggcgtctattgctgggcttcagaccggactggcgattcatattgtgctggttggcgtggggttggggacgctattttcccgctcagtgattgcgtttgaagtgttgaagtgggcaggcgcagcttacttgatttggctgggaatacagcaatggcgcgccgctggcgcaattgatcttaaatcgctggcctccactcaatcgcgtcgacatttgttccagcgcgcagtttttgtcaatctcaccaatcccaaaagtattgtgtttctggcggcgctatttccgcaattcatcatgccgcaacagccgcagctgatgcagtatatcgtgctcggcgtcaccactattgtggtcgatattattgtgatgatcggttacgccacccttgctcaacggattgctctatggattaaaggaccaaagcagatgaaggcgctgaataagattttcggctcgttatttatgctggtgggagcgctgttagcatcggcgaggcatgcgtga

SEQ ID NO: 3860 - DNA, 621 bp, Escherichia coli
atgttgatgttattcctcaccgtcgccatggtgcacattgtggcgcttatgagccccggtcccgatttcttttttgtctctcagaccgctgttagtcgttcccgtaaagaagcgatgatgggcgtgctgggcattacctgcggcgtaatggtttgggctgggattgcgttgcttggcctacatttgattatcgaaaaaatggcctggctgcatacgctgattatggtgggcggtggcctgtatctctgctggatgggttaccagatgctacgtggtgcactgaaaaaagaggttgtttctgcccctgcgccacaagtcgaactggcgaaaagcgggcgcagttttcttaagggcttactgaccaatctcgcgaaccctaaagcgattatctactttggttcggtgttctcgctgtttgtcggtgataatgtcggcaccaccgaacgctggggcattttcgcgttgattattgtcgaaacactggcgtggtttaccgtcgttgccagcctgtttgctctgccgcaaatgcgccgtggttatcaacgtctggcgaagtggattgatggttttgccggggcgttatttgccggatttggcattcatttgattatttcgcgttaa

SEQ ID NO: 3861 - DNA, 1836 bp, Escherichia coli
gtgaatgtggcgcaggcggaagtgttgaatctggagtccggagctaaacaggttttacaagaaacctttggctaccaacagtttcgccccggccaggaagagattatcgacaccgtactttccggtcgcgattgcctggtcgtcatgcccactggtggcggaaaatccctttgctatcaaatccctgccttattgctaaacggccttaccgtggttgtctcaccgctgatttcgttgatgaaagatcaggtagatcaactgcaagccaacggcgtggcggcggcgtgccttaactcgacgcaaacccgcgagcagcagcttgaagtgatgacaggctgtcgcaccgggcaaatcagcctgctttatatcgcgccggaacgcctgatgctggataactttcttgagcatctggcgcactggaatccggtgttattagccgttgatgaagcgcactgtatctcccaatggggtcacgatttccgcccggaatacgctgccctcggtcagctgcgtcagcgttttccgacgctcccgtttatggcgctgactgccacagccgatgacaccacgcgccaggatatcgtgcgcctgctggggctgaacgatccgctgattcaaatcagcagttttgaccgtccgaatattcgctacatgctgatggagaaattcaaaccgctcgatcagttgatgcgttatgtacaggaacaacgcggtaagtcggggattatttactgtaatagtcgtgcgaaagtagaagacaccgctgcgcgcctgcaaagcaagggaattagcgcggcggcctatcatgccgggctggaaaataatgttcgcgctgatgtgcaggaaaaattccagcgcgatgacctgcaaattgtggtggcgacggtggcgttcggcatgggcatcaacaagcctaacgttcgcttcgtggtgcattttgatattccgcgcaatatcgaatcctattatcaggaaactggacgcgccgggcgtgatggcctgcccgcggaagcgatgctgttttacgatccggctgatatggcgtggctgcgccgttgtctagaagagaagccgcaggggcagttgcaggatatcgaacgtcataaactcaatgcgatgggcgcgtttgctgaagcgcaaacttgccgtcgtttggtattgctgaactattttggcgaagggcgtcaggagccgtgcgggaactgcgatatctgcctcgatccgccaaaacagtacgatggttcaaccgatgcgcagattgccctttccaccattggtcgtgtgaatcagcggtttgggatgggttatgtggtggaagtgattcgcggtgctaataaccagcgtatccgcgactatggtcatgacaaactgaaagtctatggcatgggccgtgataaaagccatgaacattgggtgagcgtgatccgccagctgattcacctcggcctggtgacgcaaaatattgcccagcattctgccctacaactgacagaggctgcgcgtccggtgctgcgcggcgaatcctctttgcaacttgccgtgccgcgtatcgtggcgctcaaaccgaaagcgatgcagaaatcgttcggcggcaactatgatcgcaaactgttcgccaaattacgcaaactgcgtaaatcgattgccgatgaaagcaatgtcccgccgtacgtggtgtttaacgacgcaaccttgattgagatggcggagcagatgccgatcaccgccagcgaaatgctcagcgttaacggcgttggtatgcgcaagctggaacgctttggcaaaccgtttatggcgctgattcgtgcgcatgtcgatggtgacgacgaagagtag

SEQ ID NO: 3862 - DNA, 870 bp, Escherichia coli
atgcggactctgcagggctggttgttgccggtgtttatgttgcctatggcaatatatgcacaagaggcaacggtgaaagaggtgcatgacgcgccagcggtgcgtggcagtattatcgccaatatgctgcaggagcatgacaatccgttcaccctttatccttatgacaccaactacatcatctacacccaaaccagcgatctgaataaagaagcgattgccagttacgactgggcggaaaacgcgcgtaaggatgaagtaaagttccagttgagcctggcgtttccgctgtggcgtgggattttggggccaaactctgtactgggctcctcctacacacagaaatcctggtggcagctttctaatagcgatgagtcatcaccgtttcgtgaaactaactacgaaccgcaattgttcctcggttttgccacggattacaactttgctggctggacgctgcgcgatgtggaaatgggctacaaccacgactcaaacgggcgttcagacccgacttcccgcagctggaaccgcctttatacccgcctgatggcagaaaacggtaactggctggtagaggtgaagccgtggtatgtggtggggaatacggacgataacccggacatcaccaaatatatgggttactaccagcttaaaatcggctatcacctcggtgatgcggtactgagcgcgaaagggcagtacaactggaacaccggttacggcggcgcggagttaggcttaagctacccgatcaccaaacatgtgcgcctttatactcaggtttacagtggttacggcgaatcgctcatcgactataacttcaaccagacccgcgttggtgtgggagttatgctaaacgacctgttttga

SEQ ID NO: 3863 - DNA, 468 bp, Escherichia coli
atgtctgccgtactgaccgctgaacaagccctcaaattagtgggtgagatgtttgtttatcacatgccatttaaccgcgcattggggatggaactggagcgttacgaaaaagagttcgcacagctggcctttaaaaataagccgatgatggtgggcaactgggcgcaaagcattttacacggcggggtcattgcgtcggcgctggatgtcgccgcaggtctggtgtgcgtgggaagtaccttaacccgccacgaaaccatcagtgaagatgaactacgccagcggctatcgcggatggggaccattgatcttcgcgtcgattatctgcgcccaggcagaggcgagcgttttactgctaccagtagcctgttacgtgcaggcaataaagtcgccgtcgcccgcgttgaattacacaatgaagaacagctttatattgccagtgccaccgccacctatatggtaggttga

SEQ ID NO: 3864 - DNA, 891 bp, Escherichia coli
atggatgcaaaacaaacgcggcagggcgtattactcgctcttgccgcttattttatttggggtattgcgccagcgtacttcaaactgatttactacgtgcccgccgatgagatcctgacgcatcgcgtgatctggtcgtttttctttatggtggtgctgatgagcatttgccgccagtggtcctatttaaaaacgctgattcagacgccacagaaaatttttatgctggcagtctctgccgtgctgattggcggcaactggctactgtttatctgggcggtgaacaatcaccatatgctggaagcgagccttggttactttattaacccgctggtgaacattgtgctggggatgattttcctcggcgagcgattccgccggatgcaatggctggcggtgattctggcgatatgtggagtgctggttcagttgtggacttttggttcactgccgatcatcgcgctggggctggcgtttagttttgctttctacggcctggtgcgcaagaagattgctgttgaagcgcaaaccggcatgttaatcgaaactatgtggttgctgcccgtggcggcgatttacctgtttgctattgccgacagctcaaccagtcatatggggcaaaacccgatgtcgctgaatttactgctgatcgccgccggtattgtcaccaccgtgccactgttgtgttttactgcagctgcgacacgcctgcgtctctcaacgttaggctttttccagtacattggtccgacgctgatgttcctgctggctgtgacgttttacggtgaaaaaccgggtgccgataagatggtaactttcgcctttatttgggtggcgctggcaatttttgtgatggatgcgatttatacgcagcatagaacgtccaaataa

SEQ ID NO: 3865 - DNA, 702 bp, Escherichia coli
atgaacaacatattaggctcatcaattaatatgccctgtacacttttcgaaactattactttattcgatgatttttctgctgatgatatgcagtatggggatatggaagaacaagattttctctcactcggcttaagcgacatctctgcaaaagttgatccttaccgcctcattaaataccattttcctgggccgaattctacttatggtgcttttagtgttccaacttctggaacaaaaatatcacaaagtgaatgtattgatattttatttgcagaaatgaaagatctggcaaaaatgttttccttttttggacaatacaaaacactcatccaggatctgattgatcattttagatatggaaatggcaacagtttccatagccaggaattgaacttatcttttcatgaacgaataaacaaatatgattataatagcccaatacgtgtaatcaaagaatgtatcgaaaatgatatttcttcaacacctacgataggataccggcctcttctcctacaaaagattaagaccgaattactttcatcaagactaaataaattcaatgattttaaagataattttaatggcctgggaatcagcattcatgatatctcagctcaaaaaaatatctcttttaaattttcaaaaatatcctatgggctggagcgctaccattcatttcatagcacaagaccactttga

SEQ ID NO: 3866 - DNA, 498 bp, Escherichia coli
atgaaaagaaaactccagaaaattatattatatttatttcttctatgctgcatctataatttatggacattgcgtcctgtacagattttgtatacatactctgatgctggcaattcagtctttctggtcgttgatcatctgccatggactgatagcgataaaataaattggtatctgaagcatcaggatgaaattaaaagtcaaaatcccctaccagaagatagttggcatacctggtatgttattgatatcggtaatggcttcactgactataaaaaatatatcgaagggccgtatgaagatctctactgtttcccgacgattaagagcaatgataattgcatcgtaaaaaactatttaatggttattaatgaatatccttaccgtaatactcatttttttattgctgataacaatgagtatcaactaacccaggaaaataagatagagcgagtgttcaacccgcatgactttgaaaaagacaattttcagcaataa

SEQ ID NO: 3867 - DNA, 951 bp, Escherichia coli
atgctgagcgcatttcaactggaaaataaccgactgacccggctggaagtcgaagagtcacaaccccttgtaaatgcagtatggattgatcttgtcgaaccggacgacgacgagcgactgcgcgtacaatctgaacttggccagagcctggcaacccgcccggaactggaagacatcgaagcatcggcacgtttctttgaagacgatgacggcctgcatattcactccttcttcttctttgaagatgcggaagatcacgccggtaactccactgtggcatttaccatccgtgatggtcgtctgtttactctgcgtgagcgtgaactgcctgcattccgtctgtatcgtatgcgtgcccgtagccagtcgatggtagacggtaatgcctacgagctgctgctggatctgttcgaaaccaaaatcgaacagttggcagatgaaattgaaaatatctacagcgacctggagcagttgagccgggtaattatggaagggcatcagggcgatgagtacgacgaggcgctctccacgctggcggaactggaagatatcggctggaaagttcgcctgtgtctgatggatacccagcgcgcgctcaacttcctggtacgtaaagcacgcttaccgggtgggcaactggagcaggcgcgtgaaatcctgcgagatatcgaatccctgctgccgcataacgaatccctgttccagaaggtgaacttcctgatgcaggcggcgatgggctttatcaatatcgagcagaaccgcatcatcaaaatcttctcggtggtatccgtggtgttcctgccaccgacgctggtcgcttccagctacgggatgaactttgagtttatgccggaactgaagtggagcttcggctacccaggcgcgattatctttatgatcctcgcgggcctggcaccgtatctgtactttaagcggaagaactggttgtaa

SEQ ID NO: 3868 - DNA, 765 bp, Escherichia coli
atggcgtatcggctattcattggtaaaggaatgatcaccttgaatctcaaacggatttttctcaccctcaccttacttcccttgtttgctgttgccgctgatgattgcgcaccctcagatccgacgctgaccgtacaggcgtataccgttaatcctcaaacagagcgggtgaaaatgtactggcaaaaagccaatggcgaagcgtggggaacgttacatgctctgctggcggatattaatagtcagggtcaggtgcagatggcgatgaacggcggcatctatgatgaaagctatgcgccgctcggtttgtacatcgaaaacggtcagcagaaggtggcgttaaatctcgcttcaggtgaagggaatttctttattcgtcctggcggagtgttttatgtcgcgggagataaagtcggcatcgttcgtctggatgcctttaaaaccagtaaagagattcagtttgcggtgcagtcagggccattgttgatggaaaacggtgtaattaatccgcgtattcatcccaacgtcgcctcacgtaaaattcgtaacggtgttgggattaataaacatgggaacgccgtgtttttgttgagccagcaggcgacaaatttttatgattttgcctgttatgccaaagcgaaactgaacgttgagcagctgctttatcttgatggcacaatttcacatatgtatatgaaaggcgaggcaatcccgtggcaacgctatccttttgtcaccatgatttccgtcgagcagaaaggttaa

SEQ ID NO: 3869 - DNA, 903 bp, Escherichia coli
atgaaaaaaacgctcgcaacattatttttattaacctgtctggggtcatcatccgcttatgcggataacgctttgattttacaaacggattttagcctgaaagatggtgccgtctcggcgatgaaaggggtcgctttcggcgttgaccataatcttaaaatatttgatttaacacacgaaattccaccgtataacatctgggaaggcgcttaccgcctgtatcagactgccaattactggccgcaaggttcggtgtttgttagcgtggtcgatcctggtgttggtacagagcgtaaatcggtagtgctgaaaaccaaaaacggtcaatacttcgtttcaccggataacggtacgctcactttggtggcggaatcgctgggtattgagagcgtccgggaaatcgacgaaaaagctaaccgcctgaaaggttctgaaaagtcatataccttccacggtcgtgacgtgtatgcctacaccggtgcacgtctggcttccggggcgatcacgttcgagcaggtggggcctgagcttcctgcaaaagttgtcgaactttcttatcagaaagccaaagcaacaaaaggtgaagtgaagggcaatatcccgattctcgatattcagtacggcaacgtctggagcaatatcagcgacgagttgctgaatcaggcaggaatcaaactcaacgacacgttgtgtgtgaccatttccgaaggttcccagcaaaaatacgcagggaaaatgccgtatgtcgcaagcttcggcgatgtgccggaaggccagccgatggtgtatctgaacagcttattgaatgtttccgtggcgctgaatatggataatttcgcgcagaaacatcaggttgcgtctggtgctgactggaatattgatgtgaagaagtgcgctaagtaa

SEQ ID NO: 3870 - DNA, 2163 bp, Escherichia coli
atggatgtttcttacctgctcgacagccttaatgacaaacagcgcgaagcggtggccgcgccacgcagcaaccttctggtgctggcgggcgcgggcagtggtaagacgcgcgtactggtgcatcgtatcgcctggctgatgagcgtggaaaactgctcgccgtattcgattatggcggtgacgtttaccaacaaagcggcggcggagatgcgccatcgtatcgggcaactgatgggcactagccagggcggtatgtgggtcggcaccttccacgggctggcgcaccgcctgctgcgtgcgcaccatatggacgccaacctgccgcaggattttcagatcctcgacagcgaggaccagctacgcctgctcaaacgcctaatcaaggcgatgaacctcgacgagaagcagtggccgccgcgccaggcaatgtggtacatcaacaaccagaaagatgaaggcctgcgtccacatcatattcaaagctacggtaatccggtggagcagacctggcagaaggtgtatcaggcgtatcaggaagcgtgtgaccgcgcgggcctggtggacttcgccgagctgctgctacgtgctcacgagttgtggcttaacaagccgcatatccttcagcactatcgcgaacggtttaccaatatcctggtggacgaattccaggataccaacaacattcagtatgcgtggatccgcctgctggcgggcgataccggcaaagtgatgatcgttggcgatgacgatcagtcaatctacggctggcgcggagcgcaggtggagaatattcagcgtttcctcaatgatttccccggtgctgaaactatccgtctggagcagaactaccgctctaccagcaatattctgagcgccgcgaacgccctgattgaaaacaacaacgggcgtttgggtaaaaaactgtggaccgatggcgcggatggtgagcctatttccctctattgcgcttttaacgaactcgatgaagcgcgttttgtggttaaccgtatcaaaacctggcaggacaacggcggggcgcttgccgagtgcgccattctctaccgcagcaacgcccagtcgcgtgtgctggaagaagcactgttacaggcaagtatgccgtaccgtatttacggcgggatgcgattcttcgaacgccaggaaatcaaagatgcgctctcgtatctgcgcctgattgccaaccgcaacgacgacgcggcctttgagcgtgtggtgaatacgccaacgcggggtattggtgaccggacgctggacgtggtacgtcagacatcgcgcgatcgccagttaacactctggcaggcatgtcgtgaactgttgcaggaaaaagctctcgccggacgtgctgccagcgccttacagcggtttatggagctgatcgacgccttagcgcaggaaactgccgatatgccgctgcatgtacagactgaccgggtaattaaagactccggcctgcgcaccatgtacgagcaggagaagggcgaaaaaggtcagacgcgtatcgaaaacttagaggaactggtgacggcaacgcgccagttcagctacaacgaagaagacgaagatttaatgccgctgcaggcattcctctcccatgcggcgctggaagcgggcgaggggcaggcggatacctggcaggatgcggtgcagttgatgacgctacactcggcgaaaggtctggaattcccgcaggtgtttatcgttggtatggaagagggcatgttcccaagccagatgtcgctggatgaaggcgggcgtctggaagaagaacgccgtctggcctacgttggcgtaacccgcgcgatgcagaaactgacgctgacctacgcggaaacccgccgtctgtatggcaaagaggtttaccatcgcccgtcgcgctttatcggtgagttgccggaagagtgtgtggaagaggtgcgcctgcgcgccacggtaagccgcccggtcagccatcagcgtatgggtacgccgatggtcgagaacgacagcggctataagctcggccagcgcgtacgccacgctaagtttggtgaaggaaccatcgtcaatatggaaggcagcggcgagcatagccgtttgcaggtggcgttccagggccagggtattaaatggctggtggcggcttacgcccgactggagacggtataa

SEQ ID NO: 3871 - DNA, 717 bp, Escherichia coli
atgcgtttttaccggcctttggggcgcatctcggcgctcacctttgacctggatgataccctttacgataaccgtccggtgattttgcgcaccgagcgagaggcgcttacctttgtgcaaaattatcatccggcgctgcgcagcttccagaatgaagatctgcaacgcctgcgccaggcggtacgggaagcggaacccgagatttatcacgacgtgacgcgctggcgttttcgttcgattgaacaagcgatgctcgacgccgggctgagtgccgaagaagccagtgcaggcgcacacgcggcaatgatcaactttgccaaatggcgcagccggatcgacgtcccgcagcaaacccacgacaccttaaaacagctggcgaagaaatggccgctggtggcgatcaccaacggtaacgcccagccggaactgtttggtttggggcattattttgagtttgtgctgcgcgctggcccgcacgggcgctcaaaaccgttcagcgatatgtacttcctggcggcggaaaaactcaacgtgccgatcggcgagatcttacatgtcggggacgatctcaccactgacgtgggtggggcaattcgcagcggaatgcaggcctgttggatcagaccggaaaatggcgatctgatgcaaacctgggacagccgtttactgccgcatctggaaatttcccggttggcatctctgacctcgctgatataa

SEQ ID NO: 3872 - DNA, 897 bp, Escherichia coli
atgaccgatttacacaccgatgtagaacgctacctacgttatctgagcgtggagcgccagcttagcccgataaccctgcttaactaccagcgacagcttgaggcgatcatcaattttgccagcgaaaatggcctgcaaagctggcagcaatgtgatgtgacgatggtgcgtaattttgctgtacgcagtcgccgtaaagggctggaagctgcaagtctggcgttacggctttctgcgctacgtagcttttttgactggctggtcagccagaacgaactcaaagctaacccggcgaaaggtgtttcggcaccgaaagcgccgcgtcatctgccgaaaaacatcgacgtcgatgatatgaatcggctgctggatattgatatcaacgatcccctcgccgtgcgcgatcgggcaatgctggaagtgatgtacggcgcgggtctgcgtctttccgagctggtggggctcgatatcaaacacctcgacctggagtctggcgaagtgtgggtgatgggaaaaggcagcaaagagcgccgcctgccgattggtcgcaacgccgtggcgtggattgagcactggcttgatttgcgcgacctgtttggtagtgaagacgacgcgctttttctgtcgaaactgggcaaacgcatctccgcgcgtaatgtgcagaaacgctttgccgaatggggcataaaacaagggctgaataatcacgttcacccgcataaattacgtcactcgttcgctacccatatgctggagtcgagcggcgatcttcgtggtgtacaggagctgctgggtcatgccaacctctccaccacgcaaatctatactcatcttgattttcaacaccttgcctcggtgtacgatgcggcgcatccacgcgccaaacgggggaaataa

SEQ ID NO: 3873 - DNA, 708 bp, Escherichia coli
atgaagcaaccaggggaagaactgcaggaaacactcacggagcttgatgaccgggcggttgtcgattatctgattaaaaatcctgagttttttatccgcaatgcgcgcgcagtagaagcgatacgtgtgccgcatccggtacgcggcaccgtttcgttggtcgagtggcacatggcccgcgcacgtaatcatattcatgttctggaagagaacatggcgctgttgatggaacaggcaatcgccaacgaaggcctgttttatcgtctactctacctgcagcgcagtctcaccgccgccagcagtctcgatgatatgctgatgcgctttcaccgctgggcgcgcgatctcggcctggcaggtgcgagtctgcgcctgtttccggatcgctggcgcttaggtgcgccgtcgaactacactcatctggcattaagccgtcagtctttcgaaccgctgcgtattcagcgtctggggcaggaacagcactatctgggaccgcttaacggaccggagctgctggtggtgctaccggaagcgaaagcggtgggatcggtggcgatgtcgatgctgggaagcgatgctgatttgggtgttgtgctgtttaccagtcgcgatgccagtcactatcaacaagggcagggaacgcagttacttcatgaaattgcactgatgttgccggagcttctggcgcgttggattgaacgcgtatga

SEQ ID NO: 3874 - DNA, 825 bp, Escherichia coli
atgcagttctcgaaaatgcatggccttggcaacgattttatggtcgtcgacgcggtaacgcagaatgtctttttttcaccggagctgattcgtcgcctggctgatcggcacctgggggtagggtttgaccaactgctggtggttgagccgccgtatgatcctgaactggattttcactatcgcattttcaatgctgatggcagtgaagtggcgcagtgcggcaacggagcacgctgctttgcccgttttgtgcgtctgaaagggctgaccaataagcgcgatatccgcgtcagcaccgccaacgggcggatggttcttaccgtcaccgatgatgatctggttcgcgtaaacatgggcgagcccaacttcgaaccttccgctgtgccgtttcgcgctaacaaagtggaaaagacctatattatgcgcgccgccgagcagacaatcttatgtggcgtggtgtcgatgggaaatccgcactgcgtgattcaggtcgatgatgtcgataccgcggcggtagaaacgcttggtcctgttctggaaagccacgagcgttttccggagcgcgccaatatcggttttatgcaagtggttaagcgcgagcatattcgtttacgcgtttatgagcgtggggcaggagaaacccaggcctgcggcagcggcgcatgtgcggcggtggcggtagggattcagcaaggtttgctggccgaagaagtacgcgtggaactccccggcggtcgtcttgatatcgcctggaaaggtccgggtcacccgttatatatgactggcccggcggtacatgtctacgacggatttattcatctatga

SEQ ID NO: 3875 - DNA, 204 bp, Escherichia coli
atgaaaaacgtgtttaaggcactcactgtattacttactctcttcagcctgacgggctgcggtctgaaaggtccgctctatttcccgcctgcagataaaaacgcaccgccaccgaccaaaccggtagagacgcgaacgcaatccacggtgccggataaaaacgaccgcgccactggcgatggtccatcccaggtgaattactaa

SEQ ID NO: 3876 - DNA, 1479 bp, Escherichia coli
atgcactatcgcaacgtggtttgtttgttgtcttgttcgttgttcttatcgtcggcatggggatgtcggctttccgcgcctgaacataatatttaccagaaacagggaaaaggcgtggtgtacctgcgcccttataaagaaacaaatctttctcttcctgacgtgaattacaaaagtttgcgccgtttacccaatttattaatagacccgacaacactagacaaatgggataaagtacctcctctgactgatctgacaaccgactacctctatgaaggcgcacaggcctggtatcctcattactcctggcatagcgatggtcgctatatcctctacgcgggtgaagttgtgcaaaacctgccagacaaacctcccgtcgatgtcgcctcgttcaaggcgtgggatgattttgccgcggataaacacagtctctattttgaaggcaagcgcaccgatgacaatggcggagaaaatagtctagatatcaaaacgctgcatcaggtgaaattccgttccccctggaaacctgactttctggggctgatattacgtgacgctaatttcttatatgtcgatggacatcgcctcgcagatcccgatagtttccgtgtgctggagcagaagtcctgggatcagcgaggaaagttttccaccgagtttaacccctgcattgccgtaccatttggtcccagggatacgctagcccgcacacagacgaaaatcatgatcaacggcgaacagcttaatgccgacccggacaccttttccgtcgtgcgctggatgcccggctcactcttgacctggcgtgataaaaacgggctgcagcgtaaagtcctcgacaaggaaaatctggcgtgggatgaggatctaacaaagcactgtctggatttttctctgcaggaaaagaaagtgttctggcgtaaagggcctgcttgtaaacaggaagaattatccggactcgatcctgaacagttccaccccatcagtgatgctgtcgcccagtatcaggattcgctttataccatcatcgaaacagagtctggtgaccgcaagttggagatcgtaaaactcgatgaccccaatcttattatcaacaaacgtttcaacgccgggaaacgccacggctatttacttacgcgtgccgaagggtgggtaaaccattccagtttacacgtgtttgaatctgacggaccgctgatcttactggataaccgctctccggatgaacgcgaagcacatcttaatgaccatccctttttgcgcagatggtatgcccgcgataaccgctacgtttacagctttgatggcgcgcagctctggcgataccgcaccgctgatccgaaacaagttcacttaatctggaaggaacaacattcgggatatggctatggcgtaaattacaaaacgggatatctggacggaaaaattaccgatgacggcgaatttattcctgccccacgcaatgaggccacaaaatga

SEQ ID NO: 3877 - DNA, 1329 bp, Escherichia coli
atgaatggtcaaataatcatagttgcactcatcctgttggggaactcatttctgacacctcctgtacaggccatagggttcgactattacaatgatcacggtgttatgtcttacggtaaaggttatggggaggatgagaaaatcattgcccaatttccgaagatgaacagagccgatttgcgccttgtgacaaatatatccggggagcgggagttggtggaaggctatatacccaccgatgaaataagcataaaaaatgaggaataccattgggtgacagacggccgcgttattctctggcgtggcaaaatcgttagcaatccaccgggaacacccactgtcgatattgccagctttcaggctatgggccgcttcgcggtcgataaatatagcctctattttgacggacagcgtaccgaaagtaatagcggcgcgtcacgtgttgatctggcgacactaaaagctatcgaaggtaactctaccacgctggtggatagtaaaaatctctacttgtccggtcgacgtcaggggagcagcagtaatgttactgtattagaaaaaagatggtggggtattaatccacgtcttatgagtgtaaacagaaatttgtattccaatgatctgcttatccgcagtgggcagaatatttatttaaatggcgctcaccttacggcgaatgcagactcatttgagataattcgctggatacctcattcactgctggtttttcgcgacaataagggtctgcatcgttatccctttggtcaattatctggcaaagcgatacccgtagatgatgacgtctcttttgaagtaggggaaagtcgcgttcgctggcgtaaacagctcacgcccgaccgtcagtggagccagtggatagacctacaaggtattgaacctgaacaatttcatctgattactgacaatattgcgcagtataaagatcggctgtatgtaacaaaattatcgacttttggtgaagaccagcttgaaataatcccgctggattcgccagacctggtcattgatcactcatttaatcgcggcaaacagcatgcttactttatccaccaattacggtcacgcaagagcgtgcaaattattccaactaacaacggcccgctaactaaaaacgatcgctttgcttatgacgatcgcaatgtttatacatggaccgatacagaggtaaggattacgccctccccctgcccggcgaaaacacgcgtcagagaagagaatgtgcatgaacttcacaacagagacattattattccgttgacggatgaatcatgccagaacgcagcagacgagcaaactttgaagccctga

SEQ ID NO: 3878 - DNA, 321 bp, Escherichia coli
atgaacgacagtgaatttcatcgcctggctgatcaactgtggctgaccattgaagaacatctggacgactgggatggcgacagcgatatcgactgtgaaatcaacggcggtgtactaaccattacctttgagaacggcagcaaaatcattatcaaccgccaggaaccactgcaccaggtatggctggcaaccaaacagggcggctaccattttgatctgaaaggcgatgagtggatttgcgatcgcagcggcgaaaccttctgggatttattggaacaggccgcgacgcagcaggcgggagaaaccgtcagttttcgttaa

SEQ ID NO: 3879 - DNA, 2547 bp, Escherichia coli
ttgtacctctatattgagactctgaaacagagactggatgccataaatcaattgcgtgtggatcgcgcgcttgctgctatggggcctgcattccaacaggtctacagtctactgccgacattgttgcactatcaccatccgctaatgccgggttaccttgatggtaacgttcccaaaggcatttgcctttacacgcctgatgaaactcaacgccactacctgaacgagcttgaactgtatcgtggaatgtcagtacaggacccaccgaaaggtgagcttccaattactggtgtatacaccatgggcagcacctcgtccgtagggcaaagttgttcctctgacctggatatctgggtctgtcatcaatcctggctcgatagcgaagagcgccagttgctacaacgtaaatgtagtctgctggaaagctgggccgcctcgctgggtgtggaagtcagcttcttcctgattgatgaaaaccgcttccgtcataatgaaagcggcagcctggggggcgaagattgtggctccacccagcatatactgctgcttgacgaattttatcgtaccgccgtgcgtctcgccggtaagcgtattctgtggaatatggtgccgtgcgacgaagaagagcattacgacgactatgtgatgacgctttacgcgcagggcgtgctgacgccaaatgaatggctggatcttggtggcttaagctcgctttctgctgaagagtactttggtgccagcctttggcagctctacaagagtatcgattccccatacaaagcggtgctgaaaacactgctgctggaagcctattcctgggaatacccgaacccacgtctgctggcgaaagatatcaaacagcgtttgcacgacggcgaaatagtgtcgtttggtctcgacccgtattgcatgatgctggagcgcgtcactgaatatctgacggcgatcgaagattttactcgtctggatttagttcgccgctgcttctatttaaaagtttgcgaaaaactcagccgtgaacgcgcctgcgtaggctggcgtcgtgaagtgttaagccagttggtgaaagagtgggaatgggacgatgctcgtctggcgatgcttgataatcgcgctaactggaagattgatcaggtgcgtgaggcgcacaacgagttgctcgacgcgatgatgcagagctaccgcaatctgatccgctttgcgcgtcgcaataaccttagcgtttccgccagcccgcaggatatcggtgttctgacacgtaaactgtacgccgcgtttgaagcgttaccgggtaaagtgacgctggtaaacccgcagatttcacccgatctctcggaaccgaatctgacctttatttatgtgccgccgggccgggctaaccgttcaggttggtatctgtataaccgcgcgccaaatattgagtcgatcatcagccatcagccgctggaatataaccgttacctgaataaactggtggcgtgggcatggtttaacggcctgctgacctcgcgcacccgcttgtatattaaaggtaacggcattgtcgatttgcctaagttgcaggagatggtcgccgacgtgtcgcaccatttcccgctgcgcttacctgcaccgacaccgaaggcgctctacagcccgtgtgagatccgccatctggcgattatcgttaacctggaatatgacccgacggcagccttccgcaatcaggtggtgcattttgatttccgtaagctggatgtcttcagctttggcgagaatcaaaattgcctggtgggtagcgttgacctgctgtatcgcaactcgtggaacgaagtgcgtacgctgcacttcaacggcgagcaatcgatgatcgaagccctgaaaactattctcggcaaaatgcatcaggacgccgcaccgccagatagcgtggaagtcttctgctacagccagcatctgcgcggcttaatccgtactcgcgtgcagcaactggtttctgagtgtattgaactgcgtctttccagcacccgccaggagaccgggcgcttcaaggcgctgcgcgtctccggtcaaacctggggcttgttcttcgaacggctgaatgtctcggtacagaaactggaaaacgccatcgagttttatggcgctatttcgcataacaaactgcacggcctgtcagtgcaggttgaaaccaatcacgtcaaattaccggcggtggtggacggctttgccagcgaagggatcatccagtttttcttcgaagaaacgcaagacgagaatggctttaatatctacattctcgacgaaagcaaccgggttgaggtgtatcaccactgcgaaggcagcaaagaggaactggtgcgtgacgtcagtcgcttctactcgtcttcgcacgaccgtttcacctacggctcaagcttcatcaacttcaacctgccgcagttctatcagattgtgaaggttgatggtcgtgaacaggtgattccgtttcgcaccaaatctatcggtaacatgccacctgccaatcaggagcatgacgcgccgctgttgcagcagtatttttcttga

SEQ ID NO: 3880 - DNA, 963 bp, Escherichia coli
atgataatgacggtaacaagcatgttagacaatgttttaagaattgccacacgccaaagcccacttgcactctggcaggcacactatgtcaaagacaagttgatggcgagccatccgggcctggtcgttgaactggtaccgatggtgacgcgcggcgatgtgattcttgatacgccgctggcgaaagtaggcggaaaaggcttatttgtaaaagagctggaagtcgcgctcctcgaaaatcgcgccgatatcgccgtacattcaatgaaagatgtgccggttgaattcccgcaaggtctggggctggtcaccatttgcgagcgtgaagatcctcgcgatgcctttgtgtccaataactatgacagtctggatgcgttacctgcaggcagtatcgtcgggacgtccagtttacgtcgccagtgccaactggctgaacgccgcccggatctgattatccgctccctgcgcggcaacgtcggcactcgtctgagcaaactggataacggcgaatatgatgccatcattcttgccgtagccggactaaaacgtttaggtctggagtcccgcattcgcgccgcgttgccacccgagatttctcttccggcggtagggcaaggtgcggtgggcattgaatgccgccttgatgatgcacgcactcgcgagctgctcgccgcgctgaatcaccacgaaactgcactgcgcgttaccgccgaacgcgccatgaatacccgtctcgaaggcggatgtcaggtgccaattggtagctacgccgagcttattgatggcgaaatctggctgcgtgcgttggtcggcgcgccggacggttcgcagattattcgcggtgaacgccgcggtgcgccgcaagatgccgaacaaatggggatttcgctggcagaagagctactgaataacggcgcgcgcgagatcctcgctgaagtctataacggagacgccccggcatga

SEQ ID NO: 3881 - DNA, 741 bp, Escherichia coli
atgagtatcctggtcacccgcccgtctcccgcaggagaagagttagtgagccgtctgcgcacactggggcaggtggcctggcattttccgctgattgagttttctccgggtcgacaattaccgcaacttgctgatcaactggcagcgctgggagagagcgatctgttgtttgccctctcgcaacacgcggttgcttttgcccaatcacagctgcatcagcaagatcgtaaatggccccgactacctacttatttcgccattggacgcaccaccgcgctggcactacataccgtaagcggacagaagattctctacccgcaggatcgggaaatcagcgaagtcttgctacaattacctgaattacaaaatattgcgggcaaacgtgcgctgatattacgtggcaatggcggtcgtgagctaattagggattccctgacggcgcgcggtgctgaggtcactttttgtgaatgttatcaacgatgcgcaatccattacgatggtgcagaagaagcgatgcgctggcaatcccgcgaggtgacgacggtcgttgttaccagcggtgaaatgttgcagcaactctggtcgctgatcccacaatggtatcgtgagcactggttactacgctgtcgactattggtcgtcagtgagcgtttggcgaaactcgcccgggaactgggctggcaagacattaaggtcgccgataacgctgacaacgatgcgcttttacgggcattacaataa

SEQ ID NO: 3882 - DNA, 1200 bp, Escherichia coli
atgacggaacaagaaaaaacctccgccgtggttgaagagaccagggaggccgtggacaccacgtcacaacctgtcgcaacagaaaaaaagagtaagaacaataccgcattgattctcagcgcggtggctatcgctattgctctggcggcgggcgtcggtttgtatggctggggtaaacaacaggccgtcaatcagactgccaccagcgatgccctggctaaccaacttacggcactgcaaaaagcccaggagagccaaaaagccgagctggaaggcattatcaagcaacaagctgtacagcttgagcaggcgaatcgtcagcaagaaacgctggcaaaacagctggatgaagtccaacaaaaggtcgccaccatttccggcagcgatgctaaaacctggctgctggcccaggccgattttctggtgaaactcgccggacggaagctgtggagcgatcaggacgtcacgaccgctgcagcgttgctgaaaagtgcagacgccagcctggcggatatgaatgacccgagtctgattaccgttcgccgggcaattaccgatgatatcgccagcctttctgcggtatcgcaggtggattatgacggtatcatccttaagcttaatcagctttcaaatcaggtagataatctgcgtctggccgataatgacagcgatggttcgccgatggattccgacggtgaagagctttccagttccatcagcgaatggcgtatcaatctgcaaaaaagctggcagaactttatggacaacttcattacgattcgccgtcgtgatgacaccgccgtaccgctgttagcgccaaatcaggatatctatctgcgcgaaaatattcgctctcgcctgctggtcgcagcacaagctgtaccgcgtcaccaggaagagacttatcgccaggcgctggagaacgtctccacctgggtacgtgcttactacgatactgatgatgccaccaccaaagcgttcctcgacgaggtggaccagttaagccagcaaaatatctcgatggatcttccggaaaccctgcaaagccaggcgatgctggaaaaattgatgcagacccgcgtgcgtaacctgctggcacaaccggcagcagggacaacggaagctaaacctgcacctgcacctgcacctgcacctgcaccgcaagctgatgctccggcagccgcgccgcaaggagaataa

SEQ ID NO: 3883 - DNA, 1197 bp, Escherichia coli
atgctaaaagtgttattgctctttgtgttgctgattgcggggatcgtggttggcccgatgattgccggccatcagggttacgtgctgatccagaccgacaactacaatattgaaactagcgtcacgggcctcgcgattattttgattctggcgatggtagtgctgtttgccattgagtggctactgcggcgaatcttccgcacaggcgcgcacacccgtgggtggtttgtcggacgtaagcgtcgccgtgcacgtaagcagaccgaacaggcgctgctgaaactggcggaaggcgattatcagcaagttgaaaagctgatggcgaaaaatgccgatcacgctgaacaaccggtggtgaactatctactggcagccgaagccgcgcaacaacgtggtgatgaagcacgcgccaaccaacatctggaacgcgcagcggagctggccggcaatgacaccattccggtagaaatcacccgtgtacgtctgcaactggcccgtaatgaaaaccatgcagcacgtcacggcgtggataagctgctggaagttacgccacgccatccggaagtattacgtctggcggaacaggcgtatatccgcactggtgcatggagttcgctgctggatatcatcccatcaatggcgaaagcccatgttggtgatgaagaacatcgtgcaatgctggaacaacaggcatggattggcctgatggatcaggcgcgtgccgataacggtagtgaaggtttgcgtaactggtggaaaaaccaaagccggaaaacgcgtcatcaggtggccttgcaggtggcaatggcggaacatcttattgagtgtgacgatcatgatactgcccagcaaattatcatcgacggcctgaaacgccagtatgacgatcgcctgctgctgccgatcccgcgtctgaaaaccaataacccggaacagctggaaaaagtgctgcgccaacagatcaaaaacgtgggcgatcgcccgctgttgtggagcacactgggtcagtcgctgatgaaacacggagaatggcaggaagcatcgctcgccttccgcgcagcgctgaaacaacgtccggacgcctacgattacgcatggcttgccgacgcgctggacagactgcacaagccggaagaagccgcagcgatgcgtcgcgacggtttgatgttaacgttgcagaacaacccgccacagtag

SEQ ID NO: 3884 - DNA, 1656 bp, Escherichia coli
atggaattttcgttttcacccaaacttcttgttgttgctgtcgccgcagctcttcctctcatagccagcgcagcagataccccgtcaaccgccaccgcacgcaaaggctttgccggatacgatcacccaaaccagtatctggttaaaccggcgaccactattgccgacaacatgatgccggtgatgcagcatcctgcacaagacaaagaaacccagcagaaactggcggaacttgagaaaaaaaccggtaagaaaccgaacgtggttgttttcttgctggatgatgtgggctggatggacgttggctttaacggcggcggcgtggcggtgggtaaccctacaccagatatcgacgccgttgccagccaggggctgattttaacttcggcgtattctcaaccgagttcttccccaacccgcgccacgattctcaccggacaatactccatccaccacggcattctgatgccgccaatgtacgggcaaccgggcggtctgcaagggttaaccacgctgccgcagttgctgcacgatcagggctacatcacccaggctatcgggaaatggcatatgggggaaaacaaagagtcgcagccgcagaacgttggctttgatgatttccgcggctttaactcggtgtccgatatgtataccgaatggcgtgatgttcatgtcaacccggaagtcgccctgagcccggctcgttctgaatacatccaaaaactgccgttcagcaaagatgacgttcatgccgtgcgcggcggtgaacaggaagccattgccgacattacgccgaaatatatggaagacctggatcaacgctggatggaatatggcgttaagttcctcgacaagatggcgaagagtgataagcctttcttcctctattacggcactcgcggctgtcacttcgataactacccgaacgccaaatatgcgggtagctctccggcgcgcacctcttacggcgactgcatggtggagatgaacgatatcttcgccaatctgtataaagcactggagaaaaacggtcagcttgataacacgctgattgtgttcacctctgataacggtccggaagccgaagttccgccgcacggtcgcacgccgttccgcggtgcgaaaggttctacatgggaaggcggcgttcgtgtgccaaccttcgtttactggaaaggcatgatccaaccgcgtaaatctgacggcattgtcgatctggcggatctcttccctacggcactggatctggcggggcatcctggggcgaaagtagcgaatttagtaccgaaaaccacctttatcgatggtgtggaccagacatctttcttcctgggaacaaatggtcagtctaaccgtaaggccgagcactacttcctcaacggtaaactttctgctgtgcgtatggatgagttcaagtatcacgtcctgattcagcaaccttacgcttatacccagagcggatatcagggtggattcaccggcacagtaatgcaaacggcgggatcgtcggtgtttaacctgtacaccgatccgcaggaaagcgactctatcggcgtgcgccatatcccaatgggtgtaccgctacagaccgaaatgcatgcgtatatggagatcctgaaaaaatatccaccacgcgcgcagattaaatctgattaa

SEQ ID NO: 3885 - DNA, 1236 bp, Escherichia coli
atgcagcaacaggttccaacgcgtgcttttcatgtgatggcgaaaccgagcggttctgattgtaatctgaactgtgactactgtttttatctcgaaaaacaatccctttaccacgaaaagccagtcacgcatatggacgatgacacgctggaagcgtatgtccgtcactatatcgctgccagcgaaacccaaaacgaagtggcttttacctggcagggcggcgaaccaacgttactcgggctggatttttaccgccgtgccgtggcgctacaggcgaaatatggtgctggcaggaagataagtaatagcttccagactaacggcgtgctgctcgatgacgaatggtgtgcatttctggcagaaaatcattttcttgtagggttatcgctggatggtccggctgagatccacaatcaatatcgcgtgaccaaaggtggcagaccaacgcataagctggtgatgcgtgctctgacgctcctgcaaaaacatcatgtcgactataacgtgctggtctgcgtcaatcgcaccagtgcgttacaacctttgcaagtctatgattttctgtgtgatgcaggtgttgagttcatccagtttattccggtggtcgagcgcctggctgatgaaacggctgctcatgctggacttaagctacatgctcccggcgatattcagggcgaactgacggaatggtcggtgtgcccgcaagagttcggtgagtttctggtggcgattttcgaccactggattaagcgcgacgtcggcaagattttcgtaatgaatatcgaatgggcgttcgccaattttgtcggcgcaccgggcgcggtttgccatcatcagccaacctgtgggcgctcggtgattgttgagcacaacggtgacgtttatgcctgcgatcactatgtttatccgcagtatcgactagggaatatgcttcagcagacgattgcagaaatgattgattccccgcaacagcaggcatttggtgaagataaattcaagcagttaccggcacagtgtcgcagttgcaacgtgttaaaagcgtgctggggaggctgcccgaaacaccgctttatgctcgatgccagcggcaaacccgggctgaattatttgtgtgccgggtatcagcgttattttcgccatctaccgccatatcttaaagcaatggttgatttgctggcgcacggtcgtccggccagcgacattatgcaggcgcatttgctggtggtgagtaagtag

SEQ ID NO: 3886 - DNA, 1386 bp, Escherichia coli
atggcagataacaaaccagagctacagcgtgggctggaagctcgacatatcgaactcatcgccctggggggcaccattggcgtcggcctgtttatgggggccgccagtaccctgaaatgggccgggccatccgtattgttggcctatatcatcgccgggctgttcgtctttttcatcatgcgttcaatgggcgaaatgttgttcctcgaaccggttaccggttcgttcgccgtttacgcgcatcgttatatgagcccgttctttggttatctcaccgcctggtcttactggtttatgtggatggcggtggggatctcagaaatcaccgccattggcgtttatgtccagttctggttcccggagatggcgcagtggatacccgcattgatcgcggtggcgctggtggcgttggcgaatctggctgcggtgaggttgtacggcgaaatcgagttctggttcgcgatgatcaaagtcaccacgattatcgtgatgattgtcattggcctgggcgtgattttctttggctttggcaatggcgggcagtcgattggttttagcaatctcacagagcatggcggtttctttgctggtggctggaaagggttcctgaccgcattgtgtattgtggtggcgtcctaccagggcgtggagctgattggcattactgccggtgaagcgaagaatccgcaggtgacgctgcgcagtgccgtaggcaaggtgctgtggcgaatcctgattttctacgttggcgcgattttcgttatcgttactatcttcccgtggaatgaaataggcagcaacggtagcccgttcgtactgactttcgccaaaatcggcattaccgcagcggcgggcattatcaactttgtggtgctgacggctgcgctctctggctgtaacagcggcatgtacagttgcggacgtatgctctatgcactggcgaaaaaccgtcagttaccggcggcaatggcgaaagtttcccgtcacggcgtaccggttgcgggtgtggcagtatctattgctattctgctaattggctcatgcctgaactacatcattcccaatccgcagcgtgtgtttgtttacgtctacagtgccagcgtgcttccggggatggtgccatggtttgtgatattgataagccagctgcgttttcgtcgtgcgcataaagcagcaattgccagccatccgttccgctcaatcctgttcccttgggccaactacgtaacaatggcattcctgatttgcgttttgatcggcatgtactttaatgaagatacgcgtatgtcgctgtttgtcggcatcatctttatgctggtggtgacggcgatttataaagtttttgggcttaatcgccacggtaaagcgcataaactggaggaataa

SEQ ID NO: 3887 - DNA, 741 bp, Escherichia coli
atgaataacaacaccacggcaccgacctatacgctgcgtggcttacagttgattggttggcgtgatatgcagcatgccctcgattatctgttcgctgacgggcagcttaagcagggaacgctggttgccattaatgccgaaaaaatgctgaccattgaagataacgccgaggtcagggagttaattaacgctgccgaatttaaatatgcggatggcatcagcgttgtacgttcagtacgtaaaaagtacccgcaggcgcaggtttcccgcgttgctggggccgatctctgggaagagctgatggcgcgcgcaggcaaagaagggacaccggtatttcttgtgggcggtaaacctgaagtgctggcgcaaactgaagctaaactgcgcaaccagtggaatgtgaatatcgttggcagtcaggatggttattttaaacccgagcagcgtcaggcgctgtttgaacgcattcatgccagcggagcgcaaatcgtcaccgttgcgatgggatcgccaaagcaggagatcttcatgcgcgactgccgtctggtgcatccagatgcgctgtatatgggcgttggcgggacctacgatgttttcaccggtcacgtaaaacgcgcaccgaaaatctggcaaacgctggggctggagtggctctaccgcctgctttcgcagccgagccgcattaagcgtcagcttcgtttgctgcgttatttacgctggcattacaccggcaacctctga

SEQ ID NO: 3888 - DNA, 1353 bp, Escherichia coli
atgagtctgctgcaattcagtggcctgtttgttgtctggctgctctgcacgctgtttattgccacgctgacctggtttgagtttcgccgtgtgcgctttaacttcaatgtcttcttttcattgctgtttttgctcacctttttcttcggctttccgctgaccagcgtgctggtatttcgctttgatgttggtgtcgcgccgccagaaatcttgttgcaggcgttgctttctgcaggctgcttctacgcggtttactatgtcacctacaaaacccgtctacgcaaacgcgttgctgatgcaccgcgccgtccgctgtttaccatgaaccgcgtggagaccaatctcacgtgggtgatcctgatgggcatcgctctggtgagcgtcggcatcttcttcatgcacaacggctttttgctgttccggcttaattcttacagtcagatcttttccagcgaagtctccggcgtggcattaaaacgcttcttttactttttcatcccggcgatgctggtggtttattttctgcgccaggatagcaaagcgtggctgtttttcctcgtcagcacggttgcctttggcttgttgacttacatgattgtcggcggcactcgcgccaatatcatcatcgcattcgctatcttcctgtttattggcattattcgcggctggatttcgttgtggatgctggcggcggcgggcgtgctggggattgtgggcatgttctggctggcgctaaaacgctatggaatgaatgtgagcggcgatgaagcgttctatacgtttctctatctcactcgcgacactttctcgccgtgggagaatctggcgttgctgttgcagaactacgacaacatcgacttccagggcctggctccaattgtccgcgatttctatgtctttatcccttcctggctgtggccgggtcgcccgagtatggtgctgaactccgccaactactttacctgggaagtgctgaataaccactccggactggcgatctcgcctacgcttataggctcactggttgttatgggcggcgcgttgttcatcccgctcggggcgattgtggttggactgattatcaaatggttcgactggctgtatgagctgggcaaccgcgagactaatcgctataaggctgcgatattgcacagtttctgcttcggggcgatcttcaatatgatcgtgctggcgcgtgaagggctggattcgtttgtctcacgcgtggtcttttttatcgtggtcttcggcgcatgtctgatgatcgcaaaactgttgtactggctttttgaaagcgccggactcattcataaacgaacaaaatcatcgctccggacgcaggttgaaggataa

SEQ ID NO: 3889 - DNA, 1080 bp, Escherichia coli
atgactgtactgattcacgtactgggatcggatatccctcaccataaccgaaccgttctgcggtttttcaacgacgcgctggccgcgacgagcgggcacgcgcgcgagtttatggttgctggcaaggacgacggcttaagtgatagctgtccggcgctttctgtgcaatttttccctgggaaaaaatcgctggcggaagcggtcatcgcgaaagcaaaagctaaccgtcagcagcgattttttttccacggtcagttcaatcccacactgtggctggctctgctgagtggtggcattaagcccagccagtttttctggcatatctggggagcagacctgtatgagctttccagtggcttgagatataagcttttttacccgctacgtcgcctggcgcaaaagagagtcggctgtgtatttgccacccgcggtgatttgagcttttttgccaaaacgcatccaaaggtgcggggagaactgctgtacttcccgacgcggatggacccttctcttaatacgatggcgaacgatcggcaacgtgaaggaaaaatgaccattctggtggggaactccggtgaccgcagcaatgagcatattgctgccttgcgcgccgttcatcagcaatttggcgatacggtaaaagtggtggtgccgatgggatatccgcctaataacgaagcgtacatcgaggaagttcgtcaggcgggactggagttattcagcgaagaaaacctacaagttctgagcgaaaaactggaatttgacgcctatctgacgctacttcgccagtgcgatctcggttactttatttttgcccgccagcagggcattggtacgctttgcttactgattcaggcgggcattccttgtgtgcttaaccgggaaaatccgttctggcaggatatgacggaacagcatttgccagtactgtttactaccgatgatctcaacgaggatattgtgcgtgaagcgcagcgccagttggcgtcggtggataaaaacaccattgccttctttagccctaactatctacaaggctggcagcgggcgttggcgattgccgccggggaggtcgcatga

SEQ ID NO: 3890 - DNA, 1251 bp, Escherichia coli
atgtcgttggcaaaagcgtccttgtggacggcggccagtacactggtcaagattggtgccgggttactggtcggtaagttgctggcagtgtcatttggtccggcggggcttgggctggcggcaaatttccgccagttgattaccgtgctcggcgtgcttgccggggcaggcatctttaacggcgtaaccaaatacgttgcccagtatcatgataatccccaacagctgcgccgcgtggtcggcacttcatcagcgatggtacttggcttctctacgctaatggcgctggtttttgtgctggcagctgcgccaatcagccaggggttgtttggtaataccgactatcaggggctggtgcgtttagtggcgctggtgcaaatggggattgcctggggcaacctgttactggcgttgatgaaaggctttcgcgatgccgcaggtaatgcgttatctctgattgtcggtagcttgattggcgttctcgcgtactacgtcagttatcgtttgggcggttatgaaggggcgttgctgggtctggcgctgattcccgcgctggtggtaattcctgctgttatcatgttgatcaaacgtggtgtcatcccgttaagctatctgaaacccagctgggataacggtctggcagggcagttgagcaaatttacgctcatggcgttgattacgtcggtgaccttgcctgttgcttacatcatgatgcgtaaactgctggcggcgcagtatagctgggatgaagtggggatctggcaaggggtgagcagtatttccgatgcctacctgcaatttattacggcatcgttcagcgtatatttgctgcccacgttgtcgcggttaacggaaaagcgcgatatcacccgggaagtggttaaatcgctgaaattcgtcttaccggcagtggcggcggcgagttttaccgtctggttgctgcgtgattttgctatctggctgctgttgtcgaataaatttaccgctatgcgcgatctctttgcctggcagttggtgggtgatgtgttaaaagtgggcgcttatgtctttggttatctggtgatcgccaaagcgtcactgcggttttatattctggcggaaatcagccagttcactttattgatggtatttgcccactggctaatccctgcgcatggcgcactgggcgcagcacaggcctatatggcaacctatatcgtctatttttctctttgttgtggcgtgtttttactctggcgtaggcgggcatga

SEQ ID NO: 3891 - DNA, 1131 bp, Escherichia coli
atgattccatttaacgcaccgccggtggtgggaaccgaactcgactatatgcagtcggcaatgggtagcggcaaactgtgcggcgatggtggttttacccgtcgctgccagcagtggctggagcaacgttttggcagcgccaaagtgttactgacgccatcctgcaccgcttcgctggagatggcggcgctgctgctcgatatccagcctggcgatgaagtgatcatgccgagctacacctttgtctccaccgccaatgcctttgtgctgcgtggcgcgaaaatcgtctttgtggatgttcgcccggacaccatgaacatcgacgaaacgctgattgaagcggcgatcaccgacaaaacgcgcgttatcgtgccggtccattacgcgggtgtggcctgcgaaatggacaccattatggcgttggcgaagaagcataatctgtttgtggtggaagatgccgctcagggcgtgatgtccacttacaaagggcgtgcgctgggaaccattggtcatattggctgctttagcttccatgaaaccaaaaactacacggcgggtggtgaaggcggcgcgacactgattaacgataaagcgttgatcgaacgagcagagatcatccgtgaaaaaggcacaaaccgcagtcagttcttccgtggtcaggtcgataaatatacctggcgcgatattggctccagctatttgatgtccgatctgcaagctgcgtacctgtgggcgcaactggaagcagcggatcgtatcaatcagcagcgtctggcgctgtggcaaaactactacgatgcgctggcgcctctggcaaaaaatgggcgtatcgagctgccgtcgattcccgatggctgcgtgcagaacgcgcatatgttctacattaaactgcgggatattgatgaccggagcgcattgattaactttctgaaagaagcggaaatcatggcggtgttccattacattccgctgcacggttgccctgcgggggaacgctttggtgagttccacggtgaagatcgctacaccaccaaagagagcgagcgcctgctgcgcctgccgttgttctacaacctgtcgcccgtcaatcagcgtacggtaattgcgaccttgttgaactacttctcctga

SEQ ID NO: 3892 - DNA, 675 bp, Escherichia coli
gtgcccgtccgcgccagtattgagccactaacctgggaaaacgccttctttggtgttaacagcgccatcgtgcgcattacgtctgaagcaccgctcctgacgccagacgcgttagcgccgtggtcacgggtgcaggccaaaattgcggcatcaaatacgggtgaactggatgctctgcaacagctgggattctccctggtagaaggtgaagttgatttggcactacccgtgaacaatgtcagtgatagcggtgcagtagtggcacaagagaccgatattcccgcattacgtcagttagccagcgccgcatttgcgcaaagccgttttcgtgcgccgtggtatgcgcctgacgccagcggtcgcttttatgcacagtggattgaaaatgccgtgcgcggcacctttgatcatcaatgtctgattttacgtgcggcgtccggcgatattcgcggttatgtctctttacgggaactcaatgcgacagatgcgcgaattggcctgctggctggacgcggtgcaggtgctgagctaatgcaaacggcgctaaactgggcgtatgctcgcggtaaaacaactttgcgggtggcgacccagatgggcaacaccgccgcgcttaaacgatacatacaaagtggtgcgaatgtagaaagcaccgcgtactggttatacaggtga

SEQ ID NO: 3893 - DNA, 882 bp, Escherichia coli
atgaaaggtattatcctggcgggcggttccggcacccgattgcatccgattacgcgcggcgtatcgaagcaactgttgccgatttacgataagccaatgatttactatccgctgtcggtgctgatgttggccggtatccgcgaaattctcatcatcactacgccggaagataaaggttatttccagcgcctgctgggcgatggtagtgagttcggtatccagctggaatacgccgaacagcccagtccggacggtctggcgcaggcctttatcatcggtgaaaccttcctcaacggtgaaccttcttgtctggtgctgggcgataacatcttcttcggacagggcttcagtccgaagctgcgtcatgttgcggcgcgcacggaaggggcgacggtatttggctatcaggtgatggacccggaacgttttggcgtggtggagtttgacgacaatttccgcgctatctcgctggaagaaaaaccaaaacagccgaaatcaaactgggcggtgaccgggctttatttctacgacagtaaagtcgtggagtacgcaaagcaggtgaagccgtcggagcgtggtgaactggagattacctccatcaaccagatgtacctcgaggcgggcaacctgaccgttgaactgctcgggcgcggatttgcctggctggataccggcactcacgacagcctgattgaggccagcacttttgtgcagacagtagaaaaacgccagggctttaagattgcctgcctggaagagattgcctggcgtaacggctggctcgatgacgagggtgtgaagcgtgctgccagttcattagcgaaaactggctacggccaatatctgctggagttacttcgtgcccgtccgcgccagtattga

SEQ ID NO: 3894 - DNA, 1068 bp, Escherichia coli
atgagaaagattctgataacaggtggtgccgggtttattggctcggcgctggtgcgttatatcatcaacgaaacgagcgacgcggtggtggtggtcgataagctgacctacgctggaaacctgatgtcgctggcaccggtcgcgcaaagcgagcgctttgcctttgagaaagttgatatctgcgatcgggcagaactggcgcgcgtattcactgagtatcagccagactgtgtcatgcatctggcagccgaaagccatgttgaccgttctattgacggcccggcagcgtttattgaaaccaacattgtcgggacttatacactgcttgaagcggcgcgggcttactggattgcgctgacggaagataaaaaatcagcgttccgttttcatcatatctccaccgacgaagtatatggtgacctgcactcgacggatgatttcttcaccgaaaccacgccgtatgcgccgagcagcccttattccgcgtcaaaagccagcagcgaccatctggtgcgcgcctggctgcggacctatggtttgccgacgcttatcaccaactgctcgaataactacggtccttaccactttccggaaaaactgatcccgctgatgatcctcaacgcgctggcgggtaaaccgctgccggtatatggcaacgggcagcaaatccgtgactggctgtatgttgaagatcacgcccgcgcgctgtattgcgtggcgaccacagggaaagtcggtgaaacctataatattggtggtcacaacgagcgtaagaatctcgatgttgtggaaaccatttgcgagctgctggaagaactggctccgaataagccgcacggcgtggcgcactatcgtgacctgatcacctttgtcgctgaccgtccggggcatgatctgcgttatgccattgatgcttcgaaaattgcccgtgaacttggctggctgccgcaggaaacctttgaaagtggaatgcgtaaaacggtgcagtggtatctggctaatgaaatctggtggaagcaggtgcaggacggcagctatcagggcgagcgtttaggtctgaaaggctaa

SEQ ID NO: 3895 - DNA, 1263 bp, Escherichia coli
atgagttttgcgaccatttctgttatcggactgggttacatcgggttgcctacagcagctgcgtttgcctcaaggcaaaaacaggtgattggtgtcgatatcaaccaacacgcggttgataccatcaatcgtggcgaaatccatatcgtcgagcctgatttggcgagcgtagtaaaaactgccgtagaaggcggttttttacgagcgagcacgacgccagttgaagcggatgcctggttgattgctgtaccgacgccgtttaaaggcgatcatgagccagatatgacgtacgtcgaatcggctgcccgctccatcgcgccagtgttgaaaaaaggcgcgttggtgatccttgaatccacctcgccggtggggtcaaccgagaagatggcagaatggttagcagagatgcgtccagatctcactttcccacagcaggtgggcgagttggcggacgtcaacattgcttactgcccggaacgcgtattaccgggccaggttatggtcgagctgattaaaaacgatcgcgtgattggtggtatgacgccggtttgttcggcccgtgccagcgaactgtacaaaattttcctcgaaggtgagtgtgtcgtcactaactcgcggacggcagaaatgtgtaagctcaccgaaaacagcttccgcgatgtgaatatcgcttttgctaatgaattgtcgctgatttgtgccgatcaggggattaacgtctgggaactgattcgcctggcgaatcgtcaccctcgcgtcaatattcttcagccaggccctggcgtgggcggtcactgcatcgctgttgatccgtggtttatcgtggcacagaacccccagcaggcgcggcttatccgtaccgcgcgcgaagtgaacgatcacaaaccgttctgggttatcgatcaggtgaaagcggcggtggctgattgtctggctgctaccgataaacgcgtcagtgaactgaaaatcgcctgctttggtctggcgtttaaaccgaatattgatgacctgcgcgaaagtccggcaatggaaatcgctgaactgatcgcccggtggcacagcggcgaaacgctggttgttgagcctaacatccaccagttgccgaagaaactgaccgggctttgtactctggcgcagcttgacgaggcgctggcaacggcagatgtgctggtgatgctggtcgatcatagtcagttcaaagttatcaatggcgacaacgtccatcagcagtatgtcgtcgatgccaaaggagtctggcgctga

SEQ ID NO: 3896 - DNA, 1131 bp, Escherichia coli
gtgaaagtactgactgtatttggtacgcgcccggaagccatcaagatggcaccgttggtgcatgcgttggcaaaagatcctttttttgaggctaaagtttgcgtcactgcgcagcatcgggagatgctcgatcaggtgctgaaactcttttccattgtacctgactacgatctcaacataatgcagccaggacagggccttacagagataacctgtcggattctggaagggctaaaacctattcttgccgagttcaaaccagatgtcgtgctggttcacggcgatactacgacgacgctggcaaccagcctggcggcgttttatcagcgtattcctgttggtcacgttgaggctggtctgcgcacgggcgatctctattcgccgtggccggaagaggctaaccgtacattgaccgggcatctggcgatgtatcacttctctccaaccgaaacttcccggcaaaacttgctgcgtgaaaatgttgcggatagccgaatcttcattactggtaatacagtcattgatgcactgttatgggtgcgtgaccaggtgatgagcagcgatacgctgcgttcagaactggcggcaaattacccgtttatcgaccccgataaaaagatgattctggtgaccggtcacaggcgtgagagcttcggtcgtggctttgaagaaatctgccatgcgctggcagacatcgccaccacgcaccaggacatccagattgtctatccggtgcatctcaacccgaacgtcagagagccggtcaatcgcattctggggcatgtgaaaaatgtcattctgatcgatccccaggagtatttaccgtttgtctggctgatgaaccacgcctggctgattttgaccgactcaggcggcattcaggaagaagcgccttcgctggggaaaccggtgctggtgatgcgcgataccactgagcgtccggaagcggtgacggcgggtacggtgcgtctggtcggcacggataagcagcgaattgtcgaggaagtgacgcgtcttttaaaagacgaaaacgaatatcaagctatgagccgcgcccataacccgtatggtgatggtcaggcatgctctcgcattctggaagcgttaaaaaataatcggatatcactatga

SEQ ID NO: 3897 - DNA, 1047 bp, Escherichia coli
atgacacaaccaatgcctgggaaaccggccgaagacgctgaaaatgaactggatattcgtgggttgtttcgtaccttgtgggctgggaagctgtggattattggcatggggctggcgtttgcgttaatcgcgctggcgtatactttttttgctcgccaggagtggagctcgacagcgattaccgatcgtccaacggtgaatatgctggggggatattactcacagcagcaatttttgcgtaacctggatgtccgttcaaacatggcttctgccgaccaaccatcggtcatggacgaagcctataaagagtttgttatgcaactggcctcgtgggatacccgcagagagttctggctgcaaaccgactattacaaacagcggatggtgggcaatagcaaagccgatgcggcgttgctggatgaaatgatcaacaacatcgtgtttattcccggtgacttcacccgcgcggtcaacgacagcgtgaagctgattgccgaaactgcgcctgacgctaataacctgttacgtcagtatgttgcttttgccagccagcgtgcagccagccatctgaatgatgagctgaaaggcgcatgggcggcacgcaccatccagatgaaagctcaggtgaagcgtcaggaagaggtggcgaaagctatctacgatcgccggatgaacagtattgaacaggcgctgaaaattgctgagcagcataatatttcgcgcagtgcgacagatgtgcctgccgaggaattacctgattcagaaatgttcctgcttgggcgtccaatgctccaggctcgactggaaaatttacaggccgtcggtccggcctttgatctcgactatgatcagaatcgggccatgttaaacaccctgaatgttggtccaaccctggatccgcgttttcagacctatcgctatttgcgtacgccggaagaaccggtaaaacgcgatagcccacgtcgtgccttcctgatgattatgtggggcattgtcgggggactgatcggggctggtgtcgcattaacccgccgttgctcgaaatag

SEQ ID NO: 3898 - DNA, 1104 bp, Escherichia coli
gtgaatttactgacagtgagtactgatctcatcagtatttttttattcacgacactgtttctgttttttgcccgtaaggtggcaaaaaaagtcggtttagtggataaaccaaacttccgcaaacgtcaccagggattgatacctctcgttggggggatttcggtttacgcagggatttgcttcacgttcggaattgttgattactatattccgcatgcatctctctatctcgcttgtgctggtgtgcttgttttcattggcgcgctggatgaccgttttgatatcagcgtaaaaatccgtgccaccatacaggccgctgttggcattgttatgatggtgttcggcaaactttatctcagtagcctgggttatatctttggctcctgggagatggtgctcggaccgtttggttacttcctgacgctatttgccgtctgggcggccattaatgcgttcaacatggttgatggcattgatggcttgctgggcgggttgtcctgcgtctcgtttgcagcaatcggtatgattttgtggttcgacgggcaaaccagtctcgcaatctggtgctttgcgatgatcgccgccatcctgccatacatcatgcttaaccttggtatcctgggtcgccgctacaaagtctttatgggggatgcgggcagtacgctgattggttttaccgttatctggatcctgctcgaaacgacccagggcaaaactcatcccatcagcccggttaccgctttgtggataatcgccattccgctaatggatatggtggcgattatgtaccgtcgcctgcgtaaaggcatgagcccattctctccagaccgtcagcatattcaccatttgatcatgcgtgccgggtttacttcccgccaggcgtttgtgctgattacccttgccgcagcactgctcgcttccattggcgtgctggcagaatattctcattttgtcccggagtgggtcatgctggtgctctttttgctagcattcttcctctatggatattgcatcaagcgtgcctggaaagttgctcgctttattaagcgcgtaaaacgcagactgcgtagaaatcgtggtggcagccccaatttaaccaaataa

SEQ ID NO: 3899 - DNA, 219 bp, Escherichia coli
atgccaaaaacgccacgtgtttacgtggcgttttgcttttatatctgtaatcttaatgccgcgctggcgatgctaggaaaattcctggaatttgctggtgtgttatgcaatttgcatatcaaatggttaatttttgcacaggactggtgggttcggaacggactttcccttctgaataaaggtcttcgtggttatacttctgctaataattttctctga

SEQ ID NO: 3900 - DNA, 1260 bp, Escherichia coli
atgaatcttaccgaattaaagaatacgccggtttctgagctgatcactctcggcgaaaatatggggctggaaaacctggctcgtatgcgtaagcaggacattatttttgccatcctgaagcagcacgcaaagagtggcgaagatatctttggtgatggcgtactggagatattgcaggatggatttggtttcctccgttccgcagacagctcctacctcgccggtcctgatgacatctacgtttcccctagccaaatccgccgtttcaacctccgcactggtgataccatctctggtaagattcgcccgccgaaagaaggtgaacgctattttgcgctgctgaaagttaacgaagttaacttcgacaaacctgaaaacgcccgcaacaaaatcctctttgagaacttaaccccgctgcacgcaaactctcgtttgcgtatggaacgtggtaacggttctacggaagatttaaccgctcgcgtactggatctggcatcacctatcggtcgtggtcagcgtggtctgattgtggcaccgccgaaagccggtaaaaccatgctgctgcagaacattgctcagagcattgcttacaaccacccggattgtgtgctgatggttctgctgatcgacgaacgtccagaagaagtaaccgagatgcagcgtctggtaaaaggtgaagttgttgcttctacctttgacgaacccgcatctcgccacgttcaggttgcggaaatggtgatcgagaaggcgaaacgcctggttgagcacaagaaagacgttatcattctgctcgactccatcactcgtctggcgcgcgcttacaacaccgttgttccggcgtcaggtaaagtgttgaccggtggtgtggacgccaacgccctgcatcgtccgaaacgcttcttcggtgcggcgcgtaacgtggaagagggcggcagcctgaccattatcgcgacggcgcttatcgataccggttctaaaatggacgaagttatctacgaagagtttaaaggtacaggcaatatggaactgcacctctctcgtaagatcgctgaaaaacgcgtcttcccggctatcgactacaaccgttccggtacccgtaaagaagaactgctcacgactcaggaagaactgcagaaaatgtggatcctgcgcaaaatcattcacccgatgggcgaaatcgatgcaatggaattcctcattaataaactggcaatgaccaagaccaatgacgatttcttcgaaatgatgaaacgctcataa

SEQ ID NO: 3901 - DNA, 330 bp, Escherichia coli
atgagcgataaaattattcacctgactgacgacagttttgacacggatgtactcaaagcggacggggcgatcctcgtcgatttctgggcagagtggtgcggtccgtgcaaaatgatcgccccgattctggatgaaatcgctgacgaatatcagggcaaactgaccgttgcaaaactgaacatcgatcaaaaccctggcactgcgccgaaatatggcatccgtggtatcccgactctgctgctgttcaaaaacggtgaagtggcggcaaccaaagtgggcgcactgtctaaaggtcagttgaaagagttcctcgacgctaacctggcgtaa

SEQ ID NO: 3902 - DNA, 1266 bp, Escherichia coli
atgagcaaaacacatttaacagaacagaagttttccgacttcgccctgcatccgaaggttgtagaagcccttgaaaaaaaagggtttcataactgtacgcccattcaggcactggcccttccgctgacgctggcgggtcgtgacgtagccgggcaggcgcaaaccggtaccgggaaaacgatggcgtttcttacgtcaacgtttcattatcttctctctcatcccgcgattgccgatcgcaaagtgaatcaaccgcgtgccttaattatggcaccgacgcgtgaacttgccgtgcagatccacgccgacgcggaaccgctggcggaagctaccggcctgaagttaggtctggcttacggtggtgatggctacgacaaacagctgaaagtgctggaaagcggcgttgacattctgattggcaccacgggtcgtttaattgactacgccaagcagaaccacattaacctcggtgccattcaggtggtggtactggacgaagccgatcgcatgtacgatctgggctttattaaagatatccgctggctgttccgccgtatgccgcctgcaaaccagcgcctcaacatgctgttctccgccacgctttcgtaccgggtacgtgaactggcgttcgagcagatgaacaatgccgaatatattgaagtggaaccggaacagaaaacgggccaccgtattaaagaagagcttttctacccttctaacgaagaaaaaatgcgtttgctgcaaacgctgatcgaagaagagtggccagacagagcgattattttcgccaacaccaaacaccgttgtgaagagatctggggccacctggcggcagatggtcatcgtgtcggtttattgacaggcgatgtcgcgcagaaaaaacgtctgcgtattcttgatgaatttacccgtggcgatctggatattctggttgccaccgacgttgccgcgcgtggtttgcatattcctgctgtgacacacgtctttaactacgatttacccgatgactgtgaagattacgttcaccgtattggtcgtacaggtcgcgctggcgcaagcggtcattccatcagcctggcgtgtgaagagtatgcattgaatttgcctgctattgagacctatattggtcactcaattccggtaagtaaatacaatccggacgcattgatgaccgatctgccaaaaccgctgcgcctcacgcgcccgcgcacaggcaatggtccgcgtcgtactggcgctccgcgtaatcgtcgtcgttcaggttaa

SEQ ID NO: 3903 - DNA, 1485 bp, Escherichia coli
atgggttccacctcgtcgctgtatgcagccattgatctcggttcgaatagttttcatatgctggttgtgcgcgaggtggctggaagcatccagacgctgacgcgaataaaacgcaaagtgcgtctggctgctggcctgaatagcgaaaatgccctgtctaatgaagcaatggagcgcggttggcaatgtctgcgcctgtttgctgaacgtctgcaagatatccctccctcgcaaattcgcgttgtcgctacggcgacattacgccttgccgtcaatgcgggtgattttattgccaaagcgcaggaaatcctcggttgtccggtacaggtgatcagcggtgaagaggaagcgcgtctgatttatcagggcgttgctcacaccactggcggtgccgatcagcgcctggtggtggatatcggcggagccagtactgaactggtaaccggcacgggtgcacaaaccacctctttgttcagcctgtcgatgggctgcgttacctggctggaacgctattttgccgatcgtaatctggggcaggaaaattttgatgctgcagaaaaagcggcacgcgaagtgttacgtccggttgccgatgaattacggtatcacggctggaaagtgtgcgttggcgcttccggcaccgtgcaggcgttacaggaaatcatgatggcacaggggatggatgaacgcattaccctggaaaagttgcagcaactgaaacaacgcgccattcattgcggtcggctggaagagctagagattgacgggctgacgctggaacgtgcgttagtgttcccgagtggtctggcgatcctgatagccatttttaccgaactgaatattcagtgtatgaccctggcgggcggtgcgctgcgtgaaggcctggtctacggtatgttgcatcttaccgtcgagcaggatattcgcagccgtacgctgcgtaatattcagcgccgctttatgatcgatattgatcaggcacagcgcgtagccaaagttgcggctaacttcttcgatcaggtggaaaatgaatggcatcttgaagcaataagccgcgatttgctcatcagcgcctgtcagcttcatgaaatcggcctgagcgttgacttcaaacaagcgccgcaacacgctgcttatctggtgcgtaacctggatcttcccggttttacccccgcacagaaaaaactgctggcgacgctactgctcaaccagactaatccggtcgatctctcatcgctgcatcagcaaaatgccgtaccaccgcgcgtcgcagaacaactctgccgtttactccgcctggctatcatttttgccagccgtcgccgtgacgatctcgtgccagagatgacattacaggctaaccatgaactgttgactttgacgcttccgcaaggttggctaacccaacatccgctgggtaaagagattattgatcaggaaagccagtggcagagctatgtccactggccgctggaagtgcattaa

SEQ ID NO: 3904 - DNA, 2022 bp, Escherichia coli
atgcgtctaaaccccggccaacaacaagctgtcgaattcgttaccggcccctgcctggtgctggcgggcgcgggttccggtaaaactcgtgttatcaccaataaaatcgcccatctgatccgcggttgcggttatcaggcgcgacatatcgcggcggtgacctttaccaataaggcggcacgcgagatgaaagagcgtgtcgggcagacgctggggcgcaaagaggcgcgtgggctgatgatttccaccttccacacgctggggctggatatcatcaaacgcgagtatgcggcgctggggatgaaggctaacttttcgctgtttgacgataccgatcagcttgctttgcttaaagagttgaccgaggggctgattgaagatgacaaagttctcctgcaacagctaatttcgaccatctccaactggaagaacgatctcaaaacaccggcgcaggcggcggcagaggcaaagggcgagcgggaccgtatttttgcccattgttatgggctgtatgatgcacacctgaaagcctgtaacgttctcgatttcgatgatctgattttattgccgacgttgctgctgcaacgcaatgaagaagtccgcgagcgctggcagaacaaaattcgctacctgctggtggatgagtatcaggacaccaacaccagccagtatgaactggtgaaactgctggtgggcagccgcgcgcgctttaccgtggtgggcgatgacgaccagtcgatctactcctggcgcggcgcacgtccgcagaatctggtgctgctgagccaggattttccggcgctgaaggtgattaagcttgagcagaactaccgctcttccggacgtattttgaaagcggcgaacatcctgatcgccaataacccgcacgtctttgaaaagcgtctgttctccgaactgggttacggcacagagctaaaagttttaagcgcgaataacgaggaacatgaagccgagcgcgtcaccggcgagctgatcgcccatcacttcgtcaataaaacgcagtacaaagattacgccattctttatcgcggcaaccatcagtcgcgggtatttgaaaaattcctgatgcaaaaccgcatcccgtacaaaatatctggcggtacgtcgtttttctctcgtcctgaaatcaaggacttgctggcttatctgcgcgtgctgactaacccggacgatgacagcgcatttctgcgtatcgttaacacgccgaagcgagagattggcccggcgacgctgaaaaagctaggtgaatgggcgatgacgcgcaataaaagcatgtttaccgccagctttgatatgggcctgagtcagacgcttagcggacgtggttatgaagcattgacccgcttcactcactggctggcagaaatccagcgtctggcggagcgggagccgattgccgcggtgcgcgatctgatccacggcatggattatgaatcctggctgtacgaaacatcgcccagcccgaaagctgccgaaatgcgcatgaagaacgtcaaccaactgtttagctggatgacggagatgctggaaggcagcgaactggatgagccgatgacgctcacccaggtggtgacgcgctttactttgcgcgacatgatggagcgcggcgagagcgaggaagagctggatcaggtgcaactgatgactctgcacgcgtcgaaagggctggagtttccctatgtctacatggttggtatggaagaagggtttttgccccaccagagcagcatcgatgaagacaatattgatgaggagcggcggctggcctatgtcggcattacccgcgcccagaaggaattgacctttacgctgtgtaaagaacgccgtcagtacggcgaactggtgcgcccggagccgagccgcttcctgctggagctgccgcaggatgatttgatttgggaacaggagcgcaaagtggtcagcgccgaagaacggatgcagaaagggcaaagccatctggcgaatctgaaagcgatgatggcggcaaaacgagggaaataa

SEQ ID NO: 3905 - DNA, 282 bp, Escherichia coli
atggcaaaaacagcagcagcactgcatatccttgtaaaagaagagaaactggctctggatcttctcgagcagatcaagaatggtgccgatttcggcaagctggcgaagaaacactccatttgcccgtcaggcaaacgcggcggtgatttgggtgaattccgccagggtcaaatggttccggcgttcgataaagtggttttctcttgtccggtactggagccaaccggcccgctgcatacccagttcggttaccacatcattaaggtgctgtaccgtaactaa

SEQ ID NO: 3906 - DNA, 1476 bp, Escherichia coli
atggctaactacttcaatacactgaatctgcgccagcagttggcacagctgggcaaatgtcgctttatggggcgcgatgaattcgccgatggcgcgagctaccttcagggtaaaaaagtagtcatcgtcggctgtggcgcacagggtctgaaccagggcctgaacatgcgtgattctggtctcgatatctcctacgctctgcgtaaagaagcgattgctgagaagcgcgcatcctggcgtaaagcaaccgaaaatggttttaaagtgggtacttacgaagaactgatcccgcaggcggatctggtggttaacctgacgccggacaagcagcactctgatgtagtgcgcaccgtacagccactgatgaaagacggcgcggcgctgggttactcacacggtttcaacatcgtcgaagtgggcgagcagatccgtaaagacatcaccgtcgtaatggttgcgccgaaatgccctggcaccgaagtacgtgaagagtacaaacgtggattcggcgtaccgacgctgattgctgttcacccggaaaacgatccaaaaggcgaaggcatggcgatcgctaaagcatgggcggctgcaaccggcggtcaccgtgcgggcgttctggaatcctctttcgttgcggaagtgaaatctgacctgatgggcgagcaaaccatcctgtgcggtatgttgcaagctggttctctgctgtgcttcgacaagctggtggaagaaggcaccgatccggcatacgcagaaaaactgattcagttcggttgggaaaccatcaccgaagcgctgaaacagggcggcatcaccctgatgatggaccgtctttctaacccggcgaaactgcgtgcttacgcgctttctgagcaactgaaagagatcatggcgccgctgttccagaaacatatggacgacatcatctccggcgaattctcctccggcatgatggctgactgggccaacgacgataagaaactgctgacctggcgtgaagagactggcaaaaccgcattcgaaaccgcgccgcagtatgaaggcaaaatcggtgaacaggagtacttcgataaaggcgtactgatgatcgcgatggtaaaagcaggcgttgaactggcgtttgaaaccatggttgattccggcatcatcgaagaatctgcttactatgaatcactgcacgaactgccgctgattgccaacaccatcgcccgtaagcgtctgtacgaaatgaacgtggttatctccgatactgccgagtacggtaactatctgttctcttacgcttgtgtgccactgctgaaaccgtttatggcagagctgcaaccgggcgacctgggtaaagctattccggaaggtgcggtagataacgcgcagctgcgtgatgtaaatgaagcgattcgcagccatgcgattgagcaggtaggtaagaaactgcgcggctatatgacggatatgaaacgtattgctgttgcgggctaa

SEQ ID NO: 3907 - DNA, 975 bp, Escherichia coli
atgacaggaaatttattgcggaaattgatatattcacaacgtcacattgcaatttctgcaacgtcaacattaagggctgcgccattggatttacgcgatctgaaaaccttcctgcatctggcggaaagccgccattttggccgcagcgcgcgggcaatgcacgttagcccgtccacgctctctcggcagattcagcgcctggaagacgatctcggtcagccgctgtttgtgcgcgataaccgcacggtaacgctaaccgaagcaggcgaagaactgcgcgttttcgcccagcaaacgctgttgcagtatcaacagctgcgccacaccatcgatcagcaaggaccgtcgctctctggcgaattacatatcttctgctcggtgaccgctgcctacagccatctgccgccgattctcgatcgcttccgcgcggaacacccgtcggtggagattaaactcacgactggtgatgcggcagatgcgatggaaaaggtcgtcactggcgaagcggatctggcgattgccgggaaaccggagactctgcccggcgcagtggcattttcgatgctggagaatctggcagtagtgctgattgcccctgcgctaccctgcccggtgcgtaaccaagtttcggcagataagccggactggtctacagtgccgtttatcatggccgatcagggaccggtgcgccggcgcattgaactgtggtttcgacgcaacaaaatcagcaacccgatgatttacgctacggtcggcgggcatgaagcgatggtgtcgatggtagcgctcggctgtggcgtagccttgttgccggaagtggtgctggaaaacagcccggaaccggtgcgtaaccgcgtgatgattttagagcgcagtgatgaaaaaacgccgtttgaactgggcgtgtgtgtgcagaaaaagcggctacatgagccgctgattgaggcattctggaagattttgccgaaccattaa

SEQ ID NO: 3908 - DNA, 1548 bp, Escherichia coli
atgatggcagactcacaacctctctccggcgccccggaaggcgccgaatatttaagagcggtgctgcgcgcgccggtctacgaagcggcgcaggtcacgccgctacaaaaaatggaaaaactctcgtcgcgtctcgataacgtgattctggtgaaacgcgaagaccgtcagccagttcatagctttaagctgcgcggcgcatacgccatgatggcgggcctgacggaagaacagaaagcgcacggcgtgatcaccgcttctgcgggtaaccacgcgcagggcgtcgcgttttcttccgcacggttaggcgtgaaggcactgatcgtcatgccaaccgccaccgccgatatcaaagtcgacgcggtgcgcggcttcggcggcgaagtgcttcttcacggcgcgaactttgatgaagcaaaagcgaaagcgatcgaactgtcacagcagcagggcttcacctgggtgccgccgttcgaccatccgatggtgatcgccgggcaagggacgctggcgctggaactactccagcaggatgctcatctcgaccgcgtatttgtgccggtcggcggcggcggcctggcggcgggcgtggcggtgttgatcaaacaactgatgccgcaaatcaaagtgatcgccgtggaagcggaagactccgcctgtctgaaagcggcgctggatgccggtcatcctgttgatctgccgcgtgtggggctgttcgccgaaggcgtcgcggtaaaacgcatcggcgatgaaaccttccgtttatgccaggagtatctcgacgacatcatcaccgtcgatagcgatgccatatgtgcggcgatgaaagacctgttcgaagatgtgcgcgcggtggcggaaccctctggcgcgctggcactggcgggaatgaaaaaatatatcgcccagcacaacattcgcggtgagcggctggcgcatattctttctggtgctaacgtgaactttcacggcctgcgctacgtctcggaacgttgcgaactgggcgaacagcgtgaagcgttgctggcggtaaccatcccggaagagaagggcagcttcctgaagttctgccagctgcttggcgggcgctcggtcaccgagttcaactaccgttttgccgatgccaaaaacgcctgcatttttgttggtgtgcgcctgagccgtggtctcgaagagcgcaaagaaattttgcagatgctcaacgatggcggctacagcgtagtggatctctccgacgacgaaatggcgaagctgcatgtgcgctatatggtcggcgggcgtccgtcgcatccgttgcaggaacgcctctacagcttcgaattcccggaatcgccgggcgcgctgttgcgcttcctcaacacgctgggtacgcactggaacatttctttgttccactatcgcagccatggcaccgactacgggcgcgtactggcggcgttcgaacttggcgaccatgaaccggatttcgaaacccggttgaatgagttgggttacgattgccacgacgaaaccaataacccggcgttcaggttctttttggcgggttaa

SEQ ID NO: 3909 - DNA, 1851 bp, Escherichia coli
atgcctaagtaccgttccgccaccaccactcatggtcgtaatatggcgggtgctcgtgcgctgtggcgcgccaccggaatgaccgacgccgatttcggtaagccgattatcgcggttgtgaactcgttcacccaatttgtaccgggtcacgtccatctacgcgatctcggtaaactggttgccgaacaaattgaagcggctggcggcgttgccaaagagttcaacaccattgcggtggatgatgggatcgctatgggccacgggggcatgctttattcactgccatctcgcgaactgatcgctgattccgttgaatatatggtcaacgcccactgcgccgacgccatggtctgcatctctaactgcgacaaaatcaccccggggatgctgatggcttccctgcgcctgaatattccggtgatctttgtttccggcggcccgatggaggccgggaaaaccaaactgtccgatcagatcattaagctcgatctggttgatgcgatgatccagggcgcagacccgaaagtttctgactcccagagcgatcaggttgaacgatccgcctgcccaacctgcggttcctgctccgggatgtttactgctaactcaatgaactgcctgaccgaagcgctgggcctgtcgcagccgggcaacggctcgctgctggcaacccacgctgatcgcaagcaactgttcctcaatgctggtgaacgcattgttgaattgaccaaacgttactacgaacaggatgatgaaagcgcactgccgcgtaacatcgccagtaaggcggcgtttgaaaacgccatgacgctggatatcgcgatgggcggctctaccaacaccgttcttcacctactggcggcggcgcaggaagcggaaatcgacttcaccatgagtgatatcgataagctctcccgcaaagtaccgcagctgtgtaaagttgcgccgagcacccaaaaataccatatggaagatgttcaccgtgctggtggtgttatcggtattctcggcgagctggatcgtgcggggttactgaaccgtgatgtgaaaaatgtacttggcctgacgttgccgcaaacgctggaacaatacgacatcatcgtgacccaggatgatgcggtaaaaaatatgttccgcgctggcccggcgggcattcgtactacacaggcattctcgcaggattgccgctgggatacgctggacgacgatcgctccaatggctgtatccgctcgctggaacacgcttacagcaaagacggcggcctggcggtgctctacggtaatttcgcagaaaacggctgcatcgttaaaaccgcaggcgtcgatgacagcatcctcaaattcactggcccggcgaaagtctacgaaagccaggacgacgcggtagaagcgattctcggcggtaaagttgtcgccggagatgtggtagtaattcgctatgaaggcccgaaaggcggtccggggatgcaggaaatgctctacccaaccagtttcctgaaatcaatgggtctcggtaaagcctgtgcgctgatcaccgacggtcgtttctctggcggcacctctggtctttccatcggccacgtctcaccggaagcggcaagtggcggcagcattggcctgattgaagatggtgacctgatcgctatcgacattccgaaccgtggcattcagttacaggtaagcgatgccgaactggcggcgcgtcgtgaagcgcaggaagctcgtggcaacaaagcctggacaccgaaaaatcgtgaacgtcaggtttcctttgcgctgcgtgcctacgccagcctggcaaccagcgccgacaaaggcgcggtgcgtgataaatcgaaactggggggttaa

SEQ ID NO: 3910 - DNA, 930 bp, Escherichia coli
atgaccacgaagaaagctgattacatttggttcaatggggagatggttcgctgggaagacgcgaaggtgcatgtgatgtcgcacgcgctgcactatggcacctcggtttttgaaggcatccgttgctacgactcgcacaaaggaccggttgtattccgccatcgtgagcatatgcagcgtctgcatgactccgccaaaatctatcgcttcccggtttcacagagcattgatgagctgatggaagcttgtcgtgacgtgatccgcaaaaacaatctcaccagcgcctatatccgtccgctgatcttcgttggtgatgttggcatgggcgtaaacccgccagcgggatactcaaccgatgtgattatcgccgctttcccgtggggggcgtatctgggcgcagaagcactggagcaggggatcgatgcgatggtttcctcctggaaccgtgctgcaccaaacaccatcccaaccgcagcgaaagctggaggtaactacctctcttccctgttggtgggtagcgaagcgcgccgccacggttatcaggaaggtatcgcgctggatgtgaatggttatatctctgaaggcgcaggagaaaacctgtttgaagtgaaagacggtgtgctgttcactccaccgttcacctcctccgcgctgccgggtattacccgtgatgccatcatcaaactggcgaaagagctgggaattgaagtgcgtgaacaggtgctgtcgcgcgaatccctgtacctggcggatgaagtctttatgtccggtacggcggcagaaatcacgccagtgcgcagtgtagatggtattcaggttggtgaaggccgttgcggcccggttaccaaacgcattcagcaagccttcttcggcctcttcactggcgaaaccgaagataaatggggctggttagatcaagttaatcaataa

SEQ ID NO: 3911 - DNA, 264 bp, Escherichia coli
atgatgcaacatcaggtcaatgtatcggctcgcttcaatccggaaaccttagaacgtgttttacgcgtggtgcgtcatcgtggtttccacgtctgctcaatgaatatggccgccgccagcgatgcacaaaatataaatatcgaattgaccgttgccagcccacggtcggtcgacttactgtttagtcagttaaataaactggtggacgtcgcacacgttgctatctgccagagcacaaccacatcacaacaaatccgcgcctga

SEQ ID NO: 3912 - DNA, 1647 bp, Escherichia coli
atgaatggcgcacagtgggtggtacatgcgttgcgggcacagggtgtaaacaccgttttcggttatccgggtggcgcaattatgccggtttacgatgcattgtatgacggtggcgtggaacacttgctgtgccgacacgagcaaggtgcagcaatggcggctatcggttatgcccgtgctaccggcaaaactggcgtttgcatcgccacgtctggcccaggtgcaaccaacctgataaccgggcttgcggacgcgctgttagattccatccccgttgttgctatcaccggtcaggtatccgcaccgtttatcggcactgacgcatttcaggaggtggatattctggggttgtcgttagcctgcaccaagcacagtttcctggtgcaatcactggaagagttaccgcgtatcatggccgaagcgtttgacgtcgccagctctggtcgtcctggtccggttttggtcgatattccaaaagatatccagttagccagcggcgatctggaaccgtggttcaccactgttgaaaacgaagtgactttcccacatgccgaagtcgagcaagcgcgtcagatgctggcaaaagcgcaaaaaccgatgctgtacgttggcggtggcgtgggcatggcgcaggcagtttcggctttgcgtgaatttctcgctgccacaaaaatgcctgccacctgtacgttgaaagggctgggcgcagtagaagcagattatccgtactatctgggcatgctggggatgcacggcaccaaagcggcgaacttcgcagtgcaggagtgcgatctactgatcgccgtgggtgcacgttttgatgaccgggtgactggcaaactgaacaccttcgcaccacacgccagcgttatccatatggatatcgacccggcagaaatgaacaagctgcgtcaggcacatgtggcattacagggtgatttaaatgctctgttaccagcattacagcagccgttaaatatcaatgactggcagcaatactgcgcgcagctgcgtgatgaacatacctggcgttacgaccatcccggtgacgctatctacgcgccgttgttgttaaaacaactgtcggatcgaaaacctgcggattgcgtcgtgaccacagatgtggggcagcaccagatgtgggctgcgcagcacatcgcccacactcgcccggaaaatttcatcacctccagcggcttaggcaccatgggttttggtttaccggcggcggttggcgcacaagtcgcgcgaccgaacgataccgtcgtctgtatctccggtgacggctctttcatgatgaatgtgcaagagctgggcaccgtaaaacgcaagcagttaccgttgaaaatcgtcttactcgataaccaacggttagggatggttcgacaatggcagcaactgtttttccaggaacgatacagcgaaacaacccttaccgataaccccgatttcctcatgttagccagcgccttcggcatccctggccaacacatcacccataaagaccaggttgaagcggcactcgacaccatgctgaacagtgatgggccatacctgcttcatgtctcaatcgacgaacttgagaacgtctggccgctggtgccgcctggtgccagtaatactgaaatgttggagaaattatcatga

SEQ ID NO: 3913 - DNA, 1521 bp, Escherichia coli
atgtcactgtcaattgttcatacccgcgcagccctgggagtaaatgcgcccccaatcactgttgaggtacatatcagtaaaggtctaccaggcttaacgatggtgggcttaccagaaacaacggtaaaagaagctcgcgatcgcgtgcgcagcgccattatcaatagcggatatgaatatccggcgaaaaaaatcaccatcaaccttgctccagccgatctgccaaaagaagggggacgatatgatttgcctatcgctattgcgttactggcggcctcagaacagcttacagccaataagttagatgaatatgaattagtcggagaactggcgcttacaggcgctctgcgtggcgttcccggcgcaatctccagtgcaactgaagctattaagtcgggcagaaaaattatcgtcgcgaaagataacgaagatgaagtggggctaattaacggtgaaggatgcctgatagccgatcatctgcaggctgtctgcgcgtttctggaaggtaagcacgctctcgaacacccgaaaccaactaatgcagtatcccgggcgctacaacatgatctcagtgatgttgtcggtcaggagcaaggaaagcgaggactggaaattaccgccgctggcgggcacaaccttttactgattggaccgccgggaacaggtaaaacaatgctcgccagccgtattaatagccttttgccagatttaagcaatgaagaggcactggagagcgctgcgatattaagtctggtaaatgctgaatcagtacaaaaacaatggcggcagcgcccgttccgctcacctcatcacagtgcgtcgttaactgcgatggtaggcggtggtgcaattccagggccaggtgaaatttcgctggcgcataacggcgtgctttttcttgatgagctacctgaatttgaacggcgtacactggatgccttgcgagagccgattgaatccgggcagatccatctttcacgcacacgagcaaaaataacctatccagcccgtttccagcttgtcgcggcaatgaatcccagccctaccggacattatcagggaaaccataaccgctgcacaccagaacagacattacgttatctcaaccggctctcggggccctttctcgaccgcttcgatctctcactggagatcccattaccgccccccggcattttgagtaaaacgatagtgccgggagaaaacagcaccaccgttaaacaacgtgtaatggccgccagagagcgccaatttaagcggcagaataaactgaacgcctggctggataatccggaaatacgccaattctgcaagcttgaaagcgaagatgcgcagtggctggaagaaacgctgatccatctggggttatcgattcgtgcctggcagcggttattgaaagttgcacgaaccattgctgatattgatcagtctgacattatcacacgtcagcatttgcaggaggcagttagctatcgtgcgattgaccgtttgctcatccatctgcaaaaactactgacataa

SEQ ID NO: 3914 - DNA, 339 bp, Escherichia coli
atggcggaaagctttacgacgactaatcgatatttcgacaataaacattatccacgtggattctctcgtcatggtgacttcaccatcaaagaggcacaactgcttgagcgtcatggttatgccttcaatgagttggatcttggcaaacgcgagccggttaccgaggaagagaaactcttcgtagcagtatgccgtggcgaacgtgaaccagtgacagaagcagaacgcgtgtggtccaagtatatgacgcgtatcaagcgtccaaaacgttttcacaccctttccggcggtaaaccgcaggttgaaggtgctgaagactacaccgattctgacgattaa

SEQ ID NO: 3915 - DNA, 840 bp, Escherichia coli
gtggatacggaattgttaaaaactttcctggaagttagccgaacgcgtcactttggtcgagcggctgaatcgctctatctgacccaatcagccgtgagctttcgaatcagacaactggaaaatcaactgggtgtgaatcttttcacccgccacagaaacaatatccgtttaaccgctgccggagaaaagcttcttccttatgcagaaacgctcatgagcacctggcaggccgcccgcaaggaggtggcgcatacctcacgacataatgagttttctatcggtgccagcgcctcgctgtgggagtgtatgcttaatcagtggctgggacgtttgtatcaaaatcaggatgtccatacaggcttacagttcgaagcgcgaattgcccaacggcagtctctggtaaaacagttacatgaacgccagcttgatcttcttattacaactgaagcccccaaaatggacgaattttgtagtcagttgctggggtatttcactttagcgctttataccagtgccccttctaaactaaagggagatcttaactatctgcgactagagtgggggccagattttcaacagcatgaggcaggtttgatcggtgctgacgaagttcccattctgacaaccagttctgctgaactggcacagcaacagattgcgatgcttaatggttgcacctggctacccgtcagttgggcacgtaaaaaaggcggcctgcataccgttgtcgatagcacaacactttcgcggccgctttatgccatatggctacaaaatagcgataaaaatgcgttgattcgcgatctattgaaaattaacgtgctggatgaagtgtattaa

SEQ ID NO: 3916 - DNA, 165 bp, Escherichia coli
atgactccgggcaggcgggggataaatgcccgtctgcccgcgccgggaaaagaccgcacgccggtggcgctgaaaggggccgcgctcacgcgccgcccctttcattacgcggacgttctgctgtgggcttctgtcttttcagacctgtcatttgcctgttactga

SEQ ID NO: 3917 - DNA, 564 bp, Escherichia coli
atgcacagtcagttaaaagaacgtatccggctgatgcgcgcaaggctggataacgccgcgccggttgctgacatccgggctgaatctcagctttttgtgactcttgccccggtctgtgatcgcctggttacgctggcggagatcagcaaccgtgatcacattctggaaccctctgccggcaccggggccatactgcgggcgattcgggataccgcgccgggggccatgtgtgatgcagtggaaatcaacagcgggctggtccggtatctgcgggaaaattttaacggtgtcagggttcagtgtggcgacttcatggaatggcagccggtgcagtattacagccgggttatcatgaatccgccgttcagccacgggcaggatatccggcatatcctgcgggccttttccctgttgcgtccgggtggcgtgctggttgccgtctgtctgaacgggccgcgccagcaggagaagctattaccgttttctgacgtccgcgaggagctgccgcgcggcacgtttgcttatacccgtgttccgacgatgattattcgtctgcgtgcctga

SEQ ID NO: 3918 - DNA, 1362 bp, Escherichia coli
atgacattagcagcaatcaccatgactgccccggaagccgccagccctgtgcagatgtaccgcgcgacctactcaccggatgacaacaaactgcgcctgtatgccgcgtcacgtcttgacccggagacgtataaaaaagtgcatgatgccggttttcgctgggcaccaaaacaggcgctgtttgtcgcgccggcctggacaccgggccgggaagacgtactcctctcacttgccggagagattgtggatgaagacagtacgctcgctgaacgtcaggaagcacgggcggagcggtttaccggatacagcggaaagcgggccagtgaatccgcacaggcacttgatgaagtggaaagactggccgcgatgatcccgcccggtcagcccattcttgtggggcatcacagcgaacgccgcgcccgtcgtgatgcgcagcgtattgaaaacggcatgaaacgtgccgtgatgctctttgaacgtgcggaatactgggaagaacgggcgcggtcggcactgcttcacgcgaagtataaagaacgtccggacgttcgctggcgtcgtatcaaaaaaatcgaagctgatttgcgcaaggctgaaaagatcatcgcgcagtcgcagaaatatctaacgatgtggcgggctgaatcgctggatctgaatatggcaaaactcatcagcagttgtgaccgtatcagtgcctgtttcccgctggatacgtatccgcgcccggcagaaaaaagccagtatgaagggagccggtcgttatggtcggccctggatgatgacatcatcaccacggagcaggcccgcgaaattgcgatccgctgtcatgaacggcagattcagcatcagcaacgctgggttaaccactatcagaaccgcctgatctatgagcgtgccatgctggacgaaagcggcggcgtggttacccggacacaggattttgagccgggaggacaggttttcagccggggcgagtggctgaccatcatccgtgtgaacaaaagcaacggggcggtgagttcagtcacaacgccgaattacagttttctcgggtacaacggcacgatgaaagtgacgcccgatcgcatcacggactacaaagcaccatcggcagaagaggctgccgtcgccagccaggccgcgaagcgtccgccggtagtcaactatccgggggaaggtttccgggaaatgacaaaggcacagtgggccgccctgccccgggactgtaaggccgtgcgcagtgtggcagaagcagaagaccacggggcataccgctaccgccgcacaatggacaataatttccgtctggtgaatgtgtatatcaccgacatgaaaattacggaaatcccacagaaataa

SEQ ID NO: 3919 - DNA, 231 bp, Escherichia coli
atgacaataagtattgtttcaccttccgcagcggctgtaaagccccgccgtcatccccgtttcagacgcgaagacatccccgcgccggaaattgaccccgtgctgaaagccttcgggcgacacattgcccggagttttcaccgggggcgtggtgtacacatccccgccatgaaaaacacggccttcgggcaggtgctccgcacactcgaactgaaacgcgcttttaactga

SEQ ID NO: 3920 - DNA, 1203 bp, Escherichia coli
atgccaaactggtgctcgaatcgtatgtatttttctggtgaaccggcacagatcgctgagattaaacgactggccagcggtgcagtcacaccgctttatcgccgcgccacaaatgaaggtattcagctgtttctggccggaagtgccggacttctgcagattactgaaaatatccgctctgaacagtgccccggagtgacggctgccggacgtggtgctgtatcgatggaaaatatcgcgttcacccgctggctgacacacctgcagaacggtgtactgctggatgagcaaaactgcctgatgctgcatgaactctggctgcagagcggtactggacagcgtcgctgggaaggattaccggatgatgtcagggaaatcatcactgtgcatttcaccgcaaaaagaggtgactggtgtgacatctggggtaacgaggatgtatcggtgtggtggaaccgtctgtgtgacaacgtgctgccggaaaaaacaatgccgtttgacctgctgacggttctgccgacccgcctggatgttgaagtgaacggctttaacggtggtgttctgaacggtgttccttctgcatatcactggtatacagaacggtatggcgtgaagtggccttgtgggtatgacctgaatatcagcagtcagggagacaacttcattcaggttgatttcgacacgccgtggtgtcagccggaaagcgacgttattgcagaattaagccgccgtttcagctgcacgctggagcactggtatgccgaacagggctgtgggaagcgggccacgctgacgcgtcgcccgttccccttcctgtttgtgatgtgcccggaatgtttttttctgatgttatttttctgtggttaccgtgcttgttattgttcttcttctttttcctcttcctcttctttccgttcctctcctgtttatggcttttccgggcgtccccctggcggggcgggctgtcgtgagcggagccagcgaagctgtctccgccctggcgggcttccatccctgacgcgaaaccctggcttgcagcgaccgttccggtcgcgccgcctctgtcgcgccgtggcctgcgctcctggcatcccggcaaaaggccgccgggatgtaaggggcaacgccgtttcgcaaaccgcgcttcacgtcgttgcggcgggtccctgctcattgcctgtcgggtgccacacacccgtatga

SEQ ID NO: 3921 - DNA, 180 bp, Escherichia coli
atgatccgcattgaaattcttttcgaccgccagagcacaaaaaacctcaaatcaggcacacttcaggcgctacagaatgaaatcgaacaacgtctgaaaccacactacccggaaatctggctgcatatgtgggaatccccgtccttcagagcggggagctgtcaaccagcactccattga

SEQ ID NO: 3922 - DNA, 393 bp, Escherichia coli
atgtacgacggcgaagaaaggaaaaaactttcactctaccttcacccggaggactctgccgattgtcttgcactggctgaaatcgaaactgttccccggaaaaaacggggggagttatatcggcaggctttgataaccggcctgataatgcatcagcttgatgagcgaattcccgccgtgttaaccgcgctattcaccagagaactgaatgcggatgaggtcattagtcagattgccaggataacaggctggaaaccctcctccggtgatttaaaagaggtactgaaggcgttgggagggcttcagagtacagtttcaccagaatactctcaggatgacggtgaacaggcccgtctgaaagcggctagggtgaagatgcaaaacctgatctaa

SEQ ID NO: 3923 - DNA, 975 bp, Escherichia coli
atgaaaattttttgcgatgatggttctacaaatgtgaaacttgcctggtttgaaggcaagacgctgaaaagtgcggtatcagtgaactcttttcgccataactggaaagtcgagggtttaggcagcagtcgtacctataactatctgcttgatggccgtaaatatacctacgactcggtcagcgaagatgcgatcagcacgactcatattgagtatcagtactctgatacaaatgtgttggcagttcaccacgcattactgaacagtggaattgaaccccaggagatcgatctcactgttacgttacctatcagcgagttttacacggccgactgccagaaaaatacgcttaacattgagagaaaaattcgcaacctgatgcgggaagtcaccctgaacaaagggggaacttttaccattaaaagcgttgaagtgatgcctgaatcactcccggctgtatttactcgcctagttgctgacaatgttggtcagtacgaaaaatcattggttatcgatctcggtggtacaactctggatgtcggggttattgttggccagtttgaggatgtttcggcagtacatggtaatcctgatattggtgtatcaatggtcacgaaagccacgctcactgcactgaaaatggcctgcagtgataccagtccaatgattgctgacgagttgatcaaaaacaggaagaacctggattttgtggggcaggttgtaaatgaggtctctaaactaaatctggtgctggataccattgatacagcgataaataaactgggcgagctagttgttgatgatttgctgcagtatcgaaacgtaaaccgcgtatatattgtcggtggcggggcagcactcattgctgatgctgttcgtaaggcatggaaccaccttggcgaaaaggtggttcttatggatgaacctcagacagcgctggtccaggctattgcacgcttcaaagcggaggagtaa

SEQ ID NO: 3924 - DNA, 375 bp, Escherichia coli
atggccgatgcatcaaaacttaagactaaaaggacccgtggtgggctgggggtacccccgggccccgacgaagtggctaccagcctgaatgcgcctgagatagctccggctgtcgctgccactgatgttcagagacaacaggcagactcatcgccagtgcaccatgagcctgtggttacgcaaacagtgaccgaggcatatacccgccgcgatggccgttctgccagaaagacaaacaggacgctggcatttgcaacacgtgtcacacctgctttcgaccaagagatccgggatatcgcagagcgtgaggggttgaaactagtggaagttctggaaaaagcagttgaggcatataaggaaaaacagggctattaa

SEQ ID NO: 3925 - DNA, 633 bp, Escherichia coli
atggcctggatagttggttttatttcccagaaaggtggtgtgggcaaaagcactaaagcgagagcgttagcgcgtgaagcatccgcctgtggcatcaaaacaaaattagctgatctcgacctggaacaggcaacgagtgctgagtggcatcgtcgacgtctgtcagctggtttgccaccggttgcttcagttgaagtgttttcaacagcaaagcaggcgatagaatctgccggcgattttgaccttctgattcttgatggcccagctcgtgcaagcaaagggacttcagaaattgctaaggttgccgaccttatcgtccagccaacgggggcctcccttgacgatcttgtcccggccattaaagttttcaacgcgctggtaaaagaaggtgtaccacgttcaaaactggtcttcgctttaagcagagtaggtaccgaagcggaagagctggatgctcgtgcatatatcagtgaagcaggttatgaaactttatctggatgcctttttgagaagccagcatacagaaaagcgatgaattcaggactcgcagtgacagaaacacgttataaaggtttaaacgagagagctgatgaacttatccaagcactcatcgataagattggagaagagtaa

SEQ ID NO: 3926 - DNA, 804 bp, Escherichia coli
atgaagtatgacaatctgaaaatctgtcacacttcacatgggcctgtcatggtggaaatagcggttataaaccataaaaaacgtaaaaatagcccgcggattgtccagtcaaatgagctgactgaggcggcatatagtctttctagggatcaaaagcgtatgctgtatctgttcgttgaccagatcagaaaatccgacggttccctgcaagaacctgatggcatctgcgaaattcacgttgctaaatacgctgaaacattcgggctaacctccgctgaagccagtaaggatattcgacaggctttaaaaggttttgcgggtaaggaagtggttttctatcgccctgaagaggatgccggtgatgaaaaagggtatgaatcctttccttggtttatcaaacgtgcgcacagtccatccagagggatttacagtgtacatataaacccatatctcattccctttttcatcgggctacaaaaccggtttacgcagttccggctcagtgaaacaaaagagattaccaatccgtatgccatgcgtttatacgaatccctgtgtcagtaccgtaaacctgatggctcaggtgtcgtgtccctgaaaatcgactggatcatggagcgctaccagctacctcaaagttaccaacgtatgccggattttcgccggcgtttcctgcaggcaagtgttgatgagatcaatagccggacaccaatgcgcctctcttacatcgagaaaaagaaaggccgccagacgactcatatcgtattttccttccgtgatattacctcgatgacaacagaatag

SEQ ID NO: 3927 - DNA, 807 bp, Escherichia coli
atgtcaggctccgttatacacagccagtctgcagtcatggtaccggcagtgtattctgccggacagtctccacaacttcctgttgccatagattatccggcagctctggcacttcgccagatgtcgatggttcatgatgaactgccgaaatatctgctggctcccgaggtgagtgccctgctccattacgtcccggatctgcgtcgcaagatgttgctggccactctgtggaacaccggcgcgcgcattaatgaagcactggcgctgacgcggggggatttttcgctcgcgcctccgtatccgtttgtgcagctggccactctgaagcagcggacagaaaaagcagccaggacggcaggaagaacgcctgccgggcagcagactcaccggctggttccgctctctgactcctggtacgtcagccagctgcagacgatggtggcaacactgaaaatccccatggaacggcgtaataaacgaacaggcaggacagagaaagcgcggatctgggaagtgacggacagaacggtcaggacttggattggggaggctgttgccgccgctgctgctgacggtgtgacgttctctgttccggtcacaccacatacgttccgccattcctatgcgatgcacatgctgtatgccggtataccgctgaaggttctgcagagcctgatggggcataagtccatcagctcaacggaggtctacacgaaggtgtttgcactggatgtggctgcacggcaccgggtgcagtttgcgatgcctgaagtggatgcggtagccatgctgaaagggaatatttaa

SEQ ID NO: 3928 - DNA, 306 bp, Escherichia coli
atgcagtttaaggtttacacctataaaagagagagccgttatcgtctgtttgtggatgtacagagtgacattattgacacgcccgggcgacggatggtgatccccctggccagcgcccgcctgctgtcagataaagtctcccgtgagctttacccggtggtgcatgtcggggatgaaagctggcgcatgatgaccaccgatatggccagtgtgccggtctccgttatcggggaagaagtggccgatctcagccaccgcgaaaatgacatcaaaaacgctattaacctgatgttctggggaatataa

SEQ ID NO: 3929 - DNA, 219 bp, Escherichia coli
atgaagcagcgcattacagtcaccgtcgacagtgacagctatcagttgctcaaggcatatgatgtcaatatctccggtctggtaagcaccaccatgcagaatgaagcccgtcgtctgcgtgccgaacgctggcaggcagaaaatcaggaagggatggctgaggtcgcccggtttattgaaatgaacggctcctttgccgacgaaaacagggactggtga

SEQ ID NO: 3930 - DNA, 231 bp, Escherichia coli
atgcgaacagtatctattttcagaaacggcaataaccgcgccatccgtctgccccgcgatctggattttgaaggggtaagtgaattcgaaatcatccgggaaggggacagcatcatcctgcgcccagcccgaccgacctggagttcattcctagagctagaaaaggccgatccggactttatggcagagcgtgaggtgattgttagcgacgaaggacgcgttgaactatga

SEQ ID NO: 3931 - DNA, 429 bp, Escherichia coli
atgaaacagccccgcacgaaaacctatatgctcgatacctgcatctgctcgttcatcatgcgtgagcagccggacgccgtgctgaaacgcctggagcaggcagtgctgcgtaatcaccggattgtggtgtcggccatcacctacgccgagatgcgctttggcgccaccggtccaaaggcctcgccgcgccacattgagctggtagacgcgttctgcgcccgcctcgatgccatcctgccgtgggaccgggctgcggtggacgccaccaccaacattaaggtggcgctgcgtaccgccggcacgcccatcggaccaaacgacactgccatcgccgggcatgccattaccgccggggccattctggtgacgaataatgtgagagagtttgagagggtgcctgacctggtgctggaagactgggtgaagtaa

SEQ ID NO: 3932 - DNA, 483 bp, Escherichia coli
atgaaggtgattattgccaccaggaaccgctacatggagtatggacttctgttgttactgaaggggcacagggttattctggctcgggagttttttatgccgcaaaaccgtcgatgtatattggaatatgatgagtcatggctgataatttccgatgcatcactaggctggttgatggagtgtatgttccatgggcgatattttctgcaactgagtatagaatccatcgtgagtgtggagcagataaaggatgctatgagaaatagcgcgtggatacacaagcaccatacgttgcaactatccatgtcagaaatggtggttatgtttggttatgtatttcgagagttaaacacttgttatttggctcgggagatgggaattcacgcaaagacggtaaattcctttctatataaggggatggcaaagaatggactgcagggtgtcagcgttaagcggcttgcctatgcagttaataaaacttag

SEQ ID NO: 3933 - DNA, 1104 bp, Escherichia coli
atggagaaatcaagacaatttattgctgttgttggtggaatactgtggggtgtcagttcttgggctcagagttttgagactgtagattttcgtggtgacggtgagttatctgtaatagtgggcaaaggggccagagcaacagagaagctttcaaccgcaactggaggctattcttctgcattcggggtacagtccactgctattggtgccactacccgtgcgtatgccacagcatctacagcaattggcgttggggccggggttgaggcaaatgcttctggcggaacctcgatagggcgtgtgtcgactgttagtgagagtaatggagtagcagtgggaatgcaggctaaggctactcacagaaacagcgttgcgcttgggactaactcccggacaacccgtgaggatgaggtttatatcggttatgagagtggaccagatgaaacttataaaacgcgaatgcttggaggactgagcgatggtatctatccttctgatgcggcaacggtgcgtcaggttggctatgtgaaaggtagagtggaacaactggcccgggatacgaatgtcagaatcgggatggaagctaaaaagtcacgggattataccgatgcaagaacaacagttggtgtgaactccgacggaactctgacccgcacggaggggactagcaaaaacattgctgttaacgatggtcttgtcgcactgtcaggcagaaccgatcggattgatgccgctatgggaagtattaacaatcatgtcatgttaaatacgagagctgtcagaaataatactaacgctatcgccagccactcccaacagttgcaggagcacaaagcacgtttgaacatacagcagcgtcagattcgagagaaccatgaagagatgaaacgagcagcagcacagaatgctgctctggctggtctttttcagccgtatagtgtgggtaaattgaatgccacagcggcgatggggggattcagagataaacaggctgttgctgttggtgttggttatcgttttaacgagaaaactgcagcgaaagctggtgtggctaccagcaacggtgatacgtcctataatgtaggagtgaatttcgagttttaa

SEQ ID NO: 3934 - DNA, 132 bp, Escherichia coli
atgatttttgccccagagttctggggcttctcatggttaagtgagaatgtgattgttaatttagagaggttattagtttttattttttataacggtaaaatgcaatgggtatatcttaaaatgttttattga

SEQ ID NO: 3935 - DNA, 774 bp, Escherichia coli
atgttatttagtcgaatgatgatgacgggtgtgctgtccctgatgcttgcaggatgtggaaatctgagtcatatcacggatgaaggaacgacggaagaagtggtatggccttctccggacagggtgatgtttaatcatgacggaacacagaaaggttcgtggccactgccagaaaagttacgtcagataaaggcaggtatgaataaggaccagatttatcaactggcagggagaccacactttgccgaaggactgtttggtgtaagggaatgggattacctgttcaactttaccgggccggagggggattatacctgccagtataagatactgtttgaccggaacatggatgcccgctctttctactggaagccggaaaactgtctgcctgagacggaaaaagcagagtacagggagtctgtacccggagatatattatttgattttgattcatggactctgacagagagaggacgtgatgagctttcccgtgtggcagagaagttcagggatggtcatgttgtcagggtaacgatagagggatttacggatttccttggaagaaaggagtataaccggttgctgtcagagaaacgtgcagagtcagtcaagggatggtttattgcccaaggatttaatgcggaaaggatacatgcaacgggccggggagatgatgagcctgtagtattctgcacggagtttgaaggagaagctctaaaggagtgcctgcgccccaatcgtagggttgaaattacagggagtggtattcattaa

SEQ ID NO: 3936 - DNA, 4320 bp, Escherichia coli
atgaaaaacagaaagacattactttgtgtttcaattgctctggctattaaccctgtagcgataacttttgctgaacagaactcgtcagttattgaagttgatgaaaaccccaatcatagcaataactggaagagcattgaaatagggctgacaaaggaagagaaagcaagaccagaactaggtattaactttgatcataattctcctgttgctaaaggtcgtaactctattgcgattggtaccagtgctgaagctggcggagagattactgatactgcaggctttaatacaggagagtccatagcgataggagccaaagcgaaagcaaccaaagagcaggcaattgcgataggtggagataccaaagcaacggcatggggagcaatagtcattggaggggatgatttaactcctttacatgacactagctatggtagaaaaaaaatagatgggaaatatgtttcttcagaggcatcaggtacgggaagtattgttgtgggcacccagagcatagcgtcaggagatttgtctgtatctctgggatcaataagccatgcaactggaactgcagctaatgcactgggagctacggcagaagctaatggtgatatggcgactgcgattggttttaatgctatagctaattccaataatgctctggctgttggtgaacagtcaacagcaaataaaaacgatgctattgctgttggttctaaggcaaatgcagcacaggagaaagcagttgtcttgggaagtggagcaacagttactgtcggaaaggggaacgtgtccatcggttctggctcactggataagcaagcacaaaaagtaatggaagccaaggtcagaaccaaaaggggggcagaggtcacatataacggctttgccggtaccaatgccgaatcagtagtgtctgttggtgatgtcggtaaagagcgtcagattgttaacgtgggggctggtgccgtatctgagaaaagtactgatgctattaacggtagccagttatatgcgatagcaaagacactgaaagacgaccttgatgccattaatccaacgtggaagttaaaagacaatcaggggggaagtaaagatgtcggcagtaaaaatggcgggactacaggtaatgaagtgaccgtcaccggcaaaggggatattgatgttactgttgatggagatggactgagtattgatggctcgaagcttgctgaaaatatcaaaaaagatgctatcaagattaaaactggagatggtcaaacactaacgaaaaaactcggtgaagaagttgagtttaatgatgcaggaccaataaaaacaagaattaataataacaaacttgagataactgccgaaactgccagttttgctactaatggaaatggtggtaacgggatggttacagtaaacaatggtgatggtgataaacttgttactgctaaaaatattactgaagccataaaccagtctggctggaaggttaaagctggaagtgaaaatggtggtaaagttgagggtaatcataatgaagagttaattaatccgggggatacggttacgctgaaagccggtaaaaatctcagcgtgaaacaaagtaacggtgattttacgttctctgttgttgatactccttcattcagcagtgttcagctgagcggaaaaggtaatagcggaaatgtaacgctgtcatccaaagataataacttgatactgtctggtggtaataatagcgccggacagaacggtagcgttgttatcagtggtgtcgcaagtggattgaataaccggaacctggcagacctgaagcaaaatgatgcggaaatgaaaaatgctgccagcgtcgcagacctgaaaacagcaattgatggtgtatccgccggtatgcaggggaccagtttcgcactgaaagacgccaagggccaagaagtgaaacaatcccttggacaggcgattaaagtatccggagatagcaatattaccaccacagccatcgtcaatggagataaagggttaaaaatatccctgaataatgatctgagcgtagggagcaataagactcccggtagcatcaaagttaacggaactgatggtaaggaggctgtgagtctgaatggtaaagatggcacgattaaactgacttccgcgcctgctgcgggcggaaagtctgcgtcagcaaccattgctgttaatgcaggtaaaggtggattaacagatgctgccggtaccacgaagatacgtctgacttatgctccggatggaaaatcaccggcagaagagctggcgaccatgaatgacggtctttcttttgagggtaatgacggagaggttattcataaaaaactgaatgaaaaactgaccatcaaaggtggagctggtgataatgagggtgtaacagacagtaatattcgtgtagatgcaaatgaaaagggagatggtcttctcgtccggatgaccagaaacctccgtgatttagccagcgcggtttttggtacaggtgggcagataacaacagttaatgataaaggcatcacaatcacaactcctgctgcgggcggtggtcaggggaatacggtttcccttaccgactccggcctgaataacggtggaaatcagataaccaatgtggccagtggtctgaacggcactgcacttgctgacgccggcgcagatgttctgaataatgcggcaaatatcggtgacctgaaaaatgctctccgtgacagcagtgcggcactggtgaatgccggctttggtctgcaggcggatgacggaagcaaggtgaacacatctctcgggaagcatatcacggttggtggtgacgggcagaatatcagcacgactgttcagaacgggagcctgacggtcagactcgctgataacattcgcctggcagatgacggcagtgtttctgtcggtggaacccggatggataaaaacgggctgaccatcaaggatggtccgtcagtgactgtgaacggtattgatgctgctggccgggttatttccggcgtgaaagacggggtgaatgaccaggatgccgtgaatgtttcacaactgaaccgtgaaatcagtcaggcaacggcagcaacgacctgggcactgaagactgaatccggtgatgaggctgttgctgtctcctcccagacggttgaagtccgtcacggacagaatacccgggtttcagccatcagtaaggatgataagggaaattacagctataagattgatgtgacggggattccagtggagtacaccgacagccaggggaacccgcttgtcaatattggtggtcgtttttacacacagaccgaagacgctgcgaccgggaaactgacaatgacgccggctgagcccgcccgtgtcagaataagcagtgagcaccctcttgttctgactaatgtggcggccggaaatgtgtcactggtatccacggatgcggttaacgggagccagctggcatctgcagccagaattgctgtcggtgataatgttgtctggaaagacggaaaagcagcgctggctcctgacaccttcagtgagctgacaactgcaggtggtgggaagacaacggtgaatggtggtgtatataaaacaccggataatgtggctgatgcggtgaatatgctgaaccgtgaaggcacgaagtattttaaagcggcctcttccggtcaggcggcaaaagcagaaggtcgtgacagcattgctgtcggacagggggccgtttcccggggacaaaacagtattgccatgggaaatggtgctgaagttacacttcaggctgctgccggctctgttgcaattggcagtcatgcccgtgcaggccgggcgaatacggggacatatgccctgaacggtcagcctgttgcgggacgtaccggaaatgatacagctgtggtttcttttggtcagccgggacaggagcgtcagttgcagtcagtggcaccaggtgtgctgtctgcgaactcaacggatgccgtcaatggcagtcagttgcatgcaactaaccgtcaggttgccggaaatacacaggcgataaacactctcgggaataaattcagtcagctgagctaccgggtggaagagcttaaccgggatatccgtggtgttggtgcatcagctgcggccatgagcgggatacctcaggcctatctgccgggtaaaagtctgatggggctgggtgttggtggatatggtggtgaaagcgccatcgcaataggggtgtcccgaatctccgataacggtaaggtgataatgaagctgaatgccggtcagaacacccggggtaatttctccgtcggtgctggtgtgggctggcagtggtaa

SEQ ID NO: 3937 - DNA, 276 bp, Escherichia coli
atgtgcaaaaatgacaccaagtgctgtccgaagattaactctaatgagttgtacccagggggggtagatgaaaagcatttccttttattggtatcaattgctcccatttatagtgtgaatgtttataagtcacttagggcatattttgtagaggggcgttcaagacgttatatatgcgataattataagattaacaatggatacctaacggtaagtattaacaagataaataacttgcatcgttctttgataagaatattgagatattacgtttga

SEQ ID NO: 3938 - DNA, 3891 bp, Escherichia coli
atgtttactccgggagctataaatcttactatttatgataacaaaggtaatgaaattgggatgctcgataaagctcccatggctgacttcagcagtgtggcaaaaaatggtggttttgcgacgcttatttcaccacaatatattacaagtgtaagtcataatggttcgtatcagactgtgagctttgggagcggtgtaaacagttactccatagttgacagaaataaccatccacgactggattttcatgttccacggctaaataagttggttactgaagtttctcctgcagaaataacaagtgccgggacagttaataatatatataaagacaagactcgttttcctgtattttatcgtctgggttctgggtatcagtatataaaggataaagatggaaaaacgacctggttagcgggagcatataagtatctgacaggtggaactgtaggatcacctggttcttatcaaaacggtgagatggttaccagttctcccggtgatacattcaatccttcgcaaggacctctggcaagttatggagcacctggtgatagcggttctcctttatttgcatgggataatacctgtcagaaatgggttctggttggggttgccagggtctggagtggtgttaatggattaagtaatggctggactgtaattcccaaagattatgtaattacatccattcaggatgacttcgatcccgtagttaattttgacgacactatagatgcaccacttatatggaaatttgataaagaaaaaggtataggggcattgactcagaataatatatctttttctatgcatggtaaacaaggggataatctgaatgcaggtagaaacctccgttttacaggtaataatggtcgtgtcattttaactaatacagtaaaccagggggctggttatcttgagttttcaggcaattacatagtatcacctgaaaataaagaaaattggattggtggaggtatcattacaaataaggggagcaatgttacatggcaagtcaatggagtggagggagataatctccataagttaggcgaaggtacattaataattaatggaacaggtgtgaatgccggaggcctgaaagtaggggatggtactgttatattatctcagaaagcagatgagcatgggaacgttcaggcattcagttctgtgaatattgccagtggaaggcctactgttgtactaaaggataataagcaagttaaggccgacaatattagctggggattcagaggaggggctcttgatctaaatggtaatgatattacgttcactcgcctccgtgtatctgattatggagctgttattgaaaacaataatgagaaaaaatcccatctcttgctgaacttatctgctgcaaataatgaaaccgtcagcgtaccgattagtactgttctaccttttggaggagaaggaacacccggaagtctgtacagtcgcaacctgaacggagtgacatcttactatatacttaaatcaagaaattatggtaatactttgtggggaaatagtctgaacgatccatctgagtgggaattcgttggtaatgatagaaaccaggcagttcagttagtaaaagatagaattctgtccgaaagagcaaaacaacctgttatctatcacggtcagtttaatggcaatatggatgtggctatcccgctattgccgggtgagcgtaagatcgttatggacggttcaataaatcttcccactggtaatctgagtaaagagggggggaaccttattttccaggggcatcccgtcattcatgcgtctgtaaatggcagtactcctgtttccataacacagaaagactgggaggaccgtgagttcagattaaatacgctttccctaaaaaactccaacttccacctgtcccgtaatgccagtttgcggggaaatatagctgcagttaacagtagtatattgctgggcagtgataaggttattattgataaaaatgacagtaccggtaattacgttattcctgaggaaggtacctcctctccggaaaaagttcagtatcagggcaatatcacgctgcaaaaaggctccacgctaaatattaatagtcgtttcactggtggggtagaagcccatgacagtctggtaaatgttacctcacaggatgtcttactgcagaacagtagtgttttctttaattcatccctgtctgttcatggcgatggtcacctgatggcacaaaaaggcttatacagtaacggcaggattcagattggtaaaaacagtacgctttccctgagcggaacaccggagaacggagctgataatacctggatacctgtactgacatacatgacagaaggctatgatttaaccggtgataacgctacgctgaacatcagccagcaggcgcatgtttccggggatgttcatgcaaccagttcatccacaattcgtattggctctgaaaacccgggctcagtttcctcttctgtctcccctgttctggctgccgggttgttcagcggatataacgcggcgtactacggtgccatcaccggcggtaaggggaacgtcagtatgaataatggcctgtggcagctgaccggagattccgacatcaacagtctgacgacccgtaacagccgggtacagtctgaagaaaacggtgccttccgtaccctgacggttaagacacttgatgccacgggcagtgattttgtcctgcgcactgacctgaagggcgctgataaaatcagtattacggagaaagccagcggttcagacaacaccctgaatgtcagctttatgaagaacccgtctccgggacagtccctgaatatcccgctggtcagtgcaccggccggaacatcaggggatatctttaaggccggcacccgggtgacaggtttcagtcgggtgactccaaccctgcatgttgacaccagtggtggcaatacgaagtggatactggacggttttaaagcggaggctgataaagccgctgccgcgaaggctgacagtttcatgaatgccgggtataaaaacttcatgacggaagtcaacaatctgaacaaacgtatgggtgacctgcgtgacacaaacggtgatgccggagcctgggcgcgcatcatgagtggtgccggttctgcagacggtggttacagtgataattacacccatgttcaggtcggctttgacaaaaaacatgaactggacggagtggacctgtttaccggtgtcacgatgacctataccgacagcagtgcagacagccatgcgttcagcggcaagacgaaatcggtggggggcggtctgtatgcttcagcattgtttgagtccggtgcctatatcgatttgattggtaaatatattcaccatgacaatgattacacaggtaactttgccggtctgggaacgaaacactacaacacccattcctggtatgccggtgctgaaacgggttaccgctatcacctgacagaggacacattcattgagccgcaggctgaactggtttacggcgccgtgtccgggaaaacattccgctggaaagacggtgatatggacctgagcatgaagaacagggacttcagtccgctgattggaagaacagggatcgaactgggcaagaccttcagtggtaaggactggagtgtgacggcccgtgccgggaccagctggcagtttgacctgctgaataatggtgagacggtactgcgtgatgcgtccggggagaaacggataaaaggcgagaaagacagccggatgctgtttaatgttggtatgaatgcgcagataaaggacaatatgcgctttggtctggagtttgagaagtcagcctttggtaaatataacgtggataatgcggtaaacgcaaatttccggtatatgttctga

SEQ ID NO: 3939 - DNA, 1776 bp, Escherichia coli
atggatagtgataaacacaatacggtaagtaatttcggtcttgttgcaataggagataaaaatacttcatcaagtactcatgcaattactatcggtcaggagaacactgccagtggtccattctctgttgcaattggaacaaaatcagtcgcgggagatagtggcgccgctgctataggatataaagcctcagctaaaaacaatggtattgctattggcactgatgccagaagcgatgacgcggctatcgctgtaggaagcagctctaaggccgcctataactccgtggcccttggtcagtcaagtttcgcgacggggaggtcttcagtatcaataggtggggatgcctctggtacaggttcagtagcaataggtggacaagcaaaagcaagtaaagaatacagtatggctttagggaaattctctgaggcaacggcagataaagctttcgcacaaggttacaatgctcacagcacatctgaacatgccattagtattggtaccagttccttatccacagggagtcaatccataagtctgggagcgaaagcgtctgcagaaaaaacggggagtgtcagtattggttctttctccagttcggttggggaaatggcaaccagtgttggatatggcgcaacatcaggaggcgcaaaatctgtttctgttgggaatgattccaatgcagaaggagatggctcctctgctattggctttatggctggtgctcacgaaaccttaagtgtagctcttggtacaaagacagctgctgaatcggctcgttcaacagttctgggaagcttcagtaaggctactgttgaagatggtgtagctctcggcagcatgtctgtcgctgatcgggctgctggcgcaacagatgcatggacccctaaggggggaattaaagacaaaagtgcgacttggatctctacaagtggagcagtttctctcggtgggaagtataatggagagtcgaaaacacggcagataacaaatgtggctgcaggttcagcagattctgatgcagtcaatgttgctcaactaaaacaactggataattcagtatcacaacagttaacgaatataaccaccaacagtaaatatttcaaagctaattcttctgaatcagaacctgttccgggaggaaaaaacagcatagcagttggccccgttgctcaggctagtgccaatgatagtatagcgattggtcacaactcgactgtaagtgataaagcacctgcagggtctattgctcttggtcatggggcaaaagcagagagagcacatactggctcatatagtataaacaatgctcctgctgctggaaaaacagggaaaacaacagctgttatttctgttggttctgtaaataatgaacgtcagattcagaatgtggcacccggtgttgtatcagaaacatcaacagacgcagtaaatggaagtcagttacactcgacaaaccaacaggttagtaaaaacacgagtgagatcaatcaaataggcaataagttcaatcaacttaataatcgtattgatggtttaaataaagacatacgtggtgttggagcctccgcagcagcaatgtcggctataccacaagcatacctacctggtaaaagtctgctcgggcttggagttggtggatatggcggtgaaagtgctattgctcttggtgtctccacaatctctgacaacggtaaggttattctaaaaatgaatgccggacaaaatacacgtggcaatttttctgttggagcgggcgtcggttatcagtggtaa

SEQ ID NO: 3940 - DNA, 621 bp, Escherichia coli
atgattaaaaagggtatgaataaagatcagatttataatttaatcggtcgtccccacttttccgaaggtgtagccggagtaagggaatgggactatgtattcaatttcgaaaataacagcggtcaccatatctgtcaattcaaagtcttgtttgacaagaatatgaatgtgggggcagtatattggcttcctgataactgcaaactgcccccgcactctgctcctgcacattctgttgctaaggatgaatttgaccatggcaggctagaaataaaagcggatgttctatttccctttgattcttcagcaatcgggagtgaaggtattggaattatttcaactatagtcaagaaattagtaaacaatggtaaaaaacatagcaaaattgtaattaacggctatactgataatataggaagtgatgattacaacatgcgtttatctgaaagaagggcaaatgctgttaaagatattctcattcgcaacggtgttcccgacaaagacataacaacggtagctaaaggaagttctgagcctatagttttttgtgcacagaaagataaacaagaacgcagaaaatgtttaagtcctaacaggcgtatcgttctgacaattaattga

SEQ ID NO: 3941 - DNA, 552 bp, Escherichia coli
atgacggaaatttatagtgataacaccttttttaacatagacagtataattggctctgacacaaatgaatcaatatgttgtgatggtcggaaactgataataataattataagtaataatatgctaggttgtgggagtaactacttctgcaaaataatagaacacatcaacaggaagaacaaaaagagtgacataaatatcataatcttctgccgaaggcgaatggttaatataatatccgatacggtgaataatagaatactatgcctcccctaccatagcttaataagaggcatgagtatatcaatgcttaaggggatatttctgatgagttttagggaacgaaatataaacttaagggtgacccctgcagaacagagggttattgacttatatcttcatggtaagacatacgatgaaataagttctattctcggaataaagccaggaacagcatcaatttataagaacaaagtgattaaaagattcggcgtctcgaatgagttggaattattttataagatgtatatcataaacaaggtaaaagattaa

SEQ ID NO: 3942 - DNA, 1098 bp, Escherichia coli
gtgctgctccatcttacggccgatgtggctcgcaggaagaaacgtcgtttctctgtattattcattgactgggaagctcagtaccagtgcacaattgcacacattctgaagatgagggagatgtatcgggatgtgacggagactttttactgggtggcactccccctgactacggtaaacggtgtctctcagtttcagccggaatggatatgctgggaaccaggtgtggagtgggttcgtcagccaccagatgacgctattacagatatgtcgtatttcccattttatcggtatgccatgacgtttgaagaatttgttccggcattttcttcctggtttgccggtaaccggtgtggagtggcaatactgactggtgttcgtgctgatgaatcactcaatcgctttatgggactggtgtctcagcgcaaactgagatatgcagatgataaaccctggaccacagcgtcacctgaagggttttattacaccttgtatccgttgtatgactggaaagcccgtgatatatggatatataacgccagaacccgagctatctacaatcccctgtatgacctgatgtaccgtgccggcgtgccgttacgcaacatgcgggtctgtgagccttttggcccggaacagcgtaagggactgtggctttaccatgttctggagccggaaacctgggccaggatgtgtgagcgggtgtcgggtgctgccagcggggcgctttatgccaatgagagcggtgcctattttgccctgcgtaagcgtatcacgaagccgcctcatcatacctggcgtagctatgcgatgttcctgctggatgtgatgccggaaagaacggcagaacattaccgtaataaaattgctgtctacctgcgctggtatcagacgcggggcttcccggatgacatcccggatgaacaggagaatgacctggggagccgggatatcccgtcttggcgacgtatctgtaagacactcataaagaatgatttctggtgccggaccctctccttcagtccgaacaaaccccggcactatgaacgttatctgcagcgtatgaaagaaaggaggaaggaatgggggattctgtga

SEQ ID NO: 3943 - DNA, 645 bp, Escherichia coli
atgggggattctgtgacacctgaggtggaagtattgagcaacatgattcgacagtacttcagtcaggaacgatctgaagaagagaccatacgagcccttaatcatctgcgcagggtgttgcatgaggtcagcccttttgcacaggagcctgtggactgtgtgttgtgggtgaaagcggatgaggtggtggccaacgattacaatcccaatgtcatgtcttccagtgaaaaaaaactgcttaaacattcactggagcaggatggattcacgcagcctgtggtggtttcggaagagaaggagcattatctggtcgtggatggttttcatcgtcagttgctgggcaggaaagcggatacgagaaaacgtctgaagggctggctgccagtgacctgtattaatccggaaagaaagggacaggcatcacgtattgccgcaaccatacggcataaccgtgccaggggaaaacaccagataacgtcaatgtctgacattgtcagggacctttcgcgtctgggctggacagatgagcgtattggcacagagttgggcatggaccaggatgaagtgctgaggctgaaacagattagcgggctgacagagctgtttcaggaagaggatttcagcccggcatggacagttcgttaa

SEQ ID NO: 3944 - DNA, 171 bp, Escherichia coli
atgtctgaacagaaaatcaccggtatagatctggctaaaacgaacttttatcttttcagtatcaatactcatggcaaacccgcaggaaagatcaaacttgtcacgaacggtgcaatagtgatccacaccaaacgcctgaaatcagatcccgggggtaatctgctctcctga

SEQ ID NO: 3945 - DNA, 138 bp, Escherichia coli
atggtcacttttgagacagttatggaaattaaaatcctgcacaagcagggaatgagtagccgggcgattgccagagaactggggatctcccgcaataccgttattacctattcctcaacaggaattccctgttcataa

SEQ ID NO: 3946 - DNA, 1095 bp, Escherichia coli
atgacttcattcttccatacaagatgtgtgtatataatatcttgtgtgcttttttatctcattgccaattcctcttatgctgcgatgacctgtaagaattcaaccggggaatctaatgatactgtgactttggctggttccattactgtgggtaatgatttaccaaacggaagcgttgtttattcacaggagttctatccatcaaagaacgtggagatacgatgttcttccgagtttaacttagacttactttcaactctacctggagcacctgcacaaattggtaaagatagtgatggtgctccactatatgaaacaagcgtacctggaattgcagtcaaatttctgaataacagacagccaattccagcaaggagagtgggagttttttttggtaatgcagatcaatggatctctttacgtacacggataactgtccaattaataaaagtaggtaatgttacttcaggcatggtaaatgctggtagtttcccagttgtacatgatgttgtaccattaacatcaggtgttaatggtacaccactgcagattagaacattacaatttttgggaagtattaatgtaacaacaggaacatgtacaactccttctttttctattaatttaggaaaacataagcaaagtgagtttaccgcaaaagggatgacgacagactgggttgactctagtattacattaactaattgtcctgtgttttatggttattggaaaaactggactggtgtgactggtaagatattcgcagggagtggaactttatcacctgtgcaacaggatacgcataatatttttgaaatatcatttcaaccagttggaaaaatactcattccatctgaaggtgttttttctttaatagaagatacacaacaagctgatggagttggtatacagttagctagtggttataagaatccaattcctgtcaattttaaccgtagttatagctataacctttaccaaagttctggaaaaacgataagaattctgttttctgctcgattatatcagacgaaagataatgtaacgcccggtgatattacaggaaaaataatttatactgtatcttataaatag

SEQ ID NO: 3947 - DNA, 1878 bp, Escherichia coli
atgaactatagctggaatgaaagtaatggtggaaaatataatactatagctagctatgttctacatggattgccgtctattaaaggacaggcttttttaggaaaaatgaatactcaaggtaagttatttgataccttaccatttaaaggtattgagattatgagtgatgacaggatgtatcctcgatctcaaagaggatatgctcctgatattcgtggtgttgctaaaacaaatgccagggttgtcatcaaacaaaatggcacaactttatatgaaacttctgtttctcccggcgcctttttaatcgatgatttatatccaatgggatatggtggtgatcttgatgtaacagtatatgaagctgatgggagtgttcagtcttttcgcgttccttatgcatctgtaacagagctgcttagaccaggacattatcgttatgatttcgcagtaggtaaaattgatgactctacattgggatacaatcctaatttgtatcaatttacctggcaacatggcgtaactaatctactgactacttatgccggtgttcagggaagtggtgcagattactatgcattattatttggtagtgcattaagtacaccgttaggtgcattttccgcagacgttacgcaagcgcgccttcatatgaaagatgcgaacaactcatcaaaaagtggacagagttatcggctaagttacagtaaatatttgtcaacaacagatagtaatttaactattgctgcatatcggtactctactgatgactattatgatttttactcagcagtgagaaatataagtagagtacataaatatggagaaatatacgactcatggcatcctaaaagtaggtttaatatcactataaaccaaggattaccaagtaattatggtagtttatggattagtggctatacacaagattattgggataaaaagaacacggatatccagtatcaagctggctatagcaatagctggtataatttatcatatagtttaagtgcaaatagagtaagaaatagttttggccatgtagaaacaaactggttgctaaacttcagtcttccgttaggaaatagctacggagacaataatagtcaaaccatttcaggttcatcaagctataactcagatggcttgatggggcaacaaattggcatatctggtaatttaggaggcgataatcaatattcatatggtgcatctacttctcattataaccaggggcgaggtaacagcttaagtatcagcggtgcatggagaacaccatatactaatttgagtgcaaattctggatatggaaaatcatattcaaatatgactttaggtgctaatgggaccattattgcatggaaggatggtattactgccagtccatatagtggagatacttttgctattattgaagcaaaagatgctcctggagccaaagttagtagctatcctggtgttaagctggatccatgggggcatgctgttgttccttatcttgagatgaatgaaatcagtattgatccaaaggggttgccagaaagtgtaacattagaaagcacaacagagagagtagccccatatgcaggtgctgtaagcaagattatgtttaagacagaaaaaggttttccactatttatcaagattgaaaataaggacacccagataattccatttggttctgagatcacagataacaatggaaataacgttggatttgtagggcaaaatggacaagcttttgttagggttaaagatgatataggtttattgaatgtcaagtggggaagtaataccttatcatcttgcaatattaaatatgatattacagaactcgtagatgtaaatggattaactactattactggtaattgtaaataa

SEQ ID NO: 3948 - DNA, 639 bp, Escherichia coli
atgatgcaacataaaattaattatcatttgttttgcattgtatttgctgttgtgtttacaggcaagagtgaagggaaagacttagaaaataaaaaaacggttaatacagttgctgaaaatatacgcttcgatccattattccttaactctgagataagagacagaatagatctacatcattttgaagagggtgatgttgctatcgaaggtatcttccctgtagatgtctacgtgaatggaaagtatatatctcgatcttctgtaaaatttgaaagagataaaggtaagaagataattccttgttttaataaggagttattgaatgtgataaatattgatttatcaaaattatctacaaatgataaagaaaaactattagttatagaggataagaaaacatgcgaacctctgagctatattattaacgatgtctctgaaacctgggatccaagcaatcaagagttgaattatattatcccacaaattttaatgacccacaatgctcagggatatgttaatcctgagttatgggataaaggtattcctgctcttattctaggatatgatactagcagttattcggtaaaaaaccatggaaaaacagaaaaaagcacaggtcatcatttaatgctggtataa

SEQ ID NO: 3949 - DNA, 729 bp, Escherichia coli
atgttttccagaatgaaaaaaattatatcaacagtgattcttagtggatacatttttacggtaaattatgcgagtgcaagcattgtcatcagtggtacgcgtataatctatccggaaaatgaaaaagaaataacagttaaagtcagtaatcctggaaaacttccggttttgactcaaagttggatcgataatggggatataaatactaagccagaggctatatctgtaccatttttactaacgccccctcttagtagaataaatccaggtaagagtcagactttgcggttaagttatacaggtttacctactgtatcacataataaagaaagtgtttattatcttaatgttcttgagataccgccattaacttctgatgctcctgaaaacagattgcaagtagctttcagaacaaggattaaactattttaccggcctgttaatttgataaaaaaagaaaaatctcaagatgcttttgaaaaccttttattttctacagatggtaagcagttaattgtaagaaatccgtcactatataatgtatctcttgtgtctataaccatagggaatgggaaagataagtatgtaattgaaggtaaaatgttatcgccagaaagtacagaacgtttctcattaaagcatctatataacgaacatgcactgtcttatgagtatattgatgactggggtgctgtgagaagtgttagtaaaaatataactattaattaa

SEQ ID NO: 3950 - DNA, 561 bp, Escherichia coli
atgaaagttagcgcgattgctaccgtattgatggcatctttgggtatggtaactttgaatgcaaatgctgcatcaacagggactattacttttaacggagaagttacttctaatacttgtgatgttgtagttgataatcagagcaatgatgcaataattacactacctaccgtaagtacatcagacttgtccactcaaggtaagacagctggtcgtacaggttttgttatggccttaaataattgtgttgttcagaccccagggcaaaaggatactgtatctgcattttttcagtcaggtcaatcagttaatttgtctacaggccgcctgaataatacggatcagtctggtgcaagtaatgttagcctacagttgcttgatgtaactggtaactatcagccaatcaaagttggcaatacatctcaagtaacagggacagcaggtgttaaaattgccaataatcaagcaacacttccttacgcggttgagtattacgctgaaggtcagtccactgcaggtttagttaaaagtactgtagtttataaccttcagtacaagtaa

SEQ ID NO: 3951 - DNA, 198 bp, Escherichia coli
atgaccgaatccagcgattacgaatccgtccaggtctttatcggcgttgatgtcggtaaagatacgcatcacgctgtagccattaatcgttcaggtaaacgcctgttcgataaagcattacccaacgacgaaaacaaactcaggtcgctaatatctgacctgaaacaacatggtcagatactgctggttatgggttaa

SEQ ID NO: 3952 - DNA, 219 bp, Escherichia coli
atgatggagatattctggaccatgctggccagccaggacaggaagcgcattcgtgagtacattgcggagcagaacctgatggccgccattgaactggacgaacggattggttgttcagccagcagcctgaccgggcagccgtataaaggccgaaacggttgtgtggaaggtccccgggaactggttattcccccgttactttattcgtaccccttataa

SEQ ID NO: 3953 - DNA, 255 bp, Escherichia coli
atgagtttaagaattgacgttgaactgaaggatgcttttatggccgctgcaaaaagcatggaccgtaatggctctcagttaatccgggattttatgcgccagaccgtggaacggcagcataatacctggttccgtgaccaggttgaggcaggacgtcagcaactcgagcgcggcgatgtgcttccccatgacatggtcgaatcttccgctgctgcatggcgggatgaaatgagcaggaaggttgccgataaatga

SEQ ID NO: 3954 - DNA, 858 bp, Escherichia coli
gtgactgatcttcaacaaacgtattaccgccaggtaaagaacccgaatccggtgtttactccccgtaaaggtgccggaacgctgaagttctgcgaaaaactgatggaaaaggcggtgggcttcacctcccgttttgatttcgccattcatgtggcgcatgcccgttcgcgtggtctgcgtcggcgcatgccaccggtactgcgtcgacgggctattgatgcgctgctgcaggggctgtgttttcactatgacccgctggccaatcgcgtccagtgctccatcaccacactggccattgagtgcggactggcgacggagtctgctgccggagtactctccatcacccgtgccacccgggccctgacgttccttgctgagctggggctgattacctaccagacggaatatgacccgcttattggctgcaacattccgaccgatatcacgttcacaccggcgctgtttgccgctctcgatgtgtctgaggtggcggtggcttccgcacgccgcagccgtgttgaatgggaaaacagacagcgcaaaaagcaggggctggataccctgggtatggatgaactgatagcgaaagcctggcgttttgtgcgtgagcgtttccgcagttaccagacagagcttaagtcccgtggaataaaacgtgcccgtgcgcgtcgtgatgcgaacagggaacgtcaggatatcgtcaccctggtgaaacggcagctgacgcgtgaaatctcggaagggcgcttcactgccaaccgtgaggcggtaaaacgcgaagtggagcgtcgtgtgaaggagcgcatgattctgtcacgtaaccgtaattacagccggctggccacagcttccccctga

SEQ ID NO: 3955 - DNA, 261 bp, Escherichia coli
atgtcgcagatcgaaaatgcagtaacttcctcaccgaaacgcatttacagaaaaggtaatccgttaaccggagccgagaaacaacgcatatctgtttcccggaaaaaggggacacataaagcgattaatgttttcatccagagtgagctcaaagatgatttgacacagctttgtaaagattcgggcttaactcaaaaagaaatgatagagcactggattttgaaagaaaaagctgcgatggatgatgcgaatagaaggtaa

SEQ ID NO: 3956 - DNA, 495 bp, Escherichia coli
atgcaattgcatgcggcaggtatacggactggtgatgcagagcgaatactgtccagcggtgaatgctggcaacgtcagaagacgctgctgacagaaagggaagtcagttttatgaaaggactgttcagaattgtggatatgaagcggtggtatctgtgtccgcaggtacgtgtcgcggatatcgtccagctgaacgggaatatccggccacgatcacgccagtggtggcagttattcaggatggtgtctcagtggcatgttgatgtggttatcgttgagcggcgttcgttcagtattgttgcagcagtagagctggatgatgccagccatttacgaccggaacgccggcgccgggatattcttctggaagaggttctgaggcaggctggtattccgttgctcagaagccacgatgccagaaaactgctgcagatgaccggagaatggctgaatacaacaggggctgatcagcagtccccggaacatcgtagctga

SEQ ID NO: 3957 - DNA, 741 bp, Escherichia coli
gtgaaaccggtggccatcaccggggatatgcacagtgttaacaaggcaaattttgcgatactgcactggtttggccttcgttttgagcctcattttactgacctgaacaggcagttacaggagttgtacagcaccagggaaccgtcggtctataaaaaatgcctgattcagccagccggtcggatagacctggagcttatatcccgggagaaaagcaatctcgatcgcatcgttgccacgctgggtctgaaggaaatgacgcagggaacgctgatccgtaagttatgtacatatacaacaactaatcctacaaggcaggcggtatttgaatatgaccgtctgattcgcagcatttatacgctgaagtatctgcgcgatccgcaaatggaacgcaatattcgccgttcccagaaccggatagagtcttatcaccagttacgtgcagccgtgaccaaagttggtggaaagaaagagttaaccggaaaaaacgatatagaaacagagatcagtaatcagtgcggtcgcctgatctccaacgcgatcgtttattacaactctgcgatcctgtcacgtttgctgaagcgactggaaacagaaggtaatgaaaaggccattgaggctctgaccaggatatcaccagtagcctggcaacacattttgctgaatgggcattatacctttcagaacagtaatgaacttattgacctggatacattggtagccggtttaaaactgggataa

SEQ ID NO: 3958 - DNA, 2190 bp, Escherichia coli
atggaatcaataaactggaaagtaaggaaacaactacccgttatccgtcaaaccgaatctgctgaatgcggtctggcgtgtctggctatgattgcctgctggcatggactgaaaacagatttatcgacattacgggaacgtttcaatataggtattcagggaatgacgctacaaaggttgatcgaatgtgcagcgtccatccatttatcatcacgtgcagttcgtctggaacccgaagatctgaggtgccttaatcttccatctattctgcactgggatatgaaccatttcgtcgttctccataaagttcggggaaaccggttatacatccatgatccggacagaggaaaaattacaataagcctgttggacgcaggtaagcattttacaggagtggcactggaattaactccagccagtgatttcaccccccggaacgagagaaaaaaaatccacctacgtcaactgacagggaaaaccccggggcttttagcatcaatgacaaaaattattatttttgctctggcccttgagattctggctttaggtggtccacttcttaatcaactagtaattgatgaagttctggtcgcagcagacagaagtctattgtatgtcattatagtggcactactgttgttatcactcatacaattattactctccctggcacgacaatgggcaacgatcagtttatccgtcaattttaacatgcaatggactgccagagttttccatcatcttgtaagactccctcttgcatggttcgatgcccgaagtaaaggaagtattaatgcccgttttgaagcagtagatataatccagcaggcgctgacaacgcaggttcttgaaggcattctggatatgctacttattgtgactactctttgcatgatgctgttgtatagcccaggaatgacattaatcgcagtaattgcagctattatatatggcgcactgagagcattgtggtatccggctttacggcaatctgttgaagatgtctgggatgcaggaactaaggagtcggggcattttctcgaaacccttaacggcattcagagtctgagaatcaacggtgtaactattcacagagaagcggcctggctaaacctcaacgttacccgcagaaacacacagctacgccagaatcgtttacaaatgagctatgaactgacgcatacactgacggaaagtgtagtttcagccattattttgtggcagggtgcagtagaagtgctggatgggacatttaccgtgggtatgttggttgcttacttatcctatcagatgcgtttttcatccagtataagcaatctgactaataactttttttcctggcgcatgcttgatgtttataatgagagactttccgatattgtgctaacaccacaggaaggtcaccagaatcagcaccatttggcaaaccataatgaaacaatatctgcaagccagtacagagaacataaatatgataatacccatccaccattacttatcgaaaaaataacatttagccataagggcgcagataaacccatattggataacgcgtcactaatgctctttcctggagaaatattagcaataacaggtaaatcaggatgtggcaaatcaacattggtaaagcttattcttggaattcatacacccagtgaaggaagaattaatgcatttggcataccacatacacattctgattattttcaggttcgtcaacgaattggcactgtattgcaagatgactatcttttcaaaggttctatagctgataatataatgttttttagtgaaattagagatcatgaacacatacgtaaatgcgcaagtctggcacttatagacagtgatattatggcaatgccaatgggctatcaaacattgcttggagaaaccggggggggactttccggtggtcagaagcaacgtattctactggcaagagcactgtataaaaaacccggtctattattactggacgaagcaaccagtcatcttgatgtggaaagtgaaatagaaataagccagacattacgccaactcggaattcctattctgttaatagctcatcgaccagaaacaatagcatccgcagacagagttctgtatctgagagatggtcacttttcggaaataaaatatcgacctgccagaactcataatataaataatcaccccaacaggaggtga

SEQ ID NO: 3959 - DNA, 1071 bp, Escherichia coli
atgccctcatcaggactggtaaaaataattcctcaatatgcaggatatgtaacacaactgactgtatccgaaggagaacacgtaactgcagggacacaactctatcatataagtggagaacattataacggtaacggaactggcacattagaaacgatgagtatctccctgaagactcagtatattatgttagcctcccagcaatcctttgagtcgcgagataatagtcaacaacaggaagccatacgacaaaggatggtatcacttgagccacaaataagaagtgcagaacaaagacttcagcttgctgaacgtcaggcagaactggctatatccgtcatggaacgctataaaaaattggctggtacgcattatgtgtcagatatcgaattccaacagaaacaaattgatgtttctgccgctcaacaaaacgttgaagatcagcgtcaggggcttctccagttgcatactgcaatggacacagccaaagatgaactaaatcatcttattgttcaggggaaaagccgtaaagcagaactcgacagacaattgcaggtgctaaaacaacaacaggatgaactggccggacaagaaaaatttacactgagggctccagtatccgggactattgctgctgtactgatcaaacaggggcagtctgtgaaagcatctgaaccggtcatgactctcattcccgataatgctcatttacaaattgagctttatgctaccagccagaaagccggttttatccgaccaggtcaacgggtatctctgaagttttcggccttcccttatcagaaatttggtatccagtacggcacaattcgtgaaatcagtcatacgactctggttccttccgacttattaccagtttcacccgtcacatggaaagaaaacgaagggcattatcgcgttattgttgaacctgaaaatacatttatatttgcatacggaaaaaaagaaccgctaagaccaggcatgactctggaaggagacgtcaaccttgatactcgtcatttatgggaatggctgacagagccactatggagcatgaaaggaaatctgtaa

SEQ ID NO: 3960 - DNA, 636 bp, Escherichia coli
atgaatgataacatatataaatacaataaagataatgcgatagcgtttcttctacttgttgttatatcaacagttgtgatattcacaccggcattcaccatacaatatattggtttggatctggcattttcctttgtctttattactgaaattttaatatcaacttcattttatattttttacttaagaagaataccaggttgtaaaatcaccataaagacaaatgcgaaaacattaaagctattagtaatatcatttgctgtgattgctctcatgcatctgcttatttttgcttatagagacaatttgaacaatagtgaatcaacttcacttaattggattgaaatatttatactggtcctgatagttccgtattatgaagaaattgtttaccgaacatgtctattcggccttctatgtacgacttataaaaaagaattattcaccccctgtgcgtgtacatctttatttttctgcctgatgcatccgcagtattataatgtggctgatcaaattattctgtttattatgtcaatgttattgttgaatataaggatttgcagtaaggggattttctatccaatgctgttacatgcgggattaaacggctttgttatatttttaaatatattatag

SEQ ID NO: 3961 - DNA, 201 bp, Escherichia coli
atgtttattaaattattttcctttatatgtggtttgttactgggatttgcactattgagtggctcctctgttattgatttctactggttttcactaccttccgagttttcaaagattgtagtcatgctgatcactcttttttccacagcaagattcatggactatatcatagaaaaaataagaacaatctccgcgaaatag

SEQ ID NO: 3962 - DNA, 852 bp, Escherichia coli
atggatctggagaagttctttgaccgggtggatcacagactcctgatgacgcgtctggccagaacgataaaggacaggcgggtgctgagactgatacgccgctacctgaaagcggaaatagtcctgaacgggcaaagggagaaacggcaggagggtatgccgcagggcggcccgctgtcgccgttactgtcgaacattctgctggatgaactggataaagaactggagcgtcgtggacacagcttctgccgctacgcagacgactgcaacatctacgtaagcagccggaaagcgggcgaccatctgctgaagaacatcagggcgttcgtggagaacaaactgaaactgaaggtgaatgagaagaagagcgcggtggcgcgcccgtgggagcggaagttcctcgggtacagtgtgacatggcacaaacaggcgaagctgaaaatagccctgacgagcgtgaacaggctgaaggagaaagtccgcagtctgaccacgggaaaccggagcaaatcagtgaaagcgacaatcaatgccctgacgccagtgctgcgtggatggataagctacttcaggctgacggaagtcagaggagtgctggaagagctggacggctggatcaaacggaaactgcggtgcctgttgtggcggcagtggaagagaccgggaacccggacgaagaacctgcaaagagcggggctgagtaagtacagggcgatgatctcagcgtacaacaaccacgggccatggtggaactcagggtcaagccctatgaatcaggcgataaagaatgcgtggttcagcaggcagggtctgatatcactgctggaacaacagaggcagttccagtgttaa

SEQ ID NO: 3963 - DNA, 471 bp, Escherichia coli
atgatgattaatgaagcacaagcgcaggcaactgcggccagcggcagaggagacggacggtatctatcagggctgcatgatggcgctgaaatcagcacggcggcgggtgggcaaacgaaagcggaagtgccgctgacgatggaagcggtgataacgagagaaaacctgatgctggcttatcagcgcgtggtggataacctcagcgtggcggagttgaaaccgtggctgaagaagaactggcgcagtgtcaggcaggcattgattgacggaaactaccagccgcgggcaatacgccggatggatatcccgaagccggatggcggcgtgagaacctcaggcatcccgacggtggtggacaggcttatccagcaggcggtgcaacaggcacagcgttacatacggggcggcaaacggtgggtgtggatatggatctggagaagttctttgaccgggtggatcacagactcctga

SEQ ID NO: 3964 - DNA, 309 bp, Escherichia coli
gtgaaactggcactgggtactaccctctatgatcccggggaccctatggggaagatgttttttaacgttctggcaacctttgctgaatttgagggagatctgatacgtctgcgcacacgggaaggtatggcaattgcacgggcaaagggaaaattgcgggggaagcagccaaaactatcagataaacaacaaaaagaactttgccgtatgcatgaaaccgggcagtactcaatcagcgatctggctgaactgttttcagtttcacgtccaacagtctaccggacacttttgcgagggaaaaatgattga

SEQ ID NO: 3965 - DNA, 273 bp, Escherichia coli
atgattgatttgacagcagaacagcgacaactggcaaagatagttcatgattatgccagtcggttcccacagacagctgaaggcgatgctcaattactgcaaggttgttatgactacatggatgcctttaaacgggtgatggacagcacctcaaaagttcagatggattacatctgcctgcaataccctgggtattttcggtttgcgaaatggatggaacgactagctcaggggatagctgatggagttattgaagtaccgaaggaccactaa

SEQ ID NO: 3966 - DNA, 591 bp, Escherichia coli
atgaagttgattatttttattctcattgttctgattattgcagcgttacttatccggattatcctcagaagtgtaaatcagcattctcctttgctgatgcaattgcatgcggcaggtatacgaaccggtgatgcagagcgaatactgtccagcggtgaatgctggcaacgtcagaagacgctgctgacagaaagggaagtcagttttatgaaaggactgttcagaattgtggatatgaagcggtggtatctgtgtccgcaggtacgtgtcgcggatatcgtccagctgaacgggaatatccggccacgatcacgccagtggtggcagttattcaggatggtgtctcagtggcatgttgatgtggttatcgttgagcggcgttcgttcagtattgttgcagcagtagagctggatgatgccagccatttacgaccggaacgcagacgccgggatattcttctggaagaggttctgaggcaggctggtattccgttgctcagaagccacgatgccagaaaactgctgcagatgaccggagaatggctgaatacaacaggggctgatcagctgtcaccggaacatcgtagctga

SEQ ID NO: 3967 - DNA, 642 bp, Escherichia coli
atgtttatcagagcttatttaagggcatcgacggaagatcagttcgccgatcgggcaaaagagatgctggagcagttcgttcaggagcgggggcataaaatcgccagctactaccgggagaacatcagcggcacaaaactagaccgcccggaactgggacgcttactgatggacagtcatcgcaatgatatcttgctggtcgagcagatagaccgcctgacccgtctcagcaacagtgactggataacgctgaaaaagcagatagaacaacacgagttgcggattgtcagtcttgatgtgcccacatcatggcaggctctgtcagataaagatccttcgcaagcggacccgatcacccgcacagtaataaccgcaataaataatatgcttatcgacctgatggctgcaatgtcgcataaagactggctgagtcgtcgtcaacgacaaaaacagggaattgaacgtgcccatactttaggtaagtatcggggcaaacaggcagatcgggaacgacatcagaaagtaatgtactaccggcagatcaagaaactgagcatccgtgaaacggcagaggtgacaggctatagtacttcccaagtttgtcgcattcaggcgctctataaagaggttaaacctgattaa

SEQ ID NO: 3968 - DNA, 297 bp, Escherichia coli
gtggaaaactggaatagtgcaaatgcgttcattttttatggtaaaggcggagaggtggcgacaaaccgtctggaagagcaggagttgtcagtcctggcgctgcatctgttgcagatttgcctggtctacgtgaacacgctgatgatccagcaggtactccatgagcctgtatggttgtcacgaatgaaggcagaagacttcagggcactgacaccgctgatttacgcccatgtaaacccttacgggatatttgaacttgatatggaaacaaggttgccgatcgaggtagttgcctga

SEQ ID NO: 3969 - DNA, 147 bp, Escherichia coli
atgcaaaaaaattttttgatgtcctatcgtcaattctcgcgctcagttcttcctgaaaaatatcagatttcacgtagcgcacctccggtactgtatccatcaacaaatgactattttttgaatatgtcatttcctgtaatctactga

SEQ ID NO: 3970 - DNA, 1503 bp, Escherichia coli
atgaagaaattttatcagtttagggatgagcagcgaaaggaacttgaacaacataatttttatagtttgatttcttcagattgtatagcgttgaaagacaaactatcatttgctcctgttatggctcatttcgtaatgaacttcagagatatgaataaatgggttatcaggtttgataacaatgataatgaatataaatctgttataaacggtggaacaatcgaggatgaaacacattcaagattgtttctagaagactggaggaagctatatatagatgacaaacttaactggaaagcaagtgatgttatatactggttgtttattagtcgagaaatggaatgtttccgaaagtttggcattgattttatgaggctttgtgtagatgatggaggcgaaccaatacttcgatattctcactccgagtcaggagaaacttgcggtaatatattcttttcaagaattagtcctattgctgatcaagttgcccatcatttgggaatatcactccgttattttggaacatttcaccttaatcttgaaaatggacatgtatggaagtcagaaggtgtttttgaaaatatagaattatcaccagattcttataaaaaagtggtcacgctctcaaagagaatgtttgatatatttaaaggaattcatgactctttttataattacctgtccagttatgttcttaatggtagttatccatcattttttgaatcattacctgtagggaaaaatgttgcacctatataccctgagtttgtgataaaaaacaaaaaccataacaatggtagacatattgaatatataaacaattacttggaaaaaatatcgaatcatgagtttttcaaatggctgattaacacctcaatagacccacaattgaaattaaaaagtttcatgcctctttggattgttgatattatgggatatagagatattaataaatatgtttttacatatgagcagcctgaatcagaaagtgaaaagattataaatgattatgcattacacctgtcagagcatagccgtttattttatcatgactggaagtcacttcaacttgatgatatgttacgttggagtgccagtgatactcttgagttcatttttcttaatgcagatatggatatgcatagagaaaatataattaagttttctttattcggattaaaacacagagatcctgttatcaggttctggtttatgatgatactggagtcaagtggaaaagcatttttctctcatgttggagatatagctttacaggtggaaagtaaatataatattcttctcccatatttatgtgggcgccatgcaacagaaaatgagcatgaagcatataataatatgtatgagcattttatgataaaggaaattaaccctgagcaaagtgatctaataatacagattacagacatggttatgcggtcattattgaataatttggatatctcatatcgatatgtaatgaataatttattggctgctcgttag

SEQ ID NO: 3971 - DNA, 561 bp, Escherichia coli
atgacagagcagaagcgaccggtactgacactgaagcggaaaacggaaggggagacgcctgtccgcagccggaaaaccatcatcaatgtcaccacgccaccaaaatggaaggtgaaaaagcagaagctggccgagaaggcggcccgggaagctgagctggcggcaaaaaaagcgcaggccagacaggcgctgtccatttatctgaacctgctctcactggatgaggccgtgaacaccctgaaaccctggtggccgggattatttgacggtgacacgccccggcttctggcctgcggtatccgggacgtgttactggaagacgtggcgcagcggaatatcccgctctcgcataaaaaactgcgcagggcgctgaaggccatcacccgttcagaaagctatctgtgtgccatgaaagccggtgcctgccggtatgacacggaagggtatgtgacggagcatatttctcaggaggaggaagcgtatgcggcagcgcgtctggataaaatccgccgccagaaccggataaaggcagaacttcaggccgtgcttgatgagaaataa

SEQ ID NO: 3972 - DNA, 747 bp, Escherichia coli
atgacaacggataacacgaacacgacacgtaacgattcactggctgcccggaccgatacctggttgcagtcgttgctggtctggtcacccggacagcgggatatcatcaaaacggtggcactggtgctgatggtactggaccatgcaaaccgcattctgcatctggaccagacgtggatgtttctggccgggcgtggagcctttccgctttttgccctggtgtgggggctgaatctgtcccgccatgcgcatatccggcagtcggccattaaccggctgtggggatgggcagttttttcccagttctggtattactttgccggctttccctggtatgaggggaatatcctgtttgcctttgcagtggcggcacaggtgctgacatggtgtgaaacgcgcagcctgtggcgtactgcagcggccattctcatgatggcactgtgggggcctttgtccggcaccagttacggcattaccgggctgctgatgctggctgtcagccaccggctgtaccgggcggaagacagaacggaacgtctggcgctggttgcatgcctgctggccgtgattccggcgcttaaccttgctaccagtgatgcggcggctgtagccggccttgtgatgacggtgctgaccgttggtctggtatcctgtgcaggaaaatcattaccccgtttctggcccggagattttttcccgacgttctatgcctgtcatctggctgtgctgggcgttctggcactgtga

SEQ ID NO: 3973 - DNA, 5271 bp, Escherichia coli
atgatgagtatcgcgcaggtcagatcggccggaagtgccggtaactattataccgacaaggataattactatgtactgggcagcatgggagaacgctgggccggcaggggggctgaacagctggggctgcagggcagtgtcgataaggatgtttttacccgtcttctggagggaaggctgccggacggcgcggatctaagccgcatgcaggatggcagtaataagcatcgtcccggctacgacctgaccttctccgcccccaaaagtgtctccatgatggccatgccaggtggcgataagcgcctgattgatgcacataaccaggccgtggactttgctgttcgtcaggtggaggcgctggcctccacacgggtgatgacggacggacactcagaaacggtactgaccggtaatctggtgatggcactgtttaaccacgacaccagtcgcgatcaggaaccacagttacacacgcatgcggtggtggctaatgtcacgcagcataacggtgagtggaagacactgagcagtgacaaagtggggaaaacggggttcattgagaatgtgtacgctaatcagattgcctttggcaggctctaccgggaaaagctgaaagagcaggttgaggcgctgggctatgaaaccgaagtggtcggtaagcacggtatgtgggaaatgccgggcgtaccggtggaggccttttccggacgctcacagactatccgggaggccgtcggggaagacgcctcgctgaaatcccgggatgtggcggcgctggatacgcgtaaatccaaacagcatgtcgatccggagatcaaaatggccgagtggatgcagacgctgaaggaaaccgggttcgacatccgggcatatcgtgacgcggcggatcagcgtgcggagatccgcacgcagacgcccgggccatcttcaccggacgggccggatgtgcagcaggcggtgacacaggccattgccggattaagtgaacgaaaagtgcagttcacgtacacggacgtgctggccaggacggtcggcatactgccgccggaaaatggtgtgattgagcgggcccgcgccggtatcgatgaggccatcagccgtgagcagcttatccccctcgatcgtgagaaggggctgttcacgtccgggattcatgtgctcgatgagctgtcagtccgggcactcagtcgtgacatcatgaaacagaaccgggtgaccgtacatccggagaaaagtgtcccccggacggccggttacagcgatgccgtcagtgttctggcacaggatcgcccgtcgctggccattgtgtccgggcagggcggtgcagccgggcagcgtgagcgggtggctgaactggtcatgatggcccgggagcaggggcgggaagtgcagattatcgctgctgaccgtcgctcgcagatgaacctgaagcaggatgaacggctgtccggtgagctgataaccggacgtcgtcagctgctggaaggcatggctttcacgccgggcagtaccgttatcgttgaccagggcgaaaaactctccctgaaagagacgttaaccctgctggacggtgccgcacgtcataacgtacaggtcctgataaccgacagtgggcagcgaaccggtacaggcagtgcgctgatggccatgaaggatgccggggtgaacacatatcgctggcaggggggagaacagcgaccggcaaccatcatcagtgaaccggaccgtaatgtccgctatgcccggctggccggagattttgcggccagcgtgaaagccggagaagagagcgtggcacaggtcagcggagtacgggaacaggccatactgacacaggccattcgcagtgagctgaaaacacagggcgtgctcggacacccggaggtaaccatgaccgccctgtcaccggtctggctggacagccggagccgttatctgcgggatatgtaccgaccggggatggtgatggagcagtggaacccggagacacgcagtcatgaccgctatgttatcgaccgggtgacggcgcagagtcacagcctgaccctgcgggatgcgcagggtgaaacgcaggtggtacgtatttcctccctggacagcagctggtcgctgttccggccggaaaaaatgccggtggcagacggcgagcgactgagggtgacagggaaaattcccggactccgcgtctccggcggtgaccgcctgcaggtggcatccgtcagtgaagatgcgatgacggttgttgtgccggggcgggctgaaccggcctccctgcctgtgagcgattcaccattcacggcactgaagctggagaacggctgggtggaaacgcccgggcattccgtcagcgacagtgcgaaggtttttgcctccgtcacacagatggcaatggacaacgccaccctgaacggtctggcccgcagcggtcgtgatgtccggctgtattcttcactggatgaaacccgtactgcggaaaaacttgcccgccatccctcctttacggtggtttctgagcagataaaggcgcgtgccggtgagacattgctggaaacagctatcagtctgcagaaagccgggcttcacacgccggcacagcaggctattcatctggcccttcctgtgctggaaagtaaaaacctggccttcagcatggtggacctgctgacagaggcgaagtcgtttgctgcagaaggaaccagttttactgacctgggaggggaaatcaatgcgcagataaaacgcggtgatttactgtatgtggatgtggcaaaaggctatggcacaggcctgctggtttcccgtgcgtcgtatgaggcagaaaagagcattcttcgccatattctcgaaggtaaggaggcggtcacgccgctgatggagagagtacctggcgaactcatggagaaactgacatcaggacagcgtgccgccacccgcatgatactggaaacgtccgaccgtttcacggtggtgcagggctatgccggtgtgggtaagaccacacagttccgggcggtgatgtcagccgtgaacatgctgccggagagtgagcgtccccgtgtcgttgggctgggtcccacgcaccgtgcggtcggggagatgcgcagcgccggcgtggatgcacagacactggcgtcctttctgcatgacacgcagctgcagcagcgcagcggagaaacgccggatttcagcaacacgctgttcctgctcgatgagagctcaatggtgggcaataccgacatggcacgggcatacgccctgattgcggccggtggtggtcgtgccgtggccagcggtgatacggaccagctgcaggccatcgcgcccggtcagcccttccgtctccagcagacgcgcagtgctgccgatgtggccatcatgaaggagattgtgcgtcagacgccggaactgcgggaggcggtatacagcctgattaatcgggatgtggaaagggcactgtccgggcttgagagtgtgaaaccgtctcaggtgccacgtcaggagggcgcatgggcaccggagcactccgtaacggagttcagtcacagccaggaagcgaaactggcagaagcgcagcagaaggcgatgctgaaaggcgaggctttcccggatgtccccatgacactgtatgaagccattgtccgcgattataccggcaggacaccggaaacgcgggagcagacgctgattgtcacgcacctgaatgaggaccggcgcgtgctgaacagcatgattcatgatgcacgggaaaaggccggtgagctggggaaagagcaggtcatggtgcctgtcctgaacacagcgaatatacgcgacggggagctgcgtcgtctctccacctgggagaataacccggatgcccttgccctggtggataatgtgtatcaccggattgccggtatcagcaaggatgacgggctgataaccctgcaggatgcggaaggtaacacgcggctgatttcaccccgggaggcggcagccgaaggggtcacactgtacaccccggatattatccgggtgggggctggtgaccggatgcgcttcacgaagagtgaccgggagcgtggttatgtggccaacagcgtctggacggtgacagcggtttccggtgacagtgtcacgctgtcggaaggtcagcagacccgggtgattcgccccggccaggagcgggcagagcaacatattgacctggcctatgccatcactgcccacggtgcacagggggcaagtgaaacctttgccattgcgcttgaaggcacggaaggtaaccggaaactgatggccggctttgagtcagcctacgtggccctgtcgcgtatgaagcagcatgtgcaggtgtacaccgataaccgtcagggctggacggatgccattaacaatgccgtacagaaaggaactgcccacgatgtgtttgagccgaaaccggaccgggaggtcatgaatgcagagcggctgttcagtacggcgcgggagctgcgggacgtggcggcaggccgagccgttcttcgtcaggcggggcttgccgggggagacagtcctgcacggtttattgcaccggggcgcaaatatccgcagccgtatgtggcactgccggcgtttgaccgtaacggcaagtcagcaggtatctggctgaacccactgaccacggatgacggaaacgggctgcggggattcagtggtgaaggccgggtgaagggcagtgaagatgcacagtttgtggccctgcagggcagccgtaacggagaaagcctgctggctgataatatgcaggatggtgtccggattgcccgtgataatcctgacagtggtgtggtggtaagaatcgccggtgaaggccgtccgtggaatcccggtgccataaccggtggccgcgtgtggggggatatcccggacaacagcgtccagccgggagccggaaatggcgaatcggtcacggcagaggtgctggcacagcggcaggctgaagagaccatccgccgtgaaacggaacgccgcgcagatgaaattgtccgtaaaatggcagagaacaaacctgacctgccggacggcaaaacagagcaggctgtcagggagattgccggacaggagcgtgaccggtctgccatatctgaacgggaagccgcgctgccggagagtgtgctgcgtgaatcacaacgggagcgggaagcggtccgggaggttgcccgggaaaatctgctgcaggagcgtctgcagcaggtggagcgggatatggttcgtgacctgcagaaagagaaaaccctgggcggagactga

SEQ ID NO: 3974 - DNA, 2199 bp, Escherichia coli
atgagttttaacgcaaaggatatgacccagggcggtcagattgcgtccatgcgtatccgcatgttcagccagatcgccaatatcatgctttactgcctgtttatttttttctggatactcgttggtctggttttatgggtaaaaataagctggcagacgtttgtgaacggctgtatttactggtggtgtaccacgctggaaggcatgcgggatttaatcaagtcccagccggtctatgagatccagtattacggcaaaaccttccggatgaatgctgctcaggtactgcatgataaatatatgatctggtgcggagagcagctatggtccgcattcgttctggccacagttgtggcactggttatttgcctgattaccttctttgttgtctcctggattctggggcgtcagggtaaacaacagagcgaaaatgaagtcacaggtggtcgtcagctgacagacaatccgaaagacgttgcccggatgctgaaaaaagacggcaaggactccgatatccggattggcgatctgccgattatccgggattccgaaatccagaacttctgtctgcacggaacagtgtcgacgggtaagtcagaggttattcgacgtcttgccaactatgcccgtaaacgtggcgacatggtggtgatttatgaccgttcgtgtgagtttgttaaaagttactatgatccctccatcgataagatcctgaatccgctggatgcccgctgtgccgcctgggatttgtggaaggagtgcctgacacagccggattttgataatgtcgcgaacacgctgatcccgatgggaacgaaagaggacccgttctggcagggatcaggacgtaccatttttgcggaagcggcgtacctgatgcgtaatgaccctaaccgcagctacagcaaactggtggatacactgctttccatcaaaattgaaaaactgcgtacctacctgcgtaattcaccggcggccaacctggtggaagagaaaattgagaaaacggcgatttccatccgtgctgtgctgaccaactacgtgaaagccatccggtacctgcaggggattgagcataacggtgagtccttcaccattcgtgactggatgcgtggtgtccgtgaagataagaaaaacggctggctgtttatctcgtcaaatgccgacactcatgcctccctgaagccggtggtttccatgtggctgtccattgccattcgtgggctgctggcaatgggagaaaaccgtaaccgtcgtgtgtggtttttctgtgatgagctacccacgttacacaaactgccggacctggtggagatcctgccggaagcccgtaagttcggaggctgctatgtgtttggtattcagtcctatgcccagctggaagatatctacggtgagaaagcggcggccacgctgtttgatgtgctgaatacccgtgcctttttccgctccccgagccatcagattgcagagtttgctgccggtgaaattggtgagaaagagcacctgaaagccagtctgcagtattcctacggtgctgacccggtacgtgacggggtatcgaccggtaaggatatggagcgccagacgctggtcagttattccgacattcagtccctgccggatctgacctgctatgtcaccctgcccggaccgtatccggcagtaaaactctcactgaaatatcaggcacgtccgaagattgccccggagtttattccgcgtgaaatcaacccggaaatggagaatcgtctgagtgccgtacttgccgcaagggaagcagaaggtcgccaggtggccagcctcttcgaaccggatgtgccggaggttgtttccggagaagacgtgactcaggctgaacagccgcaacagccgcaacagccgcaacagccgcaacagccgcaacagccgcaacagccggtgtctcctgccatcaacgataagaaatcagatgcaggtgtgaatgttccggccggggggatcgagccggagctgaaaatgaaaccggaagaagagatggaacagcaactgccacccgggatcagtggatccggtgaagtggtggatatggccgcttatgaggcatggcaacaggaaaatcatccggacatccagcagcagatgcagcgtcgtgaagagatgaacattaatgtgcaccgggagcgcggggaggatgttgagccgggagatgatttctga

SEQ ID NO: 3975 - DNA, 663 bp, Escherichia coli
atgagcacagcaatcaagaagcgtaaccttgaggtgaagactcagatgagtgagaccatctggcttgaacccgccagcgaacgcacggtatttctgcagatcaaaaacacgtctgataaagacatgagtgggctgcagggcaaaattgctgatgctgtgaaagcaaaaggatatcaggtggtgacttctccggataaagcctactactggattcaggcgaatgtgctgaaggccgataagatggatctgcgggagtctcagggatggctgaaccgtggttatgaaggcgcagcagttggtgcagcgttaggtgccggtatcaccggatataattccagttctgccggtgccacactcggtgtgggccttgctgccggtctggtgggtatggctgcagatgcgatggtggaagatgtgaactataccatgatcacggatgtgcagattgcagagcgtactaaggcaacggtgacaacggataatgttgccgccctgcgtcagggcacatcaggtgcgaaaattcagaccagtactgaaacaggtaaccagcataaataccagacccgtgtggtctcaaatgcgaacaaggttaacctgaaatttgaagaggcgaagcctgttctcgaagaccagctggccaaatcaatcgcaaatattctctga

SEQ ID NO: 3976 - DNA, 492 bp, Escherichia coli
atgagatgtttagcccatattgctctggtaacggtgatacagtttatcgcctgttatctggctgattgggggaatgccgaaacagtttttatgctgttcttcatagtgctatggcagggactgtttatatggttgttctctcaaatacgaaaaaaacggaatgtgtcggatgagtttaagtttagtaaaggcgtttggtatataacgatgccagtatcttccttactctctccgttattaagcctgatggtttttatcattggtacactatacgagttaaggcgagttagtggttgcataagcataaaaaaatggggtcaaaatcaactcaaagaccaatatgataggagtgaaaagttagacttcgggggcattgaacagcccccaacgacctactataacccttcaaccggatatcctatgcatggaggctttgattcagcgggaaatacttttgggactcgttggcaggactattatgacaggcaataa

SEQ ID NO: 3977 - DNA, 2820 bp, Escherichia coli
gtgaatgaagtttatgtgattgccggtggtgagtggttgcggaataacctgaacgccattgccgcctttatgggaaccaggacgtgggattccattgaaaaaattgcgctcacattgtctgttctcgcggtggccgtgatgtgggtacagcggcacaacgtgatggatttgctgggctgggtggccgtgtttgtgcttatcagcctgctggttaatgtccgcacatcggtgcagattattgataacagtgacctggtccaggttcatcgggtggataatgtgccggtcggactggcgatgccactttcactgacgacccgtatcgggcatgcaatggtggccagttacgagatgatcttcacgcaaccggacagtgtcacctacagcaaaacggggatgctgtttggctcagaactggtatcaaaaagcaccgactttttgtcccgcaatccggaaatcgccaatcttttccaggattatgtgcagaactgcgtgatgggggatatttacctgaaccacaaatacacgctggaggagctgatggcctccactgatccctacacgctgattttttcccgccccagtccgctgcggggcgtttatgacagcaataataatttcataacctgtaaggacgcgtcggtcacgctgaaagacaagctgaatctggatacacagagtggcggaaaaacctggcattattatgcccggcagttatttggtggtcgccctgatcctgacctgctgttcagtacgctgattggcgacagttacagttacttctatggctcaagtaaatcagccagccagatcatccgccagaatgtcaccattaatgcgctgaaggaggggatcaccagttatgcagcacgtaatggtgactcagccagcctggtgaatctggccaccacgtcatcgatggagaagcaacgtctggcacatgtctccatcggtcatgtggcgattcggacactgcccatgacgcagaccatcctgacggggatcgccatcggtattttcccgcttctggtactggcggctgtcttcaacaaactgacgctgtctgtcctgaaaggctatgtgtttgccctgatgtggctgcagtcatggccaatgttgtacgccattctgaacagcgccatgacattttatgcgaagcagaatggtgcaccggtggtgctctcggaaatttcacagatacagctgaaatactccgatctggcttccactgccgggtatctttccatgatgatcccgccattatcctggatgatggtcaggggactcggggccggattttccagtgtgtacagccatttcgcttcctttgctatcagcccgaccgccagtgcggcaggcagtgtggttgacggtaattactcctacggcaacatgcagacggaaaacgtgaacggcttcagctggagtaccaacagcaccacgtcgtttggtcagatgatgtaccagaccggcagtggcgcaacctccacacagacccgtgacggtaatatggtgatggatgcgagcggggcgatgtcccgtttaccggtcggtatcaatgcaacgcgtcagattgcggcggcacaacaggaaatggcccaggaggcgtcgaacagagcagaaagcgccctgcatgggttcagcagcagtattgccagtgcctggaactcgctcagtcagtttggttctaaccgggggagcagtgattctgtcaccggtggtgctgacagcaccatgagcgcacaggactccatgatggccagccgtatgcgcagtgcagtggaaagctatgcgaaggcgcataatatcagtaatgagcaggcgactcaggaactggcatccagaagtacgagagcttctgccgggatgtatggagatgctcatgctgaatggggggttaaacctaaaattcttggtattggtggaggattaggcgttagaggtggtggtcgggctggcattgactggagtgatgatgatgcgcatcaggccagcagtggttcacgggccagccatgatgctcgtcatgatattgacgctaaagccagtaaggactttaaagaggccagcgattactttaccagccgcaaagtcagtgaatccggcagccatactgacaataatgctgattcccgggtggatcaactgtctgcagccctgaactcagcgaaacagagttacgaccagtacacgacgaatatgacccgcagccatgaatatgctgaaatggcatcccgtactgaaagcatgagtgggcagatgagcgaagatttgtcgcaacagtttgcacagtatgtgatgaaacacgcaccgcaggatgccgaagctattctgacaaataccagttcgccggagattgcagaacgccgtcgggcgatggcctggtcttttgtgcaggaacagatacagcctggtgttgataatgcctggcgggaatcccgtggcgatattggtaaaggaatggagagcgtaccttcgggtggtggcagtcaggatattattgctgaccatcagggacatcaggccgttattgagcaaagaacgcaggacagtaatatccgtaatgatgtaaaacatcaggttgataatatggtcacagaatataaagggaatataggtgatactcagaacagcatacgtggcgaggaaaatattgtaagaggacagtattctgaactgcagaatcaccataaaacagaggcattatctcagaataataaatataatgaagaaaagtcggctcaggaaagaatgcccggggctgacagtccacaggaacttatgaaaagggcaaaggagtatcaggataagtataagtaa

SEQ ID NO: 3978 - DNA, 1374 bp, Escherichia coli
atgcctcgcattaaacttcttctggttctttgtaccgccttactgacggtcacacccgcagcgtcagcggatgtgaacagcgacatgaatcagttctttaacaagctgggcttcgcctccaataccacacagccgggcgtctggcaggggcaggctgccggctatgcttacggtggctccctgtatgcccgtactcaggtcaaaaatgttcagctgatttccatgacgctgccggatatcaatgccggatgtggcggcatcgacgcctatctcggttcgttcagttacatcaatggtgagcagctgcagcgttttgttaagcagattatgagcaatgctgccggttacttttttgaccttgccctgcagacaacggtgccggaaatcaaaacagcaaaagacttcgtgcagaaaatggcaagcgacattaacagtatgaacctcagttcctgccaggcggcacaggggattatcggcgggcttttcccccggacgcaggtgtcccagcagaaagtctgtcaggacattgccggtgagagcaatatttttgctgactgggcggcttcccggcagggatgtaccgttggcgggaaatctgacagcgtcagggataaagccagcgacaaggataaggagcgggtgaccaaaaacatcaacatcatgtggaatgcgctttccaaaaacagaatgtttgacggcaacaaagagctgaaagaatttgtgatgacgctgaccggctcactggtgtttggtcccaacggcgaaatcacaccgctgtcagccagaaccactgaccgctcaattatccgggccatgatggaaggcggcacagcaaaaatttatcactgcaacgattctgataaatgcctgaaagtggtggcagacacaccggtgaccatcagccgggataatgcactgaagtctcagattactaaacttctggccagcattcagaacaaggcggtcagtgacacacctctggatgacaaggaaaaaggctttatttccagtaccaccatccccgtcttcaaatacctggttgacccgcagatgctcggtgtttccaacagtatgatttatcagctgacggactatatcggttacgacatcctgctgcagtacattcaggagctgatacagcaggcccgggcgatggtggccacgggaaattatgacgaagcggttatcgagcatattaacgacaacatgaatgatgccacccggcagattgcggcgtttcagtcacaggtgcaggtacagcaggatgcgctgctggttgtcgatcgtcagatgagctacatgcgtcagcagctttccgcccgcatgctcagtcgttaccagaacaactatcacttcggagggagcacgctgtga

SEQ ID NO: 3979 - DNA, 396 bp, Escherichia coli
atgatgacagaaaataaaaagaatcaggaattcaaaatcagaaaaattaaacgggatattgagtgcggttgtgataatgtcgaaaaatgcttatggctttttgtcgttttctttgttgccggattgcttttatggcacggtatgcatgctattttcagcgcaggtattgattcatggaaagcggacccggaattaaataattttcgttatatgtggaatatcctgatgtatgccattccgtatacgttatatgcgcttgcagccgggtttcttgttacattttttctgttcccaatgtacgaattaatattcggaaatatcatgatattcctgctgaaacgccgtatgcgccgggagagcacattaagggagggcaagaatgatgcctcgcattaa

SEQ ID NO: 3980 - DNA, 282 bp, Escherichia coli
gtgcgaaataagcaggtggtgttactcattgccggaatatccggcatcgcgacgggaataatcgacagcctgaatatcccctttatccgtcaggggcttttttatcccgccagccctgtagaaattgtcgtttcgctgtgccttaccttttctgtttctgttgtgttctttgtgggggcaattgtgggatggatttcggtgtctgaaatatatcacagccgcatgaccggtctgaatgaatcatcggaaatatcagagggaacttatgatgacagaaaataa

SEQ ID NO: 3981 - DNA, 546 bp, Escherichia coli
atgtctctcactaaattactgccggtcattttgttgatgatggccacaggtgtgcaggcctccacccgggatgaaattgaacgactctggaatccgcagggtatggctgcgcagccagcacaaccggcagcaggcacgtcagccaggacagaaaagccggccccccgctggttccgcctcagcaacggcaggcagattaacctggccgactggaaggtggtgctgtttatgcaggggcattgcccttactgtcaccagtttgacccggtactgaaacagctggcacagcagtacggcttttccgtttttccctacaccctggatggtcagggggataccgcctttccggaagcattgccggtgccaccggacgtgatgcagaccttcttcccgaatatcccggtggccacaccgaccaccttcctggtcaacgtcaacacgcttgaggcattaccgcttttacagggggcaacggatgccgccggttttatggcacggatggatactgttctgcagatgtacggaggaaaaaaaggtgcgaaataa

SEQ ID NO: 3982 - DNA, 282 bp, Escherichia coli
atgagaaaatataaattctctttaccccggcttgatattacgggtatgtgggtattttccctgggtgtctggtttcatatcgtcgcccgtcttgtttacagcaaaccctggatggctttttttctggcggagctgattgcggccatccttgtgctgttcggcgcataccaggtgctggatgcatggattgcccgggtcagccgggaagaacgtgaggcactggaagccaggcaacaggccatgatggcagagcagcaggagggcggacatgtctctcactaa

SEQ ID NO: 3983 - DNA, 162 bp, Escherichia coli
atgagtttactttttgacagaaaaacactggaagctatcagagacattatccgggaaacaatgttaggcaatgttgccattgtcttactgataaacatttcaccggactatatggtacaaaagaacagtccatcaattatcatgctctctgttttatattaa

SEQ ID NO: 3984 - DNA, 366 bp, Escherichia coli
atgagttttatttctttatggcctttattgctggcccaggtgacagtgatgtcactgacattgattttccttgccgctgacaggcgttttttttcatgggactgttttgttgtttgcaccctgtccatgatgatggcagaaggtattgttattatgaaatatgaactgtggcatatccctcctgccctgctgggtctggcaggagtgttgtcatggttgctgcttctactccatacaggatatttttcaggcatatcagaaggagtgcataagcgtttgtggctcgctgttgccgcagtgttttctggtgcgggaatgattatattctactggtggctccatgcatcagaaaacataataaaataa

SEQ ID NO: 3985 - DNA, 744 bp, Escherichia coli
atgaataaagcattactgccactgttactctgctgctttatttttccggcgtcagggaaagatgcaggctggcagtggtataacgagaaaataaatccgaaggaaaaagaaaatcaacccgcacctgcagccccccgtcaggaaccggatattatgcagaaactggctgtgctgcagacggcaacaaagcgggcgctgtatgaagccattctgtatcccggcgtggataattttgtgaaatatttccggctgcagaattactggactcagcaggccgggcttttcaccatgagcgccagaaaggccatgctggcacatcctgaactggactataacctgcagtacagccattacaacggtacggtacggaaccagctggcggcagaccaggcgcagcagcgacaggccattgcgaaactggctgaacactacggcatcatgtttttttaccgggggcaggaccccatcgacgggcaactggcgcaggtcattaatggcttccgggatacgtatggtctgagtgttattcccgtttccgtggatggcgtgattaatccgctgttgccggattcccggactgaccaggggcaggcgcagcgcctcggcgtgaaatatttcccggccatgatgctggttgacccgaaacagggcagtgttcgtccgttatcatacggctttatttcgcaggacgacctggcaaaacagttcctgaacgtttctgaagattttaaaccgaatttttaa

SEQ ID NO: 3986 - DNA, 264 bp, Escherichia coli
atgatgaaggtcatattcacttctaatcgtcttgttgattttcttatccggcttttgattacagcgattgtcattttcccggtaattatctggtcgtgggatacggtaaaagaaaccactgcagacgggatgcttgctgcctgttttgttattttttactccggtgtgctcctgtttattctgtatttttgtttttctgccctgactgacctgcagaaacctgatgatgaaagaaaaagtgatgaaaggaatgaagatgaataa

SEQ ID NO: 3987 - DNA, 1809 bp, Escherichia coli
atgaaacgtattttacctctgatactggctctggttgccggcatggcacaggctgacagcaacagtgattaccgggccggctctgattttgctcaccagatcaaaggacagggaagcagcagtattcagggctttaagccacaggagagtatccccggctataacgcgaatccggacgagacaaaatactacggtggcgtgactgccggcggggatggcggcctgaaaaatgacggcaccacggaatgggcgaccggtgaaaccggaaaaaccatcacagagtcattcatgaacaagccgaaagacattctttcaccggatgcaccgtttatccagaccggcagggatgtggtgaaccgggctgacagcattgtgggaaacaccgggcagcagtgcagtgcgcaggagattagccggagtgaatacacgaattacacctgtgagcgggatttacaggtggagcagtactgcacacgaactgcccgtatggagctgcaggggagtaccacatgggaaacccggacgctggggtatgaaatgagtcagctacctgcacgtgaagtgaatggtcagtatgttgtctccattacctctcccgttaccggtgaaattgtcgatgcgcattacagctggagtcgtacttacctgcagaagagtgtacctatgacaattacagtactgggaaccccactgagctggaatgccaaatactcagcagatgcctcatttacaccagtacagaaaacactgactgccggtgtggcttttacgtcatctcaccccgtccgggtcgggaatacaaaattcaaacgtcatacggcaatgaagctgcgtctggttgtcagggtaaaaaaagcctcgtacaccccgtatgttgtctggtctgaaagctgcccgttcagcaaggagctggggaaactgacaaaaacagaatgtacggaggctggcgggaacaggacgctggtgaaagacggtcagccatacagcatgtaccagagctgctgggcataccgggacacgtatgtcacgcagccagcagacaaggggacctgtcagacatacaccgacaatcctgcctgtaccctggtgtcacaccagtgtgccttttactccgaagaaggtgcctgtctgcatgaatatgccacgtactcctgtgagtcaaaaacatccgggaaagtgatggtctgtgggggagatgtcttctgtctcgatggcgaatgcgataaggctcagagcgggaagagtaatgattttgccgaagctgtttctcagctggcagcactggccgctgcaggtaaggatgttgcggcgctgaacggggtggatgtccgtgctttcaccggtcaggcgaaattttgtaagaaggctgcagccggatacagcaactgctgtaaggacagcggctgggggcaggatatcgggctggccaaatgcagcagtgatgaaaaagccctggctaaagcaaaatcaaacaaactgaccgtcagcgtcggggagttctgttcgaagaaagtgctgggcgtctgtctggagaaaaaacgcagctactgtcagtttgattcgaaactggcgcagatagtccagcagcaggggcgcaacggtcagttgcgtatcagttttggcagtgcgaagcatcctgactgtcgggggattacggttgatgagctgcagaaaattcagttcgacagactggatttcactaacttctacgaagacctgatgaataaccagaaaatcccggacagtggcgttctgacgcagaaagtgaaagagcagattgctgaacagctgaaacaggcaggacagtaa

SEQ ID NO: 3988 - DNA, 639 bp, Escherichia coli
atgaagctgagtatgaaatctctggcagcactgctgatgatgctgaacggggcggttatggcgtcagaaaacgtgaacactcctgaaaaccgccagttcctgaagcagcaggaaaatttaagcagacaactgcgtgaaaaacctgaccatcagctgaaagcctgggcggagaagcaggtgctggaaaacccccttcagcgttcagataaccatttcctggatgagctggttcgtaaacagcaggcttcgcaggacgggaaaccccggcagggtgctctgtattttgtgtcgttttccattcccgaagaggggctgaaacgaatgctgggcggaacccggcactacggtatacccgccacactgcggggcatggtgaacaatgacctgaagaccaccgctgaagccgtgctgtccctggtgaaagacggcgcgactgatggtgttcagatcgacccgacgctgttttcacagtacggcattcgcagtgtaccggcactggtggtgttctgcagtcagggatacgacatcatccggggaaacctgcgggtcggccaggcgctggagaaagtggccgccacgggtgactgccggcaggtggctcatgatttactggcagggaaaggagattccgggaaatga

SEQ ID NO: 3989 - DNA, 993 bp, Escherichia coli
atgaagcgaagcctgtggctgctgatgttattccttctcgccggtcatgtccctgcagcgtctgcggattctgcctgtgaggggcgttttgtaaacccgatcacggatatctgctggagctgtattttcccgctctcgctgggcagtatcaaagtcagtcagggtaaggtccccgacacggcgaacccgtcgatgcccattcagatttgtccggcaccgccgccgctgttcaggcgtatcgggctggccattggttactgggagccgatggcgctgacggacgtcacccgatcaccgggatgcatggttaacctgggcttcagcctgccggcttttggtaaaacggcacagggaacggcgaaaaaggatgagaagcaggtgaacggggcgttctatcacgttcactggtacaaatacccgctgacgtactggcttaacatcatcacatcgctgggctgtctggaaggtggtgacctggatatcgcttatctttctgaaatcgaccccacctggacggacagcagcctgaccaccattctcaatccggaagctgtcatctttgccaatccgatagcacagggggcctgtgcagcagatgccattgccagcgcctttaatatgcctctcgatgttctgttctggtgtgccggttcgcagggcagtatgtacccgttcaatggctgggtgagtaatgagtccagtccgttgcagtcctccctgctggtcagtgaacgcatggcgttcaagctgcaccgtcagggcatgattatggaaaccatcgggaaaaataacgccgtctgtaatgaatatccgtccccaatcctgcccaaagaacgctggcgttaccagatggtgaatatgtacccggacagcggacagtgccacccgttcgggcgcagtgtgacccgctgggaaaccgggaaaaatccgcccaatacaaagaaaaacttcggctacctgatgtggcgtaaacgtaactgtgtcttcctgtga

SEQ ID NO: 3990 - DNA, 633 bp, Escherichia coli
atgagatgccgggggctgattgccctgctgatatgggggcagagtgtgaccgccgccgatcttggtacctggggcgatctgtggccggtaaaggagccggacatgctggcggtgatcatgcagcgtctgacggcactggagcagtccggtgagatgggccggaaaatggatgcctttaaggagcgggtgatccgtaacagcctgcggccccctgccgtgcctggtatcggacgcacggagaaatacggcagccggttgtttgacccgtccgtcagactggctgcggatatccgggataacgaagggcgggtgtttgcccgtcagggtgaagtgatgaatccgctgcagtatgttccttttaaccagacgctgtatttcatcaatggcgatgatccggcgcaggtggcctggatgaaacgccagacgccgcccacactggagagcaaaattatcctcgtgcagggcagtatcccggagatgcagaagtctctggacagccgtgtttactttgaccagaacggtgtgctctgccagcgcctcggcattgatcaggtcccggcacgggtgagcgccgttcccggcgatcgcttcctgaaggtggaatttattccggcagaggagggcagaaaatga

SEQ ID NO: 3991 - DNA, 387 bp, Escherichia coli
atgagttcaacgcagaaacccgccgacgtcacggcagaacgacgcatccactggtggtggacggtgccgggatgcctggcaatggtgttactgaacgcagccgtcagttacggcattgtcagactgaacgcaccggtgactgtcgccttcaacatgaaacagaccgtggatgcgttttttgacagcgccagtcagaaacaactgtcagaagcgcagtcaaaagccctttcagcgcgttttaacacggcactggaagccagcctgcaggcgtggcagcagaaacaccacgcggtcattctggtgtcgcctgccgtggtacagggggcaccggatatcacccgggaaatccagcaggatattgcccggcgaatgagggcggaaccatga

SEQ ID NO: 3992 - DNA, 2631 bp, Escherichia coli
atgagtaataaccctcttgaggccgtcactcaggcggttaattcactgctgactgcgcttaaattaccggatgaatccgcaaaggccaatgaagttctgggcgaaatgagcttcccgcagttcagccgtctgctgccgtaccgtgattacaaccaggaatccggtctgttcatgaatgacaccacgatgggctttatgctggaagccattcccatcaatggggcgaatgagtccattgtggaggccctcgatcacatgctgcgcaccaaactgccgcgcggtattccgttgtgtatccatctgatgtccagtcagctggttggtgacaggattgaatacgggctgcgtgagttctcctggtcaggtgaacaggctgaacggtttaacgccattacccgggcctattatatgaaagcggcagcgacacagtttccgctgccggaggggatgaatctgcccctgaccctgcgccattaccgggtgtttatctcgtactgttctccttcgaagaaaaaaagccgggccgacattctggaaatggaaaacctggtgaaaatcatccgggcgtcgttacagggggccagtatcaccacacagacggtggatgcacaggcctttatcgatattgtcggggagatgattaaccataacccggactccctgtacccgaaaagacgtcagctggacccgtattctgatctgaattatcagtgtgtggaggacagttttgatctgaaagtccgggctgattacctgacgctgggcctgcgtgagaacggcaggaacagcatggcccgcatcctgaatttccatctggcccgtaacccggaaatcgccttcctgtggaacatggccgacaactacagcaacctgctgaacccggaactgtccatctcctgtccgttcatcctgacgctgactctggtggtggaagaccaggtgaaaacccacagcgaagccaacctgaagtacatggacctcgagaaaaagtcgaagacctcctatgccaaatggtttccgtccgtggagaaagaggcgaaggagtggggggaactgcgtcagcggctgggctccggtcagtcctccgtggtgtcctacttcctcaacatcacagcattctgcaaggacaataatgaaacggcgctggaagtggagcaggacatcctgaacagctttcgtaaaaacggttttgagctgatttcaccgcgctttaaccacatgcgcaatttcctgacctgcctgccctttatggccgggaaagggctgtttaaacagctgaaagaggccggagtggttcagcgcgcagagagctttaatgttgccaacctgatgccgttagtggcggataaccccctgacaccggcaggtctgctggcacccacctaccgtaaccagctggcgtttatcgatattttcttccgggggatgaataacaccaactacaacatggcggtctgtggcacctccggggccggtaaaaccgggctgatacagccacttatccgcagcgtgctggactccggaggctttgccgtggtgttcgacatgggggatggctacaagtccctgtgtgagaacatgggcggggtgtatctggacggtgaaaccctgcgttttaacccgtttgcgaacatcaccgatattgaccagtcagcggagcgtgttcgtgaccagttgtcagtgatggccagccccaacggtaacctggatgaagtgcatgaaggtctgctgttgcaggcggtcagagcctcctggctggccaaagagaacagagcacgtattgatgacgtggtggatttcctgaaaaacgccagtgacagcgagcagtatgccgagtcaccgactatccgcagccgtctggacgaaatgattgtgctgcttgaccagtacactgccaacggcacttacggccagtattttaactctgatgagccgtccctgcgggatgacgcaaaaatggtggtgctggagctgggcggactggaagaccgtccgtcactgctggttgcggtgatgttctccctgattatctacatcgagaacaggatgtaccgcacgccgcgtaacctcaagaaactgaacgttattgatgaaggctggcgtctgctggacttcaaaaatcacaaggtcggtgaatttattgagaaaggctaccgtacggcccgccgtcataccggtgcctatatcaccatcacacagaacatcgtcgactttgactctgacaaggcctccagtgctgcccgcgcggcatggggtaactcctcctacaaaattatcctcaaacagagtgcgaaggagttcgcgaaatacaaccaactgtatccggaccagttcctgccactgcagcgcgacatgattggtaagtttggtgcggccaaagaccagtggttcagttccttcctgctgcaggtggaaaaccattcctcctggcaccgtctgtttgtggacccgttaagccgcgccatgtacagctctgacggcccggattttgagtttgtgcagcagaagcgtaaagaggggctgagtattcatgaggcggtatggcagctggcgtggaagaagtcagggccggagatggcttcgctggaagcctggctggaagaacatgagaaatacaggagtgtggcatga

SEQ ID NO: 3993 - DNA, 450 bp, Escherichia coli
atgcataaatcagaaaatgaaaaaatagattttattctggatgagcatgagcggatatccagaaaacagggttctttgtgtatggcactgggtaagggctttttagttatagctattctttgtggtgttgccacattctgtgtttctggcctatatctgaaatccttgtgcctgtccgttgcctgctgttgtggggtattcaatcgtatttttaattattacagcgtaccggatgaatcacgcagggtactcagtcgtcaggaattgctctggcttatgagtctgactgaagactgtccggatatgcaccagaaactgcttaaccgcctgctgtcaggtaaaaaactgaccaagagggaaatcaggagtctctggtgggaaaagatggatgcaatgcaggagtctgccacccgtcagcgtgtagagaaagaaacgaaatggcagaggtga

SEQ ID NO: 3994 - DNA, 234 bp, Escherichia coli
atggtcctcagccgtcagagcctgcttcagcttatgcgtctgactgaagacgtaccggatgcgagacaggaactgcttaaccgtctgctgtccggtaaaaaactgactggtcgggatgaaaaggatatccggcgtctctggcaggagaaagtggatgcaatgcaggagtctgccacccgtcagcgtgaacaggataccatccggaagtttactgaagagaataaatccgaatga

SEQ ID NO: 3995 - DNA, 231 bp, Escherichia coli
atgagtgatgaagccgatgaagccgatgaagcatattcagtgactgaacaactgaccatgacaggaataaaccggatacgccagaaaataaatgttcatggtattcctgtttatctctgtgaagcatgcggaaatcctattcctgaagcccggcggaaaatatttcccggtgtgacgttatgtgttgaatgtcaggcgtatcaggaaaagcagaggaaacactatgcataa

SEQ ID NO: 3996 - DNA, 516 bp, Escherichia coli
atgaaacagatttctttatttattcctctgctgggaaccttattactttccggctgtgccggaaccagtacggaatttgagtgtaacgccaccacatccgatacctgtatgacgatggagcaggccaatgagaaggctaaaaaactggagcagacctcagaggcaaagccggttgcggcatcactgccgcgcctggctgaagggaacttccggacaatgccggtgcagaccgtcaccgcgaccacttcgtccggcagcgggcctgtagtgactgcacttccggagcagaaactgctggcaccacgcccgctgtttaccgctgcccgggaagtgaaaacggttgttccggtcagttcagttgcgccggtaacacctccccgtccgctaagaacgggtgagcagacggcagcattatggatagcgccttatattgataatcaggatgtttatcatcagccatccagcgtgttttttgttattaaaccgtctgcgtggggaaaaccacgcattaattaa

SEQ ID NO: 3997 - DNA, 252 bp, Escherichia coli
atgaataagctggtttctgatggcagcgtcaaaaaaataaattatccggtgctgtatgagtccggaataacacctccgttatgtgaagtcagtgcaccagaacctgatgcgggtgggagaggcattgtggcatatgtttataaatcatcacggagtacggtttttgaaaatcctgacattgtaaaaacctgtacggtcagggaattgaagaaggattttgtgaactgcgatgagaaaggtgagggacaatga

SEQ ID NO: 3998 - DNA, 321 bp, Escherichia coli
atgaacatgcgtaatattaatgttattactgcccgctctgtaccggataaaagcgtatcagatgattttatgcatgctgttctcagtaactgcaccacaagaatcgtatttcctgcaccgaaggaattcagttctgaatcattgccgcataattttaatatggctgctgtcggtgtgatgaagaagggtatgtcgatgagcttattttcttctctggggcatattgtggttgtcggacaatcctgtggcggaaaatctgttccggtgaaagaactaatcgacagaattattcagaaatataaggaaccattcgatgaataa

SEQ ID NO: 3999 - DNA, 591 bp, Escherichia coli
atggcaaataatatgtcgtcccgtcaggcgtgccatgccgcccggtatgttgtcgcccgggttctgcgaggactgttctggtgtctgaagtacaccgtcattctgccactggccacaatggccctgatggctctgtttgttttatggaaggacaacaccacgccggggaaattactggttaaggagattaacttcgtaagacaaacagcacctgccggacagttcccggtcagtgaatgctggttttcttcctccgattcttcaggcagatcagaaatacaggatatctgccattaccgcgcggctgatgctgcagattatgtcagggagactgaccggtcactgatgcaactggtcaccgcattatgggcaacactggcactgatgtatgtctcgctggcagcgatcaccgggaaatatccggtgcgacccggaaaaatgaaatgtatccgggtggtaaccgcagatgaacatctgaaggaagtttatacggaagatgcttccctgccggaaaaaatcaggaaataccctgtttattttcctgatgacagaacaaacagaaacaacggagataaaaatgaacatgcgtaa

SEQ ID NO: 4000 - DNA, 1428 bp, Escherichia coli
atggccagtatcaacactattgtgaaacgcaagcagtacctgtggctggggattgtggttgtcggtgcagcctccgcgattggtggggcactgtatctgtctgatgtggacatgtccggtaacggtgaggcggtggctgaacaggagcccgtgccggatatgaccggtgtggtggatacgacctttgatgacaaggtgcgtcagcatgccaccacagagatgcaggtgacggcagcgcagatgcagaagcagtatgaggaaatccgtcgtgaactggatgtcctgaacaaacagcgcggtgatgaccagcgtcgtattgaaaagctgggacaggacaatgctgccctggcagagcaggtgaaagccctgggtgcaaatcccgtcaccgcgaccggtgagcctgtaccgcagaagccagcctcaccgcccggcccggaaggcgaaccacagccaggaaacacccccgtatccttcccgccgcagggcagcgttgctgttccaccgccgacgacgttttatcccgggaatggtgtcacgccaccaccacaggtgacgtaccagtctgtgccggtgcctaaccggatacagcgtaaggtgtttacccgtaatgagggaaaacagggaccatcgctgccatacattccgtcaggaagttttgcgaaagccatgctgattgaaggggcggatgccaatgcctcagtcaccggtaatgaatccacggtgccgatgcagttgcgtatcaccggtctggtggaaatgccgaacagcaaaacgtatgacgcaacgggatgttttgtggggctggaagcctggggggatgtgtccagtgaacgtgccattgtacgcacccgcaatatcagctgcctgaaggatggcaaaactattgatatgccgattaaggggcatgtcagcttccggggtaaaaacggtatcaagggcgaagtggtgatgcgtaacggcaaaatcctcggctgggcatggggcgcgggatttgttgacggtatcggtcagggaatggagcgcgcttcccagccggctgtcgggctgggtgccactgctgcttacggggccggcgatgtccttaaaatgggtatcggtggcggcgcatcgaaagctgcacagacgctcagtgactactacatcaaacgtgccgaacagtatcacccggtgataccgattggtgcgggcaacgaagtgaccgtggtgttccaggacggcttccagctgaaaaccgtggaagagatggcgctggagcgcacgcagaacagagcggaagaagataatccggaaagtccggttcctgttccgccatcagctgaaagtcatcttaacggctttaatactgaccagatgctgaagcagctgggcaacctgaatccgcagcagtttatgtccggcagccagggaggaggcaacgatggcaaataa

SEQ ID NO: 4001 - DNA, 729 bp, Escherichia coli
atgagaaaaaataatacggcaataatattcggcagcctgtttttttcctgcagcgtgatggccgcaaacggtacgctggcccccaccgtggtgccaatggtgaacggtggtcaggccagtattgccatcagtaataccagcccgaatctgtttaccgttcccggtgaccggattatcgccgtgaacagtctggatggtgccctgaccaataatgagcagaccgcctccggcagtgtggtggtggccaccgtcaacaaaaagccctttacgttcattctggaaacagaacgtggtctgaatctttccattcaggccgttccccgtgaaggcgcggggcgtaccattcagctggtcagtgacctgcgcggaaccggagaagaagccggtgcgtgggaaacgtccacgccttacgaatccctgcttgtgaccatcagccaggccgtccgtggcggaaaattacctgcaggctggtatcaggtcccggtgacaaaggaaaccctgcaggccccggcggggctgtcttcagtggcagatgccgtatggacggggaatcacctgaagatggtccgctttgccgtggaaaataaaacactgtctgccctgaatatccgggaaagtgatttctggcagccgggaacccgtgccgtgatgttcagccagcctgccagccagttactggcaggtgcgcgcatggatgtgtatgtcatccgtgacggggagggcaactga

SEQ ID NO: 4002 - DNA, 567 bp, Escherichia coli
atggaacacggtgcccgtttaagtaccagtcgtgtaatggccatcgcctttatatttatgtcagtgcttattgttctcagcctctctgttaacgttattcagggggtgaataactaccgtcttcagaatgagcaacgcactgccgtgacgccaatggcgtttaatgccccctttgccgtgtcgcagaacagtgccgatgcctcttatttacagcagatggcgctgtcatttattgccctccgtctgaatgtttcatcagaaaccgtcgatgcctcacatcaggcgcttctgcaatatatccgcccgggcgcacagaaccagatgaaagttattctggctgaagaagcgaagcgtattaaaaacgataacgtgaactcagcctttttccagaccagtgttcgtgtctggcctcagtatggccgtgtggaaattcgtggtgtgcttaaaacctggattggtgattcaaaacctttcactgatatcaaacattacatccttattctgaagcgggaaaacggggtgacctggctggataatttcggggaaacagacgatgagaaaaaataa

SEQ ID NO: 4003 - DNA, 312 bp, Escherichia coli
atgtcgggagacgagaataaacttaagaaatatcgtttcccggaaacactgaccaaccagagccgctggtttggcctgccactggatgaactgatccccgcagcaatctgtattggctggggtattacaacatcgaaatatctgttcggtattggtgcagcggttctggtttatttcgggattaaaaaactgaaaaaagggcggggtagttcctggttacgtgacctgatttactggtatatgccaacagccctgctgcgcggtatttttcataatgttcccgattcgtgtttccggcagtggattaaatag

SEQ ID NO: 4004 - DNA, 366 bp, Escherichia coli
atgaatgctgttttaagtgttcagggtgcttctgcgcccgtcaaaaagaagtcgtttttttctaaattcactcgtctgaatatgcttcgcctggctcgcgctgtgctcccggctgctgttctgatgatgttcttcccgcagctggcgatggccgcaggcagcagtgggcaggacctgatgcagagtggtaactccacggttaaggcgaccttcggtaaagattccagtattgttaaatgggttatcctggcggaagtcctggtcggtgcggtcatgtacatgatgaccaaaaacgtcaagttcctggccggttttgccatcatctctgtatttattgctgtgggtatggccgtcgttggcctctga

SEQ ID NO: 4005 - DNA, 654 bp, Escherichia coli
atgtgtgcaatggatcgtagagaaagagcactcattcgtcaattacatttccctaacgacttaagagagaacatttcattattgaaatatcccgtatgtatacgttttgaagacggttcttttataggaacaaatcacagcttcgagcgatttattaaattatcatattgttcatgtgatgaatggtttgagcatttgactttagaatccaagttacaactatcaagatctgagatggattcatatttttcaacttatggtgtaagttatattaataatgttttaattagtgctatgttatggagcatggttatcgaaacactcaatacaaacgaaggttgttttttcgtctggcgatttattcagtcaaatgacaaaaatatttcaacatctttgatttctaaatctaatgatgggttgatgtttttttctggggagtatgtagatattgaaccctatcttgtagggtttagtcattattattctgcagcagtgacaaaaattagtatatctaaatccaagaagaaaacgatgaattttttcaaaatgaatgggtttagttccagagatcactggttggatgaaatgctcaggtctgaaaaaatactatttctatatgatagagtaaaaggaatattaaaaaataaatgttaa

SEQ ID NO: 4006 - DNA, 384 bp, Escherichia coli
atggccagagtaattttgtatatcagtaatgatgtctatgataaagtaagtgcgatagttgaacagcgtcgtcaggagggggcaagagataaagatataagcctttcaggaactgcttcaatgcttcttgaactggggcttcgcgtatatgaggctcagatggagcgtaaagagtctgcatttaatcagactgagtttaataaattacttcttgaatgtgttgtaaaaacacagtcatcagtagcgaaaattttgggtattgagtctctaagtccccatgtctccgggaatccaaagtttgaatatgccaatatggttgaagatattcgtgagaaggtgtcatctgagatgggacgatttttcccaaaaaatgatgatgaataa

SEQ ID NO: 4007 - DNA, 510 bp, Escherichia coli
atgaaaaagtggatgttagcaatctgcctgatgtttataaattggagctgcgaagccgccgattgctttgatcttgcaggtcgggattacaaaatagacccggatttactgagagcgatatcatggaaagaatcccgttaccgggttaatgccattggtattaatccggtaacgggatatggcagcggactgatgcaagtagactcccagcattttaacgaactggcccgctacggaattaagccggaacatctgacaacagatccctgcatgaacatttataccggtgcttattatctggcaatagcctttaaaaaatggggcgtctcctgggaggccgttggtgcatacaatgctggattcaggaagaccgaacgccagaaccagagacgtcttgcctacgcatcagaggtttaccggatttataccgggataaagagcagtaaaggcatccaggttccgaccacgaagaaatcacttccggaaattaacagcgtgcagaacaattaa

SEQ ID NO: 4008 - DNA, 822 bp, Escherichia coli
atgcgactggcttcccgttttggccgatataattccattcgtcgtgagcgtccgttaacggatgacgaattaatgcagttcgtgccttctgtattttccggtgataaacatgagtcccggagtgaacgttatacgtatattccaacaatcaatatcatcaataagttacgtgatgaaggtttccagccattctttgtctgtcagagtcgggttcgtgatttggggcgtcgagaatacagtaaacatatgttacgtcttcgcagggaagggcatattaacgggcaggaagttcctgaaattatcctgcttaattcacatgatggttcatccagttatcagatgatccccggaatttttcgttttgtctgcacaaatggcctggtgtgcggaaataattttggcgaaatccgcgttccacataaaggtgatattgtcgggcaggttatcgagggagcgtatgaagtgctcggtgtctttgataaggtcactgataatatggaggcaatgaaagaaattcatcttaacagtgacgagcaacatttatttggcagagctgcactgatggtcaggtatgaagatgaaaataaaacgccagtgacacctgaacagataattactccccgtcgtcgggaagataaacagaacgatctctggacgacctggcagcgggttcaggagaatatgataaaaggcggattatcggggcgaagtgcctccgggaaaaataccaggacaagagccattacaggtattgatggtgatataagaatcaacaaggcgttatgggtgattgccgaacagttcagaaagtggaagttatga

SEQ ID NO: 4009 - DNA, 297 bp, Escherichia coli
atgagcgcattttcttttaacaccacttatcagccaaccggtgatcagcagaaagacgcaatcgcacaaatcgacatcatgcagagtcgtgctgttcaggcaaatcttgcatatcagagtagccaggatgcggaaacgctgatgaaacagttagggcaaatcaatgatgaactggggacgttgttggatagcctggaaaatcacacgccagttatcagacaaaaagccagtgatttgagtgcactggtgatgcttttcagtcaactggccggtcagtccatgagcagtccggtgtga

SEQ ID NO: 4010 - DNA, 504 bp, Escherichia coli
ttgacgttttgcggggacctgccttttgttccctccggtattcaccatcacctgtttgagaaccttcgccgcaagaggcatcactgccacggcctgacgcacctgtcctgggcagaacgcaaaattttttaccgggttttgggtaaaaaattttgtgggctgttcatttaccctggacagtcagtgcggcaggttgtggctgtatcagcccccggcgacaggggcttaaacaggtgcatggcaccggacacaacaacgggcagggacccgccgcaacgacgtgaagcgcggtttgcgaaacggcgttgccccttacatcccggcggccttttgccgggatgccaggagcgcaggccacggcgcgacagaggcggcgcgaccggaacggtcgctgcaagcccggggtttcgcgtcagggatggaagcccgccagggcggagacagctccgctggctccgttcacgacagcccgccccgccagggggacgcccggaaaaggcataa

SEQ ID NO: 4011 - DNA, 216 bp, Escherichia coli
atgtctcatccacgtcagtatggcctcttaccgtgcaaattgcaaggaggagtaaaccatgaaactaccgggaaacgcccttatctggtgcgtattaatcgtgtgctgcacgttgttgatattcacactcctgacccggaatcgcctgtgcgaaatacggctgaaggacggatacagggaggttacggcaagcatggcttacgaatccggcggtaa

SEQ ID NO: 4012 - DNA, 675 bp, Escherichia coli
atgagcgcacattcacaggcactggttcccctcagcgcagagcaacaggccgcatggcgggcggtggcggagacggaaaaacgccgccatcagggaaacttgctggcggaatatccgtatgcgggggcgtttttccgctgtctgaacggaagccgcaggatatcgctgtctgacctgcgatttttcatgccgtccctgaccgcagaagaactgcacggcaaccgtcttcagtggctgtatgccatcgatgtgctgattgaaacacagggcgaggtctgcctccttccccttcccggcgatgcagcagaacgcttgttcccgtcggtgcggtttcgtgtcagggaacgcagtcgccataaatccgcgctggtcatgcagaagtacagccgtcagcaggcacgggaggcagagcagaaagcccgtgcgtaccaggcgctggtcgcccaggcggaaatcgaactggcgttccattcaccggaaacagtcggaagctggcatgcacgctggagtgacagggtggcagagcatgacctggaaaccctgttctggcagtggcaggatatgccattctggcaggttatcgcggaagccagtctggcagccagagaggccggtcatgccgtccgtgagatggagcgatggatggtgccgaacaaactccgggaggcagcgtga

SEQ ID NO: 4013 - DNA, 1959 bp, Escherichia coli
atgtcagttacagagtctaagacaaaaacggagcgtaaatccagccgtaaacctgcaaaaacgcaggaaacagtgctgtctgccctgctggcgcagacggaggaagtgagcgtgccgctggcctcactgattaaatcaccgctgaatgtgcgcacggtgccgtattctgcggagtccgtcagcgaactggctgagtccattaagggcgttggcctgttgcagaatctggtcgtgcataccctgcctggtgaccgttacggtgtcgccgcaggtggtcgccgactggctgcactcaacatgctggcagagcgtggcatccttacggctgactggcctgtacgcgtgaaggttattccgcaggaactggcgactgccgcatcaatgactgaaaacggtcatcgtcgggatatgcactctgctgaacagattgccggattccgcgcaatggcgcaggaaggcaaaacacctgcacaaatcggtgatttgctgggctattcaccccgccatgtccagcgaatgctgaaactggcagaccttgcgcctgtcatcctcgatgcgctggcagaagaccgcatcaccaccgaacactgtcaggcgctggcgctggagaacgacaccgcgcgtcaggtgcaggtgtttgaggccgcctgtcagtcgggatggggcggtaaaccggaagttcagaccattcgtcgtctggtgaccgaaagtgaagtggcggtggcagggaacagtaaattccgctttgtgggggctgatgctttctcacctgacgaactgcgtactgatttgttcagcgatgacggggaggggtatgtcgaccgcgtggcgctcgatgccgccctgctggaaaaactccaggatgttgctgaacaccttcgggaagccgaaggctggggatggtgcaccggacgcatagatcctgttggtgagtgccgtgaggatgccggaacataccgctgtctgccggagccggaagcggtgctgacggaggcggaagaagaacgcctgaacgaactgatggcacgttacgacgcaccggaaaaccagagtgaggaatccgacctgctggaagcagaaatgaagctgattgactgcatggcgacggtcagggcgtggacgccggagatgcgtgccggaagtggcgtggtggtgtcctggcgttacggtaatgtgtgtatccagcgtggtgtgcagttgcgcagtgaggatgacgcggctgacgacgctgaccgcacggaacaggcgcaggagaaagcgtcagtggaggaaatcagtctgccactgctgacgaaaatgtcctcagagcgcacgctggcagtccaggcggcactgatgcagcagccggacaaatctctggcactgctggcatggacgctctgtctgaatgtgtttggcagcggagcgtacagtaaaccagcacaaatcagcctggaatgtaaacattcttcgctgaccagcgatgcgccatcggggaaggaaggtgccgcattcctggctttgatggcagaaaaagcccgtcttgccgccctgctgccggagggatgggcacgggacatgacggcgttcctgtcactcagccaggaggtactgttatccctgctcggtttctgcactgcatgcagcatccacggcgttcagacccgtgagtatggtcacacgtcacgcagtccgcttgacccgcaggaaaccgccatcggctttcacatgcgcgactggtggcagccgacaaaagcaaactttttcgggcacctgaaaaagccgcagattatcgcagccctgaatgaagccggactgtccggtgccgcgcgggacgcggagaagatgaagaaaggcgatgcggctgaacatgcggagttccacatgaaagacaaccgctgggtgcctggctggatgtgtgcaccacgtccacagacggataccactgaacgcaccgataacctggctgatgccgcctga

SEQ ID NO: 4014 - DNA, 234 bp, Escherichia coli
atgagcgaatatttcagaatacttcaggggctgcctgacggtccttttacccgcaaacataccgaagctgttgccgcacagtaccggaacgtctttatcgaggatgaccacggcgaacagtttcgcctggttgtccgtaataacggtgcaatggtctggcgtacctggaattttgaggacggtgcagggtactggatgaaccatgtcatccgggatttcggcattcttaagtaa

SEQ ID NO: 4015 - DNA, 504 bp, Escherichia coli
atggcagttcgtggcattaacaaggtcattctcgtcggtcgtctgggaaacgatccggaagtccgttacatccccaacgggggcgcagtggcaaacatgcaggtggccacgtcagaaagctggcgtgacaaacagacgggggagatgcgggagcagacggaatggcaccgcgtggtgctgttcggcaagctcgcggaagtggctggtgaatatctgcgcaagggcgcgcaggtctacatcgaaggtcagcttcgcacccgtagctgggaggataacggtatcacccgttacgttaccgaaattcttgttaagaccacgggcaccatgcagatgctgggacgtgccgcaggtgctcagactcagccggaaccacaggcggaggccggtacgaaaaaaggaggcgcaaaaacgaaaggccgtggacgtaaggccgcgcagccggagcctcagccgcaaccgccggagggtgacgattacgggttttcagacgatatcccgttctga

SEQ ID NO: 4016 - DNA, 1485 bp, Escherichia coli
atgtcattcggtcagccttgtgatgagtttcccctgagttcgctgcctccactcattcgtgatgccgttattgaagctcagcaaattacgcaggctccccttgggcttgtggcagcgtctgccctgggcgctgtttcacttgtctgccagaatctgattgatgtctgcagactgaatacactgcgggggccggtctctctttttttcctgacgcttgccgagtccggagaacgaaaaaccgcagtggacaaattattaatgaagcccctgtaccagcaggagatgcagttatattccagatacaaaagtgaactggctgtctggaaaaacaaggaagagcttttaaaggctcagaaaaaagcattgttgtcaaaactgaataaagaactccgcaaaggcgcggatgagtcagaaaccctcagacaactggaagtacttcagaaaaacagtgcggaagaacctgtgaggtataaattcatttttaatgatgccacgactgcggcaattaagaatcagctttgtggtaaatggcgttcagtgggtattatgtcagatgaagccggtattatatttgatgggtataccctgtctgagttgccttttattaacaaaatgtgggatggctctgtattgtctgtggacagaaagaatgaacccgaacagatgattgaaaatgccagaatgacgttatccctcatggtgcaacccggtctttttgaccgatatatggagcgaaaaggttctgttgccagggacagtggttttcttgcccgttgtcttatcagtaaacctgcaaccacgcaggggaaacgctttattaacggagctgtgattccgggaggatcattaacggcatttcatgaacgattaatggaactggccagaggcagtattgaaaaatccagtgaggatgaacggtattgtcttcatttttcgcctgaagcgcaaaaaatatttattgagcactataatgttctggagcaggatttatccccttccggacccttaagcccgtttcggggacatgtttcaaaaaaaacagaaaacattgcaagaattgcagcgttatttcagtatttcagctatggtgaagggaaaatctctgccgatatcatgacgtctgctgtcgtaataagttcgtggtacacagatgaatataaaaaattatttgcgttacctgatgaatctgaactgcagcagaaggacgccgaggagctgttcgactggctcattgaggagtgccgcggagaatgcccgccccgtgtcaggaaaaattatattctccagtgtggcccgggccggttcagaaacaggaaaaaactgaacgcattgctgaacattcttgaatctcagttcaggctttctgtcgtgccggaaggaaaaaccatgtatgttctgcttccccagatagccagtttaaagttgtctgatgtctctggtatttttacctcgggttatcactacaataagctgagagcgaagtaa

SEQ ID NO: 4017 - DNA, 603 bp, Escherichia coli
atgaaaccacagtatcagacccgttacgagctgctccacgaaagctaccagaaatggctgaccggcttcacccggcacgccgtatcctggggcgtgtgtcatccgaatatctactacttccataatctgacgcccgggtgggtgtcattcaatggtgaaaaaccggagattgccatcgtaccccagagtctgcaccggctgatttatggtccggacaaacggaccacgccgcccctggatgatgatctgatagtgaatttatgcaccagtgaacatctgctggttcatcatccgatgctggaaggcattctcctgtctgaatgtgaacgtctgaggcagcgttcgctggcaaataaactgatcagcctcttccgtcagtttggtggcacggagttgcgcctcaaactggtctggctttgctggcttgatttaatgaccggaaactgccttgacgactggacggagaatctgaaacggaaatcagaaaaagagctggaggaatggatcatcaaccgtcagaagcagagcgcagcactgacggatctgatggatcagtacgtgctcctggcataccgcacaacggttgacgataagcgcacctga

SEQ ID NO: 4018 - DNA, 207 bp, Escherichia coli
atgatcaccccagtttcactgatggatgaccagatggtcgacatggcatttatcactcaactgaccggcctgaccgataagtggttttacaaactcatcaaggatggtgactttcctgcgcccatcaaaatgggccgcagctcccgatggctgaaaagcgaagtggaagcctggctgcaggcgcgtattgcacagtcccgtccgtaa

SEQ ID NO: 4019 - DNA, 237 bp, Escherichia coli
atgcccgaaaatcggcccattaccgcctacacctccgtacaccattcccttttgatttcgaattctttgttgtcgctataccgcttaacgttcccggtattatcctggttcccgacaacaggaacatattcagcttttaataacctgagaagagccaataagaatcacaaagcggataacacctggcgcgatgcagttgtgattaccgaacgctcagatgacatatttccagactga

SEQ ID NO: 4020 - DNA, 198 bp, Escherichia coli
atggtgatacgcaaaacggtgtgcagggattgtgataacgccatccctcataatacggaatgttgcccgggctacgtgtcagcagatcccttcgattattaccgaaataccgatcgtctgctttgtctactgacgttactgcctgtgctgattctggctgtcgtttcaggcgtcagtgtatttgtactgttgcagtag

SEQ ID NO: 4021 - DNA, 570 bp, Escherichia coli
atgacctacaaatacaaccccttctggcagcaacgtattcgtgagacggtgcggcacgcactggatgttcatccccgtctgacggcattgcgggttgatctgcgtctcccggatgtaccggcagcaacggacgcggctgtgatatcccgcttcatcaatgccctgaaagcccgaatcgacgcttaccagaaacgtaagcatcgggaaggtaaacgcgtgcattcctcgaccctgcattacgcctgggcccgggagttcggggagcttaaaggcaaaaaacactatcacctgctgctgctggtcaaccgggatacctggtgtcgtgccggcgattaccgcgctccggggtcactggccggaatgattaaacaggcgtggtgcagtgccctgggagtggatgtcgggtgccatgccacgctggtgcattttccggcctggccggcggtgtggctggaacgcgatgatgatgctggtttacgggatatgctgaagcgtgctgactatctcgcgaaagagtacaccaaagtcaacggtaccggtgagcgcaattttggctgtagccggagttga

SEQ ID NO: 4022 - DNA, 402 bp, Escherichia coli
atgtacgcaaaatcctttcttgcacttgatggcaacgggcgtctgacgggtgcccgtaccgcacagactgcaccttacgatcgctacacttgccacctttgcggcagtgcactcagataccacccgcaatacgacactgaacgtccctggtttgaacacactgacgacgggctgactaagcacggtcatgagtgcccttatgtcagaccggaacgcagggaggtacgcttgattaagcgtctgcagcaattcgtaccggatgccttacccgtggtgcgtaaagccagctggcactgcagacaatgtcaccacgattattatggggagcagtactgcacaaactgccagaccggaggattcagtattccccggacaactcaggaggaaatatgcgaattctga

SEQ ID NO: 4023 - DNA, 435 bp, Escherichia coli
atgcgaattctgaactgttatatggcgaatgacagcaaaggccattttgttacggcgaaagaagctgcgaagcacaaccgacaggacgttttgtgctgtgtgtcctgtggatgcccgttaacacttcagcggggcaatgacggacaaccaccgtggtttgaacatgaccagatgactgtcgctgaaaaaatcctgctgcgatgtacctggcttgacccggcagagaaagaggcccgtcgtttgcatctgcagggcatgacggttccggattatacggtgaaggtgagaaagtggttttgtgtgatgtgtgacgaagattatgagggggaaaagtgctgcccacgctgcggtaccggggtatacagcagggcgtgggggcggcaggaggtgccgtcggaagatgccagggctgataatccgttacagaggctgtaa

SEQ ID NO: 4024 - DNA, 132 bp, Escherichia coli
atggttgcctccggagcagtttgcggtaatgccgttcccgggaatggattgccagtgcggggactgtggagcttaattccggtgttggtggcctttccgttgattttgagccaacagccctcctgtgactga

SEQ ID NO: 4025 - DNA, 783 bp, Escherichia coli
atggaaacgaagcaaaaagagcgtatccgacgtttgattgaaatacttaagaaaaccgacagaatccatttgaaagacgcggcacgaatgctggaagtttctgtaatgactattcgtcgcgatctccatcaggaagatgaacctctgccactgaccctactgggtggctatattgtaatggtgcataaacccgcaccatccatgccagtaatccaggacgttccgagaaatcatcgtgatgacttacctattgcaattctggccgccggaatggttaatgaaaatgatctgatcttctttgataatggccaggagataccgctcgttataagcatgatcccggatgcaatcaccttcactggcatctgttactcacatcgtgtctttgttgcgttgaatgaaaaacctaatgtgacagcaatactttgtggtggtacgtatcgtgccagaagtgatgctttttacgatgccagtaactcttcgccattagactctctcaatccgcgaaaaatatttatttccgccagcggtgtacatgatcactttggcgtcagctggtttaatcccgaagatcttgccactaagcgtaaagcgatggcccgtggactaaggaaaattttgctcgcccgccacgccttgttcgatgaagtagcctctgccagcctcgcaccgctctctgcatttgatgttctgattagcgagcgtccgttaccggcagattatgttacgcactgccggaatgcttctgtaaagatcattacacctgattcagaagacgaatga

SEQ ID NO: 4026 - DNA, 921 bp, Escherichia coli
atggacattgcagttattggttccaatatggtggatctcattacttacactaatcagatgcctaaagaaggagaaactctggaagcacctgccttcaaaatcggatgtggtgggaaaggtgctaatcaagcggtggcggcggctaaattgaattcaaaagtcctgatgctgactaaagtaggtgatgatatttttgcggataatactattcgtaatctcgaatcatggggaattaataccacttatgttgagaaagtcccctgtaccagcagtggtgttgcaccgatctttgttaatgccaactcgagcaatagtatattaataattaagggagcgaataaatttctttccccggaagatatcgatcgagctgcagaagatctgaaaaaatgcaaattgatcgttttacaactggaagttcaactggaaacagtttaccacgcgattgagtttggtaagaaaaatggtattgaagtgttattaaatccggctccggcattgcgtgagttagatatgtcttatgcctgcaaatgtgatttctttatcccgaatgaaacagaactggaaatattaaccggtatgtcggttgatacttatgatcatattcgtttggccgcacgttcgttagttgataaagggctgaacaatattattgttaccatgagcgaaaaaggcgcattatggatgacccgcgatcaggaagtccatgttcctgcattcaaagtaaatgctgttgatactagtggcgctggtgacgcatttattggttgcttttcccattattatgttcaaagcggtgatgttgaagccgctttgaaaaaagccgctctctttgccgctttcagcgtcacagggaaaggtacgcaatcatcttatccgagtattgaacaatttaatgaatttttaaccttaaacgaataa

SEQ ID NO: 4027 - DNA, 1317 bp, Escherichia coli
atgaacgataaaaacatcattcagatgcctgatgggtatctgaataagactcccttgttccagtttattttgttatcgtgtttattcccgctatggggatgcgcagctgcattaaatgacatattaatcactcaattcaaaagtgtattttcgctaagtaactttgcttcagcattggtgcagagcgcattttatggaggttattttttaattgcaataccagcatcccttgtgattaaaaagaccagttataaggtggcaattttaattggcctgacgctgtatattggtggttgtacactttttttccctgcctcgcatatggcaacctacactatgttccttgcagctatttttgcgattgcgattggcctgagtttccttgaaactgcagcgaacacatacagttcaatgatcggtccaaaagcctatgccacattgcggctcaatatcagccagaccttttatccgattggtgctgcgtctggtattttattgggcaaatatctggttttctccgagggggaaagccttgaaaagcagatgtcaggaatgaacgccgagcaaattcacaactttaaggtgctgatgttagagaacacccttgaaccgtataagtatatgattatgattctggttgtggtcatggtgttgttccttttaacccgcttcccaacctgtaaagtggcacagacaagtcaccataaacgcccgtcagcaatggatacgctgcgctatctggctagaaatccgcgctttcgtcgcggtattgtggcgcagttcctttatgtgggtatgcaggtcgcagtatggtcatttaccatccgtctggcgctggagttgggcgatatcaacgaacgtgatgcttcaaacttcatggtctatagctttgcctgcttctttattggcaagtttatagccaatatccttatgacgcgttttaatccggaaaaagtattgattctctattccgttataggggcgctgttcctggcatatgttgcactggctccaagtttcagcgcggtctatgtcgccgtcctggtaagtgttttgtttggcccttgctgggcgacgatctatgcaggaacactggatacagttgataacgaacatacagaaatggcaggagcagtcattgttatggctattgtcggtgccgcggtggttccggcaattcagggatatattgcagatatgttccactcactacagctttcattcctggtttctatgctctgctttgtctatgtcggagtctacttctggcgtgaaagcaaagtacgtaccgcactggctgaagtcacagcgtcctga

SEQ ID NO: 4028 - DNA, 1014 bp, Escherichia coli
atgagtacgcgtattaatttgtggcgggcgctttttggcgagaaacctcgtatcttgctggaaaatagtgattttactgtcacgtcttttcgatatgacagcggtgtcgaggggcttaaaattgcaaacagtcgtggacatttgattattcttccctggatggggcagatgatttgggatgcgcaatttgatggacacggcctcaccatgtgcaatatgtttcgccagcctaaaccggcgacagaggtgatagagacctatggctgttttgcttttcattcaggtttgctggctaatggctgcccatctgcggaagatactcatctgctacacggtgaaatggcctgtgccgcgatggatgaagcatggctggaattagacggagatatgttacgccttaacgggcgttacgagtatgtaatgggtttcggtcatcattatctggctcagccaacagtggtccttcacaaatcctctacactgttcgatattaagatggccgtaaccaatctggcttctgtagatatgccactacaatatatgtgccacatgaattatgcatatataccaaatgctacattcagccagaatatcccggacgaaatattaagattgcgtgaatcagtgccttcgcatgttaatcccaccgctcagtggctggcgtttaatcaacggattatgcagggagaagcctctctgtcgacgctgagtcaaccggaattttatgatccagaaattgtcttctttgcagacaaactggacgcttatacagatcagccagagtttcgcatgatctctcccgatggcactacgtttgttactcgtttctacagtgctgaactaaattatgtgacacgctggatcctttataacggagagcaacaggtagccgcctttgcattacctgcaacctgtcggcctgaggggtatcttgccgcgcaacgtaatggcacgctgattcaggttgcaccgcagcaaacgcgcacttttacagtcaccacaggaattgaataa

SEQ ID NO: 4029 - DNA, 285 bp, Escherichia coli
atggaacaaaaaacattatcagctgaaccccgcaggttattttcaaatgagtttaaacttcaaatggttaaactggctttgcaaccaaggggttctgttgcccgtattgcccgggagcatgatatcaatgataatcttctgttcaaatggctcaggctctcgctgatcaaagggcgtatatcacggcgtcttccggtaacgaactcttctggcattggcgttgaattattacctgtggagatgacgctggatgagcggccttaccccgttttttacgcgaggtaa

SEQ ID NO: 4030 - DNA, 1257 bp, Escherichia coli
atggatttctttcgttttttgatgagcgatgtactttccgaacccgcagtgctggtcggtttaatcgccctgattggcctgattgcacagaaaaaaccggtaaccgaatgcattaaaggtaccgtcaagaccattatggggtttgtgattttaggcgcaggggcgggtttagttgtgtcgtcactgggtgacttcgcaaacattttccagcatgcctttggtattcagggtgtagtgccgaacaatgaagccattgtttccgtagcgcagaaaagcttcgggaaagaaatggcgatgattatgttctttgcgatggttatcaacattatgattgcccgtttcacaccgtggaaatttatcttcctgaccggtcatcacacgttgtttatgtcgatgatggtagcggtaattctggcaacagcaggcatgaccggcattacgcttatagccgttggctctttggttgttggcgtggcaatggtctttttcccggctattgcgcatccgtacatgaagaaagtgaccggttctgatgacgttgccatcggccacttctcaacattatcttatgtattggccggtttcatcggcagcaagtttggtaataaagagcactcgactgaagacatgaatgtgccgaaaagtctgctgttcttgcgcgacacgccggttgctatctcttttaccatgagcataattttcctggtgacgtgcctgtttgcgggtgcagatgcggtgaaagagcttagcggtggtaaaaactggttcatgttctctatcatgcaatccattaccttcgcagctggcgtgtacatcattctgcagggtgtgcgcatggtgattgcggagattgtcccggcattcaaaggtatttcagacaagctggttccgaatgccagacctgctctcgattgcccggtcgtcttcccttacgcacctaacgctgtactggttggtttcctgagtagctttgctgcaggtttaatcggtatgttcacgttgtatctgctgaacatgatcgtgattattcctggtgtggtgccgcacttcttcgtaggtgcagctgcaggggtattcggtaatgcaacgggtggacgtcgtggtgcgattttgggtgccttcgctcagggcttgcttattaccttcctgccagtattcttattgccggtgctgggtgatattggttttgctaacaccaccttcagtgatgctgactttggcgcactgggtattttgttagggattatcgttcgctaa

SEQ ID NO: 4031 - DNA, 288 bp, Escherichia coli
atgaaaattacagtggtttgcggtaacggcttaggcaccagcctgatgatggaaatgagcattaaaagcattttgaaggatttgtccgtcagcgctgatgttgatcacgtcgacctgggctccgcgaaagggacgccgagtgatatctatgtcggcaccaaagacattgccgagcagttagccgcgcagtctgtcgcaggcaaaatcgtcgcactggaaaatatgattgataagaaagccatgagagaacgtttgtccgtggtattaaccgaattaggcgcactgtaa

SEQ ID NO: 4032 - DNA, 444 bp, Escherichia coli
atgttaaaaaatctattaaatacagaggtcgttcaggtcgtggaacaggtcaaagactggcgggaagccgtggcgatttcatgccgaccgttgattgaaaacggctctatcgaaccgcgttatgttgatgcgatctatcactcgcacgacactatcggtccgtactatgtggttggccctggtattgcgatgcctcatgcgcgcccggaagagggggctaacaagctgtcattagcactgaccctgatcccttcaggtgtgaattttgatgccgatgaaaacgatccagtgaaattactgattgtgctggctgcaaccgacagtaccagccacattgaagcgatttctcaactcgccaagttattcgataacgaaaaagacatacaggccattttgacggccaaaacgacgcaggacattttgtctgttattgcgcgctattaa

SEQ ID NO: 4033 - DNA, 1032 bp, Escherichia coli
atggaaaaaacacgtaagcgccgtggtaccggacgggtgacgctgcaggaggtcgctaactttgcaggtgtcggaaccatgaccgtttcccgcgcgctgagaacaccggaacaggtttctgacaagctgagggaaaagatagaacaggccgtagaagagttgggttatattcccaacagaactgctggcgcccttgcatctggtcacagtcatacagtcgccgtactggttccttccctgacagataaagccagctcccgctttatgcagtcattacagcaggtgcttaataaaaatgaattccagctactgcttgggtgtcatgagtataatcagctcaaagaagctgaaattctgatgacgcttcttcaaggcaacccggcggcgttagttatttttggttctcagttggctgataaaactcaccagatactcgagaaaacaaatatacctaccattaacgttatcggttcccctttcagtccggctcaaattaccatcgaaacagcattttttgaagcatcacataaactgaccgaacatctgctggagcagggttataagaatatcggatttatcggtgcgcatatggacaaccgcctgcaacgtcagcaactgaacggctggcataaagcaatgctgagccattaccagaacactgatcttgttatcaccatgccggatgccgcaagtctgcaattggggcgttacgcattaaacgagatattactgcgacaaccagagctggatgctgtgatttgcagccacgaagagattgcgctgggtataatgtttgagtgccagcggcgtttgttaaaaatccctggaaatatcgctgtagcttgtcttgacggttcagacaattgcgatcaaacacacccaactttgacatccatccgtattgactacaaaaaaatggggatagagacaggtaagttactgattggactattgaataataatcatgatgaatcagaagagtcgcgtatcgtgcaattcaactaccagatagaattacgtcagagtacatga

SEQ ID NO: 4034 - DNA, 1230 bp, Escherichia coli
atgacacgtcgcgtagtgattacaggaatgggcggcgtgactgcctttggtgaaaactggcaggacgtttctgcacgcttactggcgtatgaaaatgcggtgcgcaaaatgccggagtggcaggtctacgatgggctgcacaccctgcttggcgcgcctgttgatgatttcacgctaccggagcactacacccgcaagcgtatccgtgcgatgggccgcgtgtcgcaaatgtcgacccgtgccagcgagctggcgttagagcaggcagggttgattggcgatccgatattaaccagcggcgaaacgggcattgcgtacggttcatcgaccggcagtaccggtccggtgagcgaatttgccaccatgctgactgaaaagcacacgaacaacatcaccggcaccacctatgtgcagatgatgccgcacaccaccgctgttaatactggcctctttttcggcctgcgcgggcgggtgatcccaacctccagcgcctgtacctccggcagccaggcgatcggttatgcgtgggaagccattcgccacggttatcaaacggtgatggttgccggtggtgccgaagagttatgcccttcagaagcagcggtgtttgataccctttttgccaccagccagcacaatgatgcgccgaaaaccacaccttcaccgttcgatgaaaaccgcgacggactggtgattggtgaaggcgcaggtacgctcattctcgaagaactggagcatgccaaagcgcgcggcgcgaccatttacggtgaaatcgtcggctttgcgactaactgcgacgcggcacatattacccagccgcagcgcgaaaccatgcagtattgtatggagcaatcgctgaaaatcgcagggttaagcgcacaagatatcggctatatttcagcgcatggtacggcgaccgatcgcggtgatatggcagaaagtctggcgacagcaaccatttacggtgataatgtgccgctctcctcgctgaaaagttattttggtcatacgcttggtgcctgtggcgcgctcgaagcctggatgagtctgcaaatgatgcgcgaaggttggtttgcgcctacgctaaacctgaataaaccagacccgaattgtggcgcgctggattacatcatgcatgaagcccgcaaggttgattgtgagtttttgcagagtaacaactttgcctttggcggcattaatacatccatcattattaagcgctggccctga

SEQ ID NO: 4035 - DNA, 732 bp, Escherichia coli
atgagtcgttcagttctggttactggtgccagcaaaggcattggtcgcgccatcgcctgcaagcttgcggcagacggctttaacattggcgttcactatcaccgtgacgccacaggcgctcaggaaacgctgaatgccattgtcgccaacgggggtaacgggcgtttgctcagtttcgacgtcgcaaaccgcgaacagtgtcgggaagtgctggagcatgagatcgcgcaacacggtgcctggtacggcgtggtcagtaacgccgggatcgcccgcgatgccgcttttccggctttgagcgatgacgactgggatgcggtgatccacaccaacctcgacagtttctacaacgtcattcagccgtgcattatgccaatgatcggcgcgcgccagggtgggcgcatcatcacgctgtcctcggtttccggcgtaatgggcaatcgcggccaggtgaattacagcgcagccaaagccggaattatcggcgcaacaaaagcactggctatcgaactcgcaaagcgcaaaatcaccgtcaattgcatcgcgccagggcttattgataccgggatgatcgaaatggaagaaagcgccctgaaagaggcaatgtcgatgatccccatgaaacgtatgggccaggcggaagaagttgccgggcttgccagttatttaatgtctgatattgcgggttacgtcacccgccaggttatttccatcaacggagggatgttatga

SEQ ID NO: 4036 - DNA, 465 bp, Escherichia coli
gtgagccactatttatcccccggcgcttatctgccccacgacgcgcccatgttactgctggaagacgtggtgagcgtcagcgatgacagcgcggtgtgccgcgtgacggtttcgcccagtggcgtactggcaccgtttctcgacccggacggcaatctccctggctggtttgcccttgaactgatggcgcaaaccgtcggcgtctggtctggctggcatcgccaccagcagggcaaaaacagtattgagttagggatgatactgggcgcgcgtgaattgctttgcaccactggcattctgcccgcaggccagacgctgaccattaccgtcaaactgctgatgcaggacgatcgcttcggcagctttgagtgcagcatcaacgacggcgaggcgacgggccgcattaacaccttccagccgaccgcggaagaacttaccaccctgtttcaacaaggagcgtcctga

SEQ ID NO: 4037 - DNA, 1170 bp, Escherichia coli
atgatttatatttccgccgtcggcatgatcaacgccctgggaaataaccttgacgaaatcgcagccaacctggctcgcggtgtcgcccccggcatgcgcccacgcgcaggctggttgcaggggcatccgcaggcggtcctggctggcgtggatggcgagcttccgcttatcccggaaaaattcgctgcgcatcgctcgcgcaacaatcagatcctgctggcggcgctggcgcagctccagccgcaggttgatgacgctatcgcgaaatatggctgcgagcgcatcgcgattgtgcttggcaccagcacctccggcctgcatgaaggcgacacgcacgttaacctgcacacccacgggcagccgagcaccacgtggcactatgcacaacaagaactcggcgatccgtcgcgttttctcagccactggctggcgctcgacggcccggcttataccctttcaaccgcctgctcctccagtgccagagcaatgatcagcgggcgcaggcttatcgaagcggggctggtcgatgccgccattgtgggtggcgcagacaccctgagccgaatgccgattaacggttttcacagcctcgaatcgctgtcgccaaccttatgtcagccgtttagtcgtgaccgcgcaggtatcaccattggtgaaggggcggggctaatgctgctgacccgggaaccgcagcccatcgcgttgctgggcgttggtgaatcgagcgacgcttaccatatttcagccccgcatccgcagggcgaaggagcgatccgcgctattaatcaggcgctgaccgatgcgcagcttacgccggatgacgtcggctatatcaacctgcacggcaccgccacacagctcaacgaccagattgaatcaatggtggttaacgccctgtttggcgaacgcgtaccgtgcagctccaccaaacatttgaccggacacacgctcggcgcggctggcattaccgaggcggcaattagtatgttgattttacagcgtgatttaccgctgcccgctcaggacttcagcctgtcgccgcgcgatcccacgctgccaccgtgtggcattatcgaaaaaccgcagccgctggcacgtccggtgatcctgtccaattccttcgcctttggcggcaataacgccagcattctgctcgggagggtttcgtga

SEQ ID NO: 4038 - DNA, 585 bp, Escherichia coli
atgatcaaatccacattctggcgagcgttcgccctgaccgctacgcttatcctcaccggctgtagccactcgcaaccagaacaggaaggccgcccgcaggcgtggctgcaacctggcacgcgcatcacgctgccggcaccagggatttcacccgcagtcaattcgcagcaactgttgaccggcagcttcaacggcaaaacccagtcgctgttagtgatgcttaacgccgacgatcagaaaatcacccttgccgggctgtcgtcggtcggcattcgcctgtttctggtgacctacgatgcgcaagggctacgcgccgagcaatccatcgtcgtcccacagttaccgcccgcaagtcaggtactggctgacgtgatgctcagccactggccgattagcgcctggcaaccgcaacttcccgcaggatggacacttcgcgacaacggtgacaaacgcgagctgcgtaacgccagcggcaaactggtcacggaaatcacctatctgaatcgccagggaaaacgcgtgccaatcagaattgagcagcatgtctttaaataccacatcaccattcaatacttaggtgactga

SEQ ID NO: 4039 - DNA, 2319 bp, Escherichia coli
atgacgaacgccaacgctttgccacccagtaaacgccccgcgctgttatgggggctagtctgcctggtcatggcggcggcgttgctgatcctgctgccacaatcacgactgaacagtagcgtgctggctatgttacccaaacaggcgatgggcgatattcctccggcgctgaatgacggctttatgcagcgtctggaccgccaactggtgtggctggtcagccccggtaaagaggctaatcccagggtggctcaggagtggctgacgctgctgcaaaaatccgctgcgctcggcgacattaaagggccaatggatgccgccagccagcaggcgtggggagcgtttttctggcagcaccgcaacggcctgattgaccccgacacccgcgcccgcctgcaaaatggtggcgaagcgcaggcgaagtggatcctctcccagctttattctgcgttctccggggtaagcggcaaggagctgcaaaacgatccgctgatgttaatgcgcggctcgcagctggcgatggcgaaaaatggccagcgtttacgactaatggacggctggctggtgacacaggatccccagggcaattactggtatctgctgcacggcgaactggcgggatcgtcgtttgatatgcagcaaacccaccagctcatcacgaccctgaatacgctggaaaaggctctgaaaacgcgttacccgcaggcgcagttgctctcacgcggcacggtgttttacagcgattacgccagccaacaggcgaagcaggatatctccaccctgggcgtggcaacgctgctgggggtgatattgctgattgtggcggtgttccgctctttgcgcccgttgctgctttgcgtgatttccatcggcatcggcgcgctggcgggaacggccgccacattgttgattttcggtgaattacacctgatgacgctggtgatgagcatgagcgttatcggcatttccgctgactacacgctctattatctcaccgagcggatggtgcacggcaacgacgtttcgccgtggcaaagcctggcgaaagtacgcaatgccctgctgctggcgctgctcacaaccgtggcggcatatctgattatgatgctcgcccccttccccggcattcgccagatggcgatttttgccgccgtcgggttgagcgcctcctgtctgaccgtcctgttctggcatccgtggctgtgccgtggtctgccggtgcgcccggttccggcgatggcgctgatgctacgctggctggcagcgtggcggcgcaataaaaaactgtcgcggggtctgcccgttgcgctggcgctgttttcgctggcggggatgtcaatgctgcgcgtcgatgacgatatctcgcagttacaggcgctgccgcagcacattctggcgcaggagaaagccattaccgccctgaccggacaaagcgtcgatcaaaaatggtttgtagtttacggcgactccccacagcaaacattgcggcgactggagaaatataccgcctcacttgagtatgcgaaaaaagaggggcttatcagcaactaccgcactattccgctgaactccctggcgcggcaggaggaagacttagacctgctgaaaacggctgccccgacggtaacaaaagcactgcaaaatgcagggctgacggcggtgaaaccagatctcaacgccatgccggtgaaggtcgatgaatggctggcaagccccgccagtgaaggctggcgtctgctgtggctgacgctggaaaacggcgaaagcggtgtactggtgccggttgaaggggttaaaagtagcgcattgttgcaggaaatcgccagctattacccttgcggcattgcctgggttgatcgcaaaagctcctttgatgaattgttcgcactttaccgctacgtcttaaccggcttgttgctggtggcgctggcagtgattgcctgcggcgcagtggcccgtctcggctggcgcaaagggcttatcagcctggtgccttcggtgctttcgctgggctgtggtctggcggtgctggcgatgagcgggcaggcggtgaatctcttttcgctgctggcgctggtgctggtgcttggcatcggtatcaactacacgctgtttttcagtaatccgcgcggtacaccgttaacttcgctactggcgatcgcgctggcaatgctcaccaccttgctgacgctgggaatgttggtattcagcgccacccaggccatcagcagttttggcattgtgctggtgagcggtattttcaccgccttcctgctttcgccgctggctatgcccgataaaaagagaacaaaaaaatga

SEQ ID NO: 4040 - DNA, 606 bp, Escherichia coli
atgaaatttttaccgctgctggcgctgctgattagcccgtttgtgagcgccctgacccgggacgatcttcagcaacgctttaccgaacaaccggtgatccgcgcccatttcgatcaaacccggacgattaaagatctgccgcagccgctgcgatctcagggtcagatgttgatcgcccgcgaccaggggttattgtgggatcaaacctcaccgttccccatgcaactattactggacgataaacgcatggtgcaggtgatcaacggtcagccgccgcaaatcatcacggcagaaaacaacccgcagatgttccagtttaaccacctgctgcgcgcgctgttccaggccgatcgcaaagtgctggaacaaaacttccgcgtcgaatttgccgacaaaggcgaaggccgctggacgctgcgcctgacgccgaccaccacgccgctggacaaaattttcaacaccatcgatctcgccgggcaaacctatctggagagcattcagcttaatgataaacagggcgatcgcaccgatatcgctcttacccaacatcaactgacaccagcgcaactgaccgatgacgaacgccaacgctttgccacccagtaa

SEQ ID NO: 4041 - DNA, 423 bp, Escherichia coli
gtgcttaacgatccccgatttaccgctgaagtcgagctgaccattccctttcacgacgtcgatatgatgggcgtggcctggcacggtaactattttcgctactttgaagtggcccgcgaggcgctgctcaaccagttcaattacggctatcggcagatgaaagagtccggttatttgtggccagtggtcgatgcgcgggtgaaatatcgccacgccctcacctttgagcaacgcatccgcgtgcgtgcgcatatcgaagagttcgaaaaccgtctgcggattggctatcagattttcgatgccgaaacgggcaaacgcgccaccaccggatacaccattcaggtcgcagtcgacgagcaaagccgcgaactgtgctttgtcagccccgatattctgtttgaacgcatgggagtcaaaccatga

SEQ ID NO: 4042 - DNA, 1677 bp, Escherichia coli
atgtcggtaaacttttctccctgcgtgttgatcccctgctacaaccacggcgcgatgatgccgggcgtgctggcgcgtcttaagccatttaatctgccctgtattgtggtggatgacggcagcgatgccgccacgcaacagcaactggataatctggttagcgaacagcctggcgtgaccttaattcgcctggcagaaaacgcaggtaaaggcgcagcagtgatgcgtggcttgcaggcagcggcagacgcagggttcagccatgcggtgcaggtggatgctgacggtcaacatgcgattgaagatatccccaaactgctggcactcgctgaacaacaccctgtggcgctgatctccggtcagccaatttacgatgactccattccccgctcacggctgtacgggcgctgggtcacccacgtctgggtatggatcgaaacgctctccctgcaactgaaagacagcatgtgcggttttcgcgtttatccggttgcgccgacgctgcaactggcaaaacgcgccaccatcggcaagcggatggatttcgacaccgaagtgatggtgcgcctctactggcagggaaataccagctatttcgtgccgacccgcgtcacctatccactggacgggctttcgcattttgatgccctgaaagataacgtccgcatctcgctcatgcacacgcgtctgtttttcggcatgttgccgcgtattccttcactgctgatgtgccactcttccagccactgggcgcggcagagtgaagttaaagggttatggggaatgcgcctgatgctgctggtctggcgtctgctgggaagaacggcgtttaccgcgctgctttacccggtggttggcgtctactggctcaccgctgctcgtgcgcgtaaagcgtcgcaagactggctcgcccgtgtgcgccaacaacaaccacaggcagcaaaaatcaacagctatcagcactttctacgtttcggcaacgccatgctcgacaaaatcgccagctggcgcggcgagctgcaactcgggcgtgatgtgctgtttgcgccaggcgcagaagcggcgcttgacgtccgcgatccgcgcggcaaattactgctggcctcacatcttggcgatgtggaagtgtgccgggcgctggcaaaaattgagggctacaaaaccattaacgcgctggtgtttagcgaaaacgcccaacgctttaaacagataatgcaggagatggctccccaggcaggcattaacctgatgccggtaacagatatcggcccggaaaccgccatcctgctgaaagagaagctggataacggcgaatgggtggcgattgtcggtgaccgcatcgccgtcaccccgcaacgcggcggcgactggcgcgtctgctggagtccgtttatgggccagcctgcgcccttcccacaggggccgtttattctcgcctctattttgcgctgcccggtgaatctgattttcgccctacgccagcacggcaagctgcatattcactgcgaaacctttgccgacctgctgctgttgccgcgtggcgaacgccaacaggcgctgcaaaacgctatcgaccactacgccgcgcgtctggaacattacgcgctccagtcgcccctcgactggtttaattttttcgatttctggcaactgccggaaattcaggacaaggagtaa

SEQ ID NO: 4043 - DNA, 354 bp, Escherichia coli
atgatacgccatgaaattgagcgccatctggttcaaccgcaggagatggaaatcgttctataccttgacccgatgctctactggtttaatggtcattttgccgtacagcctctgttaccaggcgtggcccagttggactgggtaatgcattatgctaccacgctgcttgctccgggctggcgttttcgtagtatccagaatgttaaatttctggcgccacttatacctgagacgactgttaccctgcaattaacatggcaggaaacaagtcaggtactcactttctgctatcagcgtcacgacggtgacgcccgccacaccgccagtagcgggaagatccgtctatgtcggtaa

SEQ ID NO: 4044 - DNA, 1359 bp, Escherichia coli
atgaatcagactctctcactttcacagtggttgacagcctctcgccctgtaacaactcctgttgcctggcttggggaatatacctggacactggggcatctgcggcatgatgtagcgcttttgatcgaccatttacgcgaccagccaggcaatcgctgggcactttgttttgaaaacagctatctttttattgtagcgttgttggccacgctacactcaggtaaaatcccggtaatcccgggccataatcgcgccgctttgttaaatgtacaacgctccttgtttgattgcgtcctgagtgataaaaggctgggctggaacggtccacagtttgttgtaagcacatctcaccagatgacgaccagcacgatagcctttgatgatattgcttctgacgcgtttattgaacttttcacatcgggttcaaccggacaaccaaaacaaattgcaaaacctgttatcagccttgatcaagaagcaaacatgctggcaactcactttgcagaccgactactgggctgtcgttttgtagcatccgtgatgcctcagcacctgtatgggctaactttccgtatttttttacccatggcacttggcctgccattgcatgccgcaatgctctggtattctgagcaacttgccgcattaagccatacctaccgctatgcctttgtcagcagcccggcgttccttaagcgactcgaccttcatctgacgcctcccccagtggaaatgattctctctgccggcggtatgctaccatggcaggatgtagagaaaacttccacctggctgaatatatggcccgatgaaatctatggtagtaccgaaacaggtattctcgcatggcgttaccgtcaacaggataatatcccctggtttactttttctgatgttcatctttcacaggaaagtgagggggttcgtgtcttttcgccactaatccctgctgaaggattggtgcttgacgatatgttgcaattcaatgaaaacggtcagttccacctgatcggacgacgtggtcgagtggtaaaaatagaggagaagcggatatcactggttgaaatcgaacaacgacttctggcacttgacggtattatggatgtcgctgcaataccattaatacgcaatggccgccaggctatcggtgtcgtggttgtaccaaataaagaggcccgtcaaatatggcaatgctccggagggaaaactctggagttgtcctggcgcaaagcactattaccatggcttgaacctgttgcagtacctcgttactggcgcattattgatgaaataccagtaaacagtatgaacaagcgtgtctatgcgcaattacaggagttatttcatgatacgccatga

SEQ ID NO: 4045 - DNA, 582 bp, Escherichia coli
atgtcgggcattcgctcgctaccgatgattaagttgctgaccggattattgctgctcgtctggccttttttaatctggctaggtttggtgcataacagcctgcactggctgttgccgctgatggcgctgttgcttttattgcgcctgcgccagccccgtcgccagacggggccgctccaggtcgtcacaaaaatcgttgctgttgtgggcattgtattgtgtgtctccagttttctgttgaaaacgtaccagttactgctgttttacccggtagtggttaacgcagtcatgctggcggtttttggcggttcgctgcggtcgacaatgccgatagttgagcggctggcacgtttgcaggagccagacctcccggaaaaggccgtgcgatatacccgccgcgtaacgcaggtctggtgcctgttttttattttcaatggcagtattgcgttatttaccaccttgtatggcaacatgcccttgtggacagcctggaacggtatcattgcttaccttctgataggtttcctgactgcaggggaatggctgatacgtcgtaagatgatcaaacggaaaacaccatga

SEQ ID NO: 4046 - DNA, 252 bp, Escherichia coli
atgacagaccaacaaaccatttatcaggaagtctcagccctgctggttaagctgtttgaaatcgatccgcaggacatcaaacctgaagcgcgactgtacgaagatctggaactggacagcatcgacgccgttgacatgattgtgcacctgcaaaagaaaaccggtaagaaaatcaagccggaagagtttaaagcagtgcgtacagtccaggatgttgtcgaggctgtagaacgcctgctacaagaaggctaa

SEQ ID NO: 4047 - DNA, 258 bp, Escherichia coli
atgcaagcgctttatctggaaattaaaaacctcatcatcagcaccctcaatctggacgacttgactcctgatgatattgatatcaatgcgccactgtttggcgacggtttagggctggactctatcgatgcactggaactgggactggcagtaaaaaatgagtacggcatcgtgctctctgcggaaagcgaagaaatgcgtcagcactttttctccgtcgccactctggcctctttcattgctgcgcaacgtgcctga

SEQ ID NO: 4048 - DNA, 840 bp, Escherichia coli
atggcgctggagccgcagatgagtaagctgatgtcgcgcctgggatgggcatggcgactggtcatgaccgggttatgttttgtcctgtttggtctcggcggcctgctgctttcagtcgtgtggtttaacatattgttagttttggtgtgggatacttcccgccgccgtcgtttggcacgtcgcagcattgccgccagttttcgcctgtttttaactgtcgcgaaagggcttggcgtgctggattatcgtattgatggcgctgaaattttacgtcaggaacgcggttgcctcgtcgtagccaatcatcccacgctgatcgattacgtgctgctggcatcagtcatgccagaaactgactgcctggtgaaaagcgcgctgttaaaaaatccttttcttggcggcgtcgtgcgagcggcagattatttaatcaacagcgaagcagaaaccctgttaccccgctgccaacagcgactggcacagggtgacactatcctgattttccccgaaggcacacgaacgaagcccggtgaaaaaatgacgttacagcgcggtgcagcgaatattgccgtgcgctgcaccagcgatttacgcatcgtgacgatcggctgtagcgagcatctgctggataaacaaagtaagtggtatgacgtcccgcctgccaggccgttttttacggttgaagtccgtgggcgggtagaaatcaataaattttacgatgcaacttcacaagagccgacgctggctgcaagacagttaaaccggcatcttttgcttcaattacagcaaggttgtttacctctatcaggaataaataatgcaagcgctttatctggaaattaa

SEQ ID NO: 4049 - DNA, 723 bp, Escherichia coli
atgaaatttgcattaaatattaccaactggcaggcactggcgcctggacttagcgatgtgcagcaatggcaagcatggtcgcgccagccgtgggcgattgaccctgccgcgccgttggcaaaattaagtgaactgccaatgatgaccgctcgtcgtctcagttcaggcagcaaactggctgttgaatgcggtctgacaatgctacgccgccatcagccagacgctgttttgtataccagtcgtcatggcgaactggagcgcaattaccgcattgttcatgcactggcaaccgaacaggcgctttctccgacggacttcgcgctttccgtacacaactcttccgtgggtaacctgaccattgtggccaaacagccgatcgtttcgtcatcgctttcggctggtcgcgacagtttccagcaaggtttgtgtgaagtgcttagcctgctacaagcgggataccagcgcgtgttgatggtcgattttgatggctttctacctgagttttatcacccgcaactgcccgcagaaatgcctacctggccgtacgccgtcgcgctggtgattgaagctggcgatgactggcaatgtgaaacgcagccagccattgcggtaaatgaaacaacactgccgcaaagcatcttgtttttacagcactatttacaaaatgcagatgctttttcactgcctggcgagcgcgtgcaatggcgctggagccgcagatga

SEQ ID NO: 4050 - DNA, 1059 bp, Escherichia coli
atgtacgaacaggacacgctcagcgcactggatgccatcaccgaagcacagcggattgcctttgctcctatgcttttccaggcagctttgtgcctgcgcaatgcaggaatattagattatttggatcaacagggtaaacagggagctccccttaatgcgattactgagcacacagtcctgaatgaatatgccgtgggtgtgttactggatatgggcttaagcgggcgaattattacctgtaaagagggaatttattacctggcgaaaatcggtcattacctcctgcatgacactatgactcgcgtgaatatggatttcacccaggatgtctgttaccaggggctcttcttccttgccgattcactcaatgaaggaaaaccttccgggttaaaagtatttggcgactggccgacgatatatccggcactttcgcaattaccagacgccgcacgtgatagctggtttgcgtttgatcattactattcagatggcgcatttaacgccgcactgccttatgtattcgccaacaaccccacaaccttgtacgatgtgggtggcaatacgggtaagtgggctttgcgctgctgcaaattcaatgaaaacatcgccgttacgttattagatctgccacaacaaatcgtactggcgaaagaaaatatcgcgaatgcagttttttctgatcgcatagatttccatgcggtggatatgctaagcgatgccccattaccaggcgaggctgatatctggtggatgagccaatttttagactgtttttcacccgaacaaataattagcatactcagcaaaattgccagcgtaatgaagcctggcgcaaaactttgcatcatggagttgttctgggatgcacagcggtttgaagcgacatcgtttagcctgaatgcatcctcactttattttacctgcatggcaaacggtaacagccgtttctatagtgcagagaaattttacgactatctgaataaagcaggattccaggtaacagagcgtcacgataatttaggcgttgggcatacacttttgatatgccaaaagaaataa

SEQ ID NO: 4051 - DNA, 390 bp, Escherichia coli
atgaaacgttatataaaatggtttgccatcacaatttttatcagtatgttgagtgcctgtgcccgtacggccccagtgcaacagataagcaccactgtcagtgtgggtcatactcaggagcaggttaaaaatgccattttgaaagcaggtgcgcagcgcaagtggattatgacgcaagtgtcccctggagttattaaagctcgctatcaaacacgaaatcacgttgcagaggttcgtattacatatacagctacctactataacatcaaatatgacagtagcctgaatctgcaggcttctgatggaaaaattcataaaaactataaccgctgggtgcgtaacctagataaagatatacaggttaacttatctacaggagcaacgttatag

SEQ ID NO: 4052 - DNA, 1608 bp, Escherichia coli
atgctgtctccgggtgaccgcagtgcaattcagcagcaacagcagcagttgctggatgaaaaccagcgtcagcgtgatgcgctggagcgcagtgcgccgctgaccatcacgccgtctccggaaacgtctgccggtactgaaggtccctgctttacggtgtcacgcattgttgtcagtggggccacccgactgacgtctgcagaaaccgacagactggtggcaccgtgggtgaatcagtgtctgaatatcaccgctctgactgcggtcacggatgccatgacggacagctatatacgccggggatatatcaccagccgggcctttctgacagagcaggacctttcagggggcgtactgcacataacggtcatggaaggcaggctgcagcaaatccgggcggaaggcgctgaccttcctgcccgcaccctgaagatggttttcccgggaatggaggggaaggttctgaacctgcgggatattgagcaggggatggagcagattaatcgtctgcgtacggagccggtacagattgaaatatcgcccggtgaccgtgagggatggtcggtggtgacactgacggcattgccggaatggcctgtcacagggagcgtgggcatcgacaacagcgggcagaagaataccggtacggggcagttaaatggtgtcctttcctttaataatcctctggggctggctgacaactggtttgtcagcgggggacggagcagtgacttttcggtgtcacatgatgcgaggaattttgccgccggtgtcagtctgccgtatggctataccctggtggattacacgtattcatggagtgactatctcagcaccattgataaccggggctggcggtggcgttccacgggagacctgcagactcaccggctgggactgtcgcatgtcctgttccgtaacggggacatgaagacagcactgaccggaggtctgcagcaccgcattattcacaattatctggatgatgttctgcttcagggcagcagccgtaaactcacttcattttctgtcgggctgaatcacacacacaagtttctggggggtgtcggaacactgaatccggtattcacacgggggatgccctggttcggcgcagaaagcgaccacgggaaaaggggagacctgcccgtaaatcagttccggaaatggtcggtgagtgccagttttcagcgccccgtcacggacagggtgtggtggctgaccagcgcttatgcccagtggtcaccggaccgtcttcatggtgtggaacaactgagcctcgggggcgagagttcagtgcgtggctttaaggagcagtatatctccggtaataacggtggttatctgcgaaatgagctgtcctggtctctgttctccctgccatatgtgggaactgtccgtgcagtgactgcactggacggtggctggctgcactctgacagagatgacccgtactcgtccggcacgctgtggggtgctgctgccgggctcagcaccaccagtggccatgtttccggttcgttcactgccggactgcctcttgtttacccggactggcttgcccctgaccatctcacggtttactggcgcgttgccgtcgcgttttaa

SEQ ID NO: 4053 - DNA, 9870 bp, Escherichia coli
atgcatcagcctcccgttcgcttcacttaccgcctgctgagttaccttatcagtacgattatcgccgggcagccgttgttaccggctgtgggggccgtcatcaccccacaaaacggggccggaatggataaagcggcaaatggtgtgccggtcgtgaacattgccacgccgaacggggccgggatttcgcataaccggtttacggattacaacgtcgggaaggaagggctgattctcaataatgccaccggtaagcttaatccgacgcagcttggtggactgatacagaataacccgaacctgaaagcgggcggggaagcgaagggtatcatcaacgaagtgaccggcggtaaccgttcactgctgcagggctatacggaagtggccggcaaagcggcgaatgtgatggttgccaacccgtatggtatcacctgtgacggctgtggttttatcaacacgccgcacgcgacgctcaccacaggcagacctgtgatgaatgccgacggcagcctgcaggcgctggaggtgactgaaggcagtatcaccatcaatggcgcgggcctggacggcacccggagcgatgccgtatccattattgcccgtgcaacggaagtgaatgccgcgcttcatgcgaaggatttaactgtcactgcaggcgctaaccggataactgcagatggtcgcgtcagtgccctgaagggcgaaggtgatgtgccgaaagttgccgttgataccggcgcgctcggtggaatgtacgccaggcgtattcatctgacctccactgaaagtggtgtcggggttaatcttggtaacctttatgcccgcgatggcgatatcaccctggatgccagcggcagactgactgtcaacaacagtctcgccacgggggccgtcactgcaaaaggtcagggcgtcaccttaaccggcgaccataaagcgggaggtaacctgagcgtcagcagccggagcgatatcgttctcagcaatggaacgcttaacagcgacaaggacctcagcctgaccgccggcggcagaatcactcaacagaatgaaaaactgactgccggccgggatgtaacgcttgccgcgaaaaacatcacacaggataccgccagccagattaacgcggcccgcgatatcgtgactgtcgccagtgacacgctgacaacacagggacagataaccgccgggcagaatctcacggccagcgccaccacgctgacacaggacggaatattgctggcgaaaggtcatgcgggactcgatgccggcacgctgaataacagtggtgctgttcagggggcttccctgacgctcggcagtacaacgctcagcaacagtggctccctgctcagtggcggtcccctgaccgtgaatacccgcgactttacccagagcggccgcactggcgcgaagggcaaagtggatatcacggccagtgggaaactgaccagtacaggttcgctggtgagcgatgatgtactggtgctgaaggcgcaggatgtgacacagaacggtgtgctgtccggcggcaaagggctgacggtcagtgcgcaggcgctgagctccggtaaaaaatcggtcacccacagcgatgctgcgatgacgctgaatgtgacaacagtggcgctggacggggaaaacagtgccggtgacaccctccgggttcaggcagacaaactgagtaccgcagcgggcgcacagcttcagagcggtaaaaatctcagcatcaacgccagagatgcacgtcttgcaggtacgcaggcagcacaacagaccatggcggtgaacgccagtgaaaagctcacccacagcgggaaaagcagcgccccgtcgctcagcctcagtgcgccggaactgaccagcagcggtgtgcttgttggtttcgccctgaatacacagtcacagaccctgaccaacagtggtctgttgcagggggaggcctcactcaccgttaacacacagaggcttgataatcagcagaacggcacgctgtacagtgctgcagacctgacgctggatataccggacatccgcaacagcgggcttatcaccggtgataatggtttaacgttaaacactgcctccctcagcaatccgggaaaaatcatcgctgacacgctgaacgtcagggcgaccacgctggatggtgatggtctgttgcagggcgccggtgcactggcgcttgcaggcgacaccctctcacagggccgtaacggacgctggctgacggcgggcgacctctccctccggggtaaaacactgcataccgcagggaccacgcagggacagaatctcaccgtgcaggcggacaactgggcgaacagtggctccgtgctggcaaccggtaaccttactgcttcggcaaccggtcagttgaccagtaccggcgatatcatgagccagggtgacaccacgctgaacgcagccaccacggacaaccggggcagtctgctttcggccggcacgctctctcttgatggaaattcactggataaccgcggcactgtccagggtaaccatgtcacgattcgtcagaacagtgtcaccaacagtggcacgctcaccgggatagccgcgctgacgcttgccgcccgtatggatatggcatcccctcaacctgcgctgatgaataacggaggttcactgctgaccagcggcgatctgacaatcaccgcaggcagtattaccagttccggacactggcagggcaaacaggtgctgatcaccgcagacagtctggcaaacagcggggcgatccaggcggctgacagcctgactgcacgtctgacgggtgagcttgtcagcacagcaggtagcaaagtcacctcgaacggtgaaatggcgctcagtgcactgaatttaagcaacagcggacaatggattgcaaaaaatctgaccctgaaggcgaactcactgaccagtgcgggtgacatcaccggtgtggatgctctcacgctcacggtgaatcagacgctgaacaatcacgcgagcggaaaactgctcagtgcaggtgtgctgacgctgaaggcagacagtgtcaaaaacgacgggcaattacagggaaatgccaccaccatcacggcaggacaactcacaaacggcgggcatctgcagggcgaaacgctgacactgacagcctccggtggcgtgaacaaccgttccggtggtgttctgatgagccggaatgcactgaatgtcagtactgcgaccctgagtaaccagggcacgatacagggcggtggcggggtttccctgaacgccactgaccgtctgcagaacgacggcaaaatcctctccggcagtaacctcacgctgacggcgcaggtgctggcgaacaccggcagcggactggtacaggctgccaccctgctgctggatgtggtgaatactgtcaacggcggacgcgtacttgccaccggcagtgccgacgttaaaggaaccacgctgaataataccggtacgcttcagggggcggacctgctggtgaattaccacacattcagcaacagcggtaccctgctgggaacctccgggcttggcgtcaagggcagttcactgctgcaaaatggtacagggcggctgtacagtgcaggcaacctgctgcttgacgctcaggacttcagtggtcagggtcaggtggtggccaccggtgatgtcacactgaaactgattgctgccctcacgaatcatggtaccctggccgcagggaaaaccctttccgtcacgtcgcaaaatgccatcaccaacggcggtgtgatgcagggtgatgccatggtgctcggtgccggagaggcattcaccaacaatggaatgctgactgccggtaaaggcaacagtgttttcagcgcacagcgtcttttccttaacgcaccgggttcacttcaggccggtggcgatgtgagtctgaacagccggagtgatatcaccatcagtggttttaccggcacggcaggcagtctgacaatgaatgtggccggtaccctgctgaacagtgcgctgatttatgcggggaataacctgaagctgtttacagaccgtctgcataaccagcatggtgatatcctggccggcaacagtctgtgggtacagaaggatgcttccggcggtgcaaacacagagattatcaatacctccgggaatattgagacgcatcagggcgatattgttgtaaggaccgggcatcttctgaaccagcgggagggattttctgccacaacaacaacccggactaacccctcatccattcagggaatgggaaatgctctggttgatattcccctttcccttcttcctgacggcagctatggctatttcacccgtgaagttgaaaatcagcacggtacgccctgcaacgggcacggggcatgcaatatcacaatggatacgctttattattacgctccgtttgctgacagtgccacacagcgctttctcagcagccagaacatcacaacagtaaccggtgctgataatccggcaggccgcattgcgtcagggcgtaatctttctgctgaggctgaacgactggaaaaccgggcgtcatttatcctggcgaatggggatatcgcactttcgggcagagagttaagcaatcagagctggcagacggggacagagaatgaatatctggtataccgctacgacccgaaaacgttttacggtagctatgccacaggctctctggataaactgcccctgctgtcaccggaatttgaaaacaataccatcagattttcactggatggccgggaaaaagattacacgcccggtaagacgtattattccgttattcaggcgggcggggatgttaagacccgttttaccagcagtatcaataacggaacaaccactgcacatgcaggtagtgtcagtccggtggtctctgcaccggtactgaatacgttaagtcagcagaccggcggagacagtctgacacagacagcgctgcagcagtatgagccggtggtggttggctctccgcaatggcacgatgaactggcaggtgccctgaaaaatattgccggaggttcgccactgaccggtcagaccggtatcagtgatgactggccactgccttccggcaacaatggatacctggttccgtccacggacccggacagtccgtatctgattacggtgaacccgaaactggatggtctcggacaggtggacagccatttgtttgccggactgtatgagcttcttggagcgaaaccgggtcaggcgccacgtgaaacggctccgtcgtataccgatgaaaaacagtttctgggctcatcgtattttcttgaccgcctcgggctgaaaccggaaaaagattatcgtttcctgggggatgcggtctttgatacccggtatgtcagtaacgcggtgctgagccggacgggttcacgttatctcaacggactgggttcagacacggaacagatgcggtatctgatggataacgcggccagacaacagaaaggactgggattagagtttggtgtggcgctgacagctgaacagattgctcagcttgacggcagcatactgtggtgggagtcagccaccatcaacggacagacagtcatggtcccgaaactgtatctgtcgccggaagatatcaccctgcataacggcagcgttatcagcgggaacaacgtgcagcttgcgggtggcaatatcaccaacagcggcggcagcatcaacgcacaaaacggcctctcgctcgacagtaccggctatatcgacaacctgaatgcggggctgataagcgcgggcggtagcctagacctgagcgccatcggggatatcagcaatatcagctcagtcatcagcggtaaaaccgtacaactggaaagcgtgagtggcaacatcagcaatatcacccggcgtcagcaatggaatgcgggcagtgacagccgatatggtggtgtgcatctcagcggtacggacaccggtccggttgcgaccattaaaggcactgattcactttcactggatgcagggaaaaacattgatattaccggggcaacggtctcgtccggtggaacccttggaatgtctgcgggtaatgatatcaacattgccgcaaacctgataagcgggagcaaaagtcagtccggtttctggcacactgatgacaacagtgcatcatccaccacctcacagggcagcagcatcagcgccggcggtaacctggcgatggctgcaggccataatctggatgtcacggcatcctctgtttctgccgggcacagcgccctgctttctgcaggtaacgacctgagtctgaatgcagtcagggaaagcaaaaacagtcgcaacggcaggtcagaaagtcatgaaagccacgcagcagtgtccacggtgacggcgggcgataacctcctccttgttgccggtcgtgatgttgccagtcaggctgccggtgtggctgcggaaaataacgtggtcatccggggcggacgtgatgtgaacctggtggcagagtctgccggtgcaggcgacagctatacgtcgaagaaaaagaaagagattaacgagacagtccgtcagcagggaacggaaatcgccagcggtggtgacaccaccgtcaacgcaggacgggatatcaccgctgttgcgtcatccgttaccgcaaccggcaatatcagcgtgaatgccggtcgtgatgttgccctgaccacggcgacagaaagtgactatcactatctggaaacgaagaaaaaaagcggaggttttctcagtaagaaaaccacccacaccatcagtgaggacagtgcctcccgtgaagcaggcgccctgctgtcggggaaccgcgtgaccgttaacgccggtgataacctgacggtagagggttcggatgtggtggctgaccaggatgtgtcactggcggcgggtaaccatgttgatgttcttgctgccaccagtacagatacgtcctggcgctttaaggaaacgaagaaatccggtctgatgggtaccggcggtattggtttcaccattggcagcagtaagacaacgcacgaccgccgcgaggccgggacaacgcagagtcagagtgccagtaccatcggctccactgccggtaatgtcagtattaccgcgggcaaacaggctcatatcagcggttcggatgtgattgcgaaccgggatatcagcattaccggtgacagtgtggtggttgacccggggcatgatcgtcgtactgtggacgaaaaatttgagcagaagaaaagcgggctgacggttgccctttccggcacggtgggcagtgccatcaataatgcggtcaccagtgcacaggagacgaaggagagcagtgacagccgtctgaaagccctgcaggccacaaagacagcgctgtctggtgtgcaggccggacaggctgcggcaatggccaccgcaaccggtgacccgaatgcgacgggagtcagcctgtcgcttaccacccagaaatcgaaatcacaacaacattctgaaagtgacacagtatccggcagtacgctgaatgccgggaataatctgtctgttgtcgcaaccggcaaaaacaggggagataaccgcggagatattgtgattgcaggaagccagcttaaggccggtggtaacacaagcctggatgccgcgaatgatgttctgttgagtggcgctgcaaacacacaaaaaacaacgggcaggaacagcagcagtggcggtggcgtgggtgtcagtatcggtgccggtggtaacggtgccggtatcagcgtctttgccagcgttaatgcggcaaaaggcagcgagaaaggtaacggtactgagtggactgaaaccacaatagatagcggtaaaaccgtcaccatcaacagtggtcgggatacggtactgaacggtgctcaggtcaacggcaacaggattatcgccgatgtgggccacgacctgctgataagcagccagcaggacaccagtaagtacgacagtaaacagaccagcgtggctgccggcggcagttttacctttggctccatgaccggctcaggttacatcgctgcctcccgggataagatgaagagccgctttgactccgttgctgaacaaaccgggatgttttccggagatggcggcttcgatatcacggtcggcaaccacacccagctcgatggtgcggttatcgcttccacggcgacggcagataaaaacagcctcgataccgggacgctcggcttcagcgatattcacaacgaagcggattataaagtcagtcacagtggaatcagtctgagcggtggtggcagcttcggggataaatttcagggtaacatgccgggtggcatgatatccgccggaggtcacagcggacatgcggaaggaacgactcaggccgcagtggcagatggcacaatcaccatccgggacagggacaatcagaagcagaatctggcgaacctgagccgtgaccctgcgcacgctaatgacagtatcagcccgatatttgacaaggagaaagagcagaggcgtctgcagacagtggggcttatcagtgacattggcagtcaggtggcagatatcgcgcggacgcagggggaactgaatgcattgaaggctgcgcaggataaatatgggcctgttccggcggatgcgacggaagaacagcggcaggcatatctggcaaaactgcgtgatacgccggaatacaaaaaggaacaggaaaagtatggcactggcagtgagattcagcgaggtatacaggccgcgacagccgcgcttcagggactggcgggtggtaatttagcgggtgctctggccggagcttctgcaccggaactggcgcatctgctgaaatcaacagaaaaagacccggcagtaaacgccattgctcacgccattctgggcggtacagtagcggcaatgcagggtaataatgttgctgctggtgcagcaggcgcagcaacgggagagctggcagccagagcgattgccggaatgctgtatccgggagtgaagcagtcagacctcagtgaagagcagaagcagacgataagtacgctggcaactgtgtcagcagggctggccggcggtctaaccggaaacagcaccgcatcagcagcagtgggagcacagagcgggaagaatgctgttgagaataactacctgagcgtgtctgaaaagacagaacttgagatagcaaaacagacgcttaaaaacagtaaagatccggcagagcgtgaaaaggcacagcagaaatatgatgcattgcttgaaaaagatattgccagtgataaggaggttattgctgcctgtagtaatggtaatgcgagtagttcagcgtgtgccagcgcaagactgaaagttattgcgtcgaaagaagggtacgaagatggcccttataactcgaaatacagccagcaatacgctgatgcgtatggtcagatagtcaatctcctcgatatcaccagtgttgatgcacagaatcagcagcaggtgaaaaacgccatgattaactatttcatggtcaccaaaggggtggatcgtcagaccgcagaaagctacaccgaaacaacgcagggcttggagatcattgcggcttcggtaacgcctcttatagggcaagctgcatcaaataaattaagctaccttggtattgggaaaaagatatcctttgatggtgatttttatactgtagatggaatgaaattcagcaaaagttattatgagaaattatgggagcaaggcagacctgcgccattcgtgcaagcaagagaagttttgaatagcaatccaaaaattgagccggatcctagaggcgcacctggctacttaagatatgaaggtgcaggtcttgaaatgatctataacccgaaaacgggacaagttggtcatattcaaccagtcaaggttaaataa

SEQ ID NO: 4054 - DNA, 321 bp, Escherichia coli
atggatatttggcctgaatttcaacgagatcttgagatgtatcgagatgttgttttatcaataaaacgtaaccttcggttgtatgaggagtgtattgaatcgttagttcatcagatcggaagcaccaattttgataatgcgcagcctctatttgatgacctctttcgtatgcaatctgaacttgctactatgttatacaaatatgaatataagccaggcaaaaggatacaagatttaatatatcatctggacagggatgatttttactcaagaaaatattggcataaaaaattcagtgatggattggcatggcctgaataa

SEQ ID NO: 4055 - DNA, 531 bp, Escherichia coli
atgcctgctcgacaagtatgtcagaattttttccacgatgcgttagcaccgtttcacaaataccgacaaaatgctttgctggatgccaccatcgctctcatcaatggcgcatcactgacgttgaccagcatcgggcgttatttacccggcttggctcgggtcaaaaataaaatcaaacgcgttgaccgactgctcggtaatgaatctcttcaccgcgatatcccactgattttcaataatattattgccatgctgactagccagctatctctttgtgtcatcgccgttgactggagtggatattcatctcaggagcatcatgtgctccgcgccagcctgctctgcgatggatgctcgcttcccctgttaagctgggtagtcccgtcagaaaaacagcagaactcgcagatacaaaaaaacttcccagatgcccttgccgaggctgtaaaccctgtggccagagtcataatagttaccgatgcgggtgttcttacccccttatttccagacaggggctgtatcttaagttaa

SEQ ID NO: 4056 - DNA, 285 bp, Escherichia coli
atgctcgatcgccactgcaaggtttatattgcctgttcatcgatcatcaatctcgtgaactgtgagacgaaacagcgtacactgtttgaacgtatctacttttcccaatactgggcgaagggagatgttattgcgaagcgcgctccaattagtcagtgggaaccttattcggaagagtcactgcttgtcatcatcgtcaccagcgtctgtcgtattaaagtcgcgatgctaaaacctgaacctcccagagatccccatatcccgctaatgggggattttaactaa

SEQ ID NO: 4057 - DNA, 1119 bp, Escherichia coli
atgattaattatggcgttgttggtgttggatactttggcgctgaattagctcgttttatgaatatgcatgataatgcaaaaattacatgtgtatacgatcctgaaaatggagaaactattgcccgtgaattgcaatgtatcaatatgtcaagcttggatgctttagtttcaagtaaattagtcgattgtgtgatcgtagccaccccaaattatctgcataaagatccagtaattaaagcagcaaagaataagaagcatgttttttgtgaaaaaccaattgcattaagttatgaagattgtgtggatatggtcaaagcgtgtaaagaagctggtgtgacctttatggctgggcatattatgaattttttcaatggagttcaatatgcacggaagttaattaaagaaggtgttatcggcgaaatattatcatgtcataccaagagaaatggctgggaaaacaaacaggagagactttcctggaaaaagatgaaagaacaatctggtggacatctatatcatcatatacatgagttagattgtgttcagcatttacttggagaaataccagagacggttactatgattggtggaaatttagctcattctggtctagggtttggcaatgaagatgatatgttatttatgaccttggaattcccgtcaggaaaactagcaaccttagagtgggggagtgcatttaactggccagaacattatgtcatcatcaatggaactaaaggctctattaaaattgatatgcaagaaacagcagggtcacttaggattggcggtcagacaaagcattttttggtccatgaaacacaagaagaagatgatgatcgtcggaaaggcaatatgacctcagaaatggatggcgctatagcatatggtcatcctggaaaaaaaacaccattatggcttgccagtttaataagaaaggagacgttattcctccataatatcctcagtggtgcaaaacctgaagaagattatattgaccttctcaatggtgaggcggccatgtcggcgattgctactgctgatgctgccactctttcaagatcgcaggacaggaaagtgaaaatcagtgagatcattaaacatacatcagtaatgtaa

SEQ ID NO: 4058 - DNA, 1218 bp, Escherichia coli
atggcaacagtatggtataaacaagttaatccaccacaacggaaagctcttttttctgcatggcttggatatgtatttgatggctttgattttatgatgatattttacattcttcatattataaaagcagatcttggcattacggatattcaggccactttaatagggacagtggccttcatagccagacctattgggggcggtttttttggtgccatggctgataaatatgggcgtaagccaatgatgatgtgggcaattatcatttactcagtcggaacaggccttagcggtattgctacaaacttatatatgctcgcagtttgccgttttattgttggcttagggatgtctggtgaatatgcatgtgcttcaacttatgcagtagaaagttggcctaaaaatcttcaatctaaagctagtgcttttttggtaagtggtttttctgttgggaatattattgcggcacaaataatccctcagtttgctgaagtatatggatggagaaactctttttttataggcctgttaccagttttactagttctttggatcagaaaaagtgctccagaaagtcaggagtggattgaagataaatataaggataaatcaacatttttgtctgtcttcagaaaaccacatctttcaatctctatgatcgttttcctcgtctgtttttgtctatttggtgcaaactggccgataaacggactacttccttcctacctagcagataatggagttaatacagtggttatttcaactctgatgacaatagcaggtttaggtacactgacaggtacaatattttttggttttgttggtgataagattggtgtaaaaaaaacatttgtagttggtctaataacttcatttattttcctttgtcctcttttttttatttctgtgaaaaactcttttcttataggattatgtctctttggattaatgtttacaaatttaggtattgcagggttggttccaaaatttatatatgattactttccaacaaaattaagaggattagggaccggtcttatttataacttaggggcaactggaggaatggccgcacctgtattagctacatacatttctggatattatggcttaggtgtttcattattcattgttacggttgcattctctgccttattaattttgttagttggttttgatattccaggtaaaatttataaactatccgtggctaaataa

SEQ ID NO: 4059 - DNA, 1230 bp, Escherichia coli
gtggctccagaccgttgcgtttcgcggtttccagcaagctcattatttgcgcagcgcgttctcccgccatacgacagccgtcagagcagtgcgtcagcgggcggcagttttacctggggtgctggcagaggtggttatggcagcgccagccgcgataatatccacagcaactatgattccgttaatgagcagagcggtattttcgcaggccggggttattttgatatcactgtggggaatcacactcagctcgatggtgcggtgattgcttcgacagcacctgccgacaggaactcgctggacaccggtactctgggctggtcggatatccataaccaggcagactataaagccagctataccggaatcagtttatcgggtggctcagggatgtcagccagccagatggtggcctcaaatgcaatagccggtgcggcgaacgcacttaccggtatgtccggcagcagtggacatgctgaaggtaccacgtcatccgccatcagcggcggaaatctcattatccgtgataaggagagtcagaagcaggatattgccgggctcagccgggacccggaaaacgccaacggcagcattgcaccgatatttgacaaggagaaagaacagaagcgtctgcaggaagcgcaggttatcagccagattagcggtcagatgagtaatatcgtaatgacgtatggcgaaactgaagcgatgaaagcagcctggaaagagcatcttggcatgagcgatgcacagttgcgggagactccggaatacagagaggtcatgaaaggctacggtacgggcagttcgccgcagatggtggtacaggccatcacgggcgtgctgggcggactgaatgcagggaacccggggcaggtattggcgggcggtctgaatccggcagtggcacagcttataaaacagtccaccggcgataaccgggaagcaaacctgatggctcacgcagtctggggtgcacttgccgcacaactgggcggaaacaatgcggcttccggtgctgctggggcattcagtggtgaacttgcagcccggtatatcattgataactactacggtggtcgtaccgataacctgagtgaacaggaacgtcagcaaatcagcatgctggccaccattgcctctggtattgcggggggacttgcaggcaacagtacggcgtctgccggtacgggtgcacaggcaggaactcggctgaaaacaatatgctga

SEQ ID NO: 4060 - DNA, 231 bp, Escherichia coli
atgataatagctgggataccggtggtgttacgctggctacgggaacagtgtgctgtacgtgatccgagtcgcgatggcacccgaggaccggggcatgtgctgaatggcgacaatacagacggaaacaaacagccgaatctgggcaaagacgtagcgagcgcaacggataaggataaagctgagcttggtggtgcaggtgctggaataccgggggggatggggaccggataa

SEQ ID NO: 4061 - DNA, 357 bp, Escherichia coli
atgattactgagttaagtgaaagagaatacaaggagttgacagacgctgcagagggacagactcttgatgctattttgtgttattcagttcctgatattcaccctgcagagtttagttttgcagatagaagagaaatctttttttgggcattaacccgtcttctgaaagaagggcgtatcaaactcgccaagcacggtaagtttttggaaggaagtgttgacgagcaggttgagcgttttcgacaggcatttccgaaaacagaagaagagatggaagacggtatctggttttttgatgagagttgtccggggggggctgtttgggtgcttgaagatggctctctcgaatggacctga

SEQ ID NO: 4062 - DNA, 558 bp, Escherichia coli
atggcaacatgtgcagaaaacccttctggtgccgcctgccagaaagcaatgaatgagagggatgctgtagggctggctctggcaacaggtacagtggcactactccccggtagtgctcaggctgtgtggggactgggagcaagtgcgaatgctggtatcagttatctggctgatggtactgtagatccgacaaacgcagccattgcaggctgggtgaatgtgttcagcatgggtaatggcctggcggggactgtgggctggaatgcggcaggtggtgcgctgggtaactggattgacaacaaagatcctctgtctggtgcaatttcaaatggtatcggttctgctgccgggtatggtatcggtaaaggtattacttgggggacagataatattacgaatgctgtaggaaaatgggtgacaaatggctgggatcctaagtacgatccaacatggataaaatatgctgaagtaaatcgtaacgatatcattcgagaaggcatgaaaccgagcaatgttcttggaactgctggagatattggcggttctataggatcctag

SEQ ID NO: 4063 - DNA, 381 bp, Escherichia coli
atgtctaacactagttctaattttgagataactggaactttgctggggcaggagcttcgtaaacgtaaaactcctcaggaaaaaattgccattattcagcagacaacggagcctggcatgagggtgtcccatgtggcgcatttgcatggtattcagcccagtctgttgtttaagtggaaaaaacaatacctggaaggaagtctcgctgctgttactaccggagaggatgttgttcctgcctcagaactggctgccgctataaaaataaaagagttacagcccttgctgggtaaaaaaacatggaagttgagatcctcaaagaagccgcggagtacaccactctacagtagttgcgcaaagtcggagtggacgataatgtga

SEQ ID NO: 4064 - DNA, 366 bp, Escherichia coli
atgatttataagatatctggaaatcagagattaatatggaaattttataagactgatgacaataaatggagatggtattgtcatgagaaaaatggatatcttttgtctcaatcagataacgcatataattcgcaattgttatgcattgaaaatgctaaaaaacagggatactcagacgaatcggtcttgccactttttctacatatttcctatattcaggaaaaaggctggaaatggtatcaatgttatgattgtggatatattgtaaaagaaacctctgtttttttcccgacataccaagcatgtatcattgatgctgaacaagaatgtattggtatactagttcaactgtctgaaaaaacttga

SEQ ID NO: 4065 - DNA, 1365 bp, Escherichia coli
atgttatcaatatttaaaacggggcaatcggcggatagtgttccggtggagaaaattcaggtgacatatcgtcgctatcgtatgcaggcgttacttagcgtatttctggggtatcttgcatactatatcgtgcgtaataatttcactttatcgacgccttatcttaaagagcaattagatctcagcgccacacaaattggcgtactgagtagctgtatgcttatcgcctatggtatcagcaaaggagtgatgagtagccttgccgataaagccagtccgaaagtctttatggcgtgtgggctggtgttatgtgccatcgttaacgttggcctgggattcagcactgcattctggatttttgcggcattggttgttctgaatggtcttttccagggaatgggcgttggtccttctttcatcactattgctaactggttccctcgccgggagcgtggtcgggttggtgctttctggaatatctctcataacgtcggtggtggtattgttgcccctattgttggtgccgcttttgccctactcggcagcgagcactggcaaggtgcgagctatatcgttccggcctgcgtggctatcgtttttgcggtaattgtgctgattctcggtaaaggttccccacgtcaggaaggtctaccctctctggaagagatgatgccggaagaaaaagtcgtcctgaatacccgacagacggtaaaagcaccagaaaacatgagcgcctttcagattttctgcacttatgtattacgcaacaaaaatgcctggtatgtctcactggttgacgtatttgtatacatggtgcgcttcgggatgattagctggttgcctatttacctgctgacggtgaaacatttttctaaagaacaaatgagcgtcgcgtttttattttttgaatgggctgcaatcccttccacgctacttgccggttggttgtcagacaaactgtttaaagggcgtcgtatgccattggcgatgatttgtatggcgctgattttcatttgcctgattggctactggaaaagtgaatcgctgtttatggtgacaatttttgctgccattgttggttgcctgatttacgttccacaatttctggcttccgttcagactatggagatcgttcccagctttgctgttggttctgcagtaggcttacgcggttttatgagctatatcttcggtgcgtctctgggcaccagcctgtttggtattatggtcgatcatattggctggcatggcggattttatcttcttggctgcggtattatttgttgcatcattttctgctggttatcacatcgtggtgcaattgaacttgaacgtcacagagccgcatatataaaagaacactga

SEQ ID NO: 4066 - DNA, 1083 bp, Escherichia coli
atgatccgtacgcttaaccgcaccagtgcctcactggaacagttgcttgatacggccaacgtagaaaacgtcgatcttatcctgacttcatcaccaatgctgctccagcaccttcaggagcaccagaaactggccccgtttgatgatgcacccgcagaaagccaaaacctggtgccggagtcgatccgtgcaacctccgttgcagtagcaatatcaggttttggtctgctcattaatcgtccggcgctttctgtaaaacaccttcctgcccctgctgactgggacgatcttgctttgccgatctatcaggacgctttattgatgagtagtccgtcgcgttcagatactaaccatttaatggttgagtcattactacagcaaaaaggctgggtgaaaggatgggaaacgttgctgacaagtgcaggaaacctggtgacaatctcctcccgcagttttggcgtagccgataaaataaaaagcggactcggcgttgccggccccgttatcgataactatgctaatttactgttaaatgacccccatctctcttttacctatttcccccggtctgcggtatcccccacctacgttgcaattctcaagaaaagcccacacgccgatgcagcccgtcgctttattcactacctgttaagtccgaaaggacagcgtattctggccgatgccaatacaggaaaatatccggtgacaccacttgccgcagacaatccgcgggtaacgcaacaacagctcctgatgaatcaacccccgctgaattatcaccttatcctgaaacgtcagcctctggtgcagcgcttgtttgatacggcaattagctttcggttagcacagctaaaagatgcctggcgagcgctgcacagtaccgaggcacgtctgaagaaaccattaccagaaatacgtgcactgttaacacaagtgcccgttgcagcggccagtagtgaagatcccgtctggctggcacagttcgataacaaaagctttgccgagcagcaaatgatggaatggcaactctggtttctgaataaccagcgcctggcgataaaaaaactggaagagctgaaatga

SEQ ID NO: 4067 - DNA, 2010 bp, Escherichia coli
atgaaaaacataacgctgtggcagcgtttaagacaggtcagtatcagtaccagcttacgttgcgcatttctgatgggggcacttctgaccctgattgtcagtagtgtcagtctgtattcatggcatgaacaaagctcacaaattcgttactcgctggatgagtattttccccgtattcactctgctttccttattgaagggaacctgaatctggtggtagaccaactaaatgaatttttgcaggctcccaacaccacggtgcgattgcaacttcgtacccagattattcagcatctcgacaccatagaacggcttagtcggggactgtcatcccgggaacgccaacaactgacggtcattttgcaggacagtcgatcactgttatccgagttggatcgtgcgctttacaacatgtttttactacgggaaaaggtgagtgagctatcagcgcggattgactggttacacgatgattttactaccgagcttaattctttagtgcaggatttcacctggcagcagggaacgctgctggatcaaatcgcctcccgactgggcgatacggcgcaatacctgaagcgatctcgtgaagtgcaaaatgaacagcagcaggtttataccctggcacgcattgaaaatcagattgttgacgatctgcgtgacagactcaatgagctcaaatcaggacgtgatgacgacatacaggtggaaactcatatccgttattttgaaaatctgaaaaaaacggcagatgaaaatatacgtatgctggatgactggcctggcaccattaccctgaggcagaccatcgatgaattgctggatatgggaatcgtaaaaaacaaaatgccggctacgatgcgtgaatatgtcaccgcccaaaaagccttagaggatgccagtcgcaccagggaagcgacactgggtcgcttcagaacgttactggaagcgcagcttggcagtactcatcaacaaatgcagatgtttaatcaacgaatggaacaaattgttcgcgttagcggtgggctgatcctggtggcgacagcactggcgttactgctggcatgggtattcaaccattattttatccgctcacggttggtgaaacgctttaccctactgaatcaggccgttgtgcaaattggtctgggaggcacggaaacggctattcctgtttatgggaatgatgaactggggagaattgcaggattattacgccatactctcgggcagctcaatgtgcaaaaacagcaacttgaacaagaaattaccgatcgaaaggtgatagaagccgatctgcgagccacccaggacgaactgattcagacagcgaagctggcggtagtcgggcaaacgatgaccacgctggcccacgagatcaatcagccgctaaatgcgctgtcgatgtatctgtttacagcccgcagggccattgaacagacccagacagaacaggccagcatgatgcttggtaaagccgaaggggtgattggtcgcattgacgccattatccgttcactacggcagtttacccggcgcgccgaactggaaatatcactccattccgttgatttagcacagatgttcagtgcggcctgggaacttctggccatgcgtcatcgccctttgcaagctacgcttgttctgccgcaaggtacagccacagtttcaggcgatgaggtcagaacccagcaggtactggttaacgtactggcgaatgcgcttgatgtttgtgggcaaggcgctgtcattaccgttaactggcaaatgcagggtaaaacgctgaacgtattcattggcgataatggcccgggctggcctgaggcattgttgccttcgttattgaagccgtttaccaccagtaaagaagtaggactgggtattggtctttcaatttgtgtgtcgttgatggagcaaatgaaaggtgaattacggctggcatcaacgatgaccaggaatgcctgtgtggtactgcaattcagactaacggatgtggaagatgctaagtag

SEQ ID NO: 4068 - DNA, 1248 bp, Escherichia coli
atgctaagtagtgaatattcgattctgctgattgatgatgatgctgacgtgctggacgcctacacacagttacttgaacagtcaggctatcgggtttttgcctgtaacaatccttttgaggcgcagacgtggatacaaccagactggccaggcattgtgctaagtgatgtgtgtatgcctggctgctctggtatcgatttgatgatgttatttcaccaggatgatcaacagatccccattctgcttattaccgggcacggcgacgtgccaatggcagttgatgcggtaaaaaaaggcgcgtgggattttttgcaaaaaccggttgatcccggcaaattgctttctctggttgaagaggcgctacgccagcgtcaatcaatcattgcgcgtcgtcagtattgtcaacagacgttgcaggtggagttgatagggagaagtgaatggataaatcagtatcggcgacgtttacagcagttgtctgaaacagatattgccgtctggctctacggtgccccaggcacaggacggatgaccggtgcacgttatctgcaccaatttggacgtaatgcacaaggcgaatttatctaccgcgagctgacaccagacaatgcaccacagcttaatgatttcattgcgctggctcaggggggaacattagtgctcagccatcctgaacacctgacgcgtgaacagcagtaccatctggttcagttacaaagccaggaacaccgaccttttcgcctgattggtattggagacacttcgctggtcgagctggccgccagcaaccatatcatcgcggagctctattactgctttgcaatgacacaaatcgcttgcctgccattaactcaacgccccgatgatattgaaccactgtttcgccattacctttgtaaagcatgtcaacggcttaaccatcctgttccggaagtgggaaaagagatgctcaaagagatgatgcgccgcatgtggccaaataatgtgcgagagctggccaatgcagcagaactatttactgtaggagtattaccgctggcagaaacagcaaatccgttgatgcacgtcggaaccccgacaccgcttgacagacgagtggaggacgctgagcgacagataatcacagaggcacttaatatccatcaggggcgtatcaatgaggttgctgaatatttacaaatcccacggaaaaaactctatctcagaatgaaaaaatatggtcttagtaaggagcattataaaatttaa

SEQ ID NO: 4069 - DNA, 699 bp, Escherichia coli
atgcgagtgcttgctgcgggcagtttacgccgggtatggaaatcacttgtgtcagagtatcaggccgataatatacagtgtgattttggaccagcgggtatattaagggagcgtattgaggcgggtgaggcatgcgatttttttgcatcagccaatatgactcacccacagatattaatgtccgcaggacgagcattgtgtattaaaccttttgccagcaatcgtttgtgtttgtatgttcgggcgaataaattcaatgagaatgacgactggtattctttattaaatcgggaaacattgcgaatcggaacatcaacggcgggatgtgatccatctggtgattacactcaggaactgtttgaaaatatgggcagtgtcggtgaaaaaataagacaacgggctgtagcattagttggggggaggcattcgttgcctcttccaggaaatgcgatagcagcgcagtggttaattgaaaatgattatactgatctgttcatcggttatgccaattatgttcctggcttgcaatcaattgattcagtaaaagttatagaaataccggaaccttataatccgattgctatctatggatttgcctgtctgaccgataaggccctgccacttgccgactttttagtttcacctgttgccagaggtatacttgaacagcatgggtttatgcctccaggtacgttatag

SEQ ID NO: 4070 - DNA, 1053 bp, Escherichia coli
atgaaaataaataataagttgtttttattactgatttttttgctttctttatcatttactacgcaagctgaacgaactttcaccgatcagattggtcgggaggtgaaagtacccgacaaagttgatcgtatcgtggtgctccagcatcaaacgttgaatcttttagtgcagatgaatgcaactgataaaatcgttggtgttatgtcaaactggaaacaacagcttggcagtaattatgcacgtcttgcgccagaactgagcaacaaggcgtcattaggcgatttaacccatgttgatgccgaaaaattggtggctttgcatccgcaagtcgtttttgtcaccaattatgctccgcaggaaatgatagataaaatcagtagtctgggaattccggcagtagcgatttctttgcggcatgacgatgagggggagagaaataaacttaacccagtcatggcagatgaagaacaggcttacgtaaaagggttatatgaagggattatgctgattggtaatataatcaataagcctgaagaagctaaagcgttaatcaaggcaactgaaaatggccgcagaatggtgagtaaccgcctgcaacttctacccgaagagcagcgtgttcgtgcctatatggcgaatcctgaattgaccacttatggttccggaaaatatacaggattaatgatgaaacatgctggcgcagtaaacgtcgccgcttccaccattaaaggtttcaaacaggtctcgatagagcaagtcattgaatggaatcctcaggtaatttttgtgcagaatcgttatcctgcagtagtgaatgaaatacagtcaagcccacagtggcaggtaatagatgctgtcaaaaatcattgtgtttatttgatgccagagtatgccaaagcatggggctatccgatgcccgaggctatggggattggggaattgtggatggcgaaaaagctgtatccagaaaaattcaatgatgttgatatgcataaaatagtcaatggctggtatagaacgttttaccgtactgattatcagggtgaagactaa

SEQ ID NO: 4071 - DNA, 1068 bp, Escherichia coli
ttgccgcaccctatccattcaccatcgcctgagacgataaaatatcagtaccatcagcttgtacataaacggattatactgatttcaataataacgctggcgatgctctcctcactatttctggacatcatactgggctcttccaatttgccagtcagtgagctatggcatgctttagctcatccgtttagtcgtgataccagcgtccatgtcattgtctgggaaatacgattaccctacgccttaatggctttattggttggcatgacgctaggactcgcgggggcagaaatgcaaactatcctcaacaatccattggcaagtccctttacacttggagtctcttctgcggcagcatttggtgcagctctggcgattgtattaggaattggtattcctggtatatcggcagcatggtttgttcctgcaaacgcgtttatatttgctcttctgtcatcgttattacttgatagcatgtctcgttggctaagaatagcaagctcaggcatgattctgctgggtatagcattggtattcacgtttaatgctcttgtggcaataatgcagtttattgcggatgaggatacactccaggggctggtattctggacaatgggaagcctggctcgtgcatcctggaacagactgggtattttatcaggcgtatttatcattgtttttttatggtcattttcccgctcatggcaacttacggcattacgcatgggagaagaaagagcgttaagttttggtatcaatgcacagcaactgcgtctttcctccctgttacgtataagtttgcttgcagcattatcggtagcctttgttgggccgattggttttattggtcttgtctctccacatatttcccggatgctatttggtgaggaacatcgtttctatctaacaggaagtgtattaaccggaggtctggttctttcactggcttcaattgcctcgaaaaacattatttcgggtgtcattattccaataggcatcgtcacctcgcttgtgggtgttccattatttattagtattattctgcgctatcgcaggagtttgttatga

SEQ ID NO: 4072 - DNA, 774 bp, Escherichia coli
atgaaaggtctttcactgcataaattaaatgcaggttatcagaaaaaaaacgtaatatgtgatctcagtttacctgaactgcaacgaggaaaaataacaatcattctgggaccaaatggttgcggtaaatcgacattgttacgtgcactggcgggactgaataaggccaacggtaaggtatttcttgatggtgtcaacctaatgcaaatgccattttctgcgcgtgccgacagtacaatatttttgccacagtttttaccacatgatgtgcatctgaatgtgttggaatctattctggtttccctacgcgcgtcaaagatgggcgggaaacatgaaaaaacacaatcaatagctattctcaaacaactggggatagaacatctggccttttgttatctggatcaactatccggaggacaaagacaactcgtcggtttggcacaatcattggtccgtaatccatcgatattactactggatgagccactaagtgcattagatttaaaccatcagttccatgttatggatttagtaaaaagtgagacacgtaatcgcaatatagtcaccattatggtagttcacgacttaaatattgcactacgatatggtgattatgtcgttatgttaaaaaaaggcaaacttattgccagtggaaaacccaaagaggtcattacgccagagaatctggctaatgtttatcgcatccgtggacgaatagagcattgttctcatggcttgttacaacttatcgttgatggtgtcattccggattaa

SEQ ID NO: 4073 - DNA, 615 bp, Escherichia coli
atggccagtgagcgtaaaaaagcaatagttattggggcgtacagtgccttcattgagcttggttttgctcaaacctcaaccacagaaattgcccgccgggcaaaagtatcaaaaagaacgatttatgaagtgttcagcaataaaaaagaaattttctctgaagttattaaggaatataaagcactgtttctcgatcttccgagaccggaaaatgaagagctccctcttaatgaagcactgtttcgcatattccgattagatataagtcaggaagacgctaaagagagagaagcgttattaaaattaatgacgcgtgagtctattctctttccagatctttcagactatttatatacaactaaaacacttcgctcaagagaactgttaattgagtggttggatattcagcaagctcaaggacgcattactgttaaaaatacggggaattgtgtggggatgttaatggatattgtttttggtgcattgattccacgtcgatgggttttggatctgaacgaagatcagacattaacacctgaaggtcgtcagcagcaactagaggaaataaaagagcgtatcgaaaccgttatacaagtgatcaaaaatagtatttga

SEQ ID NO: 4074 - DNA, 411 bp, Escherichia coli
atggtctgccagatggaactgaccagccatctgctgacggctgcagccttcggcacgatgaagaacagcgaaaatgagcttgctgagcaacttatagaacaaaccggcgataatactctgacgttaatggataaaggttattactcaccaggactgttaaatgcctggagcctggcgggagaacaccgccactggatgatccctctcagaaagggagcgcaatatgaagagagcagaaaactgggtaaaggcgatcatctggtgaaactgaaaaccagcccgcaggcacgaaaaaagtggccgggactgggaaatgaggtgacagcccgcctgctgaccgtgacgcgcaaaggaaaaggctgccatctgctgacgtcgatgacggacgccatgcgcttccccggaggataa

SEQ ID NO: 4075 - DNA, 366 bp, Escherichia coli
atggcggatctgtacagtcatcgccgggaaatcgaactgggatacagggagataaaacagacgatgcaactgagcaggctgacgctgagaagtaaaaagccggagcttgtggagcaagagctgtggggtgtcttactggcttataatctggtgagatatcagatgattaaaatggcggaacatctgaaaggttactggccgaatcaactgagtttctcagaatcatgcggaatggtgatgagaatgctgatgacattgcagggcgcttcaccgggacgtataccggagctgatgcgcgatcttgcaagtatgggacaaccagtgaaattaccgacaagaagggaaaggccttcccgagagtggtaa

SEQ ID NO: 4076 - DNA, 621 bp, Escherichia coli
atggtaagaaactggctcccgtcgtacgcgagccgggctacccttagaaaagaaatctgcagcattggatccgctcatgagaagcaggtggtggcgcaaaagaatccattcgtcataagccccgttactcagatgtgcaaaaacagattgccgttgaacattatcttaaccacggtagttgcttggcgtttaccggcagagctctggggtatccctacagtgatatgctcactcgctgggttgatgagctttatcccgacagacgacgtatatttaccggtaagaccaatccggaatcgacctttgaaccagaagtcaaacgtcaggctgccatggcgagtatcagccagtgaagtcgccagatgtattggggtcagccgtgcggtattgtataaatggaaagataaaattatcggcaatagtgcttaccagactatgcggaaacataacaaaccttccctggagacagaacgcagaacgcgatgcgttgcgggaggaagtcgcccgactgaacctggaaatacgccgccagcagatggagctggatattctgaaaaaggcgaaggaaatcaaaaaaaatctatggtcgcccccgtttttgccgcactgatttttaattaa

SEQ ID NO: 4077 - DNA, 279 bp, Escherichia coli
atgcaggttgtcaccggcaacaccgttgaccttcctggtcacattcgtccccttgtcagtaataatgccggcccccgtccatgtttttccggattcagcagatacggtgtaactgtctttaaattcgagataaccggccccctgagtcacactgtctttcaggacaattgcaccgttctgcccgctgaataccagatttttaccggcattgaggtcattgtctttctgtccgtgcatggtccagtttttactgccctgactcagggtacctgtgcctga

SEQ ID NO: 4078 - DNA, 351 bp, Escherichia coli
atggataaccggatgaccctggaatgtcagggtgccactgtcctgactcagggtaccttctggcaggttcacgctaccatcaaagatgacctttcttccccccggcagctgtggaatggcgacatccatattcccggacagctgaccatgaaagataacgggttgttttgcccgcccggccaggatccagtcttttactgtctgaacagctttgtttttgtccgtaccaacaaattcccactgaaccggatcattcaggctgttcccccacagggtgttaccattgctggcagatttcagaatatagaagcgggcctggccgttgagtatcatgctgtacaggtttcctag

SEQ ID NO: 4079 - DNA, 186 bp, Escherichia coli
atggttcagcgtaatattcccttcatactggctcctgtcattcacggtgtccgggacagaggtaccttcctcaggactgacataatttcccgtcccgtcatttttatccacaaataccctgtcacttcccagtgtgatatggctgttatccgactggatgtcactgttaagcgtggcattacgtga

SEQ ID NO: 4080 - DNA, 585 bp, Escherichia coli
atggacgtgacaaacgatgattacatccgtctgttgtcggcactgttgccccccggtccggcgtggtcagccagcgatccggcgattgccggtgcggcaccgtcattaacccgcgttcatcagcgtgcggatgccctgatgcgggagctggatccgcgcaccaccaatgaactgataaaccgctgggagcgtctgtgcggtctgccggatgaatgtattcccgcagggacacagacccttcgccagcgtcagcaacggctggatgcgaaggttaacctggcgggcggcatcaacgaggatttttatcttgcacagcttgctgccctgggcagaccggatgccaccatcacgcgatacgacaaaagcacgttcacctgctcatcggcctgtactgacgcggtgaacgcgcctgaatggcggtattactggcaggtcaacatgccagccgccaccaacaccacctggatgacatgtggctatccctgtgattccacactgcgtatctggggcgacaccgttgtcgaatgtgtgcttaacaaactctgcccgtcgcatacctacgtaatttttaaatatccggagtaa

SEQ ID NO: 4081 - DNA, 1059 bp, Escherichia coli
atggcggacagtgaatttcagcgcccgacgctggcagaaaatatcagtatgctccgtaacgatttattcgccaggctggacgtcagcgacacgctccggcgcatggatgaagacgtgcgggcaaaggtgtatgcggcggcgctgcatacggtttacgggtacatcgattatctggcaatgaacatgctgcctgacctgtgcgatgagttctggctggcgcgacatgctgcgatgaaacggtgtccgcgcaagggggccacggctgccagcgggtatatgcgctgggaaggtgtcagcgatggcctgaaggtgaccgccggaagtgttattcagcgcgatgacctggttcagtacacggcaactgccgatgcaaccagctccggtggtgtcctgcgcctgccgatcgcctgttcaactgcaggcgcggtcggtaacgctgacgacggtacggcattaatcctggtcacgccggtgaatggtctgccgtcttccggtgtggctgacaccctgacaggcggatttgatactgaagagctggaaacgtggcgcgcccgcgtcattgagcggtattactggacgccgcaaggcggggctgacggggactatgtcgtctgggctaaagaagtgcctggcattacccgcgcatggacataccgacactggatgggaacggggactgtcggtgtgatgattgccagcagtgacctgattaatcccattccggaagaatcaacggaaacggcggcaagacaacatatcgggccactggccccggtggcaggctctgatttgtatgtgttcaggccggtggcacatacggtggattttcatatccgtgtgacgccggacacaccggaaatacgggctgccattaccgcggagttgcgttcgttcctgctgcgtgatggttatccgcagggagaactgaaggtatcgcgtatcagtgaggcgatttccggtgcgaacggggaatacagccatcagttgcttgcaccggcagacaatatctccattgcaaaaaatgaactggcggtactggggacgatttcatggacgtga

SEQ ID NO: 4082 - DNA, 426 bp, Escherichia coli
atggaactgtggctgacggtgaacggtaaacgcacctgcgccagcgcaccgctggatccgctgacccgcgccgtggtgatttccctgtttacctggcggcgggcggagcctgatgacaacgccgacgtcccgatgggatggtggggggatacctggcctgcggtacagaatgaccgttacggctcccggctgtggctgcttcagcgcagcaaactgaccaatcagctggtgcagacggtaagggggtatatccgcgaatgcctgcaatggatgactgatgacggcgtggtgtcccgtattgatctggatatccgccgcaccgggattaatgaactgggtaacagtatcactctctggcgtcgtgacggaccggtaatgatttcttttgatgatctgtggagtgcgataacgcatggcggacagtga

SEQ ID NO: 4083 - DNA, 549 bp, Escherichia coli
atgaggacgattgaagccatgcagcgacaacttctcggcctgattgggcgggccgtggtgaaaagcatcagtgccgccacgaaatgtcagaccgtggatgtgtccctgattgccggtgaacccaaagccggggttgaacatcttgaaccctacggttttaccgcaagggcaaacagcggtgcggaagcggtggtgttgtttccggatggcgaccgttctcatgcggtggttgttacggtgtcggaccggcgctaccgcctgaaagggctgcagacgggtgaggtggctgtctatgacgatcaggggcagtccgtgacgctgacccgggaggggatcgtggtggacggtgcagggaaaacgatcacgtttcgcaattcacttaaagcacgttttgaaatggacctggaagtgaccggacaggtgaaagacctgtgcgactccggcggcaccaccatgtcagcgatgcggcttgcctataacgggcatcgtcacagagagaacggtcagggcagtaacaccgataaacctgataaagcgatggaggcatga

SEQ ID NO: 4084 - DNA, 1080 bp, Escherichia coli
atgaacgacaatgtcacgctacgggtaaatggccgggagtggaatggctggacatcggtgcgcatcggtgccggtattgaacggctggcgcgggatttcagtgtggagatcactcgccagtggccgggagatgagggtatcaccacgcttcagccgcgcattaaaaacggttcaaaagtggaagtgctgattggtgatgagctggtgatcaccggctgggtggaggcgactcccgttcgttacgatgcccgttcggtcagcaccggtattgccggacgtagtctgacggctgacctgattgactgtgcagccgaaccgacacagtttaacggacgctcgctggtgcagattgcgcaggcgcttgctgcgcctttcggcattgaggtggtgaacagcggtgcgccgtcgggtgttattcctgatgttcagcctgatcacggtgaaacggtgattgaggtaatcaacaaaatactcggtcagcagcaggcgctggcttacgacgacccgcacggcaggctggtgattggcggtattggctcaacgcgggcacataccgcgctggtacttggggaaaacatcctttcctgtgatacggagaagagtatccgggagcggttttctgtttaccaggtggcggggcagcgtgccggaaacgacgatgatttcggtgaggccaccaccaccgcgctgcgggcccgcacagaggacgcatttattgcccgttaccgtccgatgtatatcaggcagacagggcaggccacgggggcaggctgtattgcgcgtgctgactttgaagcccggcaacgggcggcgcggacggatgaaaccacctatttggtgcagggctggcgacagggtaacggtacgctgtggcagcccaaccagcgggtgattgtcttcgatccggtctgtggtttcgacaataccgaactgcttgtctcggaagtcacgtttactcaggaccagaacggcaccctgacggaaatctgtgtcggcccgcctgatgcttatctgcctgaacccgaagcccccggcgcgcggaaaaagaaaaaagccagagtacaggaggacccgttctga

SEQ ID NO: 4085 - DNA, 1329 bp, Escherichia coli
atgacgtggaaagacagacttcaggacgcgtcatttcgcggtgtgccgtttaaggttgaagaagaaagtgcgggaaccggtcgtcgtgtggaaacgcacgaatacccgaaccgcgacaaaccctataccgaagacctggggaaaatcactttccgcccgtccatcacagcttatgtggtgggagatgactgctttgaccagcgcgatcgcctgattgacgcgctgaataaacccggtcccggcacgcttgtccatccgacttacggtgagctgaaagtctgtgttgacggggaagttcgggtcagcacatcgaagagtgaagggcgtattgtccgctttgacctgaagtttgtcgaagcgggagaactctcttaccccacttcaggtgcggcgacggcgcagacgctgatgtcatcctgttctgcactggatgactgcatcagtgacagcttcagtggtttcagtatcgatggcgtggcagattttgtgcagaacgacgtcgtcggtaatgccagcacaatgcttgggtatgtttctgatgcgatgaaagtggtggattctgccgtatcggatgccgccaggctgttgcagggggatatctcggtacttctgccgccaccatcgtcaggcaaaaatttcgttgagcaggtgcagcaaatgtggcgtaccgggaaacgcctttatggtaacgccagcgacctggtcaccatgatcaaaacgctttccggtgtcagcctcggcagcgatctgcaaccgcgcggcgtctggaaaacggacagtaaaactaccgccacggcgacgcagcagcgtaacgtggttgccagcacccttcgtacgaccgcaatcagcgaagcggcgtatgccgtcacacgattgcctgcgcccacaacttccgcggtgatgcagaatgccacagtagggcagtcaacaacacccgcgcagagcaccggctggccttctgtcacgcatccggcactgaacaatgcaccggcggtgaaaaacacggttgacctgccaacgtgggaagaactgaccgacattcgcgacacactgaatacggcaattgataaggagttgtcccgtacaaccagtgatgcgctgtttctggcgctgcgccgggtgaaagcagatctgaatgcggatatcaacacgcgccttgaacagtctgcacggatcattcagcgcacgccggatgaggttttacccgcgctggtgctggcggcgacctggtttgataacgcggcgcgtgacgcggacattatccggcgtaatgccattacgcatcccggctttgtgccggtgatccctctgaaggtgccagtgcaatga

SEQ ID NO: 4086 - DNA, 1836 bp, Escherichia coli
atggcggaatttgagcttaaggcgttgatcaccggtgtcgacaggctttctcccgcgctgtcgaaaatgcaaaagaaaatccggggatttaaacgccaggcggaagaagcgtcacagggtgggctggcgcttggtggcggactggcagcgggtctgacgctttccctgaaatcttatgccgatcaggaaaacgccgccaccgggctgaaagtcgccatgatggatgcgaacggcgaggttggaaagagctttcaggacatcaataaactggctattggcctgggtaaccagctacccggtacaacggctgatttccagaacatgatgcagatgctggtgcgtcaggggatcccggcagaaaacattcttggcggtgtgggtaaagcgacagcttatcttgcggtacaactgaaaaaaacaccggaagcggctgctgagtttgctgcaaagatgcaggatgctaccggaacggcgtcagaagacatgatggggctgttcgacactatccagaaggcgttttatctgggtgttgacgataccaacatgttgtccttcttcactaaaaccagctctgttctgaagatggtgaacaaggacggtcttcaggctgcacagagccttgcccccatcagcgtcatgatggatcagatggggatgaacggggagtcggcaggtaacgccctgcgaaaagttatccagtccggattaagcgttaagaaaatcagggacgtcaataaaatcatggcccgccagaaactcggggtacagctcgattttactgacggcaaaggaagttttggcggtcttgataacatgttcaggcaactggcaaagctgcgaaaactgaccgacgttaagcgaacaggtgtacttaaggcaatatttggtgatgatgccgaaacccttcaggtggtcaatgcactaatcgataaaggaaaggatggctacgatcagatccagcagaagatgaataaacaggccagcctgaataaacgtgttcaggcccagcttggtacgctgtccaacctgtgggaggcaatgacggggaccgcaactaacggccttgcggctattggcggcgcattttctggtgacgccaaaaatatcacgcaatggctgggggagttaggggaaaaattcacgaagtttgcggatgaaaatccccgggttattcgcggcgtcgtcgggcttgctgccggtcttgcgattctgaaactgggattgatgggcgttggcggtgccatcagtattgtcagcaggatcatgtcgatgacgccgattggaatgattgcgacggcgatagccctggctgcgggattaattatcactaactgggatgttgtcggaccttatttcaagaagctctgggaaaccattggtccttattttgaggctggctgggaacttctgaagaaggtttttgcctggtcgccgctggggatggtaatcaataactggggaccggttgttaagtggtttcaggatatgtgggacaaactgaagccaattattgagtggtttaccgacagttccggtgacacggtcgatgccattaactctgcgcagtggggcgcgggtgcttatgatgcttatgggacgggaataccggcacggggatacacaccttatcaggcggtagatccggctcagtcaaacaacgcctccggtgccacaggcccgaatcccttcatgattaacaaagcttctgcgccaaaagttgatggtgagatcaaggtctcttttgtgaattcgcctccgggtatgcgggttatggaaacgcgatccagcggttttgatgtcagccatgatgttggctatacgcgctttggcaggtaa

SEQ ID NO: 4087 - DNA, 270 bp, Escherichia coli
atgaaagagcttgagttaaagaaaccgattactgctcatggcgagacactctccgtactggagtttgatgaacccaccgggaaggatgtccgcgagctggggtatccctaccagatgaatcaggatgagtcagtcagacttctggcgcatgtggtgtcgaaatacattgtgcggctggcgaaagtgccgcaaagctctgtcgaccagatgtctccggcagacctgaatgcagcggcgtggcttgtggctggttttttcctccaggcctga

SEQ ID NO: 4088 - DNA, 357 bp, Escherichia coli
atggcccgtatcgggggaacctgttatttcaaaattgacggtcagcagctatcgctgaccggcggcattgaggtgcccatgaacaaaacggttaacgatgacatcatcggcctggacggttcagtggaccgcaaggaaactcaccgtgcgccttatgtcaaagggaccttcaaggtgccgaagaattttccggtaagcaaaatcacctcgtctgatgagatgaccatcactgccgagctggcgaacggtcaggtctatgtactgtcgtctgcctggctgcacggcgaagcgaaccataatgccgaagaaggcacggttgatcttgagttccacggtgaagaaggggattaccagtaa

SEQ ID NO: 4089 - DNA, 1497 bp, Escherichia coli
atgacgataagctttaacaccattccgtcgaatacgctggttccgttgttttatgcggaaatggataaccaggcggcgaatactgcacaggacagcggagcatcgctgctgattggtcatgccaataacggtgcagagattgttgccaacagtctggtactgatgtcgtcggcagactatgcacgccagatttgtggtgcgggaagtcagctggcgcgtatggtcgaggcttatcgccagactgacccgtttggcgagctgtatgtgattgccgttcctgaatccacaggtgcggcggcaacagttacgctgacggtgaccggggcggcaaccgaaaccggcacggtgaatgtgtatgtaggacgtacccgcgtgcaggcaccggtgactaacggcgataacgtcacgatgattgccagcagtatccaggatgccatcaatgccgttccgaccctgccgtttacggcttcatctttggcaggcgtggtcacactgaccgcgcgtcataaggggctttgtgggaatgaaattcctgtcagcctcaattactacggctttggtgggggcgaagtgctgccagcgggcgtacagattgccgtggcgacgggtaccgccggaacgggtgctccggttctcaccggcgcggtggctgcaatggcggatgagccgtttgattatatcggcctgccgttcaacgacacggcctccgttaacacgctggtgaccgagatgaacgataccagcggtcgctggagctatgcgcgtcagctgtatggtcatgtgtatacggcaaagatcggcacgctgtcagaactggtgaccgcaggtgaccagtttaaccagcagcacattaccctggcggggtacgaaaaagagacccagacgcctgccgacgagctggcggcaagccgtaccgcccgcgcagcggtgtttatccgcaacgatccggcacgtcccacgcagaccggtgagctggtgggtatgctgcctgcgccgaaggggaaacggttcacgatgaccgaacaacagaccctgctgtctcatggcgtggcaacggcgtatgtcgaaagcggggtactacgcattcagcgtgatgtcaccacgtacaggaaaaacgcttacggggttgcggataacagttacctcgacagtgagacgctgcataccagcgcgtatgtactgcgcaaactgaaatccgtcattaccagtaagtacgggcgtcacaagcttgccagtgacggtacccgctttggtcccggtcaggcgattgtcaccccggcggtgatcaaaggggaactgctggcaacctaccgtcagcttgagcgtgcggggatcgtggaaaactacgaactgtttaagcagtacctggttgtggagcgtgatgccagcgatccgaaccgcctgaacacgctgttcccgcctgactatgttaaccagctgcgtgtctttgccgtggttaatcagttccgtcttcagtattcagaggagtctgcataa

SEQ ID NO: 4090 - DNA, 171 bp, Escherichia coli
atgtttgtcaaacctgttaaagggcggtcagtgcctgaccctgcccgcggcgaccttttgcccgccgaagggcgaaatgttgacgagaacaactactggctgcgccgtgaagcagcgggtgatatccggcgcgtgaataaaaaggtgaacaccgatgacgataagctttaa

SEQ ID NO: 4091 - DNA, 561 bp, Escherichia coli
atgaaactgacgcctgttattgctgcgctgcgtgcccgctgcccgtattttgaaaaccgggtggcaggcgcggcacagttcaaaaatctgccggaggtcggaaagctgagactcccggcggcgtatgtggtaccgggtgatgactctccgggagaaaacaaaagccagaccgactactggcaggagctgaaagagggcttctccgtggttgtcatactgagtaacgggcgtgatgagctcggtcagtttgcttcgtatgatgtggtggacgatgtccggcagatgctctttaaggccttgctgggctggaacccggaagcgtgcggtaacccgattacctatgacggcggcacgctgctggatctgaatcgtcatgagctgatttatcagttcgatttttcggtcatcagcgagctgactgaagacgatacccgccagcaggatgatctgaacagtctggatgaactgcaaacgctggcgattgatgttgattatctcgagcccggtaacgggcctgacggcgatatcgaacatcacaccgaaataacccttccttcctga

SEQ ID NO: 4092 - DNA, 507 bp, Escherichia coli
atggcgactcccttttttcacgttgatgttcagcagcccgccgagatgcgctttaaccgcgcccgtgtccggcgggcgtttgtcacgattgggcagcgtcatatgcgtgatgcccgtcggctggtgatgcgccgtgcgcggtcggcaccgggtgaaaaccccggttatcagaccggacgcctggctcgttcgattggttacatggtgccgagagccagtaaaaagcgagccggttttatgacacgcattgcccctaaccagcgcaacgggaaggggaaccggatgatctctggtgacttctatccggcgtttctgttttttggtgtccggggaggagcaaaacgtcgtcgtagtcatcatcgtggtgcatccggtggcagcggctggcggctggctccacgtaataactttatggtggaaacgcttgaaaagaaccgcagctggacacgctattttctggcgcgagaattacgtaaatcactgaagcctgagcgacgacgcagatga

SEQ ID NO: 4093 - DNA, 411 bp, Escherichia coli
atgaaaattcgtcaggcgcagaccagcgcaacctacattctgccggaccccggtgaactgaataaacgcgtcctgatccgccagcgggtggatatgcccgcggataactttggcgtggagcctcaatacccggttgcgttccggacatgggcgaaggttgtccagaccagtgccaccacctggcaggaaaccgcgcagaccggggacgccatcacccattacatcaccattcgttaccgccgggggatcaccgctgattatgaggtggtctgcggtgacagtgtgtaccgggtgaaacgtcagcgcgatctgaacggggcgcggcgctttctgctgctggagtgtacggaactgggcgaatttacgcagagtcacggaggcagcaatggcgactcccttttttcacgttga

SEQ ID NO: 4094 - DNA, 324 bp, Escherichia coli
atgcttctgacaatggaagagattaaagcccaactccggctggatgaggatttcgatgctgatgaccgccatctgcaactgctggcctgtgcggcgcaaaagcggacggaaacgtatctgaaccggaagctctatgctccggatgaaaccattccggacagcgatccggacgggctgcacctgccggatgatattcgtctggggatgctgatgcttatcagccatttttacgaaaatcgctcgtcggttacagacgttgagaaaatggagttgccaatgagctttaactggcttgtcggcccgtacaggtatttcccgcaatga

SEQ ID NO: 4095 - DNA, 201 bp, Escherichia coli
atgatcctgaaacaagatctgaaatggtcaccggacggtatgcgtgttgaggtcattcgggccggtgagtatgacgacggggcgcttcctgcccgggtgcaggagattgcacttcaggccgggttagcagagcgcggaaccagtgcaaaaagcagtaaagcgacaaaagagaaaaaagccacgaccagtaaagagggctga

SEQ ID NO: 4096 - DNA, 1206 bp, Escherichia coli
atggcggttgatattaaagatgtcgaacaggtcgcgcaggaactgcagcagaagtttgacgacttcaaagcaaagaacgacaagcgcgtggatgcgattgagcaggaaaaaggcaagcttgccgggcaggtggaaaccctgaacgggaaactcagcgagctggaaaatctcaaaagcgaccttgaaaaagagctgcttgagctgaaacgtccggctggtggagcgcaaaataaactggccaccgagcataaagaggcgtttgtgggcttcctgcgtaaaggccgtgaagacggtctgcgcgatctggagcgtaaggcattgcaggtgggtaccgatgaagacggtggctacgccgtgccggaagaactggatcgcaacattcttaacctgctgaaagatgaagtggtgatgcgtcaggaagccacggtgatcaccgttggcggttccgactacaaaaaactggtgaatctgggcggtacggcttccggatgggtgggggaaacggatacgcgatcccagactgccacctccagactggagctgattgaacctctcatgggggaaatttacggcaacccgcaggctacccagaaaatgctggacgatgccttcttcaacgtggaggcctggatcaacagcgagctggcaaccgaatttgccgaacaggaagaaattgcctttacctcaggcgatggcaccaagaagccgaaagggttcctggcgtatgaatccactgatgaaaccgacaaggtccgggcgttcggcaaacttcagcatattgtatccggcgaagcgaccgcggtgaccgcagacgccattatcaaactgatttacacgctgcgtaaggcacaccgcactggcgcgaagttcatgatgaacaacaacagcctgtttgccatccgtctgctgaaagacaccgagggtaactatctgtggcgtcctgggctggaactggggcagccatcctctctggcgggttacggtatcgctgaaaacgagcagatgccggatattgccgcggatgcgaaagccattgcatttggtaacttcaaacggggttacaccatcgttgaccgtatcggtacccgcattcttcgcgatccgtacaccaataaaccgtttgtcggtttttataccaccaagcgcaccggcggcatgctggtcgattcgcaggccatcaaactgctgaagattgctgcggcgtaa

SEQ ID NO: 4097 - DNA, 651 bp, Escherichia coli
atgcagacgaaacaacgtcttgatgtaccgctgagtctgaaatctgtcagtgactccggtgagtttgaagggtatggctccgtctttggtgtaaaggacagccacgatgatgtggtgatgtccggggcatttgctgcttccctgcgggcgtggagtgacagaaaagcgttacctgcgctgctctggcagcaccgcatggatgaacccatcggtgtttacaccgaaatgaaggaagacgatgtcgggctttacgtcaggggacggttgcttattgatgatgatcccctcgcaaaacgcgcacatgcacacatgaaggccggttcgttaaccggcctttctattgggtacgtcctgaaagactgggaatacgaccggagcaaagaagcctttctgctgaaagaaatcgacctctgggaagtcagcctggtgacgttcccgtctaacgacgaggcgcggatcagcgacgtcaagaacgcactggcccgcggggaaatccccgaacagaaaaaaatcgaaagagtcctgcgtgatgtcggactctcccgtacccaggccaaagcattcatggccgggggctatggcgcactgtccctgcgcgacgctgaggatgtgggctctgcactgaatgcactgaaaaatctgaacttctaa

SEQ ID NO: 4098 - DNA, 1242 bp, Escherichia coli
gtgttcttttcgggattatttcaacgaaaaagtgacgcaccggtgaccacgccagcagagctggcggatgccatcgggttgtcctacgacacctataccggaaagcagatcagcagtcagcgggccatgcgactgacggcggttttttcctgcgtcagagtgctggcagagtcggtcgggatgttgccctgcaatctgtatcacctgaacggcagcctgaagcagagagccaccggcgaacgtctgcataaactgatctccacgcatcccaatggctatatgacgccgcaggagttctgggagctggtggtcacctgtctgtgcctgcggggaaacttttacgcctacaaagtgaaagcatttggcgaagtggctgaactgctgcccgtcgatcccggctgtgtggtaccgaagcttaacagtagctgggagccgatctatcaggtcacattcccggatggctccacggatgtactgagccaggaggatatctggcatgtgcgcacgctgacgctggacggactggtggggctgaatcccatcgcctatgcccgcgaggcaatatcgctggcggcagcgaccgaagagcacggggccagactgttcagcaatggcgcggtgacgtcgggtgtgttgcgtacagagcagacgctgtcagatcaggcttatgagcgcctgaagaaagattttgaggagcgtcacaccgggcttggcaatgctcaccgcccgatgatccttgagatggggctggactggaagtcgatggcgctgaacgccgaggacagccagttcctggaaacccgcaagtttcagcttgaagaaatctgtcgtctgttccgggtgccgttgcacatggtgcagaacaccgatcgcgccaccttcaacaatatcgaagagctggggctgggatttatcaactattcactggtgccgtatctgacccgcatcgaacagcggatcaacaccggactggtacgaaaaagtaagcagggcgtttattacgccaaatttaacgccggggcgttactgcgcggggatatgaagtcccgttttgaagcctacgccaccgggatcaactggggaatttactctcccaatgactgccgcgacctggaagatatgaatccgcgtcccggtggtgatgtctatctcacaccgatgaacatgaccacgaaaccctccgatggcagtaaagccggtaagcagaaggataacgccaatgcagacgaaacaacgtcttga

SEQ ID NO: 4099 - DNA, 183 bp, Escherichia coli
atgatcatgctgattctcgcgcctctggtgggcgtgctgggggcgcttttgctggcgtatggtgcctggctgatttatcccccggcggggtttgttgttgccggggcgttgtgcctgttctggtcgtggctggtagcgcgatatctcgatcgtacacagctgtctgttggtggaggtaaatag

SEQ ID NO: 4100 - DNA, 1734 bp, Escherichia coli
atgagccggaaatcttaccccaacgtaaatgctgcaaatcagtatgcccgtgatgtcgtgcgcggaaagattgtggcctgccagtttgtgattcaggcctgccagcgccatcttgatgacctgatggcggaaaaaagtaagtcgtttcgttaccgcttcgacaaggacctggctgaacgggccgcgaaatttattcagctgttgccacacaccaagggggagtgggcattcaagaggatgcccatcacgctggaaccgtggcagctctttgtgatctgctgtgcgtttggctgggtcaataaaggctcccggctgcgccgcttcagggaggtgtataccgaaatcccccgtaagaacggcaaatcggcaatctctgccggtgttgccctgtattgttttgcctgtgataacgagtttggcgcggaagtgtattccggtgccacgacagagaaacaggcgtgggaagtctttcgcccggcgcgactgatgtgtaaacgcacacccatgctgacggaagcgttcgggattgaggttaacgcctcaaacatgaaccgtccggaggatggcgcgcggtttgaaccgctgatcggtaaccccggtgatggttcatcaccccactgtgccgtggtggatgaatatcacgagcacgccaccgatgcgctttataccacgatgcttaccgggatgggcgcgcgacgtcagccactgatgtgggccatcaccaccgccgggtacaacattgaggggccgtgctacgacaagcggcgggaagttatcgagatgctcaacggttcggtacccaacgatgaactgttcgggatcatctataccgttgacgaaggcgatgactggaccgacccgcaggtgctggaaaaagccaatccaaatattggcgtgtcggtttatcgcgaatttttgttaagtcagcagcagcgtgcgaaaaataacgcccgtctggcaaacgtctttaaaacaaaacacctcaatatctgggtgtcggcgcgttcggcgtatttcaacctggtgagctggcagagctgcgaggataaatcactgacccttgagcagttcgaggggcagccgtgcattctggcctttgacctggcgcgtaagctggatatgaacagcatggcgcgactttatacccgcgagattgacggtaaaacgcattactacagtgtggctccgcgcttctgggtaccgtatgacacggtgtacagcgtcgagaaaaatgaagatcgccggacagccgaacgctttcagaaatgggtggaaatgggcgttctgaccgttaccgatggtgcggaggtggattatcgctacatcctcgaggaggccaaagcggcgaacaaaatcagcccggtcagtgagtcacccatcgaccccttcggggcgaccgggttgtcacatgaccttgctgatgaagacctgaatcccgtcactatcattcagaactacaccaacatgtccgacccgatgaaagagctggaagcggcaattgaatcggggcgctttcatcatgatggcaatcccatcatgacctggtgtatcggcaatgtggtcggcaaaaccattccgggtaacgatgatgtggtgaaacccgtcaaagagcaggcggaaaacaaaattgacggtgcagttgcgctgattatggcggttggcagagccatgctgtacgagaaagaagacacgctgtctgaccacattgagtcctatgggatccgctcgctttaa

SEQ ID NO: 4101 - DNA, 495 bp, Escherichia coli
atggctggaacggcggggcgttccgggcgtcgccccaagccaacggcgcgcaaggcgctggccggaaaccccggcaagcgagccctgaacaaagatgaacctgtttttacgcccatcaaaggtgttgagccaccggagtggttcgctgaagaagatctccctctcgccacgatcatgtggcaactgacaaccaaagaactctgcggtcagggcctgctgtgcgtgactgacctcgcggtgcttgagcggtggtgcgtggcctatgagttctggcgacgtgccgtgaaaaatattgccagacagggcaacaccatcaccggtgcaatgggcggcatggtcaaaaatccggagctgaccgccaaaaaagaacaggagtccgagatgagcagtacgggggcaatgctcggactcgaccccagcagccgccagcgtctgattggcctggcggggcagaagaaagccactaacccgtttctgaaaattatcgaatcatga

SEQ ID NO: 4102 - DNA, 351 bp, Escherichia coli
atgccgccacgaacaccaaaagcctgccgcgttcgcggttgccgcaataccactactgacccgtcaggctattgtgaaagccataaaagcgaaggctggaagcaatacaagccaggacaatctcgtcatcagcgcggttatggttcgaagtgggatgttatccgcgtgcgtgtcctgaagcgtgacaaagtcctgtgtcagctatgtctgcgtgctggtgtggtgcgtgaggcgaaaactgttgaccacatcatccctaaagcgcatggcggcactgatgccgactgtaatctgcagagtctgtgctggccgtgtcataaggcgaagacggcccgtgaacggttgaagtga

SEQ ID NO: 4103 - DNA, 276 bp, Escherichia coli
atgggtgcctgcaataatgtttgtggcggtaaacgtgtcgtgatgggattttggtgtctcgaaagcaaaggagacaccaaaatgaactattcaaacattatctgcccaaccaaccgtctgcaggtgaccattctgcatgaaaaagatgtgctgactggtatcggtgatgccatcggcgaattgcacacataccaatgttcacgggagcacgtgtgcagctatagagaaacgacggaatgtattgtaagaaagcgggagattcttcaaaacaggtaa

SEQ ID NO: 4104 - DNA, 123 bp, Escherichia coli
atgcttcgttccaaaagtcagttgactgtaattattactacgtcaccttatgccgaagaccttttccgcttcactttgagcctgattcacttctacctgaccggctcgcctctatctttttaa

SEQ ID NO: 4105 - DNA, 294 bp, Escherichia coli
atgaaaaaaatgttgttttctgccgctctggcaatgcttattacaggatgtgctcaacagacgtttactgttggaaacaaaccgacagcagtaacaccaaaggaaaccatcacccatcatttcttcgtttcgggaattggacaggagaaaactgttgatgcagccaaaatttgtggcggcgcagaaaatgttgttaaaacagaaacccagcaaacattcgtaaatggattgctcggttttattactttaggcatttatactccgctggaagcgcgtgtgtattgctcacaataa

SEQ ID NO: 4106 - DNA, 462 bp, Escherichia coli
atgagcagagtaaccgcgattatctccgctctggttatctgcatcatcgtctgcctgtcatgggctgttaatcattaccgcgataacgccattacctacaaagcccagcgcgacaaaaatgccagagaactgaagctggcgaactcgacaattactgacatgcaggtgcgccagcgtgatgttgctgcgcttgatgcaaaatacacgaaggagttagctgatgcgaaagctgaaaatgatgctctgcgtgatgatgttgccgctggtcgtcgtcggttgcacatcaaagcagtctgtcagtcagtgcgtgaagccaccaccgcctccggcgtggataatgcagcctccccccgactggcagacaccgctgaacgggattatttcaccctcagagagaggctgatcactatgcaaaaacaactggaaggaacccagaagtatattaatgagcagtgcagatag

SEQ ID NO: 4107 - DNA, 477 bp, Escherichia coli
atgcaaaatcttaatcctcagcgtaaagctttcctcgatatgttggcgtggtcagagggaacggataacgggcgacaaccgacacgtaaccacggttatgatgttattgttggtggtgaactgtttactgattactccgatcatcctcgcaaacttgtcacgctaaacccgaaacttaaatcaacagccgccggacgttatcagcttctttcacgctggtgggatgcttaccgtaagcagcttgctctgaaagacttctctccgaaaagccaggacgctgtggcattgcagcagattaaggagcgtggcgctttaccgatgattgatcgcggtgatattcgtcaggcaattgaccgttgcagcaatatctgggcttcactgccgggtgctggttatggtcagttcgagcataaggctgacagcctgattgcaaaattcaaagaagcaggcggaacggtcagagagattgaggtatga

SEQ ID NO: 4108 - DNA, 306 bp, Escherichia coli
atgcacgaaaaagagagccttgccggagcgttctggctcgttttgctgatcatcgcaggttggggcggtctggtccgctatctgatagatgtgaagcagagtaaagcaacgtggagttggataaatgctctggctcagatagtggtatcgggattcaccggtgttattggtggcctgatcagtatcgaaagtggattcagtatttacatgattctcgcgacagcggggattagtggtgcgatgggttcggttgcactgacgtacttctgggaacgactgacaggggtgaaaaatgcaaaatcttaa

SEQ ID NO: 4109 - DNA, 804 bp, Escherichia coli
atgacagaaaaagataacattggtaagttaatttggcatattgcttgcgatgaatctggcattgatggacaacgtttctacggctttggcagtctgtggatgaagtaccaacgccgtggggatttctgtcaactaatcagagaactacgcagaaaacatggtttttttgaagaaataaaatggcaaaaagcccattcaaaaagatactctgaattttatcttgagctgatcgacttattctttagagttccttggctagcttttcattgtatcgtggttgaaaaatcaatagtaaataaggcatttcataatggagattatgacctggcaaggagaaagcacttcacaaatctcattaccacaaaaattagctctgtaatttctgcacaccctgaaagagacagttacttcaggattgaagttgatcctatcgcatctcgttataaaaaggctgatgaagaactaaatgttattgccaataacatattgaatagaaaatttggtcgtaaagggataatcagcagtgtagtgacaaaagactctaaagcatctgaaaacattcagctagccgattttttcttaggtgcggttatgtgcgcatatcaaggaaaagcttcatctgaagccaaaataagagtatcaaattatgttgcttcatatttaggctgggatcacttgcaatatgatacatggcacactgagagaaaatttaatatctggtatttttatgataaaactcgagggccacgagatatagaaactcaaaatgttagcttaaagtatccacttcccaaaaagaaatag

SEQ ID NO: 4110 - DNA, 690 bp, Escherichia coli
atgaatacccaatatttacagtatgtccgcgagcaactcattgtggctaccgctgatttgagcggagcaacgaaaggccagcttgaagcctgtctggagcatgcacaatttgatactggtacatacaaacgaaagaagccgcgcattctggatgaggtaactggcaggatgattacgctggataatccgccgatttccggtaagcagtcgtacgcaaaaggttcatccattgcactggtcagccaggttgagttctcaacctcgtcatggcgccgcgcggttctgtctctcgatgaacatcagaaagcgtggttgctgtggagttacagcgaaagtgttcgctgggagcatcaggttgccataacgcagtgggcatggaacgagtttaaggctctgttaggtacaagaaaaattgccagtaagacactggaacgcttaaagaagttgatctggctggcagcacaggatgtgaagagcgagctggctgggcgtgagacttatgaataccgggaactggcatcactggtgggagtgacatcaaaaaactggtctgagacattcactgaacgctgggttgcaatgaagcacatttttctacagcttgatagcgaagctttattgcttgtaacgagaacacgttcaaaacaaaagaccacattttcacagcaaagtattgcaaaactggattaa

SEQ ID NO: 4111 - DNA, 138 bp, Escherichia coli
atgtttgagtttaatatggcagaacttcttcgccaccgctgggggcgtctgcgcttatatcgtttccccggttctgttttgaccgattaccgaatactgaagaattacgccaaaacactgaaaggagctgccgcatga

SEQ ID NO: 4112 - DNA, 363 bp, Escherichia coli
gtgaatacctacagcatcacattaccctggcctccgagcaataatcgctattaccgccataatcgcgggcgcacgcacgtcagcgcagaggggcaggcataccgcgataacgtcgccagaatcattaaaaacgcaatgctggatatcggcctggctatgcctgtgaaaatccgcattgagtgccacatgccggatcgccgtcgccgtgacctggataatctgcaaaaagccgcttttgacgcactcactaaagcaggtttctggctggatgatgctcaggtcgttgattaccgcgttgtgaagatgcctgttaccaaaggtgggaggctggaactgaccatcaccgaaatggggaatgaatga

SEQ ID NO: 4113 - DNA, 342 bp, Escherichia coli
atggattattcacagttaagtgattttgaaattaacagaatggtaggagacataatttttaaaggcctttgggcaagtaaaccggaaacatcagggaataacaccaacaaatggtattacggaaatgctgatacaacttttgagccattaaatcatttgcctgactactgcaatgatccgagcgcttcatggccgattattgagaaatacaggatttctatcttagaccagttaactgaatggtgtgtggatgcaaaaggcgtaagcccaatatttgataccagacctctccgcgccgccatgattgtctttctcctgatgcaggaggccaataatgcttag

SEQ ID NO: 4114 - DNA, 528 bp, Escherichia coli
atgactatcaaatcaaatacgccagcacacgacaaggactgctggcaaacgccgctttggctttttgatgcactggatattgagtttggattctggctggattcggcagcgagcgacaaaaatgctctgtgcgctcactggttaactgaggccgacgacgcgctaaattctgagtggataagccacggtgcaatctggaataacccaccgtacagcaatatcaggccgtgggtggaaaaagccgctgagcagtgcatacaacagcgacagacggtagttatgcttgtgccagaggatatgtcagtcggatggttcagcaaggctctggagagtgtcgacgaagttcgcattatcactgatggacggattaattttatcgaaccatcgacagggctggagaagaagggaaacagcaaaggctccatgctgctgatttggcgaccgttcatcagtcctcgacggatgtttactaccgtatccaaagcggcattgatggcgatcgggcagggcgtcaggagggcggcatga

SEQ ID NO: 4115 - DNA, 441 bp, Escherichia coli
atgaaaaaactaacctttgaaattcgatctccagcacatcagcaaaacgctattcacgcggtacagcaaattcttccagacccaaccaaaccaatcgtagtaaccattcaggaacgcaaccgcagcttagaccagaaccgaaagctttgggcttgccttggtgacgtctctcgtcaggttgaatggcatggtcgctggctggatgcagaaagctggaagtgtgtgtttaccgcagcattaaagcagcaggatgttgttcctaaccttgccgggaatggctttgtggtaataggccagtcaaccagcaggatgcgtgtaaacgaatttgcggagctattagagcttatacaggcattcggtacagagcgtggcgttaagtggtcagacgaagcgcgactggctctcgaatggaaagcgcgatggggagatcgggctgcatga

SEQ ID NO: 4116 - DNA, 291 bp, Escherichia coli
atgacgggcaaagaggcaattattcattacctggggacgcataatagcttctgtgcgccggacgttgccgcgctaacaggcgcaacagtaaccagcataaatcaggccgcggctaaaatggcacgggcaggtcttctggttatcgaaggtaaggtctggcgaacggtgtattaccggtttgctaccaaggaagaacgggaaggaaagatgagcacgaacctgatttttaaggagtgtcgccagagtgccgcgatgaaacgggtattggcagtatatggagttaaaagatga

SEQ ID NO: 4117 - DNA, 702 bp, Escherichia coli
atgaaaaacatcgccgcacagatggttaactttgaccgtgagcagatgcgtcggatcgccaacaacatgccggaacagtacgacgaaaagccgcaggtacagcaggtagcgcagatcatcaacggtgtgttcagccagttactggcaactttcccggcgagcctggctaaccgtgaccagaacgaagtgaacgaaatccgtcgccagtgggttctggcttttcgggaaaacgggatcaccacgatggaacaggttaacgcaggaatgcgcgtagcccgtcggcagaatcgaccatttctgccatcacccgggcagtttgttgcatggtgccgggaagaagcatccgttaccgccggactgccaaacgtcagcgagctggttgatatggtttacgagtattgccggaagcgaggcctgtatccggatgcggagtcttatccgtggaaatcaaacgcgcactactggctggttaccaacctgtatcagaacatgcgggccaatgcgcttactgatgcggaattacgccgtaaggccgcagatgagcttgtccatatgactgcgagaattaaccgtggtgaggcgatccctgaaccagtaaaacaacttcctgtcatgggcggtagacctctaaatcgtgcacaggctctggcgaagatcgcagaaatcaaagctaagttcggactgaaaggagcaagtgtatga

SEQ ID NO: 4118 - DNA, 900 bp, Escherichia coli
atgacaaatacagcaaaaatactcaacttcggcagaggtaactttgccggacaggagcgtaatgtggcagatctcgatgatggttacgccagactatcaaatatgctgcttgaggcttattcgggcgcagatctgaccaagcgacagtttaaagtgctgcttgccattctgcgtaaaacctatgggtggaataaaccaatggacagaatcaccgattctcaacttagcgagattacaaagttacccgtcaaacggtgcaatgaagccaagttagaactcgtcagaatgaatattatcaagcagcaaggcggcatgtttggaccaaataaaaacatctcagaatggtgcatccctcaaaacgagggaaaatcccctaaaacgagggataaaacatccctcaaattgggggattgctatccctcaaaacagggggacacaaaagacactattacaaaagaaaaaagaaaagattattcgtcagagaattctggcgaatcctctgaccagccagaaaacgacctttctgtggtgaaaccggatgctgcaattcagagcggcagcaagtgggggacagcagaagacctgaccgccgcagagtggatgtttgacatggtgaagactatcgcaccatcagccagaaaaccgaattttgctgggtgggctaacgatatccgcctgatgcgtgaacgtgacggacgtaaccaccgcgacatgtgcgtgctgttccgctgggcatgccaggacaacttctggtccggtaacgtgctgagcccggccaaactccgcgacaagtggacccagctcgaaatcaaccgtaacaagcaacaggcaggcgtgacagccagcaaaccaaaactcgacctgacaaacacagactggatttacggggtggatctatga

SEQ ID NO: 4119 - DNA, 282 bp, Escherichia coli
atgggtactattgcaactaaaagcaagaaagcggctcgcatcgagtcagccttgctgaacaaactggcactgatggggcagaagacattcgctcgagcaatgggggttcctgaatatcaggtaagccgatggaagaatggtttcttctcgcaggtaagcatgatgctggctgttctggaatacggaatcgaagacgatgaaatggctgagctgactaagcggcttgccaattacctgacaaaagaaaaagccccgaagaacggcgaattcttcgaggcctga

SEQ ID NO: 4120 - DNA, 231 bp, Escherichia coli
atggaagaactccgcttgtatctgaactccctttcactggaagagcagagagaatttgccaccaagtgcggaacttctatcggctatttgaggaaagcacttagccgtaatcatgaattgggcgcagcactttgtgttctgattgagaagttcagcaatggtgaagtgactcgcaaagaccttcatccggttgattgggaaagtatctggcctgaattaatggccgcttaa

SEQ ID NO: 4121 - DNA, 570 bp, Escherichia coli
atgctgtatccggaaggaaaaagcggaaaaaaacgcattgctgacgatatgatggaactaattgaaaaatcttttaatctcccacgcggatggatggacatgcttgcagatggtaaagctggagctacagaccatcttgagtttgcgggtaacgttcgtgcgggttttgttccggtaattggtgaagccgttttgggagttgatggctcagtggatatgattgaattcagatccggttggttaagcatctacagcggcgataaagatgcatacggtctgaaggttaagggtgacagcatgtggccaaggattcagtcaggagaatatgttgttattgaaccaaatacgccagtacatccaggtgatgaagtctttgtaaggaccaaagacggtcacaacatgataaagatcatgaacaaaacaagagacggtgattatcagtttagtagcataaacagtgatcaccgcccaatcactcttcctgttgaagaagttgataaaatgcattttgtttcagctattgtgaaacacaccaggtacgtagaccaggacgatctgccaaaagtttga

SEQ ID NO: 4122 - DNA, 324 bp, Escherichia coli
atggatgcacaaacacgccgccgcgaacgtcgcgcagagaaacaggctcaatggaaagcagcaaatcccctgttggttggggtaagcgcaaaaccagttaaccgccctattctctcgctgaatcgcaaaccgaaatcacgagtagaaagcgcactgaatccgatagaccttacagtgctggctgaataccacgaacagattgaaagcaacctgcaacgtattgagcgcaagaatcagcgcacatggtacagcaagcctggcgaacgcggcataacatgcagtggacgccagaaaattaagggaaaatcgattcctcttacctag

SEQ ID NO: 4123 - DNA, 540 bp, Escherichia coli
atggatccactcgttattctcggacgagtgttcagtaatgaacctctggagagaaccatgtatatgatcgttatctgggttggacttctgcttttaagcccagataactggcctgaatatgttaatgagagaatcggtattcctcatgtgtggcatgttttcgtctttgctcttgcattttcgctagcaattaatgtgcatcgattatcagctattgccagcgccagatataagcgatttaagctaagaaaacgcattaagatgcaaaacgataaagtgcaatcggtaattcaaaaccttacagaagagcaatctatggttttgtgcgcagcccttaatgaaggcaggaagtatgtggttacatcaaaacaattcccatacattagtgagttgattgagcttggtgtgttgaacaaaactttttcccgatggaacgggaagcatatattattccctattgaggatatttactggactgaattagttgccagctatgatccatataatattgagataaagccaaggccaatatctaagtaa

SEQ ID NO: 4124 - DNA, 369 bp, Escherichia coli
atgtcaaacatcaaaaaatacatcattgattacgactggaaagcatcaatagaaattgaaatcgaccatgacgtaatgacagaggaaaaacttcaccagattaataatttctggtcagactctgaataccgactcaataaacacggctctgtattaaatgctgtattaatcatgctggcgcaacatgctctgcttatagcaatttcgaaagacttaaatgcatatggtgttgtttgtgagttcgactgggatgatggaaatggtcaggaaggatggcctccaatggatggtagtgaaggaataagaattaccgatatcgatacatcaggaatatttgattcagatgatatgactatcaaggccgcctga

SEQ ID NO: 4125 - DNA, 165 bp, Escherichia coli
atgcaatatgccattgcagggtggcctgttgctggctgcccttccgaatctttacttgaacgaatcacccgtaaattacgtgacggatggaaacgccttatcgacatacttaatcagccaggagtcccaaagaatggatcaaacacttatggctatccagactaa

SEQ ID NO: 4126 - DNA, 144 bp, Escherichia coli
atggatcaaacacttatggctatccagactaaattcactatcgccacttttattggcgatgaaaagatgtttcgtgaagccgtcgacgcttataaaaaatggatattaatgctgaaactgagatcaagcaaaagcattcactaa

SEQ ID NO: 4127 - DNA, 297 bp, Escherichia coli
atgaacgcttattacattcaggatcgtcttgaggctcagagctgggcgcgtcactaccagcagatcgcccgagaagagaaagaggcagaactggcagacgacatggaaaaaggcctgccccagcacctgtttgaatcgctatgcatcgatcatttgcaacgccacggggccagcaaaaaagccattacccgtgcgtttgatgacgatgttgagtttcaggagcgcatggcagaacacatccggtacatggttgaaaccattgctcaccaccaggttgatattgattcagaggtataa

SEQ ID NO: 4128 - DNA, 786 bp, Escherichia coli
atgagtacagcactcgcaacgctggctgggaagctggctgaacgagtcggcatggattctgtcgacccacaggaactgatcaccactcttcgccagacggcatttaaaggtgatgccagcgatgcgcagttcatcgcattgctgatcgtcgccaaccagtacggtcttaatccgtggacgaaagaaatttacgccttccctgataagcagaacggcattgttccggtggtgggcgttgatggctggtcccgcatcatcaatgaaaaccagcagtttgatggcatggactttgagcaggacaatgaatcctgtacatgccggatttaccgcaaggaccgtaatcatccgatctgcgttaccgaatggatggatgaatgccgccgcgaaccattcaaaacccgcgaaggcagagaaatcacggggccgtggcagtcgcatcccaaacggatgttacggcataaagccatgattcagtgtgcccgtctggccttcggatttgctggtatctatgacaaggatgaagccgagcgcattgtcgaaaatactgcatacactgcagaacgtcagccagaacgcgacatcactccggttaacgatgaaaccatgcaggagattaacactctgctgatcgccctggataaaacatgggatgacgacttattgccgctctgttcccagatatttcgccgcgacattcgcgcatcgtcagaactgacacaggccgaagcagtgaaagctcttggattcctgaaacagaaagccactgagcagaaggtggcagcatga

SEQ ID NO: 4129 - DNA, 681 bp, Escherichia coli
atgataccggacattatcctgcagcgtaccgggatcgacgtgagagctgtcgaacagggggatgatgcatggcacaaattacggctcggcgtcatcaccgcttcagaagttcacaacgtgatagcaaagccccgctcaggaaagaagtggcctgacatgaaaatgtcctacttccacaccctgctggctgaggtttgcaccggtgtggctccggaagttaatgctaaggcgctggcctggggaaaacagtacgagaacgacgccagaaccctgtttgaattcacttccggcgtgaatgttactgaatccccgatcatctatcgcgacgaaagtatgcgcaccgcctgctctcccgatggtttatgcagtgacggcaatggccttgagctgaaatgcccgtttacctcccgggatttcatgaagttccggctcggtggtttcgaggccataaagtcggcttacatggcccaggtgcagtacagcatgtgggtgacacgaaaagatgcctggtactttgccaactatgacccgcgtatgaagcgtgaaggactgcattatgtcgtggttgagcgggatgaaaagtacatggagagttttgacgagatggtgccggagttcatcgaaaaaatggacgaggcactggctgaaattggttttgtatttggggagcaatggcgatga

SEQ ID NO: 4130 - DNA, 183 bp, Escherichia coli
atgacgcatcctcacgataatatccgggtaggcgcgatcactttcgtctactccgttacaaagcgaggctgggtatttcccggcctttctgttatcagaaatccactgaaagcacagcggctggctgagaagataaataataaacgggaggcggtatgcacaaagcatctcctgttgagttaa

SEQ ID NO: 4131 - DNA, 192 bp, Escherichia coli
atgcacaaagcatctcctgttgagttaagaacgagtattgagatggcacatagccttgctcaaattggagtcaggtttgtgccaataccagtagaaacagacgaagaatttcatacgttagccacatccctttcacaaaagctggaaatgatggtggcgaaagcagaagcagatgagagagaccaggtatga

SEQ ID NO: 4132 - DNA, 219 bp, Escherichia coli
atggcagacatcattgattcagcatcagaaatcgaagaattacagcgcaatacagcaataaaaatgcgtcgtcagaactaccagactgtatccgcaactcattgttgtgagtgtggcgatccgatagatgagcgaagacgcctggctgttcagggttgtcggacttgtgcaagttgccaggaggagatcgaacttaagaacaaacaatggggactgtga

SEQ ID NO: 4133 - DNA, 279 bp, Escherichia coli
atgttcagaataatttttcctaacacctggtacgtcgaccaccacggcactccctgcaaaatcctgcgttctacccacaacaaagttcactacatccgaaaaggcagaacatgtatcgccagcatgttccgctttaatcatgactttgaacctgtgaataaagctgatgcagatcggatagtagaagagatcgaaacggcagaacacattaagaagttacgtgacatgcgttcaaaaagcagaggtaaccatggaatcatacagcctcacactcgatga

SEQ ID NO: 4134 - DNA, 1164 bp, Escherichia coli
atgtcactcttccgcagaagtgaaatatggtacgccagtttcacattgccgaacggtaaaagatttaaacagtctcttggaacaaaggacaaaaggcaggcgacagagctccatgacaagctaaaggctgaagcatggcgggtcagcaaacttggtgaaatacctgatatgacgtttgaggaagcgtgtgtcaggtggctcgaagagaaagcacataagaaatcactggacgatgacaaaagccggatcggattctggcttcaacatttcgcagggatgcaactaagagacatcactgaatcaaaaatttattcagcgatgcagaaaatgacaaaccggcgtcatgaggaaaactggaaactcagggcagaagcatgcagaaaaaaagggaaacctgttccagaatacacgccaaaaccaacgtccgttgcaacgaaggctacgcatctttcatttataaaggccctgctaagagccgcagagcgtgaatggaaaatgctggataaggcaccaattattaaagtgcctcaaccaaagaataaacggatccgctggctggagccccatgaagcacaaaggctgattgatgaatgtccggagccattaaagtctgttgttgaatttgcactggcaacaggcttaagacgctcgaacatcatcaaccttgaatggcaacaaatagatatgcagcgccgggtggcatggataaacccggaagagagtaaatcaaaccgcgcaattggcgttgcgctgaatgatactgcatgtcgcgtattgaaaaaacaaatcgggaatcatcaccgttgggtatttgtgtacaaggaaagctgtaccaaaccagacggaacgaaagcgccaacagtaaggaagatgcggtatgacgcaaacacagcctggaaagcggcgctgagacgggctggtattgatgatttcagatttcacgacttgagacacacctgggcaagttggctggttcaagccggagtcccgttgtcagtgttacaggaaatgggaggttgggagtctatcgaaatggttcgtcgatatgctcaccttgcacctaatcaccttaccgaacacgcacggcaaatagactcgatcctgaacccatcggtcccaaatttgtcccagtcaaaaaataaggaaggtactaatgatgtgtaa

SEQ ID NO: 4135 - DNA, 1254 bp, Escherichia coli
atgctggaacaaatgggcattgccgcgaagcaagcctcgtataaattagcgcaactctccagccgcgaaaaaaatcgtgtgctggaaaaaatcgccgatgaactggaagcacaaagcgaaagtatcctcaacgctaacgcgcaggatgttgcagacgcgcgtgccaatggccttagcgaagcgatgcttgaccgtctggcactgacgcccgcacggctgaaaggcattgccgatgatgtgcgccaggtgtgcaacctcgccgatccggtggggcaggtaatcgatggcggcgtactggacagcggcctgcgtcttgagcgtcgtcgcgtaccgctgggggttattggcgtgatttatgaagcgcgcccgaacgtgacggttgatgtcgcttcgctgtgcctgaaaacaggtaacgcagtgatcctgcgcggcggcaaagaaacgtgtcgcactaacgctgcaacggtggcggtgattcaggacgccctgaactcttgtggcttaccggcgggtgccgtgcaggcgattgataatcctgaccgtgcgctggtcagtgaaatgctgcgtatggataaatacatcgacatgctgatcccgcgcggcggggctggtttgcataaactgtgccgcgagcagtcgacgatcccggtgatcactggtggtataggcgtatgccatatttacgttgatgaaagtgcagagatcgctgaagcattaaaagtgatcgtcaacgcgaaaactcagcgtccgagcacatgtaatacggtagaaacgttgctggtgaataaaaacatcgccgatagcttcctgcccgcattaagcaaacaaatggcggaaagcggcgtgacattacacgcagatgcagctgcgctgacacagttgcaggcaggccccgcgaaggtggtggctgttaaagcggaagagtatgacgatgagtttctgtcattagatttgaacgtcaaaatcgttagcgatctggatgacgccatcgcccatattcgtgaacacggcacacaacactccgatgcgatcctgacccgcgatatgcgcaacgcccagcgttttgttaacgaagtggattcgtccgctgtttacgttaacgcctctacgcgttttaccgacggcggccagtttggtctgggtgcggaagtggcggtaagcacacaaaaactccacgcgcgtggcccaatggggctggaagcactgaccacttataagtggatcggcattggtgattacaccattcgtgcgtaa

SEQ ID NO: 4136 - DNA, 1104 bp, Escherichia coli
atgagtgacagccagacgctggtggtaaaactcggcaccagtgtgctaacaggcggatcgcgccgcctgaaccgtgcccatatcgttgaacttgttcgccagtgcgcgcagttacatgccgccgggcatcggattgttattgtgacgtcgggtgcgattgccgccggacgtgagcacctggggtacccggaattgccagcgactatcgcttcaaaacagctgctggcggcggtagggcagagtcgactgattcaactgtgggaacagctgttttcaatttacggcattcatgtcgggcagatgttgctgacccgtgctgatatggaagatcgtgaacgcttcctgaacgcccgtgataccctgcgtgcgttgctcgataacaatatcgttccggtaattaatgagaacgatgctgtcgctactgcagagattaaggtcggtgataacgataacctttctgcgctggcggcgattctggcgggtgccgataaactgttgctgctgaccgatcaaaaaggtttgtataccgctgacccgcgcagcaatccgcaggcagaactgattaaagatgtgtacggcattgatgacgcactgcgcgcgattgccggtgatagcgtttcaggcctcggaactggcggcatgagcaccaaattgcaggccgcggacgtggcttgccgtgcgggtatcgacaccattattgccgcgggcagcaagccgggcgttattggtgatgtgatggaaggcatttccgtcggtacgctgttccatgcccaggcgactccgcttgaaaaccgtaaacgctggattttcggtgcgccgcctgcgggtgaaatcacggtagatgaaggggcaactgccgccattctggaacgcggcagctccctgttgccgaaaggcattaaaagcgtgactggcaatttctcgcgtggtgaagtcatccgtatttgcaacctcgaaggtcgcgatatcgcccacggcgtcagtcgttacaacagcgatgcattacgccgtattgccggacaccactcgcaagaaattgatgcaatactgggatatgaatacggcccggttgccgttcaccgtgatgacatgattacccgttaa

SEQ ID NO: 4137 - DNA, 1056 bp, Escherichia coli
atgaaaaagagcactctggcattagtggtgatgggcattgtggcatctgtatccgtacaggccgcagaaatatataacaaagacggtaataaactggatgtctatggcaaagttaaagccatgcattatatgagtgataatgacagtaaagatggcgaccagagttatatccgttttggttttaaaggcgaaacacaaattaacgatcaactgactggttatggtcgttgggaagctgagtttgccggtaataaagcggagagtgatactgcacagcaaaaaacgcgtctcgcttttgccgggttgaaatataaagatttgggttctttcgattatggtcgtaacctgggcgcgttgtatgacgtggaagcctggaccgatatgttcccggaatttggtggcgactcctcggcgcagaccgacaactttatgaccaaacgcgccagcggtctggcgacgtatcggaacaccgacttcttcggcgttatcgatggcctgaacttaaccctgcaatatcaagggaaaaacgaaaaccgcgacgttaaaaagcaaaacggcgatggcttcggcacgtcattgacatatgactttggtggcagcgatttcgccatcagtggagcctataccaactctgatcgcaccaacgagcagaacctgcaaagccgtggcacaggcaagcgtgcagaagcatgggcaacaggtctgaaatacgatgccaataatatttatctggcaactttctattctgaaacacgtaaaatgacgccaatctctggcggctttgccaataagacgcagaactttgaagcggtcgctcaataccagtttgactttggtctgcgtccatcgctgggttatgtcttatcgaaagggaaagatattgagggcatcggtgatgaagatctggtcaattatgtcgatgttggtgctacgtattatttcaacaaaaatatgtcagcgtttgttgattataaaattaatcagctggatagcgataataagctgaatatcaacaatgatgatattgtcgcggttgggatgacgtatcagttttaa

SEQ ID NO: 4138 - DNA, 402 bp, Escherichia coli
atgacgttaccgagtggacacccgaagagcagattgatcaaaaaatttaccgcactaggcccgtatattcgtgaaggtaagtgcgaagataatcgattctttttcgattgtctggctgtatgcgtcaacgtgaaaccggcaccggaagtgcgtgagttctggggctggtggatggaactggaagcgcaggaatcccgttttacctacagttaccagtttggtctgttcgataaagcaggcgactggacgagtgttcagataaaagatgccgaagtggttgaacgactggagcacaccctgcgtgaatttcacgagaagctgcgtgagctgctggcgacgctgaatctgaagctggaaccggcagatgattttcgtgatgaaccggtgaagttaacggcgtga

SEQ ID NO: 4139 - DNA, 1245 bp, Escherichia coli
atgacacaggcaaacctgagcgaaaccctgttcaaaccccgctttaaacatcctgaaacctcgacgctagtccgccgctttagtcacggcgcacaactgcctgtgcagtcggcccttgatggtaaaaccatccctcactggtatcgcatgattaaccgtctgatgtggatctggcgcggcattgacccacgtgaaatcctcgatgtccaggcgcgtattgtgatgagcgatgccgaacgtaccgacgatgatttatacgatacggtgattggctaccgcggcggcaactggatttatgagtgggctacccaggcgatggtgtggcaacaaaaagcctgtgcggaagaagatccgcaactcagcggtcgacactggctgcatgcggctacgttgtacaacattgctgcctatcctcatctgaaaggagatgacctggccgagcaagcgcaggctttgtcaaaccgcgcctatgaagaggccgctcagcgtctgccgggcacgatgcggcagatggagtttaccgtacccggcggtgcgcccatcaccggctttttgcatatgccgaaaggcgatggcccgttcccgacagtattaatgtgtggtggtctggatgcgatgcagacggactattacagcctgtatgaacgttattttgcgccgcgcggcattgctatgctgactattgatatgccgtcggtgggcttttcttcaaaatggaagctcacccaggactccagcctgttgcatcagcacgttttaaaggcgctgcctaacgtaccgtgggtggatcacactcgcgtcgcggcctttggtttccgtttcggcgctaacgttgccgtgcgtctggcataccttgaatcgccgcgtctgaaagtggttgcctgtcttggtccggtagttcataccctgttgagtgattttaagtgccagcaacaggtgccggaaatgtatcttgacgttctggccagtcgtttagggatgcatgatgcttccgatgaagcgttgcgagtggagttgaatcgctattcattaaaagtgcaaggattgctgggacgtcgctgcccaacgccaatgttatcaggctactggaagaacgatccgttcagcccggaagaggactcacgcttaatcacgtcgtcatctgctgacggtaaattattagagatcccatttaacccggtgtatcggaattttgacaaaggccttcaggaaatcacagactggatcgaaaaacggttgtgttaa

SEQ ID NO: 4140 - DNA, 459 bp, Escherichia coli
atgagcgaaaaatacatcgtcacctgggacatgttgcagatccatgcacgtaaactcgcaagccgactgatgccttctgaacaatggaaaggcattattgccgtaagccgtggcggtctggtaccgggtgcgttactggcgcgtgaactgggtattcgtcatgtcgataccgtttgtatttccagctacgatcacgacaaccagcgcgagcttaaagtgctgaaacgcgcagaaggcgatggcgaaggcttcatcgttattgatgacctggtagataccggtggtactgcggttgcgattcgtgaaatgtatccaaaagcgcactttgtcaccatcttcgcaaaaccggccggtcgtccgctggttgatgattatgttgttgatattccgcaaaatacctggatcgaacagccgtgggatatgggcgtcgtattcgtcccgccaatctccggtcgctaa

SEQ ID NO: 4141 - DNA, 1458 bp, Escherichia coli
gtgtctgaactgtctcaattatctccacagccgctgtgggatatttttgccaaaatctgttctattcctcacccgtcctatcatgaagagcaactcgctgaatacattgttggttgggcaaaagagaaaggtttccatgtcgaacgcgatcaggtaggtaatatcctgattcgtaaacctgctaccgcaggtatggaaaatcgtaaaccggtcgtcttgcaggcccacctcgatatggtgccgcaaaaaaataacgacaccgtgcatgacttcactaaagatcctatccagccttatattgatggcgaatgggttaaagcacgcggcaccacgctgggtgcggataacggcattggtatggcctctgcactggcggttctggctgacgaaaacgtggttcacggcccgctggaagtgctgctgaccatgaccgaagaagccggtatggacggtgcttttggcttacagagcaactggttgcaggctgatattctgattaacaccgactccgaagaagaaggtgaaatctacatgggttgtgcgggaggtatcgacttcacctccaacctgcatttagatcgtgaagcggttccagctggttttgaaaccttcaagttaaccttaaaaggtctgaaaggcggtcactccggcggtgaaatccacgttggcctgggtaatgccaacaaactgttggtgcgcttcctggcgggtcatgcagaagaactggacctgcgtcttattgatttcaacggcggcacactgcgtaacgccatcccgcgtgaagcctttgcgaccattgctgtcgcagctgataaagtcgacgccctgaaatctctggtggatacctatcaggagatcctgaaaaacgaactggcagagaaagagaaaaatctggcattgctgctggactctgttgcgaacgataaagctgccctgattgcgaaatctcgcgatacctttattcgtctgctgaacgccaccccgaacggtgtgatccgcaactccgacgtggcaaaaggtgtggtcgaaacctccctgaacgtcggtgtggtgaccatgaccgacaataacgtagaaattcactgcctgatccgttctctgatcgacagcggtaaagactacgtagtgagcatgctggattcgctgggtaaactggcaggtgcgaaaaccgaagcaaaaggcgcatatcctggctggcagccggacgctaactctccggtaatgcatctggtacgtgaaacctatcagcgtctgttcaacaaaacgccgaacatccagattatccacgcgggcctcgaatgtggcctgttcaaaaaaccgtatccggaaatggacatggtgtctatcgggccaaccatcaccggtccacactccccggatgagcaagttcatatcgaaagcgttggccattactggacactgctgactgaactgctgaaagaaattccggcgaagtaa

SEQ ID NO: 4142 - DNA, 615 bp, Escherichia coli
atgatcttgctacaactctcctctgctcaggggccggaagaatgttgtctcgcagtgagaaaagcactggacaggctgattaaagaagctacccgacaggacgtcgcggtaacggtgctggaaacagaaacgggtcgctactctgacacactgcgttcggcgctgatttctctggatggcgataacgcatgggctctaagcgaaagctggtgcggcactattcagtggatttgtccgagtccgtatcggcctcatcatgggcgcaaaaactggtttctgggcattgggcgttttaccgctgatgagcaggaacaatcggatgcaatccgttatgagacgctgcgttcgtcggggccgggcggtcaacatgtcaataaaaccgactcggcggtacgcgccacgcatctggcatccggtattagcgtgaaggttcagtcagagcgcagtcagcatgctaacaaacggctggcgcgattactgattgcctggaagctggaacaacagcaacaggaaaatagcgcggcgctgaaatcgcagcggcgaatgttccatcaccagattgaacgtggcaacccgcgacgaacgtttacagggatggcttttatcgaaggataa

SEQ ID NO: 4143 - DNA, 1140 bp, Escherichia coli
atgggcaaatatattcgtcccttatccgatgcggtatttaccatcgcatctgatgacctgtggatcgagagtttagcgatccaacaattacacaccacggcaaatttacccaacatgcagcgcgttgtggggatgccagatttacatcccggacgcggctacccgattggcgcagcgttcttctctgttggtcgtttttacccggcactggtcggcaatgatatcggctgcggcatggcgctatggcaaacagatattctcgctcgcaaatacaacgccgataagtttgaaaagcgattatcagatctggatgacgttgctgaagaaagctggctggaggaaaacctgccgtcagcatttgcacagcatccgtggcacaactcgcttggctccatcggtggcggtaaccacttcgcagaactgcaacagattgatcaaattatcgacgcggaactgtttgcactggctggtctggatgcgcagcatctgcaactgctggttcatagcggctcgaggggattggggcagtctattttacagcggcatattgcctcgttttcgcatcatggtttgcctgaaggcagtgacgacgcgctacggtatattgcggaacatgacgatgcgctggcgtttgcgcgtattaatcgccagctgatcgctttgcgcataatgcaacaagttaaggccaccggaagtccggttctggatgtggcgcataactttgttagcgcgtgccaaatcggcgatcaacagggctggttgcatcgtaaaggcgccacgccggatgacaacggtctggtgattattcccggttcacgcggcgattactcctggctggttaaacctgttgcgaacgaaaaaacgctccactcgctggcgcatggggcggggcgtaaatgggggcgcaccgagtgtaaagggcgtctggcagcgaaatacacggcgacgcaactctcgcggactgaacttggcagtcgggtaatttgtcgcgataaacaactcatctttgaagaagcgccacaagcctataaatcggctgaaagcgtggtgcaatgtctggtgctggctgggttaattattcctgtcgcgcgactgcgcccggtgctgacgctcaaaaacagtggagggaaaaaaggatga

SEQ ID NO: 4144 - DNA, 375 bp, Escherichia coli
atgacggcgagtcagcactattctccacagcaaattgccgcctgggcgcagattgacgaatctcgctggaaggagaaactcgcgaaatcacaagtgcgggttgcagttattaatgcacaaccggttggttttattacccgcattggacattatatcgatatgttatttgttgaaccggaatacacccgacgcggagttgccagcgctttgttaaaaccattgattaagtctgaatccgaacttacggtggacgccagcataaccgcaaaacccttttttgaacgttatggttttcagacagttaagcagcagcgcgttgaatgccggggaacgtggtttactaatttttatatgcgatataaaccgcaacattaa

SEQ ID NO: 4145 - DNA, 1056 bp, Escherichia coli
atgcgtaaaatcattcatgtggatatggactgctttttcgcagcggtggagatgcgcgacaatcccgccctgcgcgatatccctattgctattggcggcagccgcgaacgacggggggtaatcagcaccgccaattatcccgcgcgtaaatttggcgtacgtagcgctatgccgacagggatggcgctcaaattatgcccgcatctcaccttgcttccagggcgctttgacgcctacaaagaagcctcaaatcatatccgcgaaattttctcgcgctatacctcgcgcattgaaccgttatcactggatgaagcctatctcgatgtcaccgatagcgtccattgccacggttctgcgaccctcatcgcccaggaaatccgccagacgatcttcaacgagctgcaactgacggcgtctgcgggcgttgcgccggtcaagtttctcgccaaaatcgcctccgacatgaataaacccaacggtcagtttgtgattactccggctgaggttccggcatttctgcaaaccttaccgctggcaaaaattcccggcgtcggcaaagtctcagcggctaaactggaagcgatggggctacgaacctgcggtgatgtgcaaaagtgtgatctggtgactctgctcaaacgttttggcaaatttggccgcattttgtgggagcgtagtcagggcattgacgagcgcgacgttaacagcgaaaggttgcgaaaatccgtcggtgtagaacgtacgatggcggaagatattcatcactggtctgaatgtgaagcgatcatcgagcggctttaccctgaactggagcgtcgtttggcaaaggtaaaacctgatttgctgattgcccgccagggggtgaaattaaagttcgacgattttcagcaaaccacccaggaacacgtctggccgcggctgaataaatctgatctaatcgccaccgcgcgtaaaacctgggatgaacgccgcggcgggcgcggtgtgcgactggtggggctgcatgtgacgttgctggacccgcaaatggaaagacaactggtgctgggattatga

SEQ ID NO: 4146 - DNA, 687 bp, Escherichia coli
ttgtcgccgttaaataaaatcagcccgtctcatctgccaaaacctgccaccgtggcggtgccggaagagacggagaaaaaagcgcgcgacgtcaacgagaaaacggcgctgttgaagaagaaatccgccaccgagcttggcgagctggcgaccagtatcaataccatcgcccgtgatgcgcatatggaagcgaatctggagatggagattgttccccagggattacgcgtgctgattaaagacgaccagaaccgcaatatgtttgaacgcggcagcgcgaagattatgccgttctttaaaactttgctggtggagcttgcgccagtgttcgactcgctcgataacaaaattattattaccgggcataccgatgcgatggcctacaaaaacaatatctacaacaactggaacctttcgggcgatcgcgcgctttcggctcgtcgggtgctggaagaggccggaatgccggaaaataaagtgatgcaggtaagcgcaatggcggaccagatgctgctggatgccaaaaatccgcaaagcgcgggcaaccggcgcattgagattatggtgctgaccaaaagtgcgtccgatacgctgtatcaatactttggtcagcatggggataaagtggtgcagccgctggtgcaaaagctggataagcagcaggtgctttcgcagcgagcgcgttaa

SEQ ID NO: 4147 - DNA, 1740 bp, Escherichia coli
atgctttcacgctcggatttactgacgctgttgacaatcaactttatcgtcgtcaccaagggggccgagcgtatttccgaggtttctgcccgctttaccctggacgcgatgcccggcaaacagatggcgattgacgccgaccttaacgccgggttgatcaatcaggcgcaggcgcagacccggcgtaaagatgtcgccagcgaggccgatttctacggcgcaatggacggggcatcaaaatttgtgcgcggggacgccatcgccgggatgatgattctggcaatcaacctgatcggcggcgtctgtatcggcatcttcaaatacaacctgagcgccgacgccgccttccagcaatatgtgctgatgactatcggcgatgggctggtggcgcaaatcccttccctgctgctctccaccgcggcggcgattatcgtcacccgcgtcagcgataacggtgatatcgcccatgacgtgcgtaatcagttgctggcaagcccgtcggttctctacaccgccactggaattatgttcgtgctggcggtggtgccgggaatgccgcatttcccgttcctgatgttcagcgccctgcttggttttaccggctggcggatgagcaagcgcccgcaagcggcggaggcggaagagaaaagcctcgaaacgctaacccgtacgatgacagaaaccagcgagcaacaggtcagttgggaaactattccgctgatcgaacctatcagtttaagcctcggctacaaactggtggcgctggtggataaagcgcagggcaacccgctcacccagcgtattcgcggcgtacgtcaggtgatttccgacggcaacggcgtgctgctgccggagatccgtattcgggaaaacttccgcctcaagcccagccagtacgctattttcatcaacggcattaaggctgatgaagcggatattccggcggataaactgatggccctgccctccagcgaaacctacggcgagatagacggcgtgctggggaacgacccggcgtacgggatgccggtcacctggattcagcccgcgcagaaagcgaaggcgctgaatatggggtatcaggtgatcgacagcgccagcgtaattgccacccatgtgaataagattgtgcgcagctatattccttatttatttaactatgacgatattactcagctgcataaccgtttgtcgtcgatggcaccgcgactggcggaagatttgagcgcggcgctcaattacagccagttgctgaaagtgtaccgggcgctactgactgaaggcgtttccctgcgcgatatcgtcaccatcgccaccgtgttggtcgccagtagtgcggtgactaaagatcatattctgctggcggccgatgtgcgcctggcgctgcggcgcagcattacccatccgttcgttcgcaagcaggagctgacggtgtatacgctgaataatgagctggaaaatctgctgaccaacatggtgaatcaggcgcaacaggccggcaaagtgatgctcgatagcgtgccggtggacccgaatatgctcaaccagtttcagatcacgatgccgcaggtgaaggagcagatgaaagcggcggggaaagatccggtgctgctggtgccgccgcagctgcgccctttgctggcgcgctacgcaaggttgtttgcaccagggctgcatgtgctgtcgtataacgaagtgccggatgagctggagttgaagataatgggggcgttgatgtag

SEQ ID NO: 4148 - DNA, 498 bp, Escherichia coli
atgtctgaatatcgtcgttattacatcaaggggggaacctggtttttcacggtaaatttacagaatcgtcgaaaccaacttttgaccacccagtttcagacgctccgtaacgttattattaaagttaagcgagacagaccttttgaaattaacgcttgggtagttttgccggagcatatgcattgcatatggacattacctgaaggcgatgatgatttttcctcgcgctggcgggaaattaaaaagcaatttacccatgcttgtggattgaaaaatatctggcaaccacgtttttgggaacatgctatccgcaataccaaagactatcgccatcatgttgattatatttatataaatccagtaaaacatggttgggtaaaacaagtgagtgattggccattctcaacgtttcaccgcgatgttgcgaaagggttatatcccatcgattgggcgggagacgtaacggattttagtgctggggagcgtatcattttatag

SEQ ID NO: 4149 - DNA, 759 bp, Escherichia coli
atgtccttcatgacttcgttcttgcacggcagatttctgcatccaggcgtgttttcgttatgcgttttgctccctttactcgccagcgccaccacatcacatatctcttttagctacgccgcccgccagcggatgcaaaaccgtgcgcgtttattaaaacagtaccaaacccatctgaaaaagcaggccagctatattgtggaaggcaatgccaaaagcagaagggcgctgcgccagcataatcgggagcagataaaacagcatccagaatggtttcctgcgccgctcaaggcgagtgacagacgctggcaggcgttggtggagaataatcatttcttaagcagcgaccatctacataacatcaccgaagtggcgattcaccgcctggagcagcagctaggtaagccttatatctgggggggcacgcggcctgataaaggcttcgactgtagcgggttggttttttatgcctacaacaagatccttgaggctaagctcccgcgcacggccaatgagatgtaccactaccgtcgggcaacgattgtggcgaataacgacctgcgccggggagatttgctgtttttccatatccacagtcgtgagatagccgaccatatgggcgtatatcttggagacggtcagtttatcgagtcaccgcgcaccggggaaaccattcgggtaagtcggttagccgaacctttctggcaggaccattttttaggcgcgcgacggattttgacggaagagacgattttgtag

SEQ ID NO: 4150 - DNA, 741 bp, Escherichia coli
atgcgtaaaatcgcattaattcttgcgatgttgttgatcccgtgcgtttcgtttgccggtttgctgggcagcagtagctcgaccacgccagtgagcaaagagtataagcagcagttgatgggatcccctgtctacatccagatcttcaaggaagaacgtacgctcgatctctacgtcaaaatgggcgagcaatatcaactgctcgacagctataaaatctgtaaatattccggcggcttggggccaaaacagcgtcagggcgatttcaaaagcccggaagggttttatagcgtccagcgtaatcagttaaaaccagacagccgttactacaaagcgattaatattggattcccaaacgcctatgaccgtgcgcatggttatgaagggaaatacctgatgattcacggcgattgtgtttccatcggctgctacgcgatgaccaatcagggtattgatgagatcttccagttcgttactggtgcgctggtgtttggtcagccgagcgtgcaagtgagtatttatccgttccgcatgaccgacgccaatatgaagcgccataaatattccaactttaaggacttctgggagcaactgaagccgggctacgactactttgagcaaacccgtaagccaccgaccgtttctgtggtcaatggccgttacgtggtcagcaagccgttaagccacgaagttgtgcagccacaactggcatcaaactacacgctccccgaggcaaaataa

SEQ ID NO: 4151 - DNA, 768 bp, Escherichia coli
atgtgcgaattgctcgggatgagtgccaacgtccctaccgatatctgctttagtttcaccggacttgtacagcgtggtggtggaaccgggccacataaagatggctggggcattaccttttacgaaggtaaaggctgtcgcacatttaaagatccgcaacccagctttaattcccccatcgccaaacttgtccaggactacccgataaaatcctgttcggtggtggctcatattcgccaggctaatcggggcgaggtggcgctggaaaatactcacccatttacccgcgagttatgggggcgtaactggacttatgcccataacggacaactgacgggctacaaatcactggaaaccggcaacttccgcccggtcggtgaaaccgatagcgaaaaagccttttgctggctcctgcataaattaacgcagcgttacccgcgcacaccgggcaacatgacggcagtgtttaaatatatcgcctcactggcggatgaactgcggcagaagggcgttttcaatatgctgctttcggacgggcgctatgtgatggcgtattgctcgactaatttacactggatcacccgccgcgcgccgtttggcgtggcaacgttgctggatcaggatgtggaaatcgacttcagctcgcagaccacaccgaatgatgtggtcacggtgattgcgacacagccgctgacgggcaatgaaacctggcaaaagattatgccaggcgaatggcgcttattttgcctcggggagcgtgtagtttga

SEQ ID NO: 4152 - DNA, 579 bp, Escherichia coli
atgtaccaggatcttattcgtaatgaactgaacgaagcggcggaaacgctggctaactttttaaaagatgacgccaatattcacgccattcagcgcgcggcggtcctgttagcagacagctttaaagccggtggcaaagtgctttcctgtggcaacggcggctcccattgcgacgccatgcactttgccgaagagttgaccggtcgctaccgtgaaaaccgtccgggctacccggcgattgccatttctgacgttagtcatatttcctgcgtcggtaacgattttggtttcaatgatattttctcccgttacgttgaagcggtaggtcgcgaaggcgatgtactgctggggatctccacttccggtaactctgcaaacgtgatcaaagcgatcgcggcggcgcgtgagaaggggatgaaagtgatcaccctgaccggtaaagacggcggcaaaatggctggcacggcggatattgaaattcgcgttccgcactttggttatgccgaccgcattcaggagatccacattaaagtgatccatatcctgatccagttaattgaaaaagagatggttaagtaa

SEQ ID NO: 4153 - DNA, 2445 bp, Escherichia coli
atgatgattttgagtattctcgctacggttgtcctgctcagcgcattgttctatcaccgcgtgagcttatttatcagcagtctgattttgctcgcctggacagccgccctcggcgttgctggtctgtggtcggcgtgggtactggtgcctctggccattatcctcgtgccatttaactttgcgcctatgcgtaagtcgatgatttccgcgccggtatttcgcggtttccgtaaggtgatgccgccgatgtcgcgcactgagaaagaagcgatcgacgcaggcaccacatggtgggaaggcgatttgttccagggcaagccggactggaaaaagctgcataactatccgcagccgcgcctgaccgcagaagagcaagcgtttctcgacggcccggtagaagaagcctgccggatggcgaatgatttccagattactcatgagctggcggatctgccgccggagttgtgggcgtaccttaaagagcatcgtttcttcgcgatgatcatcaaaaaagagtacggcgggctggagttctcggcttatgcccagtctcgcgtgctgcaaaaactctccggcgtgagcgggatcctggcgattaccgtcggcgtgccaaactcattaggtccgggcgagctgctgcaacattacggcactgacgagcagaaagatcactatctgccgcgtctggcgcgtggtcaggagatcccttgctttgcactgaccagcccggaagcgggttccgatgcaggcgctatcccggataccgggattgtctgcatgggtgaatggcagggccagcaggtgctgggaatgcgtctgacctggaacaaacgctacattacgctggcaccgattgcgaccgtgcttgggctggcgtttaaactctccgacccggaaaaactgctgggtggcgcagaagatttaggtattacctgtgcgctgatcccgaccaccacgccgggcgtggaaattggtcgtcgccacttcccgctgaacgtaccgttccagaacggaccgacgcgaggtaaagatgtgttcgtgccgatcgattacatcatcggcgggccgaaaatggccgggcaaggctggcggatgctggtggagtgtctctcggtaggccgcggcatcaccctgccttccaactcaaccggcggcgtgaaatcggtggcgctggcaacgggcgcgtatgcgcatattcgtcgtcagttcaaaatctctattggtaagatggaagggattgaagagccgctggcgcgtattgccggaaacgcttatgtaatggatgctgcggcatcgctgattacctacggcattatgctcggtgaaaaacctgccgtgctgtcggctatcgttaagtatcactgtacccaccgcgggcagcagtcgattattgatgcgatggatatcactggtggcaaaggcattatgctcgggcagagcaacttcctggcgcgtgcttatcagggcgcgccgattgccatcaccgttgaaggggctaacattctgacccgcagcatgatgatcttcggacaaggagcgattcgttgccatccgtacgtgctggaagagatggaagcggcgaagaacaatgacgtcaacgcgttcgataaactcctgtttaaacatatcggtcacgtcggtagcaacaaagttcgcagcttctggctgggcctgacgcgcggtttaaccagcagcacgccaaccggcgatgccactaaacgctactatcagcacctgaaccgcctgagcgccaacctcgccctgctttctgatgcctcgatggctgtgctgggcggcagcctgaaacgtcgcgagcgtatctcggcacgtctgggggatattttaagccagctttacctcgcctctgccgttctgaagcgttatgacgacgaaggccgtaatgaagccgatctgccgctggtgcactggggcgtacaggatgcgctgtatcaggcagaacaggcgatggacgatttactgcaaaacttcccgaaccgcgtggttgccgggctgctgaatgtggtgatcttcccgaccggacgtcattatctggcaccttctgacaagctggatcataaggtggcgaagattttacaagtgccgaacgccacccgttcccgcattggtcgcggtcagtacctgacgccgagcgagcataacccggttggtttactggaagaggcgctagtggatgtgattgccgccgacccgattcatcagcggatctgtaaagagctgggtaaaaacctgccgtttacccgtctggatgaactggcgcacaacgcgctggcgaaggtgctgattgataaagatgaagccgctattctggtgaaagctgaagaaagccgtctgcgcagtattaacgttgatgactttgatccggaagagctggcgacgaagccggtaaagttgccggagaaagtgcggaaagttgaagccgcgtaa

SEQ ID NO: 4154 - DNA, 447 bp, Escherichia coli
atgtttaaggcaataacgacagtcgccgctctggtcatcgccaccagtgcaatggcgcaggatgatttaaccattagcagtcttgcaaagggcgaaaccaccaaagcggcgtttaatcagatggtgcaagggcataagctgcctgcctgggtgatgaaaggcggtacttatactcccgcacaaaccgtgacattgggagatgagacgtatcaggtgatgagcgcgtgcaaaccgcatgactgtggctcgcaacgtatcgctgtgatgtggtccgagaaatctaatcagatgacggggctgttctcgaccattgatgagaaaacgtcgcaagagaaactcacctggttgaatgtgaacgatgcgctttctattgatggtaaaacggtgctgttcgcggcgttgaccggcagcctggaaaaccatccggatggctttaattttaaataa

SEQ ID NO: 4155 - DNA, 771 bp, Escherichia coli
gtgcctggtttgaagattacgcttttgcagcaaccactggtgtggatggatggtcctgccaacctgcgccattttgatcgtcaactggaaggtattaccgggcgcgatgtgatcgttctaccggagatgtttaccagcggctttgccatggaagcggcagcttcgtcgctagcacaagatgacgtagtgaactggatgaccgctaaagcgcagcagtgcaatgcgctgattgcaggcagtgttgcattacaaacggagtctggttcggttaaccgctttttgctggttgagccgggcggcacggtacatttttatgataagcgtcatctgttccgcatggcagatgagcatctacattataaagcgggcaatgcgcgagtgattgtggaatggcgcggctggcgtattttgccgctggtgtgctacgacttacgttttccggtgtggtcgcgcaatctcaacgattatgacctcgccctgtacgtcgccaactggcctgctccgcgctctctgcactggcaggcattgctgacagcccgcgcgattgagaatcaagcgtatgtggcgggatgcaatcgcgtcggcagcgatggcaacggctgccattatcgcggtgacagccgggtgattaatccgcaaggcgagattatcgctactgccgacgcgcatcaggcaacgcgcattgatgcggagctgtcgatgatggcattgcgggaatatagagaaaagtttccggcatggcgggatgcggatgagtttaggttgtggtga

SEQ ID NO: 4156 - DNA, 489 bp, Escherichia coli
atgttaaaaatgagtttatacgtaataatattgttattttcccttcagtttagtgcagccattactggcaaggaaagtgaggttgtttcaccattattaatggatgttaatccttcactaacaatggaaaatatttctgaattatccacatcatcggaaccatcgcaacagggggtatttcctgtaatatgtactcgacttcatcctggctccgtaatgaaacgtcagttattaaccggctgggggcctgtttttataattggtgatgatcctttttctctgcgctggatgagtgaacatctggagatccttaaatcgctaaatgcccttggtttggttgttaatgttgaatcagtagaacgaatggaggtattacagcagcgggctgatgggttattgttattgccagttatctgcgataattttgtgcaagctctgcaattaaatgcttatccggtattaatcacagagatggaaatatcacaatga

SEQ ID NO: 4157 - DNA, 504 bp, Escherichia coli
atggtagatattgtcgaggccgataaaacggatatttatttcattcaggagagtgtttatggcaaaatcgggttgccagcttttggtaatacaataggaccatccgcacagcaagttgttaaaaaggtattcgctgtcgttaaagaacgagataagacacatgcaaaacagagattattgttggaatataatggtaacaaactctggatgaatgctattgatggcagtgaagctatcctaccaacagaattttctaagcgatacgaactttcattattcaatactactaattttggagaagatccttttcctgatgttaatttatataataatatgaaatcaagtttttttgtaaggtttggtggaacatcccatcccgaggcttgggctatttataatgcaagtacgaaagaggttaaatatatagaaactgcaagagaaattgataaaatattcagtgattttaacttgagtggtacattgccaattcacattggtcaatga

SEQ ID NO: 4158 - DNA, 486 bp, Escherichia coli
atgcgtgactgccattcctcagatgataaagatgtcattgcaattgatggaaaaacgcttcggcactcttatgacaagagtcgccgcaagggagcgatttatgtcattaaaatccgtcttcatattatttgcgatgtccctgatgaacttattgatttcacgtttgaatggaaagagctgaagaaattatgcatggcagtctcctttcgttcaataataacagaacaaaagaaagagccagaaatgacggacagatattatagcatttctgctgatttaaccgcagagaagttcgccacagcgaaccgaaatcactggtacgtggagaataagctgcactggcatctggacgtggtaatgaataaagacgactgcaaaataagaagaggaaatgcagcagaattattttcagggatacggaagatcgctattaatattttaacgaaagataagatactcaaggcaggggcaagatgtaagatgtga

SEQ ID NO: 4159 - DNA, 180 bp, Escherichia coli
atggaacttaaaaaattgatggaacatatttctattattcccgattacaggcaagcctggaaagtggaacataaattgccagatattctatctgttaactatttgcgccgttatttctggtgcataatgctgggaagatatagaggatttggggaaacacagctcgattttttgaagtga

SEQ ID NO: 4160 - DNA, 291 bp, Escherichia coli
atgggcatagtgtttacaaaccataatattgatttgttatcggttgaatttgatgagattacaaaaaattgtaattacacttttagtgtagatggagagacggctatctttactgctagaatatcaataataagaaatataaagggaattaaatatagcgaagaacttgataaatttataatgtcaataatgccattgcagcctaaagtatcaaaaattttgggaggtgttacttgggattgtatttgtggtaaggaagttggatttcctgtgagattaattggtaagtga

SEQ ID NO: 4161 - DNA, 1440 bp, Escherichia coli
atgggtaactatcatatcggggatggtgaatgtagatttagagtcgtgtgttcttcaccagatgtatgtgaagtaggaggttacaaggttccttttgacagttaccagactttagatagtgaaagacagtacagttcaacggtatgggcgcgtggatgcagagctttaaatgttggttcagtgattgctggaactcaaagtaatgccggtaaaggtgtcatatccggtacatctcaaggaacgggtgactgtgttattttaacgggaagtccgactgtaacaatagaagggaaacctgttgcttatcatggttcagttgttgggattaataaccacaactgccttggtaaattgtataccaaaataaaatcaccaatgatttctgtcattgatagaacttttaattatgaaaggactgctgaagtaatacacgatttactgcttctgaaggatctcctctctgttggtaatatttttgacggagatatttcacctgaggttaaaaatgatttatttcaaataaaagatcctgaccaatcatggggggagtttttttcaataaagaatatcagagaatctctcaggaatggtattgaaggagataaatctcagatcagagaatggtttggagagaacacacttactcaaatggggaatggagcaatcaccactttacatggtgtggcggatttagccttagttacattcgatgctctgttagatacggcaacggcaacggttgcttgcccgataggcgaagatgggttatgtgaacaggcaaatataaatttaaatgaaaaagaacaggctttatttaatattagtaattcattgataaatgggcaagcatgggatgcacttaaaaaaatgataatggatacaaataatggtgatcagattgctctggagcattttgccagctttttatggggctttatgatacccgcaaaaataccagaagaaaatatctctgggaaagtatttgtagagccagtagttttagaaggtggtgctggtggcaattggacagtatttgatgaggttttagattcaaatgtaataaagcaattgactttaacaggctgtggagcggcctgtggggaaatgttgcttagggataggtatatttttgtcacgcaaaatgtaattggaacagaattaacatctatgacgtcgctggcaaacaagcttaataaatttgatgtcggctgggaagggaatgcagtgagcgaatctagtttatatgccctcagtaatactggttcatggggagcaatgatgtgggattctggaagtaaagtagggcattgggtacttgttaagggtgttgatgatgctgggaatgtgataatatatgatccatatcaagggagtcgatatctgatgactgaacaggaatttaaggaggtatggaatgggcatagtgtttacaaaccataa

SEQ ID NO: 4162 - DNA, 1047 bp, Escherichia coli
atgatagaaatgaaaaataacacgccatttcctttgttgtcatttgaaaaatatggtcgttatggtcttttgtttgatgttattgctattaaaatgtcattgcgaattaaaaatggattttatgctgatcttgctgagtttcaaaaagaattgtccatgtctgatgaatactatggggagtctgaaacaagtagtctaaaatctgaaacagacttagttctttgtaaaagaaatacagatattcacgtgacaggtagtgctcatgccccttcaggggataagtttcagtggaaggcttgtgtgagggttaatagtttttctaaagaactgagtttatctggtgtccgctacttacaatatgagcgaaatcgttggcagatgagcttaccagataaaattattaatgttcctctacgctatgagcttgcttacggtggtatttggcaaccagatggtatggagaaattggttttttcagcaaaccctgtaggttgtggatattatcctgatatttctcaacttaatacaagttgtcaatataaactcccacaaataaccagctctgctttgtcagaaaacgctaccatttttaatggggaatctgacttttttcaaggtgttggccctgtatctcgatggtggaaaagtcgcctccagtatgcaggaacctacaatgaagtatggcgtgaaaagcgctatccctatttgccggatgattttgatgagcggttctacaatagtgctcatccggatatgatatacacggggtttctctctggcgatgaaaacatctctcttgaaggtttttttaaatttgaacaggttgttaagacaaaattgccaggtatacgacctgtacttatattaaaaaccaagcataatacatcacatatgttcttacctgttgcggatacaatggttatcgatttaagtcgacaggaaatataccttacctggagattaacaatacctgatttttttggaatgaaagaaggagtgctgagttgtattattcctgaatgtatagggaaaaaatattatgggtaa

SEQ ID NO: 4163 - DNA, 645 bp, Escherichia coli
atggggcggacgtaccatgaagataaccgctccccgggtgacctgccggggacgaagacgcagatgacgatacggtcgaagacctataaaggaagcggctttaatgaactgcggtttgaagacgccacgggcggtgaacaggtctatatccacgcgcagaagaacatggatacggaggtgctgaataatcggacgacggatgtgaaggctgaccacacggagaccattggtaacgaccagaagataacggtggggttgggccagacggtgaatgtggggagcaaaaaggaaggtggtcatgaccagaaagtgacggtagcgaacgatcagcatctcacgataaaaaatgaccggcacaaggttgtaaataacaaccagacaagcaaggtgacgggaactgataccgaagaagtcgtcaaaaaacagagtattaaaataggtgataattacgaactgaaagttgagcatggtacaaatatcatatctggggacagtattgagctaatttgtgggcagggagagagcgggacttgttccataaaactggagaaaacaggaaagataataatacgggggacggagtttctatttgaggctaccggtcctgtagatattaaaggaaaagatattcatctgaacggatag

SEQ ID NO: 4164 - DNA, 1539 bp, Escherichia coli
atgcaacagcaaaaaccgctggaaggcgcacaactggtcattatgacgattgcgctgtcactggcgacattcatgcaggtgctggactccaccattgctaacgtggcgatccccactatcgccgggaatctgggctcatcgctcagccagggaacgtgggtgatcacttctttcggggtggcgaatgccatctcgatcccgcttaccggctggctggcaaagcgcatcggggaagtgaaattgttcctctggtcaaccatcgcctttgctattgcgtcgtgggcgtgtggtgtctccagcagcctgaatatgctgatcttcttccgcgtgattcaggggattgtcgccgggccgctgatcccgctttcgcaaagtctattgctgaataactacccgccagccaaacgctcgatcgcgctggcgttgtggtcgatgacggtgattgttgcgccaatttgcggcccgatcctcggcggttatatcagtgataattaccactggggctggatattcttcatcaacgtgccgattggcgtggcggtggtgttgatgacactgcaaactctgcgcggacgtgaaacccgcaccgaacggcggcggattgatgccgtggggctggcactgctggttattggtatcggcagcctgcagattatgctcgaccgcggtaaagagctggactggttctcatcacaggaaattatcatcctcaccgtggtggcggtggtggctatctgcttcctgattgtctgggagctgaccgacgataacccgatagtcgatctgtcgttgtttaagtcgcgcaacttcaccatcggctgcttgtgtatcagcctcgcgtatatgctctacttcggcgcgattgttctgctgccgcagttgttgcaggaggtctacggttacacggcgacgtgggcagggctggcctctgcgccggtagggattattccggtgatcctgtcgccgattatcggccgctttgcgcataaactggatatgcgccgactggtaaccttcagctttattatgtatgccgtctgcttctactggcgtgcctatacctttgaaccgggtatggattttggcgcgtcggcctggccacagtttatccagggttttgcggtggcctgcttctttatgccgctgaccaccattacgctgtccggtttgccaccggaacgactggcggcggcatcaagcctctccaactttacgcgaacgctggcggggtctatcggcacgtcgataaccacgaccatgtggaccaaccgcgagtcgatgcaccatgcgcagttgactgagtcggtaaacccgttcaacccgaatgctcaggcgatgtacagtcaactggaagggcttggtatgacgcaacagcaggcatcaggctggattgcccagcagataaccaatcaggggctgattatttccgccaatgagatcttctggatgtcagccgggatattcctcgtcctgctggggctggtgtggtttgctaaaccgccatttggcgcaggtggcggcggaggtggtgcgcactaa

SEQ ID NO: 4165 - DNA, 1173 bp, Escherichia coli
atgagcgcaaatgcggagactcaaaccccgcagcaaccggtaaagaagagcggcaaacgtaagcgtctgctcctccttctcaccttgctctttataattattgccgtagcgatagggatttattggtttttggtactgcgtcatttcgaagaaaccgatgacgcatacgtggcagggaatcagattcaaattatgtctcaggtgtctggcagcgtgacgaaagtctgggccgataacaccgattttgtaaaagaaggcgacgtgctggtcactctcgacccgacagatgctcgccaggcatttgaaaaagccaaaactgcactggcttccagcgttcgccaaacccaccagctgatgattaacagcaaacagttgcaggcgaatattgaggtgcaaaaaatcgccctcgcgaaagcacaaagcgactacaaccgccgtgtgccgctgggcaatgccaacctgattggtcgcgaagagctgcaacacgcccgcgacgccgtcaccagtgcccaggcgcaactggacgtcgctattcaacaatacaatgccaatcaggcgatgattctggggacgaaactggaagatcagcctgccgtacaacaggctgccaccgaagtacgtaacgcctggctggcgctggagcgtacccgtattgtcagtccgatgaccggttatgtctcccgccgcgcggtacagcctggggcgcaaattagcccaacgacgccgctgatggcggtcgttccagccaccaatatgtgggtggatgccaactttaaagagacgcagattgccaatatgcgtatcggtcagccggtcaccatcaccaccgatatttacggcgatgatgtgaaatacaccggtaaagtggttggtctggatatgggcacaggtagcgcgttctcactgcttccggcgcaaaacgccaccggtaactggatcaaagtcgttcagcgtctgcctgtgcgtattgaactggaccagaaacagctggagcaatacccgctgcgtatcggtttatccacgctggtgagtgtcaataccactaaccgtgacggtcaggtactggcaaataaagtacgttccacaccggtcgcggtaagcaccgcgcgtgaaatcagcctggcacctgtcaataaactgatcgacgatatcgtaaaagctaacgctggctaa

SEQ ID NO: 4166 - DNA, 531 bp, Escherichia coli
atggatagttcgtttacgcccattgaacaaatgctaaaatttcgcgccagccgccacgaagattttccttatcaggagatccttctgacccgtctttgcatgcatatgcaaagcaagctgctggaaaaccgcaataaaatgctgaaggctcaggggattaacgagacgttgtttatggcgttgattacgctggagtctcaggaaaaccacagtattcagccttctgaattgagttgtgctcttggatcatcccgtaccaacgcgacgcgtattgccgatgaactggaaaaacgcggttggatcgaacgtcgtgaaagcgataacgatcgccgctgtctgcatctgcaattaacggaaaaaggtcacgagtttttgcgcgaggttttaccgccgcagcataactgcctgcatcaactctggtccgcgctcagcacaacagaaaaagaccagctcgagcaaatcacccgcaaattgctctcccgtctcgaccagatggaacaggacggtgtggttctcgaagcgatgagctaa

SEQ ID NO: 4167 - DNA, 336 bp, Escherichia coli
atgagctatgaggttctgctgcttgggttactggttggcgcggcgaattattgcttccgctatctgccgctgcgcctgcgtgtgggtaatgcccgcccaaccaaacgtggcgcggtaggtattttgctcgacaccattggcatcgcctcgatatgcgctctgctggttgtctctaccgcaccagaagtgatgcacgatacacgccgtttcgtgcccacactggtcggcttcgcggtactgggtgccagtttctataaaacacgcagcattatcatcccaacactgcttagtgcgctggcctatgggctcgcctggaaagtgatggcgattatataa

SEQ ID NO: 4168 - DNA, 738 bp, Escherichia coli
atggaaagccctactccacagcctgctcctggttcggcgaccttcatggaaggatgcaaagacagtttaccgattgttattagttatattccggtggcctttgcgttcggtctgaatgcgacccgtctgggattctctcctctcgaaagcgtttttttctcctgcatcatttatgcaggcgcgagccagttcgtcattaccgcgatgctggcagccgggagtagtttgtgggttgctgcactgaccgtcatggcaatggatgttcgccatgttttgtatggcccgtcactgcgtagccgtattattcagcgtctgcaaaaatcgaaaaccgccctgtgggcgtttggcctgacggatgaggtttttgccgccgcaaccgcaaaactggtacgcaataatcgccgctggagcgaaaactggatgatcggcattgccttcagttcatggtcatcgtgggtatttggtacggtaataggggcattctccggcagcggctttctgcaaggttatcccgccgttgaagcagcattaggttttatgcttccggcactctttatgagtttcctgctcgcctctttccagcgcaaacaatctctttgcgttaccgcagcgttagttggtgcccttgcaggcgtaacgctattttctattcccgtcgccattctggcaggcattgtctgtggctgcctcactgcgttaatccaggcattctggcaaggagcgcccgatgagctatga

SEQ ID NO: 4169 - DNA, 1185 bp, Escherichia coli
atgactaaacctaatcatgagcttagcccggcgctgatcgtgctgatgtctatcgccaccggtctggcggtagccagtaactattacgcccagccattgctcgacaccatcgcgcgtaacttttccctttccgccagttcggcaggctttattgttaccgccgcacagttgggctatgccgcaggtctgctgtttcttgttcccctcggtgatatgtttgaacgccgccgcctgattgtctcgatgaccttactggcagcaggcggcatgttaatcactgccagcagtcagtcgctggcgatgatgatcctcggtacagcattaaccggtttattttcagtcgtggcacaaattctggttccactggcagcgacactggcttcaccggacaaacgcggcaaagtggttggcaccattatgagcggtctgctattggggatcttactcgcacggaccgttgccggattgctggcgaatctcggcggctggcgcaccgtcttttgggttgcttcgatgttaatggcactgatggcgctggcattatggcgtggtctgccacaaatgaaatcagaaacccacctcaactacccacagttgttgggttccgttttcagcatgtttatcagcaataagatcctgcgcacccgcgcgttgctgggctgcctgacctttgccaacttcagcattctctggacctcaatggcctttttgcttgccgctccaccttttaactacagcgatggtgtaattggtctgtttgggcttgcgggagctgccggagcgttgggcgctcgtccggcgggcggttttgccgataagggcaaatcgcaccacaccacaactttcggtctgctgctgctgttactttcatggctggcaatctggtttggtcacacttccgtactggcgctgattatcggcatcctggtgctggacctcaccgtgcagggcgtgcatatcactaaccagacggtaatttatcgaatacaccctgatgcgcgtaatcgcctgaccgcaggttacatgaccagctactttattggcggtgccgccggttcgctaatttcagcctcagcctggcaacatggcggttgggctggcgtgtgtctggctggcgcgacgattgccctggttaacttactggtctggtggcgaggttttcatcgtcaggaagccgcaaattaa

SEQ ID NO: 4170 - DNA, 993 bp, Escherichia coli
atgcgacatagcgtactttttgcgacagcgtttgccacgcttatctctacacaaacttttgctgccgacctgccgggcaaaggcattactgttaatccagttcaaagcaccatcaccgaagaaaccttccagacactgctggtaagtcgtgcgctggagaaattaggttataccgtcaataaacccagcgaagtggattacaacgttggctacacctcgcttgcttccggcgatgcaaccttcaccgcagtgaactggacgccactgcatgacaacatgtacgaagctgccggtggcgataagaaattttatcgtgaaggagtatttgttaacggcgcggcacagggttacctgatcgataagaaaactgccgaccagtataaaattaccaacatcgcgcaacttaaagatccgaagatcgccaaactgttcgataccaacggcgacggtaaagcggatttaaccggctgtaacccaggctggggctgcgaaggtgcgatcaaccaccagcttgccgcgtatggactgaccaataccgtgacgcataatcaggggaactacgcagcgatgatggctgacaccatcagtcgttacaaagagggtaagccggtgttttactacacctggacgccgtactgggtgagtaacgaactgaaaccggggaaagatgtggtctggttgcaggtgccgttctccgcactgccgggcgataaaaatgccgataccaaactgccgaatggcgcgaattacggcttcccggtcagtaccatgcatatcgttgccaacaaagcctgggccgagaaaaacccggcagcagcgaaactgtttgccattatgcagttaccagtggctgatattaacgcccagaacgccatcatgcatgacggcaaagcctcagaagacgatattcagggccacgttgatggttggatcaaagcccaccagcagcagttcgatggctgggtgaatgaagcgctggcagcgcagaagtaa

SEQ ID NO: 4171 - DNA, 1065 bp, Escherichia coli
atggctgatcaaaataatccgtgggataccacgccagcggcggacagtgctgcacaatccgcagacgcctggggtacaccggcgactgcaccgactgacggcggtggcgctgactggctgaccagtacgcctgcgccaaacgtcgagcattttaatattctcgatccgttccataaaacgctgatcccgctcgacagttgggtcactgaagggatcgactgggtcgttacccattttcgtcccgtctttcagggcgtgcgcgttccggttgattacatcctcaacggtttccagcaattgctgctgggtatgcccgcgccggtggcgattatcgttttcgctctcatcgcctggcagatttccggggtcggaatgggcgtggcgacgctggtttcgctaattgccatcggcgcaatcggtgcctggtcacaggcaatggttaccctggcgctggtgttaacagccctgctgttctgtatcgtcataggtttgccgttggggatctggctggcgagaagtccgcgagcggcgaaaattattcgtccactgcttgatgccatgcagaccacgcccgcgtttgtttatctggtgccaatcgtcatgctgtttggtatcggcaacgtgccaggcgtggtggtgacgatcatctttgcgctgccgccgattatccgtctgacgattctgggaattaaccaggttccggcggatctgattgaagcctcgcgctcattcggtgccagcccgcgccagatgctgttcaaagttcagttaccgctggcgatgccaaccattatggcgggcgttaaccagacgctgatgctggccctttctatggtggtcatcgcctcgatgattgccgtcggcgggctgggtcagatggtacttcgcggtatcggtcgtctggatatggggcttgccaccgttggcggcgtcgggattgtgatcctcgccattatcctcgaccgcctgacgcaggccgttgggcgcgactcacgcagtcgcggcaatcgtcgctggtacaccactggccctgtcggtctgctgacccgcccattcattaagtaa

SEQ ID NO: 4172 - DNA, 1203 bp, Escherichia coli
atggcaattaaattagaaattaaaaatctttataaaatatttggtgagcatccacagcgagctttcaaatatatcgaacaaggactttcaaaagaacaaattctggaaaaaactgggctatcgcttggcgtaaaagacgccagtctggccattgaagaaggcgagatatttgtcatcatgggattatccggttcgggtaaatccacaatggtacgccttctcaatcgcctgattgaacccacccgcgggcaagtgctgattgatggtgtggatattgccaaaatatccgacgccgaactccgtgaggtgcgcagaaaaaagattgcgatggtcttccagtcctttgccttaatgccgcatatgaccgtgctggacaatactgcattcggtatggaattggccggaattaatgccgaagaacgccgggaaaaagcccttgatgcactgcgtcaggtcgggctggaaaattatgcccacagctacccggatgaactctctggcgggatgcgtcaacgtgtgggattagcccgcgcgttagcgattaatccggatatattattaatggacgaagccttctcggcgctcgatccattaattcgcaccgagatgcaggatgagctggtaaaattacaggcgaaacatcagcgcaccattgtctttatttcccacgatctcgatgaagctatgcgtattggtgaccgaattgccattatgcaaaatggtgaagtggtgcaggttggtacaccggatgaaattcttaataatccggcgaatgattatgtccgaaccttcttccgtggcgtcgatattagccaggtgttcagtgcgaaagatattgcccgtcgtacaccgaacggcttaattcgtaaaacccccggcttcggcccgcgttcggcactgaaattattgcaggatgaagatcgcgaatatggctacgtcatcgaacgcggtaataagtttgtcggcgctgtgtctatcgattcgcttaaagccgcgttaacgcagcagcaaggtcttgatgcagcgctgattgatgcgccgttagcggtcgatgcacaaacgcctcttagcgaattgctctctcatgtcggacaggcaccctgtgcggtgcccgtggtcgacgaggaccaacagtatgtcggcatcatttcgaaaggaatgctgctgcgcgctttagatcgtgagggggtaaataatggctga

SEQ ID NO: 4173 - DNA, 960 bp, Escherichia coli
atgaaactctcacgtatcagcgccatcaactggaacaagatatctgacgataaagatctggaggtgtggaatcgcctgaccagcaatttctggctaccagaaaaggtgccactgtcgaacgatattcctgcatggcagacattaagtgtcgtagaacaacaactaacaatgcgcgtttttactggcctgacgctgctcgacacgctgcaaaatgttatcggcgcgccctcgctgatgcccgatgcactcaccccccatgaagaggcggtattatcaaatatcagctttatggaagcggttcatgcccgctcttacagttcaattttctcgacgctgtgccagaccaaagatgtcgatgccgcctacgcctggagtgaagaaaacgcaccgttgcagcgaaaagctcagattattcagcaacattatcgcggggatgatccgctgaaaaagaaaatcgccagtgtgtttcttgaatcttttttgttctattccggtttctggctgccgatgtatttttccagccgcggaaagctaaccaataccgcagacctgatccgtctgattatccgggatgaagcagtccacggttattacatcggctataaatatcagaaaaacatggaaaagatctcccaggcacaacgtgaagagttgaagagtttcgccttcgatttgttgctggaactttatgacaacgagttgcaatacaccgatgagctgtacgccgaaaccccgtgggctgacgatgtgaaagcgtttctctgttacaacgccaataaggcgttgatgaatctgggctacgaaccgttatttcccgcagaaatggcggaagtgaatccggcaatcctcgccgcgctttcgccgaatgccgatgaaaatcacgatttcttttccggttcaggctcttcatatgtgatgggaaaagcggtcgaaacagaagatgaagactggaatttctga

SEQ ID NO: 4174 - DNA, 2145 bp, Escherichia coli
ttggcaacgacaaccgcagaacgcctgacgcaggaaacgatggattatcacgctctgaatgcgatgcttaacctttacgatagcgcaggtcgcattcagttcgataaagacagccaggcagtagacgcctttatgacgacgcatgtgcgtccgaacagtgtggccttcagtagccagcagcagcgcctgaactggctggttaacgaaggttactatgatgaaagtgtccttaatcgctactctcgcgattttgtcattacgctgtttgcccacgcgcacgccagcggttttcgtttccagacattcctaggagcatggaagttttacaccagctatacgttgaagacattcgacggtaagcgttatctggaagattttgccgatcgcgtcacgatggtggcgctgacgctggcacaaggcgatgaaacactggcgacgcagctcactgatgagatgctgtcaggacgctttcagccagccacgccaacattcctcaactgcggtaagcagcagcgcggcgaactggtttcctgttttctgctgcgtattgaagacaatatggagtcgattggccgggcagtgaattccgcactacaactgtcgaaacgcggcggcggcgtagcatttttgctgtcgaatctgcgggaagcgggcgcgccaattaaacgtattgaaaatcaatcttctggcgtgattccggtgatgaaaatgctggaagacgcatttacctatgccaaccaactcggcgcgcgtcagggggctggggcagtctatttacatgctcatcatcccgatattctgcgttttctcgatacaaaacgggaaaatgccgacgaaaaaatccgcattaaaacactgtcgctgggcgtggtgatcccggatatcactttccatctggcaaaagagaatgcgcagatggcgctgttttcgccttatgacgtagagcgagtttatggcaagccatttgccgatgtcgccatcagtgaacactatgacgaactggttgccgatgaacgcatccgcaaaaaatacctcaacgcccgtgatttcttccagcgactggcagaaatccagtttgagtccggctatccgtacatcatgtatgaagacacggttaaccgtgctaaccctatcgccgggcgcataaatatgagcaatctctgctcagaaattttgcaggttaacagcgcctcagaatatgacgagaatctcgactatgctcgtacaggacatgatatttcctgcaatctagggtcgttgaatattgcccacaccatggattcccccgactttgcccgcacggtagagactgccgtacgcggtttaacggcggtgtcagatatgagtcatatccgcagcgtgccgtccatcgaagccggaaatgccgcctcacacgccatcggtctggggcagatgaatttacacggttatctggcacgagaaggcatcgcttatgggtcgccggaagcactggatttcaccaatctctatttctataccatcacctggcacgcactgcgtacctcgatgttgctggcgcgcgaacgcggtgaaaccttcgccgggttcaaacagtcacgctatgccagtggtgaatatttcagccaatatctgcaaggtaactggcagccgaaaacggcgaaagttggcgaactgtttgcccgtagcggtattacgttacctacccgtgagatgtgggcacagctgcgcgacgacgtgatgcgctatggtatctacaaccagaatctccaggcggtgccgccaaccggttctatctcttatatcaaccatgccacgtcgagtattcatccgattgtggcgaaagtagagatacgcaaagagggcaaaacaggacgcgtttactaccctgccccgtttatgactaacgaaaatctggcgctgtatcaggacgcttacgaaatcggcgcagaaaagatcatcgacacctacgcggaagcgactcgccatgtcgatcaggggctgtcgctgacgctgtttttccccgataccgccaccactcgcgatatcaacaaagcgcagatttacgcctggcgcaagggtatcaaaacgctctattacattcgcctgcgtcagatggcgctggaaggcactgaaattgaaggctgcgtctcctgtgcactttaa

SEQ ID NO: 4175 - DNA, 411 bp, Escherichia coli
atgagccagctcgtctacttttccagcagctccgaaaatacgcagcgttttatcgaacgtttagggctgcccgcggtgcgcatcccgctcaatgagcgggaacggattcaggtagacgagccttacatcctgatcgtgccctcttacggcggcggcggtacggctggcgcggtgccacgacaggtcattcgctttttaaacgacgagcataaccgggcgttgctgcgcggcgttattgcttcgggtaatcgcaactttggtgaggcatatggccgcgccggagatgtgattgcccggaaatgcggcgtgccgtggctgtaccgctttgaactcatgggtacgcaaagcgatatcgaaaacgttcgtaaaggagtaaccgaattttggcaacgacaaccgcagaacgcctga

SEQ ID NO: 4176 - DNA, 246 bp, Escherichia coli
atgcgcattactatttacactcgtaacgattgcgtccagtgccacgccaccaaacgggcgatggaaaaccggggctttgattttgaaatgattaatgtcgatcgcgttcctgaagcggcagaagcgctgcgtgctcagggctttcgtcagttgccggttgtgattgcaggcgatcttagctggtctggtttccgcccggacatgatcaatcgtctgcatccagcgccacacgcggccagtgcatga

SEQ ID NO: 4177 - DNA, 432 bp, Escherichia coli
atgactacattacgtcagccttactacgaacttagcccggcagtgtataacgcactagtgcaggccaaaacggcactggaaaatagcacgctggataccacgttgatggagttagtttatttgcgcgtctcgcaaatcaacggctgcgcattttgtctggagatgcacagcaaagcattgcgcaaatccggcgtgccacagcacaaactggacgccctggcaggttggcgcgtaagccatcattttgatgaacgcgagcgggcggcgctggcatgggcggaatcggtaaccgaaattgccagaacccatgcggaagacgaggtttatcagcctttgcttgagcatttcagcgcagcagagatcagcgacttaacgtttgccatcgggctgatgaattgttttaaccgtctggccgtttccatgcggatgtaa

SEQ ID NO: 4178 - DNA, 1335 bp, Escherichia coli
atgccgcgctatcaggatatcgcccgtcagttaaaaacggctattgagcaaggggaactgaaacccggcgcaaggctgccttcaagtcgtacttggtcgcaggagctgggggtgtctcgatccactgtcgaaaatgcgtatgctgagctggtggcgcaaggatggctgatcaggcggggacaggctggcacatttgtcagtgagcggatatatccgcaacaatctactgtacaagttgtagcttttgccggtgaaagtcagcaaccgttgccatttcaaatgggattacccgcactcgatctctttccgcgagagctgtgggcgcgggtgatggggcgtcgccttcgtacccagacgcgctttgatttggcgttaggcgatgtctgcggtgaggcggcgttgcgcgaggcaatagttgattacttacgtgtttcacgtgggattgattgtcagccagagcaggtctttatcactcacggttatgcggcctcaatagctttaattctgcacgcgctggcgaaaccgggaaacgggatgtggatagaagatcccggctttccactgattcgcccgattgtcactcgccatgatgtggaaattttgcctgtgccggttgatgacaatggactggatatcacaagcggaatacaaaattatcctgatgcgcgttttgccctgataacaccagcacaccaaagtccgctgggtgtggcgctctctttagcgcgcaggcatcagatactggaatgggcagatcgtagtcaggcatggattattgaagatgattatgacagtgagtttcgctatcacggtaagccgttaccggcgttaaaaagtctcgacgcaccgcagcgggtaatttatgccggaacattcagcaaagcgctatttcctgcattgcgctgtgcgtggctggtggtgccggtgaagcaaattgcacaattccgccaccaggcgtcactggctccatgtgcggtacctgttctatggcagaacacactggcagactttcttcgcgaggggcatttctggcggcatctgaagaaaatgcgtcagcattatgctcaacgtcggcaatggattgagcaagcgttgacgcagcaaggatttcaggttgtgccgcagaaaggtggtatccagatggtgatcagaatgataggcgatgatattgcccatgcgcgtaaagccaatgctgcaggccttgcggtgcaggcacttagcgactggcgtatccgttcaagtggggaaggtggattactgctttcgtttactaatatcgttaacgaagctatggcgcgacaggtagcacaacaattacgtaaagccttaagctaa

SEQ ID NO: 4179 - DNA, 330 bp, Escherichia coli
atgtttaaccgaccgaaccgcaacgacgttgatgatggcgtgcaggatatccagaatgatgtcaatcaattagctgacagtctcgaatctgtattgaagtcctggggcagcgacgccaaaggggaagccgaagccgctcgtagtaaagcgcaggctctactgaaagaaaccagggcgcgaatgcatggtcgtactcgcgtccagcaagccgcgcgcgatgccgttggctgcgcggattcttttgttcgtgaaagaccctggtgtagtgtgggtacagcggcagcggtgggtatttttatcggcgcactgttaagcatgcgcaaatcgtag

SEQ ID NO: 4180 - DNA, 345 bp, Escherichia coli
atgtatttacgaccagacgaggtggcgcgcgtacttgaaaaagtcggttttactgtcgatgtggtaacccagaaagcgtatggttaccgccgtggggaaaattatgtctatgttaatcgcgaagcgcgaatgggacgtaccgccctggtgattcatccaacattaaaagaacgtagttcaacactggctgaacccgcttccgatattaaaacttgcgatcattaccagcaatttccgctctatttagcgggtgaacgtcatgagcattacggtatcccgcatggctttagttcgcgtgttgcgcttgaacgttatttgaatggtttatttggcgaagccagttaa

SEQ ID NO: 4181 - DNA, 450 bp, Escherichia coli
atgttctcaccgcagtcacgcttgcgtcatgcagttgcagatacgttcgcgatggttgtttactgttctgtcgtgaacatgtgtattgaagttttcctctccggaatgagcttcgaacagtctttttattccagattggtagcgattccggtgaacatcttaattgcatggccatacggtatgtaccgcgatctgtttatgcgcgcggcacgcaaagttagcccgtcgggctggataaaaaatctggcggatatcctggcttatgtgacgttccagtcaccggtgtatgtggcgatcttgttagtggtgggcgcagactggcatcagattatggcggcggtcagttcaaacatcgttgtttcgatgttgatgggggcggtttatggctacttcctcgattattgccgccgactgtttaaagtcagccgttaccagcaggtaaaagcctga

SEQ ID NO: 4182 - DNA, 405 bp, Escherichia coli
atgtccgtaatgttacaaagtttaaataacattcgcaccctccgtgcgatggctcgcgaattctccattgacgttcttgaagaaatgctcgaaaaattcagggttgtcactaaagaaagacgtgaagaagaagaacaacagcagcgtgaactggcagagcgccaggaaaaaattagcacctggctggagctgatgaaagctgacggaattaacccggaagagttattgggtaatagctctgctgcggcaccacgcgctggtaaaaaacgccagccgcgtccggcgaaatataaattcatcgatgttaacggtgaaactaaaacctggaccggtcagggccgtacaccgaagccaatcgctcaggcgctggcagaaggtaaatctctcgacgatttcctgatctaa

SEQ ID NO: 4183 - DNA, 525 bp, Escherichia coli
atggctttgacaaccatttcgccgcatgatgcacaagaattaatcgcacgcggcgcaaagttaatcgatattcgtgatgctgatgaatatcttcgtgaacatattcctgaagcagatctggctccattatccgtactggaacagtcaggtcttccgcctaaattacgtcgcgagcaaattatattccactgccaggcaggtaaacgcaccagtaataacgccgataaattagcagcgattgccgcccccgcagaaatctttttactcgaagatgggattgatggctggaaaaaagcaggattgccagtagcggtaaataaatcccaacccttgccgttaatgcgccaggtgcagatcgccgcgggtggtttaatattaatcggcgttgtactgggttataccgtaaatagcgttttcttcttattaagcggctttgttggtgctgggttactgtttgcaggaattagtggtttttgtggaatggcaagattgttagataagatgccgtggaaccaacgagcttga

SEQ ID NO: 4184 - DNA, 300 bp, Escherichia coli
atgactgaactcgcacaattacaggccagtgccgaacaggcagcggccttattgaaatcaatgagccaccctaaacgattgctgattctgtgtatgcttagcggttcccccggcaccagcgcgggagagctgacgcgcattaccggactgagtgcctctgcgacatcacagcatctcgctcgtatgcggggcgaagggcttatcgacagccaacgggatgcccaacgcattctatattccattaaaaatgaggcggtaaatgccattatcgccaccctgaaaaatgtctattgtccgtaa

SEQ ID NO: 4185 - DNA, 159 bp, Escherichia coli
atgggtttctggagaatcgtcatcaccatcattctgccgccgctcggcgtgctgctcggtaaagggttcggttgggcgttcattattaatattctgctgacactgcttgggtatatccccggtttgattcacgcgttctgggtgcaaacccgcgattaa

SEQ ID NO: 4186 - DNA, 450 bp, Escherichia coli
atgggtctgttcaattttgtgaaagatgccggagaaaaactctgggacgcggttacaggtcagcacgataaagacgatcaggcgaagaaggtgcaggagcatctgaacaaaaccggtatacctgatgccgataaagtgaacattcaaattgccgacggcaaagcgacggtcactggtgacggcttaagtcaggaggcgaaggagaaaatccttgttgcggtggggaatatttccggtattgccagtgtcgatgatcaggtgaaaacggcgacaccagccactgccagccagttttataccgttaagtctggcgacactctgagtgccatttccaaacaggtctacggtaacgctaatctgtacaataaaatcttcgaagcgaataaaccgatgctaaaaagcccggataaaatttacccggggcaagtgttgcgtattcctgaagagtag

SEQ ID NO: 4187 - DNA, 663 bp, Escherichia coli
atgaccattacttctctggatggctatcgctggctgaagaacgatattattcgcggcaattttcagccggatgaaaaattacggatgagtttgctgacatcgcgttatgcacttggcgttgggccgttgcgggaagcgctttcgcaactggtggcagaacgactggtcacggtggtgaatcaaaaagggtatcgggtggcgtctatgtcagagcaagagctgctcgatattttcgatgcccgcgccaatatggaagcgatgttggtgaatctggcgattgcccgcggtggcgatgaatgggaggcagacgttcttgcgaaggcgcatctgctcagtaagcttgaggcctgtgacgccagtgagaaaatgcttgatgagtgggatctgcgtcatcaggcgtttcatactgcaattgtggcgggctgtggttcttactatttgctgcaaatgcgtgaacggttgtttgatctggcagcgcgttatcgatttatctggctgcggcgaacagtgctttcggtggaaatgctggaagataaacacgatcagcaccagaccctgactgcgacggtactggcgcgagataccgcgcgcgccagtgagttaatgcgccagcatttactgacgccaattcccattatccagcaggcgatggctggcaattaa

SEQ ID NO: 4188 - DNA, 1401 bp, Escherichia coli
atggggcaatcatcgcaaccacatgagttaggcggcgggctgaagtcacgccacgtcaccatgttgtctattgccggtgttatcggcgcaagtctgtttgtcggttccagcgtcgccatcgccgaagcgggcccggcggtattactggcctatctgttcgccggattactggtggttatgattatgcggatgttggcggaaatggcggttgccacgcccgataccggttcgttttccacctatgccgataaagccattggccgctgggcgggctataccatcggctggttgtactggtggttttgggtactggttatcccacttgaagccaacatcgccgccatgatcctgcactcgtgggttccaggcattcccatctggttattttccctcgtcattaccctcgccttaaccggcagtaatttattaagcgttaaaaactacggcgaatttgagttctggctggcgctgtgtaaagtcatcgctatcctggcctttattttccttggtgcagtcgcaattagcggtttttacccgtatgccgacgtgagcggtatttcaagattgtgggatagcggcggctttatgcccaacggcttcggtgcggtattaagcgcgatgttgatcaccatgttctcgtttatgggcgcagaaattgtcaccattgccgccgcggaatccgacacgccggaaaaacatattgtccgcgccaccaactcggttatctggcgtatctctattttctatttgtgttctatttttgtcgttgttgcattaatcccgtggaatatgccagggctgaaagccgttggttcttatcgctcggttctggaattgctcaatattcctcatgcgaaattaatcatggactgcgtgatattactttccgtaaccagttgcctgaactcggcactgtataccgcttccaggatgctctactccttaagccgtcgcggtgatgctcccgcggtaatgggtaaaatcaaccgcagtaaaaccccatacgtagcggtgttactctccaccggcgcggcattcttaacggtggtggtgaactattacgcgcctgcgaaggtgtttaaatttctgatcgacagctccggcgctatcgccctgctggtttatttagtcatcgccgtttcacaattgcggatgcgcaaaattctgcgagcagaaggaagcgaaattcgcctgcggatgtggctttatccgtggctcacctggctggtaatcggttttattacctttgtgttggtagtgatgctattccgcccggcgcaacagttagaagtgctctccaccggcttattagcgattgggattatctgtaccgtgccaattatggctcgctggaaaaagctgataatgtggcaaaaaacacccattcataatacgcgctga

SEQ ID NO: 4189 - DNA, 1281 bp, Escherichia coli
atgagcagcaataaagagttaatgcagcgccgcagtcaggcgattccccgtggcgttgggcaaattcacccgattttcgctgaccgcgcggaaaactgccgggtgtgggacgttgaaggccgtgagtatcttgatttcgcgggcgggattgcggtgctcaataccgggcacctgcatccgaaagtggttgcggcggtggaagcgcagttgaaaaaactgtcgcacacctgcttccaggtgctggcttacgagccgtatcttgagctgtgcgagattatgaatcagaaggtgccgggcgattttgccaagaaaactctgctggttacgaccggttccgaagcggtggaaaatgcggtgaaaatcgcccgcgccgccactaaacgtagcggtactatcgcctttagcggtgcgtatcacgggcgcacgcattacacactggcgctgaccggcaaggtgaatccatactctgcgggcatggggctgatgccgggtcatgtttatcgcgcgctttatccttgcccgctgcacggcataagcgaggatgacgctatcgccagcatccaccggatcttcaaaaatgacgccgcgccggaagatatcgccgccatcgtgattgagcccgttcagggcgaaggcggtttctacgccgcaacaccagcctttatgctgcgtttacgcgcgctgtgtgacgaacacgggatcatgctgattgccgatgaagtgcagagcggcgcggggcgtaccggcacgctgtttgcgatggagcagatgggcgtggcgccggatctcaccacctttgcgaaatcgatcgcaggcggcttcccgctggcgggcgtcaccgggcgcgcggaagtgatggacgccgtcgcaccgggcggactgggtggcacctatgccggtaacccgattgcctgcgtagcggcgctggaagtgttgaaggtgttcgagcaggaaaatctgctgcaaaaagccaacgttctggggcagaagctgaaagacggattgctggcgatcgccgaaaaacacccggagatcggcgacgtacgcgggctgggggcgatgatcgccatcgagctgtttgaagatggcgatcacagcaaaccggacgcaaaactcaccgccgagatcgtggcacgcgcccgcgataagggtctgattcttctctcctgcggcccgtattacaacgtgctgcgcatccttgtaccgctcaccattgaagacgctcagatccgtcagggtctggagatcatcagccagtgttttgctgaggcgaagcagtag

SEQ ID NO: 4190 - DNA, 1449 bp, Escherichia coli
atgaaacttaacgacagtaacttattccgccagcaggcgttgattaacggggaatggctggacgccaacaatggcgaggtcatcgacgtcaccaatccggcgaacggcgacaagctgggtagcgtacccaaaatgggcgctgatgaaacccgcgccgctatcgacgccgccaaccgcgctctgcccgcctggcgtgcgctcaccgccaaagaacgcgccaacattctgcgcaactggttcaatttgatgatggagcatcaggacgatttagcgcgcctgatgaccctcgaacagggcaaaccactggctgaagcgaaaggcgaaatcagctacgccgcctcatttattgagtggtttgccgaagaaggcaaacgtatttatggcgacaccattcccggtcatcaggccgataaacgcctgattgttatcaagcagccgattggcgtcaccgcggctatcacgccgtggaacttcccggcggcgatgattacccgtaaagcaggtccggcgctggcggcaggctgcacgatggtgctgaagcccgccagtcagacgccgttctctgcgctggcgctggcagaactggcgattcgcgcgggcgttccgactggcgtgtttaacgtggtcaccggttcggcgggcgcggtcggtaacgaactgaccagcaacccgctggtgcgcaagctgtcgtttaccggctcgaccgaaattggccgtcagttaatggaacagtgcgcgaaagacatcaaaaaagtgtcgctggagttgggcggcaacgcaccgtttattgtctttgacgatgccgatctcgataaagccgtggaaggcgcgctggcctcgaaattccgtaacgccgggcaaacctgcgtctgcgccaaccgcctgtatgtgcagaacggcgtgtatgaccgctttgccgaaaaattgcagcaggcggtgagcaaactgcacatcggcaacgggctggagaaaggcgtcaccatcgggccgctgatcgatgaaaaagcggtagcaaaagtggaagagcatattgccgatgcgctggagaaaggcgcgcgcgtggtttgcggcggtaaagcacatgaacgcggcggtaacttcttccagccgaccattctggtggacgttccggctaacgccaaagtgtcgaaagaagagacgtttggccccctcgccccgctgttccgttttaaagatgaagccgatgtgattgcgcaagccaatgacaccgaatttggacttgcagcctatttctacgcccgtgatttaagccgcgtcttccgcgtgggcgaagcactggagtacggcatcatcggcatcaacaccggcattatttccaatgaagtggccccgtttggcggcattaaagcctcgggtctgggtcgtgaaggttcgaagtatggcatcgaagattacttagaaatcaaatatatgtgcatcggtctttaa

SEQ ID NO: 4191 - DNA, 1269 bp, Escherichia coli
atgtatgattttgtgattattggcggcggcatcatcggcatgtcgaccgccatgcaactgattgatgtttatccggatgcccgcattgcgttgctggaaaaagagtccggcccggcctgtcaccagacgggccacaacagcggcgtgatccatgccggagtctattacacgcccgacagcctgaaggcgcagttttgcctggcggggaaccgtgccactaaagtcttttgcgatcaaaacggcattcgctacgacaactgcggcaagatgctggtcgccacgtctgaactcgaaatggaacggatgaatgcgttatggaaacgcacggcggcaaacggaatcgagcgcgagtggttaaacgccgaggagctgcgcgagcgtgaaccgaatatcaccgggcttggcggcatttttgtgccgtccagcggcattgtcagctaccgcgaagtggcggcggcgatggcaaaaatcttccaggccagaggtggtgagattatttataacgccgaagtcagcgccctcagtgagcataaaaacggcgtggtgatacgtacccgtcagggcggtgaatatgaagcatcgacgctgattagctgttccgggctgatggctgaccggctggtgaaaatgctcggcctcgaaccgggctttattatctgcccgttccgtggcgagtatttccgccttgcgccggagcataaccagattgttaaccacctgatttaccccattcccgaccccgcgatgccatttttgggcgtgcatctcacccgcatgatcgatggcagcgtgaccgtcgggccaaacgcggtgctggcttttaaacgcgaaggctatcgcaagcgcgatttctcgtttagtgacacgctggagattttaggctcgtcggggattcgccgggtgctgcaaaaccatctacgctcaggattgggcgagatgaaaaactcgctgtgcaaaagcggctatctgcggctggtgcaaaagtattgtccccggctttcgttaagcgatctccagccctggcccgcaggtgtgcgggcgcaggcggtatcgccggacggcaagctgattgacgattttctgtttgtcaccaccccgcgcacgatccacacctgcaatgcgccctccccggcagcgacatcagcaattcctattggtgcgcatattgtcagcaaggtacaaacgctgttggcaagccagagtaaccccggacgcacgctgcgagcggcacgtagtgtggatgccttacacgccgcatttaatcaataa

SEQ ID NO: 4192 - DNA, 978 bp, Escherichia coli
atgaatgcactgaccgccgtacaaaataacgctgtcgattcaggccaggactatagcggattcactctcatcccgtcggcgcaatccccgcgtctgctggaactcaccttcaccgaacagacgaccaatcggttcctcgaacaggttgccgagtggcccgtgcaggcgctggagtacaaatcgtttctgcgttttcgggtaggcaaaattctcgacgatctgtgtgcgaatcagctgcaaccgctgctgttgaagaccctgttaaaccgcgctgaaggtgcgctgttgatcaatgcggtgggtatcgatgatgtcgcgcaggcggatgagatggtgaagctggcgacggcggtggcgcatctgattggtcgctccaatttcgatgcgatgagcggtcagtattacgcgcgtttcgtggtgaaaaatgttgataactcagacagctatcttcgtcagccgcaccgcgtaatggagctgcacaacgacggcacttacgttgaagagatcactgattacgtgctgatgatgaaaatcgacgagcaaaacatgcagggcggtaactcgctgctgctgcatctcgatgactgggaacatctggaccactttttccgccatccgctggcgcgccgtccgatgcgctttgccgcgccgccgagcaaaaacgtcagcaaagatgtcttccatccggtgttcgatgtcgatcagcagggccgcccggtgatgcgctatatcgaccagtttgtccagccgaaagacttcgaagaaggcgtgtggttgagcgagctttccgatgccattgaaaccagtaaaggcattctttctgtacccgttcccgttggcaaattcctgttgattaacaacctgttctggctgcacggtcgcgaccgctttactccgcacccggatctgcgccgtgaactgatgcgtcagcgtggctatttcgcttacgccactcaccactaccagacgcatcagtaa

SEQ ID NO: 4193 - DNA, 483 bp, Escherichia coli
atgacgaagaaaaaagcacataaacctggttcagcgaccatcgcgcttaacaagcgcgcccgtcacgaatactttatcgaagaagagttcgaagcgggacttgccctgcaaggctgggaggttaaatccctgcgcgcaggaaaagccaatatcagcgacagctatgtccttctgcgcgacggagaggcatttctgtttggcgctaacatcacgccaatggctgtggcctccacgcatgtggtgtgcgatcctacccgtacccgcaagttacttctcaaccagcgcgaactggactcattgtacggtcgcgtcaatcgagaaggctataccgtagtggcgctctccctgtactggaaaaatgcctggtgcaaagtgaaaatcggcgtcgccaaaggtaagaaacagcacgataaacgttcagatatcaaagaacgcgaatggcaggtggataaagcgcgtatcatgaaaaatgcccaccgttaa

SEQ ID NO: 4194 - DNA, 450 bp, Escherichia coli
atggaaattgttatgcctcagattagccggaccgcactggtgccctacagcgcggagcaaatgtatcagttagtgaatgacgttcagtcttatcctcagtttttgccgggttgtaccggaagtcggattctggagtccactcttgggcagatgactgctgcggtagatgtgtctaaggctgggatcagcaaaacgtttacaacccgcaaccagttgaccagtaatcaaagtattctcatgagtctggttgatggaccgtttaagaaattgatcggcggttggaagtttacgccgttgagccaggacgcgtgccgtattgagtttcatctcgactttgagtttaccaataagttgattgaactcgcctttggtcgtgtgtttaaagagctggcagctaatatggtgcaggcttttactgttcgtgcaaaagaggtctacagtgccaggtaa

SEQ ID NO: 4195 - DNA, 291 bp, Escherichia coli
gtgccaggtaaaattgccgttgaggtggcttatgcgctacctgagaagcagtacctgcagcgcgtgacgttgcaggagggcgcgacggttgaagaagctattcgcgccagtggtttgctggaattgcgtaccgatatcgatttaactaaaaacaaagtcggcatttacagccgtccggcaaaactcagcgatattgtgcatgatggcgatcgggtggagatttatcgtcctctcattgccgatccgaaagagcttcgcaggcaacgagcagaaaaatcagcgaataaataa

SEQ ID NO: 4196 - DNA, 342 bp, Escherichia coli
atgcgctgtaaaacgctgactgctgcagcagcagtactattgatgttgaccgcaggctgttccactctggagcgagtggtttaccgtcctgacatcaaccaggggaactatctgaccgctaacgacgtatccaaaatacgtgttggcatgacgcaacaacaagttgcgtacgcattgggtacaccgctgatgtccgatccatttggtacaaatacctggttctatgtcttccgccagcaacctggtcatgaaggtgtaacgcagcaaacgctgacgctgacctttaacagtagcggtgtgttgaccaacattgataacaaacctgcgctgagtggtaactaa

SEQ ID NO: 4197 - DNA, 1662 bp, Escherichia coli
atgttggcacaactgaccatcagcaactttgctatcgttcgtgagcttgagattgattttcatagcggcatgaccgtaataactggcgagaccggcgcgggtaaatctattgcaatagatgccctcggcctttgtctcggtggtcgcgctgaagccgacatggtgcgtaccggcgctgctcgtgccgacctgtgcgcccgtttttctctgaaagatacgccagcggccctgcgttggctggaagaaaaccagcttgaagacgggcatgaatgtttgcttcgtcgcgtaatcagcagcgatggtcgctcccgtggtttcatcaacggtacagctgttcctctgtcacaactgcgcgaactgggtcagttgctgattcagatccatggtcagcacgctcatcagttactcaccaaacccgagcaccaaaaattcctgcttgatggctatgccaatgaaacctctcagctccaggaaatgaccgcacgttatcatttgtggcatcaaagctgccgtgacctcgcgcatcatcaacagttaagtcaggaacgcgccgctcgtgcggagctgctgcaataccaattaaaagaacttaacgaatttaatccgcagcctggagagtttgagcaaatcgacgaagagtacaaacgtctggcgaacagcggtcaattgctgaccaccagccagaatgcattggcattaatggctgacggtgaagacgcaaacctgcaaagtcaactttacacggctaaacaactggtgagcgaattgattggcatggacagcaaactgtccggcgtacttgatatgctggaagaggctaccatccagattgctgaagccagtgatgaactacgccactactgcgatcgtctggatctcgatcccaaccgactgtttgaacttgaacagcgcatctcaaaacagatttcgctggcacgtaaacatcacgtcagccctgaggcattgccacagtattaccagtcgctactggaagaacagcagcaactggacgatcaggccgactcacaagaaacgctcgcgctggcggtaacgaaacatcatcagcaggcactggaaacggcgcgcgcgttacaccagcaacgccagcattatgcaaatgagttggcacagctgatcaccgatagtatgcatgcactctctatgccacatgggcagtttacgatcgatgttaaatttgacgagcatcacctgggcgctgacggcgctgatcgtattgagtttcgggtaaccaccaacccaggtcagccaatgcagcctattgccaaagtcgcatccggtggtgagttgtcccgcatcgcattggcaatccaggtcattaccgcgcgtaaaatggaaaccccggcactgatttttgatgaagtggatgtagggattagcggcccaacagcggcagttgtcggcaaactgctacgtcaacttggcgaatcaactcaggtgatgtgtgttacccacctgccacaagtcgcgggatgtggtcatcaacactattttgtcagcaaagaaactgatggtgcgatgacagaaacgcatatgcaatccctggataaaaaagcgcggttacaagagttggcgcgcctgcttggtggcagtgaagtcacacgtaacacactggcgaatgcgaaagaactgcttgcggcgtaa

SEQ ID NO: 4198 - DNA, 879 bp, Escherichia coli
atgaataatcatttcaagtgtattggcattgtgggacacccacggcaccccactgcactgacaacacatgaaatgctctaccgctggctgtgcacaaaaggttacgaggtcatcgttgagcaacaaatcgctcacgaactgcaactgaagaatgtgaaaactggcacgctcgcggagattgggcaacaggctgatctcgcggttgtcgttggcggcgacggtaatatgctgggcgcggcgcgcacgctcgcccgctacgatattaaagttattggaatcaaccgtggcaacctgggtttcctgactgaccttgatcccgataacgcccagcaacaattagccgatgtgctggaaggccactacatcagcgagaaacgttttttgctggaagcgcaagtctgtcagcaagattgccagaaacgcatcagcacggcgattaacgaagtggtacttcatcctggcaaagtagcgcatatgattgagttcgaagtgtatatcgacgagatctttgcgttttcgcagcgttccgatggactgattatttcgacgccaacaggctccaccgcatattccctctctgcgggcggtcctattctgacaccctctctggatgcgattaccctggtgcccatgttcccgcatacgttgtcagcacgaccactggtcataaacagcagcagcacgatccgtctgcgtttttcgcatcgccgtaacgacctggaaatcagttgcgacagccagatagcacttccgattcaggaaggtgaagatgtcctgattcgtcgctgtgattaccatctgaatctgattcatccgaaagattacagttatttcaatacattaagcaccaagctcggctggtcaaaaaaattattctaa

SEQ ID NO: 4199 - DNA, 594 bp, Escherichia coli
atgagtagtaaagaacagaaaacgcctgaggggcaagccccggaagaaattatcatggatcagcacgaagagattgaggcagttgagccagaagcttctgctgagcaggtggatccgcgcgatgaaaaaattgcgaatctcgaagctcagctggctgaagcccagacccgtgaacgtgacggcattttgcgcgtaaaagccgaaatggaaaacctgcgtcgtcgtactgaactggatatcgaaaaagcccacaaattcgcgctggagaaattcatcaacgaattgctgccggtgattgatagcctggatcgtgcgctggaagtggctgataaagctaacccggatatgtccgcgatggttgaaggtattgagctgacgctgaagtcgatgctggatgttgtgcgtaagtttggcgttgaagtgatcgccgaaaccaacgtcccactggacccaaatgtgcatcaggccatcgcaatggtggaatctgatgacgttgcgccaggtaacgtactgggcattatgcagaaaggttatacgctgaacggtcgtacgattcgtgcggcgatggtgactgtagcgaaagcaaaagcttaa

SEQ ID NO: 4200 - DNA, 1242 bp, Escherichia coli
atggtggtcatttcagcctatttttccggttcagaaactggaatgatgacactcaaccgctatcgcctgagacacatggcgaagcaaggtaatcgctcggcaaaacgcgtcgaaaaattactgcgcaagccagaccgcctgataagcctggtgttaatcggcaataatctggtcaatatccttgcttccgcactcggcactattgtcgggatgcgcttgtatggcgatgctggcgtggcaattgcgactggcgtgctgaccttcgtagtgctggtttttgctgaagtattgccgaaaaccattgccgcactgtacccggaaaaagtcgcctatccgagtagttttctactggcgccgctacaagtcctgatgatgccgctagtctggttactaaatgccatcacccgaattttgatgcgtatgatgggtattaaaaccgatatcgtagtcagcggctctttgagtaaagaagagttgcgcaccatcgtgcacgaatcacgctcacaaatttcccgtcgcaatcaggatatgctgctgtcggtgctcgatctggaaaagatgaccgtcgatgacatcatggtgccgcgcagtgaaattatcggtattgatatcaacgatgactggaaatcgattctgcgccaactctcccactcacctcacgggcgcatcgtgctctaccgtgattcgctggacgacgccatcagtatgctgcgtgtgcgtgaagcctggcgactcatgtcggagaaaaaagagttcaccaaagaaaccatgctacgcgccgcggacgagatctattttgtcccggagggtacgccgctcagcacacagttggtgaagtttcagcgcaacaaaaagaaagtcggactggtcgtcaacgagtatggagacattcagggactggtgacggtcgaagatattctcgaagagattgtcggcgatttcaccacgtcgatgtcgccaacacttgccgaagaggtcacgcagcaaaacgacggttcggtgattattgatggcactgccaacgtgcgagaaattaacaaagcctttaactggcatctaccggaagatgatgctcgtactgttaacggcgtcattctggaagcgctggaggagatcccggtagcaggcacccgcgtgcgtataggcgagtacgatatcgatattctcgacgtacaggacaatatgattaagcaggtaaaagtttttcctgtaaaaccgctgcgcgagagtgtggcggagtaa

SEQ ID NO: 4201 - DNA, 867 bp, Escherichia coli
atgcaacggttggagcagcgttcacctgacgctatactgcttctctttcttattgctcaaactgtcgacattactatgcccgtttttgctctgctcgcgcttgtcgcctactccgtcagtcttgcgctgattgttcccggtctgctgcaaaaaaacggcggctggcggcgcatggctattatttctgcggtcatcgcgctggtctgccacgcaatcgctctggaagcccgcatcctgcccgacggtgatagcggacaaaacctcagcctgctgaacgttggttcattggtcagtttgatgatctgtacggtaatgaccattgtggcttctcgcaatcgtggctggttgttgctacccattgtctatgcctttgcgcttatcaacctggcgctggcgaccttcatgcccaatgaatacatcacccatctggaagcaacgccggggatgctggtgcacattggcttatcgcttttttcctatgccacgctaattatcgctgccctgtacgcgctgcaactggcgtggattgattaccaactgaagaacaagaagctggcgtttaaccaggaaatgcctccattgatgagtatcgagcgtaaaatgttccatatcacgcagattggcgtggtgctgctaacgctcactctttgcactggcctgttctacatgcacaacttatttagcatggaaaatatcgacaaggccgtgctctctatcgtggcgtggtttgtctatattgtgctgctgtggggacattatcatgaaggatggcgtggacgccgcgtcgtctggtttaacgttgcgggtgcagtcattctgacactggcctacttcggcagccgaatttttcagcagttaatcagctaa

SEQ ID NO: 4202 - DNA, 1362 bp, Escherichia coli
atgtttgataatttaaccgatcgtttgtcgcgcacgctgcgcaatatcagtggccgtggacgcctcactgaagacaacgtaaaagatacgctgcgcgaagtgcgcatggcgctgctggaggcggacgtcgctctgccggtagtgcgtgagtttatcaatcgcgtaaaagagaaagcggttggtcatgaagttaataagagcctgacgccggggcaggagttcgtcaaaattgtccgtaacgaactggttgcggcgatgggcgaagagaaccagaccctgaacctggctgcgcaaccgcctgcggtcgtgctgatggcgggcctgcaaggtgccggtaaaacaaccagcgttggtaaactcggtaagttcctgcgcgagaagcacaagaagaaagtgctggtggtttctgccgacgtctatcgcccggcggcaatcaaacagcttgagacgctggcagagcaggtgggcgttgatttcttcccttctgatgttggtcagaagccggtagatatcgttaacgcggcgctgaaagaagccaaactgaaattctacgacgtgctgctggtggatactgccggtcgtctgcacgttgacgaagcgatgatggacgagatcaaacaagtccatgcgtcgattaatccggttgaaaccctgtttgtggtcgatgccatgaccggtcaggatgcggccaatacggcaaaagcattcaatgaagcgttaccgcttaccggtgtagtgttgaccaaagtggacggcgatgcccgcggcggtgcggcgctctctattcgtcacatcactggcaaaccgatcaagttcctcggtgttggcgagaaaaccgaggcgctggagccattccatccggaccgtattgcctcccgtattctcggcatgggcgacgtactgtcactgatcgaagatatcgaaagcaaggttgaccgcgcgcaggcagagaaattagccagcaagctgaaaaaaggcgacggcttcgatctcaacgactttcttgagcagctgcgccagatgaaaaatatgggcggcatggctagcctgatgggcaagctgccgggcatggggcagatcccggataacgtcaagtcacagatggacgataaagtgctggtgcgtatggaagccatcatcaactcgatgacgatgaaagagcgcgctaagccagaaatcatcaaaggttcgcgtaagcgtcgtatcgctgccggttgcggtatgcaggtgcaggacgttaaccgtcttctgaaacagttcgacgacatgcagcgcatgatgaagaaaatgaaaaagggcgggatggcgaagatgatgagaagcatgaaagggatgatgccgccgggatttcctggtcgctaa

SEQ ID NO: 4203 - DNA, 249 bp, Escherichia coli
atggtaactattcgtttagcacgtcacggcgctaaaaagcgtccgttctaccaggttgttgtcgctgacagccgtaatgcacgcaacggtcgcttcatcgagcgcgttggtttcttcaacccaatcgctagcgaaaaagaagaaggcactcgcctggatctggatcgcatcgctcactgggttggccagggcgcaactatttctgatcgcgttgctgcgctgatcaaagaagtaaacaaagcagcttaa

SEQ ID NO: 4204 - DNA, 549 bp, Escherichia coli
atgagcaaacaactcaccgcgcaagcacctgttgatcccatcgttttgggaaaaatggggtcgtcttacggtattcgtgggtggctcagagtgttttcttccaccgaagacgccgaaagcatttttgactatcagccctggtttatccagaaggcgggtcagtggcagcaagtccagctggaaagctggaagcaccacaatcaggacatgatcatcaagctgaaaggcgttgacgatcgtgatgcggcgaacctgctgacgaattgtgaaattgtcgtggattcatcgcagttgcctcagcttgaagagggggactactactggaaagacctgatgggctgccaggtagtaaccactgaaggctacgatctcggtaaagtcgtagatatgatggaaaccggatctaatgacgttctcgtcattaaggcaaacctgaaagatgcgtttggtatcaaggaacgtctcgtaccgttcctcgatgggcaggttatcaagaaagtcgatctcactacacgttcaatcgaagtagattgggatcctggtttttaa

SEQ ID NO: 4205 - DNA, 768 bp, Escherichia coli
atgtggattggcataattagcctgtttcctgaaatgttccgcgcaattaccgattacggggtaactggccgggcagttaaaaatagcctgctgagcatccagagctggagtcctcgcgacttcacgcatgaccggcaccgtaccgtggacgatcgtccttacggcggcggaccggggatgttaatgatggtgcaacccttgcgggacgccattcatgcagcaaaagccgcggcgggtgaaggcgcaaaggtgatttatctgtcaccacagggacgcaagcttgatcaagcgggcgtcagcgaactggcaacgaatcaaaaattgattctggtgtgtggtcgctacgaaggtatagatgagcgcgtgatccaaaccgaaattgacgaagaatggtcaatcggcgattacgttctcagtggtggtgagttaccagcaatgacgctgattgactccgtttcccggtttattccgggagtactgggacatgaagcctcggcaacggaagattcctttgctgaaggattgctggattgcccgcactatacgcggcctgaggtgttagaagggatggaagttccgccagtgttactgtcgggcaaccatgccgagatacgtcgctggcgtttgaaacagtcgctgggccgtacctggcttagaagacctgaacttctggaaaacctggctctgactgaagagcaagcaaggttgctggcggagttcaaaacggaacacgcacaacagcaacataaacatgatgggatggcgtaa

SEQ ID NO: 4206 - DNA, 348 bp, Escherichia coli
atgagcaacattattaagcaacttgaacaagagcagatgaagcaggacgtaccttccttccgtccgggtgataccgtggaagtgaaagtatgggttgttgaaggttccaaaaaacgtctgcaggcattcgagggcgtggttatcgctattcgtaaccgcggtctgcactctgcattcactgttcgtaaaatttccaacggcgaaggcgttgagcgtgtcttccagactcactctccggtagttgacagcatttctgtcaaacgtcgtggtgctgttcgtaaagctaaactgtactacctgcgtgagcgtactggtaaggctgctcgtatcaaagagcgtcttaactaa

SEQ ID NO: 4207 - DNA, 483 bp, Escherichia coli
atgataaagcacctgctagcacccctgattttcacctcgctaatacttactggctgccagtcccctcagggaaagtttactcctgagcaagtcgccgctatgcaatcttatggatttactgaatccgccggcgactggtcgctgggcttatcagatgccattctgtttgcaaaaaatgactacaaattgctcccggaaagccagcaacagatccaaaccatggcagccaaattggcctcgacagggctaacacatgcccgtatggatggacacaccgacaactatggtgaagacagttacaacgaagtcttatcattgaaacgggcgaatgtcgtggccgatgcatgggctatgggtggacaaattccgcgcagcaatctcaccactcagggtttaggaaaaaaatatcccatagccagtaacaagaccgcccagggccgcgccgagaaccgccgcgtcgcagtggtgattacaaccccttaa

SEQ ID NO: 4208 - DNA, 1227 bp, Escherichia coli
atgatggataacgataattctcttcataagcgccccacgtttaaaagagcattacgcaacatcagcatgaccagcatatttatcactatgacgctgatctggctgctgctttccgtgacgtcagtgctaaccctgaaacaatacgcgcaaaaaaacctggcactgacagcagcaacaatgacttacagtctggaagcagctgtcgtttttgccgatggccctgcagcaactgaaacactggcagcgctgggccagcaaggccaattttcaactgcagaagtgcgtgataagcagcaaaatattctggcatcctggcattacacccataaggaaccaggcgatactttcagcaatttcataagccactggctcttccctgcccccatcattcagccgattcgccacaatggtgaaaccattggcgaagtacgcttaactgctcgcgacagttcaatcagccattttatctggttttcgctcgctgtcctgaccggttgtattctgctggcatcaggcatcgcaattaccctcacccgccatttgcacaatggcctggtggaagcgctgaaaaatatcaccgatgtcgtacatgatgtgcgttctaaccgcaatttttcccgacgagtttcggaagaacgtatcgctgagtttcaccgcttcgctctcgacttcaacagtctgctggatgaaatggaagagtggcagcttcgtttacaggccaaaaatgcgcagcttctacgtaccgcgctacatgacccattaaccgggctggctaaccgcgcagcgtttcgtagcggcatcaacacgttgatgaacaattccgatgcccgaaaaacgtcggcgttactatttcttgatggcgataatttcaaatatatcaatgatacctggggtcatgcgacgggcgatagagtcttgattgaaatagcaaaacggttagctgaatttggcgggctgcgacataaagcataccgcctgggcggcgatgaattcgctatggtgctctatgatgtacagtcggaatctgaagtgcagcagatatgctcagcactgacacaaatttttaatctcccgtttgatcttcataatggccatcagactaccatgacattaagcattggttacgcgatgactattgagcacgcctctgcggaaaatttacaagagcttgccgatcacaatatgtatcaggccaaacaccagcgtgccgaaaagctggtgagataa

SEQ ID NO: 4209 - DNA, 519 bp, Escherichia coli
atgcgtttttctcaccgactgttcttactgctgattctcctgctgacgggagcaccaatactcgctcaggaaccttctgacgttgcgaaaaacgtgcgtatgatggtttccggtattgtcagttacacccgctggcctgggctatcagggccaccaaagttatgtatcttttcatcttcacgttttagtaccgccttacaagaaaatgctgctacatctttaccttatctgcctgtcatcattcatactcaacaagaggcgataatttcaggctgcaatggtttttattttggcaacgagtcaccgacattccagatggaattaaccgaacaatatccgtcaaaggcgttattattaattgccgaacaaaataccgagtgcattattggtagcgccttttgtctgatcatccacaataatgacgtcagatttgccgtaaacctggatgccttatcgcgtagcggtgtaaaggtcaacccggatgtcttaatgctcgcacggaagaaaaatgatggataa

SEQ ID NO: 4210 - DNA, 363 bp, Escherichia coli
atgaaaaaatttatcgcccccttgttggctttactggttagcggatgtcagattgatccttatactcacgcgccaaccttgaccagcaccgactggtatgatgttggtatggaagatgcgatatcgggcagcgccattaaagatgacgatgcatttagcgattcacaggcggatcgcggtctataccttaaaggatatgccgaagggcaaaagaaaacttgccagaccgattttacttatgcccggggactttctggtaaaagctttcctgccagctgcaataatgttgaaaatacaagccaactgcatgaagtatggcgaaaaggggctgatgaaaatgccagcacaatacgattaaattaa

SEQ ID NO: 4211 - DNA, 1071 bp, Escherichia coli
atgcagaaagacgcgctgaataacgtacatattaccgacgaacaggttttaatgactccggaacaactgaaggccgcttttccattaagcttgcaacaagaagcccagattgctgactcgcgtaaaaccatttcagatattatcgccgggcgcgatcctcgtctgctggtagtatgtggtccttgttccattcatgatccggaaactgctctggaatatgctcgtcgatttaaagcccttgccgcagaggtcagcgatagcctctatctggtaatgcgcgtctattttgaaaaaccccgtaccactgtcggctggaaagggttaattaacgatccccatatggatggctcttttgatgtagaagccgggctgcagatcgcgcgtaaattgctgcttgagctggtgaatatgggactgccactggcgacggaagcgttagatccgaatagcccgcaatacctgggcgatctgtttagctggtcagcaattggtgctcgtacaacggaatcgcaaactcaccgtgaaatggcctccgggctttccatgccggttggttttaaaaacggcaccgatggcagtctggcaacggcaattaacgctatgcgtgccgccgcccagccgcaccgttttgttggcattaaccaggcagggcaggttgcgttgctacaaactcaggggaatccggacgggcatgtgatcctgcgcggtggtaaagcgccaaactatagccctgcggatgttgcgcaatgtgaaaaagagatggaacaggcgggactgcgcccgtctctgatggtagattgcagccacggtaattccaataaagattatcgccgtcagcctgcggtggcagaatccgtggttgctcaaatcaaagatggcaatcgctcaattattggtctgatgatcgaaagtaatatccacgagggcaatcagtcttccgagcaaccgcgcagtgaaatgaaatacggtgtatccgtaaccgatgcctgcattagctgggaaatgaccgatgccttgctgcgtgaaattcatcaggatctgaacgggcagctgacggctcgcgtggcttaa

SEQ ID NO: 4212 - DNA, 1122 bp, Escherichia coli
atggttgctgaattgaccgcattacgcgatcaaattgatgaagtcgataaagcgctgctgaatttattagcgaagcgtctggaactggttgctgaagtgggcgaggtgaaaagccgctttggactacctatttatgttccggagcgcgaggcatctatgttggcctcgcgtcgtgcagaggcggaagctctgggtgtaccgccagatctgattgaggatgttttgcgtcgggtgatgcgtgaatcttactccagtgaaaacgacaaaggatttaaaacgctttgtccgtcactgcgcccggtggttatcgtcggtggtggcggtcagatgggacgtctgttcgagaagatgctgacactctcgggttatcaggtgcggattctggagcaacatgactgggatcgagcggctgatattgtttccgatgccggaatggtgattgttagtgtgcccatccacgttactgagcaagttatcggcaaattaccgcctttaccgaaagattgtattctggttgatctggcatcggtgaaaaatggaccattacaggccatgctggcggcgcacgatggcccggtgctggggttacacccgatgttcggcccggacagcggtagcctggcaaagcaagttgtggtctggtgtgatggacgtaagccggaagcataccaatggtttctggagcaaattcaggtctggggcgctcggttgcatcgtattagcgctgtcgagcacgatcagaatatggcgtttattcaggctctgcgccactttgctacttttgcttatgggctgcacctggcagaagaaaatgttcagcttgagcaactactggcgctctcttcgccgatttaccgccttgagctggcgatggtcgggcgactgtttgctcaggatccgcagctttatgccgacattattatgtcgtcagagcgtaatctggcgttaatcaaacgttactataagcgtttcggcgaggcgattgagctgctggagcagggcgataagcaggcgtttattgacagtttccgcaaggtggagcactggttcggcgattacgcacagcgttttcagagtgaaagccgcgtgttattgcgtcaggcgaatgacaatcgccagtaa

SEQ ID NO: 4213 - DNA, 1161 bp, Escherichia coli
atgacatcggaaaacccgttactggcgctgcgagagaaaatcagcgcgctggatgaaaaattattagcattactggcagagcgacgcgaactggccgtcgaggtgggaaaagccaaactgctctcgcatcgcccggtacgtgatattgatcgtgaacgcgatttgctggaaagattaattacgctcggtaaagcgcaccatctggacgcccattacattactcgcctgttccagctcatcattgaagattccgtattaactcagcaggctttgctccagcaacatctcaataaaattaatccgcactcagcacgcatcgcttttctcggccccaaaggttcttattcccatcttgcggcgcgccagtatgctgctcgtcactttgagcaattcattgaaagtggctgcgccaaatttgccgatatttttaatcaggtggaaaccggccaggccgactatgccgtcgtaccgattgaaaataccagctccggtgccataaacgacgtttacgatctgctgcaacataccagtttgtcgattgttggcgagatgacgttaactatcgatcattgtttgttggtctccggcactactgatttatccgccatcaatacggtctacagccatccgcagccattccagcaatgcagcaaattccttaatcgttatccgcactggaagattgaatataccgaaagtacgtctgcggcaatggaaaaggttgcacaggcaaaatcaccgcatgttgctgcgttgggaagcgaagctggcggcactttgtacggtttgcaggtactggagcgtattgaagcgaatcagcgacaaaacttcacccgatttgtggtgttggcacgtaaagccattaacgtttctgaccaggttccggcgaaaacgacgttgttaatggcgaccggacaacaagctggtgcactggttgaagcgttgctggtactgcgcaatcacagtctgattatgacccgtctggaatcacgtccgattcacggtaatccgtgggaagagatgttttatctggatattcaggccaatcttgaatcagcggaaatgcaaaaagcattgaaagagttaggggaaatcacccgttcgatgaaggtattgggctgttacccaagtgagaacgtagtgcctgttgatccaacctga

SEQ ID NO: 4214 - DNA, 342 bp, Escherichia coli
atgacaatgaacattaccagcaaacaaatggaaattactccggccatccgccaacatgtcgcagaccgtctcgccaaactggaaaaatggcaaacacatctgattaatccacatatcattctgtccaaagagccacaagggtttgttgctgacgccacaatcaatacacctaacggcgttctggttgccagtggtaaacatgaagatatgtacaccgcaattaacgaattgatcaacaagctggaacggcagctcaataaactgcagcacaaaggcgaagcacgtcgtgccgcaacatcggtgaaagacgccaacttcgtcgaagaagttgaagaagagtag

SEQ ID NO: 4215 - DNA, 738 bp, Escherichia coli
atgacgcgcatgaaatatctggtggcagccgccacactaagcctgtttttggcgggttgctcggggtcaaaggaagaagtacctgataatccgccaaatgaaatttacgcgactgcacaacaaaagctgcaggacggtaactggagacaggcaataacgcaactggaagcgttagataatcgctatccgtttggtccgtattcgcagcaggtgcagctggatctcatctacgcctactataaaaacgccgatttgccgttagcacaggctgccatcgatcgttttattcgccttaacccgacccatccgaatatcgattatgtcatgtacatgcgtggcctgaccaatatggcgctggatgacagtgcgctgcaagggttctttggcgttgaccgtagcgatcgcgatcctcaacatgcacgagctgcgtttagtgacttttccaaactggtgcgcggctatccgaacagtcagtacaccaccgatgccaccaaacgtctggtattcctgaaagatcgtctggcgaaatatgaatactccgtggccgagtattatacagaacgtggtgcatgggttgctgtcgttaaccgcgtagaaggcatgttgcgcgactatccggatacccaggctacgcgtgatgcgctgccgctgatggaaaatgcataccgtcagatgcagatgaatgcgcaagctgaaaaagtagcgaaaatcatcgccgcaaacagcagcaatacataa

SEQ ID NO: 4216 - DNA, 981 bp, Escherichia coli
atggcacaacgagtacagctcactgcaacggtgtccgaaaaccaactcggtcaacgcttagatcaggctttggccgaaatgttcccggattattcacgttcgcggataaaagaatggatcctcgaccagcgtgtgctggttaacggcaaagtgtgtgataagccaaaagaaaaagtattgggtggcgagcaggttgccatcaacgctgagattgaagaagaagcgcgttttgaaccgcaggatatcccgctggatatcgtctatgaagatgaagatatcatcgtcattaataaaccgcgcgacctggtggtacatcctggcgcgggtaacccggatggtacggtactgaatgcgttgcttcattactatccgcccattgccgatgtaccgcgtgcgggcatcgtccatcgtctggataaagacaccaccggcctgatggttgtggcaaaaaccgttccggctcagacgcgtttagtcgaatctttgcaacggcgtgaaattactcgtgagtatgaagcggtggcaattggtcatatgaccgctggcggtacagtagatgaaccaatcagccgccacccgaccaaacgtactcacatggcggtgcatccgatgggtaaaccggcggtcactcactatcgcatcatggaacacttccgtgtgcacacgcgtctgcggttgcgtctggaaactggacgtacgcaccagatccgcgtgcatatggcccatatcactcatccgctggtgggcgatccggtttatggtggccgtccgcgtccgccaaaaggtgcttcggaagcgtttatctccacgctgcgtaagtttgaccgccaggcgcttcatgcaaccatgctgcgtctttatcacccgatctccggtatcgaaatggaatggcatgcgcctattccacaagatatggtggagctgattgaggtgatgcgcgccgatttcgaagagcataaggatgaagtggactggttatga

SEQ ID NO: 4217 - DNA, 732 bp, Escherichia coli
atgagtaagctgattgtcccgcagtggccgctgccaaaaggtgttgcggcctgtagctctacccgtatcggcggcgtgagcttgccgccttacgactctctcaaccttggcgctcattgtggtgataacccggatcacgttgaggagaatcgcaagcgactttttgctgcgggcaatttgccttctaaaccggtctggcttgagcaggtacacggcaaagatgtgcttaagcttactggtgagccttatgcctcaaaacgagcagatgcctcttatagcaatacgcccggcacggtttgcgcagtgatgactgccgattgcctccctgtgctgttttgcaatcgtgcgggaacggaggtcgccgccgctcatgctggctggcgtggactgtgcgcaggcgtgttggaagagacggtttcctgttttgctgataatccggaaaatattctcgcctggttagggccggcaattgggccacgtgcgttcgaagtgggggcggaggttcgcgaggcgtttatggtagtagacgccaaatcgagtacagctttcattcagcatggtgataagtatctggcggatatttatcagcttgcccggcagcgtctggcgagcgttggtgttgaacaaatttttggcggtgaccgttgtacatatacggaaaatgagactttcttctcttatcgtcgcgacaagaccaccggtcgtatggcaagtttcatttggctgatataa

SEQ ID NO: 4218 - DNA, 2574 bp, Escherichia coli
atgcgtctggatcgtcttactaataaattccagcttgctcttgccgatgcccaatcacttgcactcgggcacgacaaccaattcatcgaaccacttcatttaatgagcgccctgctgaatcaggaagggggttcggttagtcctttattaacatccgctggcataaatgctggccagttgcgcacagatatcaatcaggcattaaatcgtttaccgcaggttgaaggtactggtggtgatgtccagccatcacaggatctggtgcgcgttcttaatctttgcgacaagctggcgcaaaaacgtggtgataactttatctcgtcagaactgttcgttctggcggcacttgagtctcgcggcacgctggccgacatcctgaaagcagcaggggcgaccaccgccaacattactcaagcgattgaacaaatgcgtggaggtgaaagcgtgaacgatcaaggtgctgaagaccaacgtcaggctttgaaaaaatataccatcgaccttaccgaacgagccgaacaaggcaaactcgatccggtgattggtcgtgatgaagaaattcgccgtaccattcaggtgctgcaacgtcgtactaaaaataacccggtattgattggtgaacccggcgtcggtaaaactgccatcgttgaaggtctggcgcagcgtattatcaacggcgaagtgcccgaagggttgaaaggccgccgcgtactggcgctggatatgggcgcgctggtggctggggcgaaatatcgcggtgagtttgaagaacgtttaaaaggcgtacttaacgatcttgctaaacaggaaggcaacgtcatcctgtttatcgacgaattacataccatggtcggcgcgggtaaagccgatggcgcaatggacgccggaaacatgctgaaacctgcactggcgcgtggtgaattgcactgcgtaggtgccacgacgcttgacgaatatcgccagtacatcgaaaaagatgctgcgctggaacgtcgtttccagaaagtgtttgttgccgagccttctgttgaagataccattgcgattctgcgtggcctgaaagaacgttacgagctgcaccaccatgtgcaaattactgacccggcaattgttgcagcggcgacgttgtctcatcgctacattgctgaccgtcagctgccagataaagccatcgacctgatcgatgaggcagcatccagcattcgtatgcagattgactcaaaaccagaagaactcgaccgactcgatcgccgtatcatccagctcaaactggaacaacaggcgttaatgaaagagtctgatgaagccagtaaaaaacgcctggatatgctcaacgaagaactgagcgacaaagaacgtcagtactccgagttagaagaagagtggaaagcagagaaagcctcgctttctggtacgcagaccattaaagcggaactggaacaggcgaaaatcgctattgaacaggctcgccgtgtgggtgacctggcgcggatgtctgaactgcaatacggcaaaatcccggaactggaaaagcaactggaagccgcaacgcagctcgaaggcaaaactatgcgtctgttgcgtaataaagtgaccgatgccgaaattgctgaagtgctggcgcgttggacgggaattccggtttctcgcatgatggaaagcgagcgcgaaaaactgctgcgtatggagcaagaactgcaccatcgcgttattggtcagaacgaagcggttgatgcggtatctaacgctattcgtcgtagccgtgcggggctggcggatccaaatcgcccgattggttcattcctgttcctcggcccaacgggtgtggggaaaacagagctttgtaaggcgctggcgaactttatgtttgatagcgacgaggcgatggtccgtattgatatgtccgagtttatggagaaacactcggtgtctcgtctggttggtgcgcctccgggatatgttggttatgaagaaggtggctatctgaccgaagcggtgcgtcgtcgtccgtattccgtcatcctgctggatgaagtggaaaaagcgcatccggatgtcttcaacattctgttgcaggtactggatgatgggcgtctgactgacgggcaggggagaacggtcgacttccgtaatacggtcgtcattatgacctctaacctcggttccgatctgattcaggaacgttttggtgaactggattatgcgcacatgaaagagctggtgctcgatgtggtaagccataacttccgtccggaattcattaaccgtatcgatgaagtcgtcgtcttccatccgctgggtgaacaacacattgcgtcgattgcgcagattcagttgaaacgtctgtacaaacgtctggaagaacgtggttatgaaatccacatttctgacgaggcgctgaaactgctgagcgagaacggttacgatccggtctatggtgcacgtcctctgaagcgtgctatccagcagcagatcgaaaacccgctggcacagcaaatactgtctggtgaattggttccgggtaaagttattcgcctggaagttaatgaagaccggatcgtcgccgtccagtaa

SEQ ID NO: 4219 - DNA, 555 bp, Escherichia coli
atgtctgatgttttacgcccataccgcgatctttttccacaaatcggtcagcgcgtaatgatcgacgatagcagcgtcgtgattggtgacgttcgtctggctgatgatgtggggatctggccgctcgttgtgattcgtggagatgtacattatgtacagatcggagcacgcaccaatatccaggatggcagtatgttgcatgtcactcataaatcctcgtacaacccagctggcaacccattaaccattggcgaagatgtcactgttggtcacaaggtgatgctccacggctgcaccattggcaatcgagttttggttgggatgggctcaattttacttgatggcgcaatagtagaagatgatgtgatgattggtgcaggtagcctggtcccacaaaataaacggctggagagcggatatctgtatctcggtagccccgtcaaacagatccgcccgttaagtgatgaagagaaggctgggttacgctattccgcaaataactacgtgaaatggaaggacgaatatatggatcagggtaaccacacccaaccttga

SEQ ID NO: 4220 - DNA, 258 bp, Escherichia coli
gtgaatcaggccatccagtttccggatagggaagagtgggacgagaataaaaaatgtgtatgttttcccgctctcgtgaatggtatgcaactgacatgtgcgatctctggcgagagtctggcgtatcgctttactggagatacgccagaacagtggttagcgagttttcgtcagcatcgctgggacctggaagaagaagcggaaaacttaattcaggaacaaagtgaagatgatcaaggttgggtgtggttaccctga

SEQ ID NO: 4221 - DNA, 819 bp, Escherichia coli
atggaaacctatgctgtttttggtaatccgatagcccacagcaaatcgccattcattcatcagcaatttgctcagcaactgaatattgaacatccctatgggcgtgtgttggcacccatcaatgatttcatcaacacactgaacactttctttagtgctggtggtaaaggtgcgaatgtgacggtgccttttaaagaagaggcttttgccagagcggatgagcttactgaacgggcagcgttggctggtgctgttaataccctcaagcggttagaagatggacgcttgcggggtgacaataccgatggtataggtttgttaagcgatctggaacgtctgtcttttatccgtcctggtttacgtcttctgctcatcggcgctggtggcgcatctcgcggcgtactactgccactcctttccctggactgtgcggtgacaatcactaatcggacggtatcccgcgcggaagagttggctaaattgtttgcgcacactggcagtattcacgcgttgggtatggacgaactggaaggtcatgagtttgatctcattattaatgcaacatccagtggcatcagtggtgatattccggcgatcccgccatcgctcattcatccaggcatttattgctatgacatgttctatcagaaaggaaaaactccttttctggcatggtgtgagcagcgaggctcaaagcgtactgctgatggtttaggaatgctggtggcacaagcggctcatgccttccttctttggcatggcgttctgcctgatgtagaaccggtcatcaaactattgcaacaggagttgtcagcgtga

SEQ ID NO: 4222 - DNA, 573 bp, Escherichia coli
gtgaataataacctgcaaggagacgctatcgcagctgcgatagatgtcctcaatgaagaacgtgtcatcgcctatccaacggaagccgttttcggtgtcgggtgcgatcctgatagcgaaacagcagtgatgagactgttggagttaaaacggcgtccggttgataaggggctgattttaatcgcggcaaattacgagcagcttaaaccctatattgatgacaccatgctgactgacgcgcagcgtgaaaccattttttcccgctggccaggtcctgtcacctttgtctttcccgcgcctgcgacaacaccgcgctggttgacgggccgctttgattcgcttgctgtacgagtcaccgaccatccgttggtggttgctttgtgccaggcttatggtaaaccgctggtttctaccagtgccaacttgagtggattgccaccttgtcgaacagtagacgaagttcgcgcacaatttggcgctgcgttcccggttgtgcctggtgaaacgggggggcgtttaaatccttcagaaatccgcgatgccctgacgggtgaactgtttcgacaggggtaa

SEQ ID NO: 4223 - DNA, 543 bp, Escherichia coli
atggcgaaatcagcactgttcacggtgcgtaataatgagtcctgcccaaagtgcggggctgaactagttattcgatccgggaaacacggtccgtttcttggatgctcacagtatccggcgtgtgactacgtccgtcctctgaaatcttcagcggatggacatattgtcaaagttctggaggggcaggtttgccctgcatgtggcgcaaatctggtattacgccagggacgctttggtatgtttattggttgcagtaactaccctgaatgcgaacataccgaacttatcgataaaccggacgaaacagcaattacatgcccccaatgccggacgggccatctggttcagcgccgctcccgttatggcaaaacatttcactcctgtgatcgctacccggagtgtcaatttgccattaacttcaaacccatagctggagaatgccctgagtgccattatccgctactcatcgaaaagaaaaccgcgcagggtgtaaaacacttttgtgccagtaaacaatgtggaaagccgatttcggcggaataa

SEQ ID NO: 4224 - DNA, 474 bp, Escherichia coli
atgttcgacgtactaatgtatttgtttgaaacctatattcacacagaagctgagttgcgtgtggatcaagacaaacttgaacaggatcttaccgacgcaggatttgatcgagaagatatctacaatgccctgctttggctggaaaagcttgcggattatcaggaaggactggcagaaccgatgcaactggcctctgatccactctccatgcgtatttatacccctgaagagtgtgaaagactggatgccagctgtcgtggttttctgcttttccttgagcaaattcaggtgcttaaccttgaaacccgtgaaatggtgatagagcgagtgctcgcgctggataccgctgagttcgacctggaagacctgaaatgggtaatcctgatggtgttgttcaatattccgggctgcgaaaatgcgtaccagcaaatggaagaattactctttgaagtgaatgaaggtatgctgcattaa

SEQ ID NO: 4225 - DNA, 1125 bp, Escherichia coli
atggtcgatacagaaatttggctgcgtttaattagcatcagcagcttgtatggcgatgatatggtccgtatagctcactggctggcaaaacagtcgcatattgatgcggttgtattgcagcaaacagggcttacattgcggcaggcacaacgctttctttcatttccgcgaaagagtatcgaaagctcactttgttggttggagcaacccaaccatcatttaatccctgcggacagcgaattttatcctcctcaacttctggcgacgacagattaccccggcgcactgtttgttgaaggagaactgcacgcgttgcattcatttcagcttgccgtagtggggagtcgggcgcattcatggtatggcgagcgatggggacgattattttgcgaaactctggcgacgcgtggagtgacaattacgagtggactggcgcgtggaatcgatggtgtggcgcataaagcggccttacaggtaaatggcgtcagcatcgctgtattagggaatggacttaataccattcatccgcgtcgtcatgcccgactggctaccagtttgcttgaacatggtggtgctctcgtctcggaatttcccctcgatgttccaccccttgcttacaatttcccacgaagaaatcgcattatcagtggtctaagtaaaggtgtactggtggtggaagcggctttgcgcagtggttcgctggtgacagcacgttgtgcgcttgagcaggggcgtgaagtttttgctttgccaggtccaatagggaatccgggaagcgaagggcctcactggttaataaaacagggggcgattcttgtgacggaaccggaagaaattctggaaaacttgcaatttggattgcactggttgccagacgcccctgaaaattcattttattcaccagatcaggaagacgtggcattgccatttcctgagctcctggctaacgtaggagatgaggtaacacctgttgacgtcgtcgctgaacgtgccggccaacctgtgccagaggtagttactcaactactcgaactggagttagcaggatggatcgcagctgtacccggcggctatgtccgattgaggagggcatgccatgttcgacgtactaatgtatttgtttga

SEQ ID NO: 4226 - DNA, 510 bp, Escherichia coli
atgtcagttttgcaagtgttacatattccggacgagcggcttcgcaaagttgctaaaccggtagaagaagtgaatgcagaaattcagcgtatcgtcgatgatatgttcgagacgatgtacgcagaagaaggtattggcctggcggcaacccaggttgatatccatcaacgtatcattgtaattgatgtttcggaaaaccgtgacgaacggctggtgttaatcaatccggagcttttagaaaaaagcggcgaaacaggcattgaagaaggttgcctgtcgatccctgaacaacgtgctttagtgccacgcgcagagaaagttaaaattcgcgccctggaccgcgacggtaaaccatttgaactggaagcagacggtctgttagccatctgtattcagcatgagatggatcacctggtcggcaaactgtttatggattatctgtcaccgctgaaacaacaacgtattcgtcagaaagttgaaaaactggatcgtctgaaagcccgggcttaa

SEQ ID NO: 4227 - DNA, 948 bp, Escherichia coli
gtgtcagaatcactacgtattatttttgcgggtacacctgactttgcagcgcgtcatctcgacgcgctgttgtcttctggtcataacatcgttggcgtgtttacccagccagaccgaccggcaggacgcggtaaaaaactgatgcccagcccggttaaagttctggctgaggacaaaggtctgcccgtttttcaacctgtttccctgcgtccacaagaaaaccagcaactggtcgccgatctgcaggctgatgttatggtcgtcgtcgcctatggtttaattctgcctaaagctgtgctggagatgccgcgtcttggctgtatcaacgttcatggttcactgctgccacgctggcgcggtgctgcaccaatccaacgctcactatgggcgggtgatgcagaaactggtgtgaccattatgcaaatggatgttggtttagacaccggtgacatgctttataagctctcctgcccgattactgcagaagataccagtggtacgctgtacgacaaactggcagagcttggcccacaagggcttattactacgttgaaacaactggcagacggcacggcgaaaccagaagttcaggacgaaactcttgtcacttacgccgaaaagttgagtaaagaagaagcgcgtattgactggtcactttcggcagcacagcttgaacgttgcattcgcgctttcaatccatggccaatgagctggctggaaattgaagggcagccggttaaagtctggaaagcatctgtcatcgatacgacaacaaaggctgcgccaggaacaatccttgaagccaataaacaaggcattcaggtagcgacaggtgatggcatcctgaatctgctctcaatgcaacctgcaggtaagaaagcgatgagcgtgcaagacctcctgaattctcgtcgggaatggtttgtaccgggcaaccgtctggcctga

SEQ ID NO: 4228 - DNA, 1290 bp, Escherichia coli
atgaaaaaacaacgtaatttacgtagcatggcggcccaggccattgaacaagtcgttgagcaagggcaatcactgagcaacattctgccaccgctccagcaaaaagtttccgataaagataaagctcttctccaggagttatgctttggcgtactgcgtacgctctcacagttagactggctgattaataagctaatggcccgtccgatgacaggcaaacagcgtactgttcattacctgattatggttggtttgtatcaactgctttatacccgcattccacctcatgccgcgctggctgaaacggttgaaggcgcagttgcaattaagcgcccgcaacttaagggattgattaacggtgtattacgtcagttccagcgtcagcaagatgagttattagccgagtttaatgccagtgatgcacgttatctgcatccttcctggttgctgaagcgtctgcaaaaggcgtatcccgagcagtggcaatccatcgtcgaagccaataaccagcgtccgccaatgtggctgcgcgttaatcgtacgcatcattcccgcgacagctggcttgcattgctggatgaagcaggaatgaaaggtttcccgcatgcggattaccctgatgctgtacagctggaaacacctgcacctgttcatgcgctacccggttttgaagaaggatgggttaccgttcaggatgcttcagcacaaggttgcatgacctggcttgctccacaaaatggtgaacacattctggatctttgcgccgccccaggcggtaaaacaacgcatattcttgaggttgctccagaggcgcaagttctggcggtcgatattgatgagcagcgcctctctcgcgtttacgacaatttaaaacgccttggtatgaaggcaaccgtaaaacaaggtgatggccgttacccttcccaatggtgtggtgagcaacagttcgatcgcattttattagatgcaccttgttcggcaactggtgtaattcgtcgccatccggatattaaatggttacgccgcgatcgcgatatcccagaactcgcgcagttgcagtctgaaattctcgacgccatctggtcgcatttaaaatccggaggaaccctggtctatgccacctgttcggtgttaccggaagagaatagcctgcagattaaagcctttttgcaacgtaccgctgatgccgaactttgcgaaacaggaacaccagagcaaccgggtaaacaaaatttgcccggtgccgaagagggcgacggcttcttttacgctaagctaatcaaaaagtga

SEQ ID NO: 4229 - DNA, 1377 bp, Escherichia coli
atgaaaattatcattctgggtgccggccaggttggcggcacactggcggaaaacctggttggcgagaacaacgatattactgttgtcgataccaacggtgagcgtctgcggaccttacaggataaatttgacctgcgagtcgtgcaggggcatggctctcatccacgcgtattgcgggaggcaggtgccgacgacgccgatatgctggttgctgtaaccagttcagatgaaaccaatatggttgcctgccaggtagcctactcacttttcaacacccctaatcgcatcgctcgtatccgctcaccagactacgtgcgcgatgccgataagctatttcattcagatgctgttccgattgatcatctgatcgcaccagagcagttggttatcgataatatttaccgactgattgagtatcccggcgcattgcaggtggtgaacttcgctgagggtaaagtcagcctggctgtggttaaagcctattatggcggcccgctgattggtaatgcactttcgaccatgcgcgaacatatgccacatatcgatactcgtgtggcagcaattttccgccacgatcgccccattcgtccgcaaggttcgaccattgttgaagctggtgatgaagtgttctttattgccgcttcacagcatatccgcgcggtgatgagtgaattacagcgactggaaaaaccgtataagcggatcatgctggttggtggcggtaatatcggtgcagggctggcgcgtcgtctggaaaaagattacagcgttaaactcatcgaacgtaatcagcagcgcgctgccgaactggcggaaaagttgcagaatacgatcgtcttttttggtgatgcgtcggatcaagaactgctggccgaagaacatatcgatcaagttgatctgtttattgccgtcaccaacgatgacgaggccaatatcatgtccgccatgcttgccaaacgtatgggtgcgaaaaaggtgatggtattgatccaacgtcgcgcttatgtggatctggttcaggggagcgtgatcgatattgcgatttcaccacaacaagcaactatttctgcgttgcttagccatgtgcgaaaagcagatattgttggtgtttcctcattacgccgcggcgtagcagaagctattgaagccgttgctcacggtgatgaaagcacctcacgcgttgtcggcagagtcattgacgaaatcaagctaccgccaggaacgattattggagcggtggtacgtggaaacgatgtgatgattgccaatgacaatctgcgcattgagcaaggcgatcacgtaattatgttcctcacagataaaaagtttattaccgacgtcgaaagactcttccagccaagtcctttcttcttgtaa

SEQ ID NO: 4230 - DNA, 414 bp, Escherichia coli
atgagcattattaaagaatttcgcgaatttgcgatgcgcgggaacgtggtggatttggcagtgggtgtcattatcggagcggcattcgggaagattgtatcttcactggttgccgatatcatcatgccacctctgggcttattaattggcgggatcgactttaaacagtttgctgtcacgctacgcgaggcccaaggggatatccctgctgttgtgatgcattacggtgtcttcattcaaaacgtctttgattttctgatagtggcctttgccatctttatggcgattaagctaatcaacaaactgaatcggaaaaaagaagaaccagcagcagcaacacctgcaccaactaaagaagaagtattactgacagaaattcgtgatttgctgaaagagcagaataaccgctcttaa

SEQ ID NO: 4231 - DNA, 219 bp, Escherichia coli
atgagccgatatcagcatactaaagggcagataaaggataatgcgatagaagcattactacatgatcccttattccgacagcgagtagagaaaaataagaaagggaaaggcagttacatgcgaaaaggaaaacatggcaatcgggggaactgggaggccagtggcaagaaagtaaatcacttttttaccactggccttctgctttcagacgcttgttaa

SEQ ID NO: 4232 - DNA, 426 bp, Escherichia coli
atgtatcgcattggtgagctggcaaaaatggcggaagtaacacccgacacgattcgttattacgaaaagcagcagatgatggagcatgaagtacgcaccgaaggtgggtttcgcctgtataccaaaagcgatctccagcgattgaaatttatccgccatgccagacaactaggtttcagtctggagtcgatccgcgagttgctgtcgatccgtatcgatccggaacaccatacctgtcaggagtcaaaaggcattgtgcaggaacgattgcaggaagtcgaagctcgtatagccgagttgcagagtatgcagcgttccttgcaacgccttaatgatacctgttgtgggaccgcccatagcagtgtttattgctcgattcttgaagctcttgaacaaggggcgagtggcgttaagagtggctgttga

SEQ ID NO: 4233 - DNA, 369 bp, Escherichia coli
atgtggttacttgaccagtgggcagagcgtcatatagcagaagcgcaagcgaaaggtgagtttgataacctggtaggtagcggcgaaccattgatactggatgatgattctcatgtgccaccggaattacgtgcggggtatcgcttgctgaagaatgctggttgcttaccgccagaacttgagaataggagggaagcaatacagcttctggatattctcaaaggtatccgtcatgatgatccgcaatatcaagaggttagtcgtcgattgtcattactggaattgaagctgcgacaagctggattgagtaccgattttttacgcggcgattatgctgacaagttgttgaacaaaatcaacgataactag

SEQ ID NO: 4234 - DNA, 384 bp, Escherichia coli
atgcgccatcgtaagagtggtcgtcaactgaaccgcaacagcagccatcgccaggctatgttccgcaatatggcaggttcactggttcgtcatgaaatcatcaagacgactctgcctaaagcgaaagagctgcgccgcgtagttgagccgctgattactcttgccaagactgatagcgttgctaatcgtcgtctggcattcgcccgtactcgtgataacgagatcgtggcaaaactgtttaacgaactgggcccgcgtttcgcgagccgtgccggtggttacactcgtattctgaagtgtggcttccgtgcaggcgacaatgcgccgatggcttacatcgagctggttgatcgttcagagaaagcagaagctgctgcagagtaa

SEQ ID NO: 4235 - DNA, 990 bp, Escherichia coli
atgcagggttctgtgacagagtttctaaaaccgcgcctggttgatatcgagcaagtgagttcgacgcacgccaaggtgacccttgagcctttagagcgtggctttggccatactctgggtaacgcactgcgccgtattctgctctcatcgatgccgggttgcgcggtgaccgaggttgagattgatggtgtactacatgagtacagcaccaaagaaggcgttcaggaagatatcctggaaatcctgctcaacctgaaagggctggcggtgagagttcagggcaaagatgaagttattcttaccttgaataaatctggcattggccctgtgactgcagccgatatcacccacgacggtgatgtcgaaatcgtcaagccgcagcacgtgatctgccacctgaccgatgagaacgcgtctattagcatgcgtatcaaagttcagcgcggtcgtggttatgtgccggcttctacccgaattcattcggaagaagatgagcgcccaatcggccgtctgctggtcgacgcatgctacagccctgtggagcgtattgcctacaatgttgaagcagcgcgtgtagaacagcgtaccgacctggacaagctggtcatcgaaatggaaaccaacggcacaatcgatcctgaagaggcgattcgtcgtgcggcaaccattctggctgaacaactggaagctttcgttgacttacgtgatgtacgtcagcctgaagtgaaagaagagaaaccagagttcgatccgatcctgctgcgccctgttgacgatctggaattgactgtccgctctgctaactgccttaaagcagaagctatccactatatcggtgatctggtacagcgtaccgaggttgagctccttaaaacgcctaaccttggtaaaaaatctcttactgagattaaagacgtgctggcttcccgtggactgtctctgggcatgcgcctggaaaactggccaccggcaagcatcgctgacgagtaa

SEQ ID NO: 4236 - DNA, 621 bp, Escherichia coli
atggcaagatatttgggtcctaagctcaagctgagccgtcgtgagggcaccgacttattccttaagtctggcgttcgcgcgatcgataccaagtgtaaaattgaacaagctcctggccagcacggtgcgcgtaaaccgcgtctgtctgactatggtgtgcagttgcgtgaaaagcaaaaagttcgccgtatctatggtgtgctggagcgtcagttccgtaactactacaaagaagcagcacgtctgaaaggcaacaccggtgaaaacctgttggctctgctggaaggtcgtctggacaacgttgtataccgtatgggcttcggtgccactcgtgcagaagcacgtcagctggttagccataaagcaattatggtaaacggtcgtgttgttaacatcgcttcttatcaggttagtccgaatgacgttgtaagcattcgtgagaaagcgaagaagcagtctcgcgtgaaagccgctctggagctggctgagcagcgtgaaaagccaacctggctggaagttgatgctggcaagatggaaggtacgtttaagcgtaagccggagcgttctgatctgtctgcggacattaacgaacacctgatcgtcgagctttactccaagtaa

SEQ ID NO: 4237 - DNA, 390 bp, Escherichia coli
atggcaaaggcaccaattcgtgcacgtaaacgtgtaagaaaacaagtctctgacggcgtggctcatatccatgcttctttcaacaacaccatcgtgactatcactgatcgtcagggtaacgcgttgggttgggcaacagccggtggttccggtttccgtggttctcgcaaatccactccgtttgcagcacaggttgcagcagagcgttgcgctgacgccgtgaaagaatacggcatcaagaatctggaagttatggttaaaggtccgggtccaggccgcgaatctactattcgtgctctgaacgccgcaggtttccgcatcactaacattactgatgtgactccgatccctcataacggttgtcgtccgccgaaaaaacgtcgcgtataa

SEQ ID NO: 4238 - DNA, 357 bp, Escherichia coli
gtggcccgtatagcaggcattaacattcctgatcataagcatgccgtaatcgcattaacttcgatttatggcgtcggcaagacccgttctaaagccatcctggctgcagcgggtatcgctgaagatgttaagatcagtgagctgtctgaaggacaaatcgacacgctgcgtgacgaagttgccaaatttgtcgttgaaggtgatctgcgccgtgaaatcagcatgagcatcaagcgcctgatggatcttggttgctatcgcggtttgcgtcatcgtcgtggtctcccggttcgcggtcagcgtaccaagaccaacgcacgtacccgtaagggtccgcgcaaaccgatcaagaaataa

SEQ ID NO: 4239 - DNA, 1332 bp, Escherichia coli
atggctaaacaaccgggattagattttcaaagtgccaaaggtggcttaggcgagctgaaacgcagactgctgtttgttatcggtgcgctgattgtgttccgtattggctcttttattccgatccctggtattgatgccgctgtacttgccaaactgcttgagcaacagcgaggcaccatcattgagatgtttaacatgttctctggtggtgctctcagccgtgcttctatctttgctctggggatcatgccgtatatttcggcgtcgatcattatccagctactgacggtggttcatccaacgttggcagaaattaagaaagaaggggagtctggtcgtcgtaagatcagccagtacacccgctacggtactctggtgctggcaatattccagtcgatcggtattgctactggtctgccgaatatgcctggtatgcaaggcctggtgattaacccgggctttgcattctacttcaccgctgttgtaagtctggtcacaggaaccatgttcctgatgtggttgggcgaacagatcactgaacgaggtatcggcaacggtatttcaatcattatcttcgccggtattgtcgcgggactcccgccagccattgcccatactatcgagcaagcgcgtcaaggcgacctgcacttcctcgtgttgctgttggttgcagtattagtatttgcagtgacgttctttgttgtatttgttgagcgtggtcaacgccgcattgtggtaaactacgcgaaacgtcagcaaggtcgtcgtgtctatgctgcacagagcacacatttaccgctgaaagtgaatatggcgggggtaatcccggcaatcttcgcttccagtattattctgttcccggcgaccatcgcgtcatggttcgggggcggtactggttggaactggctgacaacaatttcgctgtatttgcagcctgggcaaccgctttatgtgttactctatgcgtctgcaatcatcttcttctgtttcttctacacggcgttggttttcaacccgcgtgaaacagcagataacctgaagaagtccggtgcatttgtaccaggaattcgtccgggagagcaaacggcgaagtatatcgataaagtaatgacccgcctgaccttggttggtgcgctgtacattacctttatctgcctgatcccggagttcatgcgtgatgcaatgaaagtaccgttctacttcggtgggacctcactgcttatcgttgttgtcgtgattatggactttatggctcaagtgcaaactctgatgatgtccagtcagtatgagtctgcattgaagaaggcgaacctgaaaggctacggccgataa

SEQ ID NO: 4240 - DNA, 435 bp, Escherichia coli
atgcgtttaaatactctgtctccggccgaaggctccaaaaaggcgggtaaacgcctgggtcgtggtatcggttctggcctcggtaaaaccggtggtcgtggtcacaaaggtcagaaatctcgttctggcggtggcgtacgtcgcggtttcgagggtggtcagatgcctctgtaccgtcgtctgccgaaattcggcttcacttctcgtaaagcagcgattacagccgaagttcgtctgtctgacctggctaaagtagaaggcggtgttgtagacctgaacacgctgaaagcggctaacattatcggtatccagatcgagttcgcgaaagtgatcctggctggcgaagtaacgactccggtaactgttcgtggcctgcgtgttactaaaggcgctcgtgctgctatcgaagctgctggcggtaaaatcgaggaataa

SEQ ID NO: 4241 - DNA, 180 bp, Escherichia coli
atggcaaagactattaaaattactcaaacccgcagtgcaatcggtcgtctgccgaaacacaaggcaacgctgcttggcctgggtctgcgtcgtattggtcacaccgtagagcgcgaggatactcctgctattcgcggtatgatcaacgcggtttccttcatggttaaagttgaggagtaa

SEQ ID NO: 4242 - DNA, 504 bp, Escherichia coli
atggctcacatcgaaaaacaagctggcgaactgcaggaaaagctgatcgcggtaaaccgcgtatctaaaaccgttaaaggtggtcgtattttctccttcacagctctgactgtagttggcgatggtaacggtcgcgttggttttggttacggtaaagcgcgtgaagttccagcagcgatccagaaagcgatggaaaaagcccgtcgcaatatgattaacgtcgcgctgaataacggcactctgcaacaccctgttaaaggtgttcacacgggttctcgcgtattcatgcagccggcttccgaaggtaccggtatcatcgccggtggtgcaatgcgcgccgttctggaagtcgctggggttcataacgttctggctaaagcgtatggttccaccaacccgattaacgtggttcgtgcaactatcgatggcctggaaaatatgaattctccagaaatggtcgctgccaagcgtggtaaatccgttgaagaaattctggggaaataa

SEQ ID NO: 4243 - DNA, 354 bp, Escherichia coli
atggataagaaatctgctcgtatccgtcgtgcgacccgcgcacgccgcaagctccaggagctgggcgcaactcgcctggtggtacatcgtaccccgcgtcacatttacgcacaggtaattgcaccgaacggttctgaagttctggtagctgcttctactgtagaaaaagctatcgctgaacaactgaagtacaccggtaacaaagacgcggctgcagctgtgggtaaagctgtcgctgaacgcgctctggaaaaaggcatcaaagatgtatcctttgaccgttccgggttccaatatcatggtcgtgtccaggcactggcagatgctgcccgtgaagctggccttcagttctaa

SEQ ID NO: 4244 - DNA, 534 bp, Escherichia coli
atgtctcgtgttgctaaagcaccggtcgttgttcctgccggcgttgacgtaaaaatcaacggtcaggttattacgatcaaaggtaaaaacggcgagctgactcgtactctcaacgatgctgttgaagttaaacatgcagataataccctgaccttcggtccgcgtgatggttacgcagacggttgggcacaggctggtaccgcgcgtgccctgctgaactcaatggttatcggtgttaccgaaggcttcactaagaagctgcagctggttggtgtaggttaccgtgcagcggttaaaggcaatgtgattaacctgtctctgggtttctctcatcctgttgaccatcagctgcctgcgggtatcactgctgaatgtccgactcagactgaaatcgtgctgaaaggcgctgataagcaggtgatcggccaggttgcagcggatctgcgcgcctaccgtcgtcctgagccttacaaaggcaagggtgttcgttacgccgacgaagtcgtgcgtaccaaagaggctaagaagaagtaa

SEQ ID NO: 4245 - DNA, 393 bp, Escherichia coli
atgagcatgcaagatccgatcgcggatatgctgacccgtatccgtaacggtcaggccgcgaacaaagctgcggtcaccatgccttcctccaagctgaaagtggcaatcgccaacgtgctgaaggaagaaggttttattgaagattttaaagttgaaggcgacaccaagcctgaactggaacttactctgaagtatttccagggcaaagctgttgtagaaagcattcagcgtgtcagccgcccaggtctgcgcatctataaacgtaaagatgagctgccgaaagttatggcgggtctgggtatcgcagttgtttctacctctaaaggtgttatgactgatcgtgcagcgcgccaggctggtcttggtggcgaaattatctgctacgtagcctaa

SEQ ID NO: 4246 - DNA, 306 bp, Escherichia coli
atggctaagcaatcaatgaaagcacgcgaagtaaaacgcgtagctttagctgataaatacttcgcgaaacgcgctgaactgaaagcgatcatctctgatgtgaacgcttccgacgaagatcgttggaacgctgttctcaagctgcagactctgccgcgtgattccagcccgtctcgtcagcgtaaccgctgccgtcaaacaggtcgtccgcatggtttcctgcggaagttcgggttgagccgtattaaggtccgtgaagccgctatgcgcggtgaaatcccgggtctgaaaaaggctagctggtaa

SEQ ID NO: 4247 - DNA, 540 bp, Escherichia coli
atggcgaaactgcatgattactacaaagacgaagtagttaaaaaactcatgactgagtttaactacaattctgtcatgcaagtccctcgggtcgagaagatcaccctgaacatgggtgttggtgaagcgatcgctgacaaaaaactgctggataacgcagcagcagatttggcagcaatctccggtcaaaaaccgctgatcaccaaagcacgcaaatctgttgcaggcttcaaaatccgtcagggctatccgatcggctgtaaagtaactctgcgtggcgaacgcatgtgggagttctttgagcgcctgatcactattgctgtacctcgtatccgtgacttccgtggcctgtccgctaagtctttcgacggtcgtggtaactacagcatgggtgtccgtgagcagatcatcttcccagaaatcgactacgataaagtcgaccgcgttcgtggtttggatattaccattaccactactgcgaaatctgacgaagaaggccgcgctctgctggctgcctttgacttcccgttccgcaagtaa

SEQ ID NO: 4248 - DNA, 315 bp, Escherichia coli
atggcagcgaaaatccgtcgtgatgacgaagttatcgtgttaaccggtaaagataaaggtaaacgcggtaaagttaagaatgtcctgtcttccggcaaggtcattgttgaaggtatcaacctggttaagaaacatcagaagccggttccggccctgaaccaaccgggtggcatcgttgaaaaagaagccgctattcaggtttccaacgtagcaatcttcaatgcgacaaccggcaaggctgaccgtgtaggctttagattcgaagacggtaaaaaagtccgtttcttcaagtctaacagcgaaactatcaagtaa

SEQ ID NO: 4249 - DNA, 372 bp, Escherichia coli
atgatccaagaacagactatgctgaacgtcgccgacaactccggtgcacgtcgcgtaatgtgtatcaaggttctgggtggctcgcaccgtcgctacgcaggcgtaggcgacatcatcaagatcaccatcaaagaagcaattccgcgtggtaaggtcaaaaaaggtgatgtgctgaaggcggtagtggtgcgcaccaagaagggtgttcgtcgcccggacggttctgtcattcgcttcgatggtaatgcttgtgttcttctgaacaacaacagcgagcagcctatcggtacgcgtatttttgggccggtaactcgtgagcttcgtagtgagaagttcatgaaaattatctctctggcaccagaagtactctaa

SEQ ID NO: 4250 - DNA, 255 bp, Escherichia coli
atgaccgataaaatccgtactctgcaaggtcgcgttgttagcgacaaaatggagaaatccattgttgttgctatcgaacgttttgtgaaacacccgatctacggtaaattcatcaagcgtacgaccaaactgcacgtacatgacgagaacaacgaatgcggtatcggtgacgtggttgaaatccgcgaatgccgtccgctgtccaagactaaatcctggacgctggttcgcgttgtagagaaagcggttctgtaa

SEQ ID NO: 4251 - DNA, 192 bp, Escherichia coli
atgaaagcaaaagagctgcgtgagaagagcgttgaagagctgaacaccgagctgctgaacctgctgcgtgagcagttcaacctgcgtatgcaggctgcaagtggccagctgcaacagtctcacctgttgaagcaagtgcgtcgcgatgtcgcacgcgttaagactttactgaacgagaaggcgggtgcgtaa

SEQ ID NO: 4252 - DNA, 411 bp, Escherichia coli
atgttacaaccaaagcgtacaaaattccgtaaaatgcacaaaggccgtaaccgcggtctggcgcagggtacggatgttagcttcggcagcttcggtctgaaagctgttggccgtggtcgtctgactgcacgtcagatcgaagcagcacgtcgtgctatgacccgtgcagttaagcgtcaaggtaagatctggatccgtgtgttcccggacaaaccgatcactgaaaagccgctggcagtgcgtatgggtaaaggtaaaggtaacgtggagtattgggttgccttgattcagccgggtaaagtcctgtatgaaatggacggtgttccggaagagctggcccgtgaagcattcaagctggcagcagcgaaactgccgattaaaaccacctttgtaactaagacggtgatgtaa

SEQ ID NO: 4253 - DNA, 702 bp, Escherichia coli
atgggtcagaaagtacatcctaatggtattcgcctgggtattgtaaaaccatggaactctacctggtttgcgaacaccaaagaattcgctgacaacctggacagcgattttaaagtacgtcagtacctgactaaggaactggctaaagcgtccgtatctcgtatcgttatcgagcgtccggctaagagcatccgtgtaaccattcacactgctcgcccgggtatcgttatcggtaaaaaaggtgaagacgtagaaaaactgcgtaaggtcgtagcggacatcgctggcgttcctgcacagatcaacatcgccgaagttcgtaagcctgaactggacgcaaaactggttgctgacagcatcacttctcagctggaacgtcgcgttatgttccgtcgtgctatgaagcgtgctgtacagaacgcaatgcgtctgggcgctaaaggtattaaagttgaagttagcggccgtctgggcggcgcggaaatcgcacgtaccgaatggtaccgcgaaggtcgcgtaccgctgcacactctgcgtgctgacatcgactacaacacctctgaagcgcacaccacttacggtgtaatcggcgttaaagtgtggatcttcaaaggcgagatcctgggtggtatggctgctgttgaacaaccggaaaaaccggctgctcagcctaaaaagcagcagcgtaaaggccgtaaataa

SEQ ID NO: 4254 - DNA, 333 bp, Escherichia coli
atggaaactatcgctaaacatcgccatgctcgttcttctgctcagaaggttcgccttgttgctgacctgattcgcggtaagaaagtgtcgcaggctctggatattttgacctacaccaacaagaaagcggctgtactggtcaagaaagttctggaatctgccattgctaacgctgaacacaacgatggcgctgacattgacgatctgaaagttacgaaaattttcgtagacgaaggcccgagcatgaagcgcattatgccgcgtgcaaaaggtcgtgcagatcgcatcctgaagcgcaccagccacatcactgtggttgtgtccgatcgctga

SEQ ID NO: 4255 - DNA, 279 bp, Escherichia coli
atgccacgttctctcaagaaaggtccttttattgacctgcacttgctgaagaaggtagagaaagcggtggaaagcggagacaagaagcccctgcgcacttggtcccgtcgttcaacgatctttcctaacatgatcggtttgaccatcgctgtccataatggtcgtcagcacgttccggtatttgtaaccgacgaaatggtcggtcacaaactgggtgaattcgcaccgactcgtacttatcgcggccacgctgctgataaaaaagcgaagaagaaataa

SEQ ID NO: 4256 - DNA, 822 bp, Escherichia coli
atggcagttgttaaatgtaaaccgacatctccgggtcgtcgccacgtagttaaagtggttaaccctgagctgcacaagggcaaaccttttgctccgttgctggaaaaaaacagcaaatccggtggtcgtaacaacaatggccgtatcaccactcgtcatatcggtggtggccacaagcaggcttaccgtattgttgacttcaaacgcaacaaagacggtatcccggcagttgttgaacgtcttgagtacgatccgaaccgttccgcgaacatcgcgctggttctgtacaaagacggtgaacgccgttacatcctggcccctaaaggcctgaaagctggcgaccagattcagtctggcgttgatgctgcaatcaaaccaggtaacaccctgccgatgcgcaacatcccggttggttctactgttcataacgtagaaatgaaaccaggtaaaggcggtcagctggcacgttccgctggtacttacgttcagatcgttgctcgtgatggtgcttatgtcaccctgcgtctgcgttctggtgaaatgcgtaaagtagaagcagactgccgtgcaactctgggcgaagttggcaatgctgagcatatgctgcgcgttctgggtaaagcaggtgctgcacgctggcgtggtgttcgtccgaccgttcgcggtaccgcgatgaacccggtagaccacccacatggtggtggtgaaggtcgtaactttggtaagcacccggtaactccgtggggcgttcagaccaaaggtaagaagacccgcagcaacaagcgtactgataaattcatcgtacgtcgccgtagcaaataa

SEQ ID NO: 4257 - DNA, 303 bp, Escherichia coli
atgattcgtgaagaacgtctgctgaaggtgctgcgtgcaccgcacgtttctgaaaaagcgtctactgcgatggaaaaatccaacaccatcgtactcaaagttgctaaagacgcgaccaaagcagaaatcaaagctgctgtgcagaaactgtttgaagtcgaagtcgaagtcgttaacaccctggtagttaaagggaaagttaaacgtcacggacagcgtatcggtcgtcgtagcgactggaaaaaagcttacgtcaccctgaaagaaggccagaatctggacttcgttggcggcgctgagtaa

SEQ ID NO: 4258 - DNA, 606 bp, Escherichia coli
atggaattagtattgaaagacgcgcagagcgcgctgactgtttccgaaactaccttcggtcgtgatttcaacgaagcgctggttcaccaggttgttgttgcttatgcagctggtgctcgtcagggtactcgtgctcagaagactcgtgctgaagtaactggttccggtaaaaaaccgtggcgccagaaaggcaccggccgtgcgcgttctggttctatcaagagcccgatctggcgttctggtggcgtgacctttgctgctcgtccgcaggaccacagtcaaaaagttaacaagaagatgtaccgcggcgcgctgaaaagcatcctgtccgaactggtacgtcaggatcgtctgatcgttgtcgagaagttctctgtagaagcgccgaaaactaagctgctggcacagaaactgaaagacatggctctggaagatgtgctgatcatcaccggtgagctggacgagaacctgttcctggctgcgcgcaacctgcacaaggttgacgtacgcgatgcaactggtatcgacccggttagcctgatcgccttcgacaaagtcgtaatgactgctgatgctgttaagcaagttgaggagatgctggcatga

SEQ ID NO: 4259 - DNA, 630 bp, Escherichia coli
atgattggtttagtcggtaaaaaagtgggtatgacccgtatcttcacagaagacggcgtttctatcccagtaaccgtaatcgaagttgaagcaaaccgcgttactcaggttaaagacctggctaacgatggctaccgtgctattcaggtgaccaccggtgctaaaaaagctaaccgtgtgaccaagcctgaagctggacacttcgctaaagctggcgtagaagctggccgtggtctgtgggaattccgcctggctgaaggcgaagagttcactgtaggtcagagcattagcgttgaactgtttgctgacgttaaaaaagttgacgtaactggcacctctaaaggtaaaggtttcgcaggtaccgttaagcgctggaacttccgtacccaggacgctactcacggtaactccttgtctcaccgcgttccgggttctatcggtcagaaccagactccgggcaaagtgttcaaaggcaagaaaatggcaggtcagatgggtaacgaacgtgtaaccgttcagagccttgacgtagtacgcgttgacgctgagcgcaacctgctgctggttaaaggcgctgtcccgggtgcaaccggtagcgacctgatcgttaaaccagctgtgaaggcgtaa

SEQ ID NO: 4260 - DNA, 312 bp, Escherichia coli
atgcagaaccaaagaatccgtatccgcctgaaagcgtttgatcatcgtctgatcgatcaagcaaccgcggaaatcgtcgagactgctaagcgcactggtgcgcaggtccgtggtccgatcccgctgccgacacgcaaagagcgcttcactgttctgatctccccgcacgtcaacaaagacgcgcgcgatcagtacgaaatccgtactcacttgcgtctggttgacatcgttgagccaaccgagaaaaccgttgatgctctgatgcgtctggatctggctgccggtgtagacgtgcagatcagcctgggttaa

SEQ ID NO: 4261 - DNA, 420 bp, Escherichia coli
atgtttgaattctatatcgccgcgcgtgagcagaaagaaacgggtcaccctggtatcttctcccgacaaaaacacagcaccataatatatgtcatttgtttattgctgatttgcctgtggtttgcaggaatggtgttggttggtgggtatgcccggcagctatgggcactttggatagtaaaagcagaagtcactgtagatgctgaaacgcccgcttttaaacaatcaacacaacactattttttcaaaaaacagccactccccgtcgtcgaatccgtcgaggaggaagatgaaccaggcgtcgcggttgagaatgccccctcttcttctgaagacgaagaaaatactgtagaagaaagcgacgagaaagccggtttaagagagcgtgtcaaaaatgcgctgaacgaacttgagagataa

SEQ ID NO: 4262 - DNA, 1470 bp, Escherichia coli
atgtctacgagaagagaagtcattctttcctggttgcgtgagaaacgtcagacctggcgtctgtgctatttgttgggtgaggctggaagtggaaaaacctggctggcgcagcaactacaaaaagataaacatcgccgtgtgattactttaagcctcgttgtttcctggcaaggtaaggccgcatggatcgttaccgacgataatgcggctgaacagggctgccgtgacagcgcctggacgcgagatgagatggcgggtcaattactgcatgcacttcatcgaactgatagtcgctgccctcttattattattgaaaatgctcacctgaatcaccgccgcatacttgatgatctccaacgcgcgatatctcttattcctgacggtcaatttttgctgatcggcagacccgatcgaaaagttgaacgtgattttaaaaaacagggcattgaacttgtctcgacaggtcgtctgacggagcacgagcttaaggcaagcatccttgaaggtcagaatattgaccagcccgatctccttttaaccgccagagttctgaaacggatagctttattatgtcggggagatcgcagaaagctggcgcttgccggcgaaacaattagcttattacagcaagccgagcagaccagcgttttcactgcaaaacaatggcgaatgatttaccgcgtattaggtgataagcgcccccggaaaatgcagcttgccgtggtgatgagtggaaccattctcgcacttacctgtggttggctactgctgtcctctttcacagctccgttacccgttcctgcgtggctgatacccgtaacgccagtagttaaacaagatatgactaaggatattgctcatgtggtgatgcgcgatagtgaggcgctaagcgtgttatacggcgtatgggggtacgaggttccagccgattcggcctggtgcgatcaggcagtaagagcggggctggtatgtaaaagtgggaacgcttctttacaaacattggtagatcagaatttgccctggatcgcatcgcttaaagtcggggacaaaaaattgcctgttgtggtcgttcgcgtcggtgatgctaccgttgatgtactcgtagggcagcaaacctggacgctgacacataaatggtttgagttggtatggacgggtgattatcttctgttgtggaaaatgtcgccggaaggggagagtaccattacgcgtgatagcagcgaggaagagattctctggctggaaacgatgttaaaccgcgcattgcatatttcgacagaatcttcggcagagtggcgtcccttgttggtagaaaaaataaagcaatttcaaaaaagccatcacttgaaaactgacggtgttgttggcttttcaacgttagtacatctctggcaggtggcgggggagagtgcctacttatatcgggatgaagcaaatatttccccagaaacaacagtgaaggggaaatga

SEQ ID NO: 4263 - DNA, 816 bp, Escherichia coli
gtgcccacactacctttccctttccatctggcgaatcataataaagatgctgccatcaatatattgattatatttataagcatagggttgattatttttaatgtgaattatttccatacaactatagttaaaaatgaacagatcattaatcaaccaacaaatgcatttcagtctgaattcagccttgccgctttatggcgcaacgaaaatcatgctggggtaaaagatgcaaatcccgtggcagttaatcaggaaacacctaagctctctatagcgcttaatggcattgtactcacatcgaatgatgagacttcttttatcttaattaatgaggggaacgaacaaaagcgatactccctcaacgaagcccttgagtcagcgccgggaacgtttattagaaaaataaataaaaccagcgttgtgtttgaaactcacgggcattacgaaaaagtaactctccatccagggctacctgacatcatcaagcagcctgattcggaaaatcaaaatgtactcgccgattatattatcgccacacctatacgtgatggagaacagatatacggtcttcgattgaatcctcgtaagggtctcaatgcatttaccaccagcttgctgcaacctggggatatcgccctcaggatcaataatctttcgctgacccaccctgatgaggtttcacaggcattaagtttactgctaactcaacaaagtgctcagtttacaattcgtcgcaacggcgtaccccgcttgataaatgtttccgtcgcggaacttacaggaatgaatggacagcgcaatgaagggactcaataa

SEQ ID NO: 4264 - DNA, 1953 bp, Escherichia coli
atgaagggactcaataaaatcacctgctgcttgctggcagcactactcatgccttgtgcaggacacgctgagaacgaacaatacggcgctaacttcaataacgccgatatccgccagttcgtggaaatagtgggtcagcatcttggcaaaacgatcctgatcgacccttcggtacagggaaccatttccgtacgcagtaatgatacgtttagccaacaggagtactaccagttctttttaagtattcttgatctttacggttattccgtgatcacactggacaatggttttctgaaagtggtgcgctcagctaatgtaaaaacatcgccagggatgattgctgacagttctcgtccaggcgtaggtgatgagttggtcacccgaatcgtaccgcttgagaacgttcctgctcgtgacctggctcccctgctccgccagatgatggatgcgggtagcgtcggtaatgttgtgcattatgaaccctccaacgttcttattctgaccggtcgtgcctccaccattaataaactgattgaagtcataaagcgcgttgatgtcatcggcacagagaagcagcaaattattcatctggaatatgcatcagcggaagatctcgccgagattcttaatcaattaatcagcgaaagccacggtaaaagccagatgcctgccctcctttccgcgaagattgtggcggataagcgaaccaactctcttatcatcagcgggccggaaaaagcacgccagcgcataacttcattactgaaaagccttgatgtagaagagagcgaggaaggaaatacccgggtctattacctgaaatatgctaaagccacgaatctggtggaagtgctaaccggtgtttccgaaaagctgaaagatgaaaaagggaattcgcgtaagccttcttctacttctgcgatggataatgtggccattaccgccgatgaacagaccaactcgttggtcattaccgctgaccagtccgtccaggagaaactcgccacggtaattgcgcgtctggatattcgccgtgcacaggtgctggttgaggcaatcatcgtcgaagttcaggatggaaatggactcaacctcggcgtgcaatgggcgaataaaaacgttggcgcacagcaatttaccaatacgggattaccggtttttaacgctgcgcaaggtgtagctgattataaaaagaatggcgggatcaccagcgcgaatcctgcctgggatatgtttagcgcctacaatggcatggctgcaggcttcttcaatggcgactggggcgtattgttgactgcgctggccagtaacaataaaaatgacatcctcgccaccccgagcatcgtaacgctggataataaactcgcgtccttcaacgttggtcaggatgtgccggtgctatccggctctcagaccacttctggggataacgtctttaatactgtcgaacgcaaaacggtgggcacaaaactcaaagtcactccgcaggtcaatgaaggcgacgcggtactgctcgaaatagagcaggaggtttccagcgttgactcttcgtctaattcgacgctcggcccgacatttaacacccgtactattcaaaacgctgtgctggttaaaaccggtgaaacggtggtcctgggcggattgctggatgatttttctaaagagcaagtgtcaaaggttcctctgcttggcgatattcctttagtgggacaactcttccgctatacctcgaccgagcgcgctaaacgcaacttgatggtatttatccgcccgacgattatccgtgacgatgatgtttatcgctcactgtcaaaagagaaatacacccgctaccgtcaggagcaacagctgcgaatcgacgggaaatcaaaagcgttggttggctcggaagatttgccggtgctgaatgagaacacgttcaacagtcacgcccctgcgccatcgtcacggtga

SEQ ID NO: 4265 - DNA, 1482 bp, Escherichia coli
atgagaattcactcaccgtaccccgccagttgggcgctggcacaacgaattggttatctctattcagagggcgagattatttatctcgccgatacgccattcgaacggttactcgatattcaacgtcaagttggccagtgccagaccatgaccagcttgtcacaggctgattttgaagcccgactggaagcggtgttccatcagaataccggtgagtcgcaacagattgcgcaggatatcgatcagtccgtcgatcttctctcgctttcggaagagatgcccgcaaatgaagatctcctgaatgaagattcagcggcaccggttatccgcttgatcaatgctattttgagtgaggccatcaaagaaaccgcctccgatatccacattgaaacctatgaaaaaacaatgtcgatccgttttcgcatcgacggcgttttgcggacaattttacagcccaacaaaaaactggcggcactgcttatctcccgaattaaggtcatggctcgtcttgatatcgccgaaaaacgtattccacaggatggaagaatcagtttgcgtatcgggcgacgtaacatagatgtccgcgtatccacactgccatccatctatggtgaacgcgctgtgctccgcctgctggataaaaacagcctccagctttcattgaacaacctggggatgacggcagcggataaacaggatttagaaaatctcattcagcttccgcacggtattatcctggtaacagggccgacaggctccggtaaaagcaccacgctctacgccattctttcggcgcttaatacccctggccgtaatattctgacggtagaagatcccgtggaatatgaactggaaggcataggacaaacgcaggtgaatacccgcgtggatatgtctttcgctcgcggcctgcgcgccatacttcgccaggacccggatgtcgtcatggtgggggagattcgtgatacagaaaccgcgcaaattgcggttcaggcctcgctcacaggccatctggtactctcaacactccacactaacagtgcatcaggcgcagtcacccggctacgcgacatgggcgtcgaatcattcctgctttcgtcttcactggcagggattatcgcgcaacgtctggttcgtcgtctgtgtccgcaatgccgacaattcacgcccgtatcgccgcaacaagcgcagatgtttaaatatcatcagctcgcggtgacaacaattggcactcccgtaggttgccctcattgccatcaatccggttatcaggggcgcatggcgatccacgaaatgatggtggtgacgccggaattgcgggccgctattcatgaaaatgtggatgaacaagcactggagcgactggtccggcaacaacacaatgccttaatcaaaaatggcctgcaaaaagtgatacgcggtgacacctcctgggatgaggttatgcgcgtcgccagtgccacgctggagaacgaagcatga

SEQ ID NO: 4266 - DNA, 1197 bp, Escherichia coli
atgaattatcgctatcgcgccatgacccaggatggtcaaaaattgcaggggatcattgatgctaacgatgaacgtcaggcacgactgcggctgcgtgaagaagggcttttcctgttggatattcgcccccaaaaaagttcgggagtaaaaacacgtcgcccgaggatcagccatagtgaactaacgcttttcacccggcagttggcaaccttaagcgcagcggcattacccctggaagagagccttgccgtaattggtcaacaaagcagtaataatcgactggctgacgtgttaaatcaggtacgcagcgccatccttgaagggcatcccctttccgatgcgttacaacattttcccacgcttttcgattcgctctaccgtaccctggtaaaagcgggcgaaaagagcggtctgctggccccggtgttggaaaagctggctgattacaatgaaaaccggcagaaaatccgcagcaagctcattcagtcactgatctacccctgcatgctcactacggtggcgattgtggtcgtgattattctcctcactgctgtcgtgcccaaaattaccgaacagttcgtgcatatgaagcagcaactgccactgagtacacgcattcttttaggtctgagcgacacgttgcaacgtaccggcccgacattattagcgacagtatttattgtcgctgtgggtttctggctctggttaaaacgcggcaataaccgccaccgttttcatgccatgttactgcgcgttgcgctcatcggcccgctgatttgcgccattaacagcgcacgctatctccgcactttaagtattttgcaatccagcggcgtccctctgctggatgggatgaatttgtccaccgaaagcctcaacaacctcgaaattcgccagcgcctggcaaatgcggcagaaaacgttcgccagggtaacagcattcatctttcactggaacaaaccgcaattttcccgccgatgatgctctacatggtggcctctggcgaaaaaagcgggcaactcggcacgttaatggtcagagccgcagataaccaggagacactccaacaaaatcggatcgccttaacgctctccatcttcgagccagcactcattattacgatggcactgatcgtcctgtttattgtcgtgtcggtactccaacctcttcttcaacttaactcaatgattaattaa

SEQ ID NO: 4267 - DNA, 438 bp, Escherichia coli
atgcgcgcaacggataagcaacgcggttttacattactggaaattatggtggtaattgtcatcattggcgtactcgccagcctggtggttcccaacctgatgggcaataaagaaaaggcggataaacaaaaagccgtcagcgatattgtggcgctggaaaacgccctggatatgtacaagctcgacaatcatcgctatccaaccacaaatcaggggcttgaatccttagtagaagcgccgacactgccaccgctggccgcaaactataacaaggaaggttatatcaagcgtctgcctgccgatccctggggcaatgattatgtcctcgttaatcctggtgagcatggtgcatacgatctgctttcagcaggacccgatggtgaaatgggaaccgaggacgacatcaccaactggggtttgagcaagaagaaaaagtaa

SEQ ID NO: 4268 - DNA, 510 bp, Escherichia coli
atgaatcagcaacgcgggtttaccctgctggagatgatgctggtgctggcactggtcgctatcacggcaagtgtggtgctcttcacatatggtcgggaggatgccgccagcactcgtgcgcgcgaaacagcggcgcggtttaccgctgcacttgaattagccatcgaccgcgccacgctcagtggtcagcctgtcggtatccatttctctgattcagcatggcgcattatggtaccgggcaaaacaccatcagcctggcgctgggttccattacaagaagatgccgcagacgagagcaaaaatgactggggtgaagaactctcaattcaacttcagccatttaaacctgatgacagcaaccaaccgcaggtggtgattctggccgacggacaaatcacgcccttctctttgttgatggctaatgccgggaccagtgagccgctcctgacgttagtcagttcaggctcatggcccctggatcaaacgctcgccagagatacccgcccatga

SEQ ID NO: 4269 - DNA, 396 bp, Escherichia coli
atgaacaaacaatcagggatgacactgcttgaagtcttactggcgatgagtattttcaccgctgttgcgctgactttaatgagcagtatgcaagggcaacgaactgccatcgagcggatgcgtaatgagacgctggcattgtggatagcggataaccagcttcagtcacaagattcattcgacgaggaaaacacgtccagttctggcaaagagttaataaatggcgaagagttaataaatggcgaagagtggaactggcgcagcgatatccactcaagcaaagacggcacgcttctggaacacaccataacggtgacattacccagcggtcagacaacctcgcttacgcgctatcaaagcatcaataataaatccgggcaggcacaagatgattaa

SEQ ID NO: 4270 - DNA, 588 bp, Escherichia coli
atgattaatcgccagcagggtttcacattgctggaagtcatggcggcgctggcgattttctcaatgcttagcgtgctggcgtttatgattttttctcaagcttccgagttgcatcaacgttcacagaaagaaatccagcagttcaatcagctacagcgcaccatcaccattcttgataacgatctcctgcaactggtcgcccggcggaatcggagtacggacaaaatcatggtgttgggtgaagaagcgatttttaccacgcaaagtcgcgatccgctggcccctctcagtgaagcacaaaccttactcactgttcactggtatctgcgaaatcatacgctctaccgtgctgttcgtgcttctgtggatggcaggaaggatcaacccgcccaggcgatgctggaacatgtcgagagctttcttctggaaagtaacagcggagaaagccaggagcttcctctctcagtcacgttacatctgaagactcagcaatatggggcgttacagcgccgttttgcattacctgagcagttagcgagagaagagtcgccagctcagacgcaggccgggaataataaccatgaataa

SEQ ID NO: 4271 - DNA, 984 bp, Escherichia coli
atgaataatgaacaacgcggcgtagcactgctcattgtactcatgttactggcgctcatggctgctctggctgcagacatgacgatcagttttcacggccagcttcatcgaacccgccaggtaaaccatcatttgcaacggcaatatgatattgagctggcggagaaacttgcgcttgccagcctcacccaggacgttaaagataacgacagacaaaccacgttgcagcagtactgggcacaaccgcaacagttgcagctggaaaatggcaatacagtgaagtggcagttacgcgatgcccagcactgttttaatctcaatgccttagcaaaaatctctgacgccccgctggcttcccctgatttccccgcccaggtattcagtgccctgctgattaacgccggtatcgatcgcggaaacaccgatgagatcgtgcaatcaatcgctgactatattgatgccgatgattcgccacgctttcacggcgcagaagataacttttaccaaagccaaacgccgcctcgccatagcgccaatcaaatgctttttctgaccggtgaattgcgtcagataaaaggcataaccgaaaacatctatcagcggcttatcccgtatgtctgcgttctcccgacctcggaacttagcatcaatcttaatatgctaacggagaacgatattccgctcttcagagcattattcctcaataacatcacggatgctgacgctcgggtcttattacaaaaaaggcccagggaaggctggctcaccacagatgcatttctttactgggcgcagcaggatttctccggcgtgaagcccctggttgctcaggtgaaagggcatctctttccctatagccgctattttacgctgagtacggaaagtatcagcgacgaacaatcccagggatggcaaagccatatttttttcaaccgtaaacagcagagcgcccaaatctatcggcgtacgctgcaactctactaa

SEQ ID NO: 4272 - DNA, 1164 bp, Escherichia coli
atgcctgaatcgttgatggtaatacgttctttctcgacgctgcgtaagcattgggaatggatgacgttctccgcagatagcgtatcttcggtacatacgctcacagacgatcttccgctggagtcgctggccgatcagcccggtgccggaaatgttcaccttttgatcccacctgagggtcttttatatcgttccctcacgctgcccaacgccaaatacaaactcaccgcgcaaacattacagtggttggcggaggagacattacccgacgccagccaaaattggcactggatggttgtcgataaacaaaacgaaagtgtcgaggtgataggcattcagtcggagaaactcagtcgttatcttgagcgtttacatactgccggactcaacgtgacgcgggttttgccagatggctgctatcttccctgggaagtagatagctggactctggttaaccagcaaacaagctggcttattcgcagtgccgcacatgccttcaacgaactggatgaacactggttacagcatcttgctaaccagtttccgccagagaatatgcgttgttatggtgtagcgcctcacggcgttgcagcggccaatccacttatccagcatcctgaaataccatcactgagtttgtattctgccgatattgcattccagcgctatgacatgctgcatggtgtttttcgtaaacagaaaactgtaagcaaatcgggaaaatggctcgcccgcctggcagtaagctgtctcgttctcgccattctttcttttgttggcagccggggcatcgcgttctggcaaacgcttaagattgaagatcaacttcagcaacaacagcaagaaacctggcaacgttatttcccgcagatcaaacacacccacaactttcgtttttactttaagcagcaactcgctcagcaatatcctgaagctgtaccgttgctctatcatttacaaacacttctgcttgaacaccctgaactgcagttaatggaggcgaactatagccagaggcaaaagtcgctgaccttaaaaatgagtgctaagagtgaagccaatatcgatcgtttctgtgagttaacacagtcctggcttccgatggaaaaaacagaaaaagatccggtcagtggtgtatggacagtaaggaactcagggaaatga

SEQ ID NO: 4273 - DNA, 462 bp, Escherichia coli
atgattaaatcatggtgggcagaaaaatccacatcggaaaaacagatcgttgcggcattggcggttctctcgctcggcgttttttgttggcttgcggtgataaaaccgatagatacctacattgaagagcatcagtcccacgcgcaaaaaattaagaaggacatcaaatggatgcaggatcaagcgagcacccatggtttactcggtcatccagcgcttacgcagcccatcaaaaatatccttctcgaagaagcaaaacgtgagaatttgactatcacgctggaaaacggtccggacaatactctgacaattaaccctgtcacagctcccctcgaaaacgtctcccgctggctcactacggcacagataacatacggtattgttattgaagaccttcagtttactcttgccggaaacgaagagatcaccctcaagcatttgtccttcagggagcaacaataa

SEQ ID NO: 4274 - DNA, 678 bp, Escherichia coli
atgacaatgctactgccgctcttcattctggttggttttattgcaggttattttgttaatgtcatggcctatcacctctcgcctttggaggataaaacggcgttaacgtttcgccaggtattggttcatttctggcaaaaaaaatatgcctggcatgatacagtgcccctgatactttgcgttgctgctgctatcgcctgcgccctggcacctttcacgcccattgtgactggcgcactctttctctatttctgtttcgcactcacgctcagtgttattgattttcgcactcagctcctgcccgacaaactcaccttaccgctgctctggcttggcttggtatttaatgcgcagtctggattaattgatttacatgatgcggtttatggcgcggtcgctggctatggggtgctgtggtgtgtttactggggcgtctggttagtttgtcacaaagagggattgggctacggtgatttcaagctactggccgctgcaggcgcgtggtgtggctggcaaacgttgccaatgatactgctgattgcctcgctgggtggcattggttacgccatcgtttcacaacttctgcaacgccggactataaccactatcgcattcggcccgtggcttgcgctcggcagcatgataaacctgggatatctggcctggatctcttattaa

SEQ ID NO: 4275 - DNA, 477 bp, Escherichia coli
atgaaaggtgatactaaagttataaattatctcaacaaactgttgggaaatgagcttgtcgcaatcaatcagtactttcttcatgcccggatgtttaaaaactggggtctcaaacgtctcaatgatgtggagtatcatgaatccattgatgagatgaaacacgccgatcgttatattgagcgcattctttttctggaaggtcttccaaacttacaggacctgggcaaactgaacattggtgaagatgttgaggaaatgctgcgttctgatctggcacttgagctggatggcgcgaagaatttgcgtgaggcaattggttatgccgatagcgttcatgattacgtcagccgcgatatgatgatagaaattttgcgcgatgaagaaggccatatcgactggctggaaacggaacttgatctgattcagaagatgggactgcaaaattatctgcaagcacagattcgcgaagaaggttga

SEQ ID NO: 4276 - DNA, 195 bp, Escherichia coli
atgtacgtttgtctttgtaatggtatcagcgataaaaaaattcgtcaggctgtgcgccagttttccccccactcgttccagcaattaaaaaaattcattccggtcggcaatcagtgcggtaaatgtgtccgggccgcgcgtgaagtgatggaggatgaattaatgcaactgccggagtttaaggagtccgcataa

SEQ ID NO: 4277 - DNA, 2703 bp, Escherichia coli
atgaaattaaatatatttactaaatctatgattggtatggggctggtgtgttccgctctgccagcattggcaatggaagcatggaataaccaacaaggtggtaataaatatcaggttattttcgatggcaaaatttatgaaaatgcctggtgggtttcttctacaaattgcccgggaaaagcgaaagcaaatgatgcaactaacccgtggcgtttaaagcgtaccgcaacagctgctgaaattagtcagtttggcaatacactttcctgcgaaaagagcggcagctcatcttcttcaaattcaaatacgccagcatctaatacgcctgctaatggcggttcggctacaccagcacagggcactgttccgtctaattcttctgtagttgcctggaataaacagcagggcggtcaaacctggtatgtcgtctttaatggtgcggtatataaaaatgcctggtgggtagcctcttctaactgcccgggtgatgcgaaaggcaatgatgccagcaacccatggcgttatgttcgtgccgctacggcaacggaaatctcagaaaccagtaatccacagtcttgtacttcagcaccacagcctgcaccggatgtgaaaccggcaccggacgttaaaccggctcctgatgttcagccagccccagctgataagtcaaacgacaactatgctgtcgtagcctggaaaggtcaggaaggttcttctacatggtacgttatctacaacggcggcatttataagaatgcctggtgggtgggcgcggcaaattgcccaggcgatgcgaaagaaaacgatgccagcaacccatggcgttatgttcgcgcggcaacggcaacagaaatcactcagtatggtaacccaggctcctgttccgttaagccggataataatggcggtgctgtgactccggttgatccaactccggaaacaccggaaactccagttactccaactccggataacaacgagccatcaacaccagcggatagcagtaacgattactcactgcaggcgtggagtggccaggaaggcagcgaaatttaccatgttatcttcaatggtaatgtttatcagaatgcctggtgggttggttctgaagattgcccgcgtggcaccagtgtagaaaactccaataacccatggcgcctcgtgcgtacagctaccgctgcggaaatgagtcagtacggtaacccgactacctgtgaaattgataatggcggcgtcattattgcgaatggtttccaggccagcaaagcgtacagcgcgaacagcatcgtagattataacgatgcacattataaaacctctgtcgatcaagacgcatggggctttgtccccggcggcgataacccgtggaagaaatacgaaccggcgaaagcatggtccgcttccaccgtgtacgtgaaaggtgatcgcgttgttgttgatgggcaggcttatgaagcgctgttctggacgcaaagtgacaaccctgctctggttgcgaaccaaaacgccaccggtagcaatagtcgcccgtggaagccgttaggtaagactcagagctatagcaacgaagagctgaataatgcgccgcagtttaatccagaaacgctttatgccagtgatacgctgattcgctttaacggtgagaactacatttctcagagtaaagtgcagaaagtttctccttctgacagcaacccgtggcgtgtttttgttgactggaccggaaccaaagagcgcgtaggtacgccgaagaaagcgtggccgaaacacgtttatgcaccgtatgtcgactttacgctgaatacgatcccggatttggctgcgctggctaagaatcataacgtcaaccacttcacgctggcgtttgtggtgagtaaagatgcgaacacctgtctaccgacatggggtaccgcttacggtatgcagaattacgctcagtacagcaaaatcaaagctctgcgtgaggctggcggtgatgtgatgctgtctatcggtggtgctaataatgccccgctggcagcttcctgtaagaacgttgacgatctaatgcagcattattatgacatcgttgataacctgaacctcagagtcctggacttcgatatcgaaggcacctgggttgcggatcaggcatctattgaacgtcgtaaccttgctgtgaagaaagtgcaggataaatggaagtcagaaggcaaagatattgctatctggtataccttgccaattctgccgacaggcctgacgccggaagggatgaatgtcctgagcgatgccaaagcgaaaggtgttgagctggcgggtgtgaacgtgatgacaatggactacggtaacgctatttgtcagtctgcaaacaccgaaggccagaacatccacggtaagtgtgcaacgtctgcgattgccaacctgcatgcgcagctgaaaggcctctatggcaataagagtgatgcagaaattgacgccatgatgggtaccacgccgatggttggcgtgaacgacgttcagggtgaggtgttctatctctctgatgctcgtctggtcatgcaggatgcgcagaagcgtaatctcggtatggttggtatctggtcaatcgcgcgcgacctgccgggcggcactaacctgtctccggaattccacggtctgactaaagaacaggctccgaagtacgcatttagcgaaatcttcgcgccgtttactaagcaataa

SEQ ID NO: 4278 - DNA, 645 bp, Escherichia coli
atgacttcaaatgcaccaacaagctttgtccgcgcttatctgagagcttcaacagcagaacaggatgcttcgcgtgccctggaaactatcgaggcttttgccagggaaagaggcctgattatttgcagctactatattgagaatgaatccggttcccgtctcgatcgtcctgaactcttccgtcttctgagagattgccagcaaaatgacattttgcttatcgaggatgtggacagactttcccgcctgtcaggggaagactggaatacgctgaagaaaatgatccggcagaaagacatccgggttatggcggtgaatgtgccgacgacatggattaattctggcatgagtgagtttgacagccggttgtttgcagccattaacgatatgctgctggatatgttggccgctgttgccagaagggactatgaacaacggcgggaacggcagaagcaagggatagagaaagcaaggaaagacggcaaatataaagggcgtaaacctaatcaagccagacatgatgcaattatcaggttgattgagagcggaagctcctggacacaggtacagaaaatactggggtgcagccgtggcacaataagcagtgcgctaaaacgtaaaaccgggcagaaatccagtaagtag

SEQ ID NO: 4279 - DNA, 621 bp, Escherichia coli
atgaaagtaatctcatttctgaatccgaaagggggttcaggtaaaacaactgccgtaatcaacatagccactgcgttgagcagaagcggatacaacattgctgtggtagatacagatccacaaatgagcctgacgaactggagcaaagcgggcaaggcagcatttgacgtatttacagctgcatctgaaaaagacgtctatggaatccgaaaagatctggcggactatgactttgctattgtggacggggcaggttcgctctcagtaatcacctccgcagccgtcatggtaagcgatctggtaattatccctgttacacccagccccctggatttctccgcagcaggaagcgtcgttactgttctggaagcacaggcttacagccgcaaagttgaagcccgctttctgatcacccgtaagatagaaatggcaaccatgctcaatgtgctgaaagaaagtatcaaagacactggtgttaaatctttccgtacggccattacacaacgtcaggtttacgtgaaatcaattctggatggtgacagcgtgtttgaatccagtgatggcgcagcaaaaggtgaaatagaaatccttacaaaagagatagttagcacatttgagtaa

SEQ ID NO: 4280 - DNA, 231 bp, Escherichia coli
atgtcacttgaaaaagcgcatacggcagtaaaaaaaatgacctttggtgaaaacagagatctggaacgagtagtaacagcaccagtatcatctggaaaaatcaaacgtgttaacgtcaattttgacgaagaaaaacacacccggtttaaggctgcatgtgccaaaaaaggtacatcgatcacagatgtggtgaaccagcttgtagataaatggctcaaagagaacgaataa

SEQ ID NO: 4281 - DNA, 312 bp, Escherichia coli
atggataaaaacgtcgttgatgcgctgaaaacgctattagaagcgttaccggaagaggtggtaacagaagtcacatcaaaactaaatccttcggcaagccatattcctgaagaaaacagtaagcaattgacagcaaaagcaagactactgaatttccggctaaccgaagcctatgaagaaatcctggaagtcgaagctatcagaacaggccagagcaaaactaccgttctaaaggcagcactggcgatgtacaacagccaggatgaaaacataaagaatcactggctacttgagtctgcaaaaattaactaa

SEQ ID NO: 4282 - DNA, 621 bp, Escherichia coli
atggatgataactctacgtcagtaaccagcaaagaagatgtgcaggatatttctttaaaaaactggctaaagaataaaaaaaccattgtattacttatatttactgcattaacaaatgttggcaatgtcctttcgacgattgatattatcacagataaaaccagttctttttacacatggcttggggaatcgaaaaaattcgaaggccattggaccaacaatacagaaggattcatagacggcactcctgattttttactcaagaatgcaggtgatgtcctcataaaatttgacctgaacatcaaaggtggcgaagtgaggggagagcttcacaccgacgcacgactaaaaatgtgtgaaactatagaagaaaagttaaaaactttgtgtacattaatagcctcacatccactaatgattgagggggaaaaatcaccattttccaatgaattcgatgcctatattactgagtatagaaatggagataaaaaaatagtcgcaatattaaatatgaaaattacagacgatgacaaaatgacaataacaaatacaatgagaacaccagaatcagcattatttccaactaaaatatatgctataaaaataataaccgaagaataa

SEQ ID NO: 4283 - DNA, 393 bp, Escherichia coli
gtgaatactggaataacaattgatttgaccaacctttcagaagatgaattgcttgatttatattcaatgtataaaagtgcaaacatagcacatcaactatggtgcagacgccatgaaaatataccagagcatttttcgataatattcgcgacgcttttagaacgaataaaaagggttacagaaaagaactcagaaggggtaaaaacaccagatgtagacctggatgcattaattgacaccatttatattggttgtcgttcaatgttctgtgaaaaccctgacttaaaaaataactacactctgcaaaactgcctgaggaaagccaattatcacaacgaagctagagtgatagataatattttacaggaaaaaaattcacagattccatcatga

SEQ ID NO: 4284 - DNA, 246 bp, Escherichia coli
atgaaagatgagtcattttttagtctggtgaaattagtttccaataagtccattgcacaccaggagagcctttcaggaaaaaaacgggaaaagatagactatcgatataaattcttaaatgacaattcaaatatctgtgagtttcagtattacatttttagatgtcaccgtatttatgagaatattgtgaaagaatatggggatacattactgaatgagcttaaaataaaaaacaatgatatataa

SEQ ID NO: 4285 - DNA, 354 bp, Escherichia coli
atgaaatatttggtcaaagagtttattaacgaaaaatatactaaggctgttaatattttaaaggataaccttaaagaacactatcatgttttttattgtgtgagattaagtgagattctttttcctgccagtgaatatggaactgaacagttttttagtgattttgaaaagataaactccatttcattacctgtcttagtgtttgatctcaaagagggtgttcctgtgattgtcattagtcttgatgatgtcagctactgtgatgttctggacgaaatggatattgattttatgaaatgtgattcgctggcagaattgcttaccagcgataagctggaaaatttattagtatga

SEQ ID NO: 4286 - DNA, 447 bp, Escherichia coli
atggctaaaatctatcaattccctcagggggaagaacgtgctaaattcaggaaagaaattgccagggagcgtaagaaacgttttgcagtgaaaacagggagcacttttgttaagtggcttggctggggatggttttatcttcgtcttcttgtcgcgagtgttttacattttatctttgtttttgtgttagccattcttggtgcgtttaaatgggctgtattctggctgggtggtattttgtgtgtcatcacttggtatcatctcgatcaccagttatggacgccacaaaatctgactataccggtgattacggcaacctggattttgggactgctggctgagcctctgatggagctgctcaacaaaactatgccttggcacaagttacttgttcccgaacctgcggacgaaagcaccgagaacagtagcgagataagccagcaatga

SEQ ID NO: 4287 - DNA, 837 bp, Escherichia coli
atgaacttactgagcgttacaaagaaaacaaaaattcgccacagaaatgaaattaacagcacattctcatcgttgcctttgtctgccagaagaattttgtttatggctatggcgcagattgattcacgtgaagagttatctgagggggcaacctttcgtattacggctcgggaatatgcatttatcgctgatattgatgtaacaggtgcttaccggcagttgaaagagggggcagaagaacttcaggccagtgttattcgcattcctcgaaatcaacttctcacacctcagggcaatcaaagctctggacatacgaagaagagaggtaaattaccttctgatgcagtcaggcttatgaacctgactgcgttttgtgattatgttgaaagtgaaggatatattgatattgctttttcacatgtcattgagccatatatcacgatgttaaaggattcttacactactcaggttttgatatcgtctgtaagactcgctgatcaaaattcaaatatgctttatcagtttatcaggaaacaatacagcagtggtaaaaagacatttttcgacattgaagtagatgtattaaaggatgaacttgaattattcagaatagataatggcgaaaaagtttacctttatcagaattttaaggattttaataaggtttttctgcaaaaaaatattgaaaaaataaatcaatatacagagattaatcatctcgaagttaaaatcgttgagagagtcgcaagaagagcatcaaagctaaggttttcttataaaatagataaagaaagtgagggcttagatatcagaataccatacggtttcagaggataa

SEQ ID NO: 4288 - DNA, 252 bp, Escherichia coli
atgagctatcaaattctgacaaccacagcggccagtattactgacctgaaaaaaaatcctatgggaaccgtagctgaaggtgaaggggacgctgttgcgatcctgaaccgaaacgaaccggcgttctattgcgttccaccaaaactttacgcctactatcgggaactcgctgaagatgctgagttaaacgctgttgctgatgagcgcatgaaaaacccggaaattgtgaaggttaacctggatgacctatga

SEQ ID NO: 4289 - DNA, 282 bp, Escherichia coli
atgacctatgaactggcttttgaccgtagagcactgaaggaatggcagaaactcggccacaccatccgtgaacaattcaaaaagaaactggcagaacggctggaaaatccacgcgtacccgcagcccggttacatggtcatgctgatcgctataaaatcaaacttcgtgcatctggctacagacttgtataccaagtcattgatgagaaagtcgttttactcgttattgccgttggaagaagggaaagcagcgaagtctatcagatcgcagatttgcgctaa

SEQ ID NO: 4290 - DNA, 324 bp, Escherichia coli
atgcaaaactacgctaaatctgtagccacagagattttacgtcaacttggtggtaatcgttttattgttatgactggtgctaaaagtttttcttactttgatgaaaacggtgagtgtgggttaactttccgtttgccgtcaaattttgcaatgaaaggcatcaacttagtaaaaattaaactggattttactgatacgtaccaggtgaaattttctcgtgtacgtggtgctgaagttaaagatatttcaagattcgataatatctattgtgatcagttagcgcgtttatttacacaggaaacagggttacataccgtgttatag

SEQ ID NO: 4291 - DNA, 246 bp, Escherichia coli
atggataaagataagataattaagaaaaacagaggtaattactcctatgtaatcagaacgatggatgaagatggggatacggtttttcacgtcttaaaatatgttaagacgattgataaaactaaaagcaggaaaacagtaagaaaattgataatggacgaaaaactcaacctggcatcattgatgcttctggataatggggttttgtgtgattgtctgacaaaaggggatgaaaatgcagaataa

SEQ ID NO: 4292 - DNA, 216 bp, Escherichia coli
atgcagaataaacctacacctgaagaagtaaagaatgcgcgggttgcggcaggtcttactcttaaagaagctgctgatatttttggttatcaactgaattcctggcagatgaaagaaagtgcaggtaaggccagtcgttctttatctattggtgaatatcagtatttattgttattagcaaatatgcatccgtcttacaggctggtaaaaaaataa

SEQ ID NO: 4293 - DNA, 330 bp, Escherichia coli
atgaaagtattaacttttaaaaatgatactgtctctgttggtgatatctttgtatcatcatggggctatgagcaaaccaatgtaaccttctaccaggttctttctgttcacggtaaaaaaaccgtcaccgttcgcgagattcgcgccaattcagaatataccgattcaatggtcggctttaaaactcccgttttaaatgattttactggtgaatgttttaagcgtcagataaaagattttggtgatgagctggcaatcaaaatcgaagattttgaaactgcgtataaaactctaccggaagaaaaacatcgattttcttcttactactaa

SEQ ID NO: 4294 - DNA, 180 bp, Escherichia coli
atggaaagagagtttagcgcaaaagcatcattaaaccgaaatataaaattttggtttgagcaatgtggattatctaaagaaagagttattcattgtattgataactggtatgaccttgcatacccaccatcagaacaggagaaagcaaaaaaagaagcaattgagaagttaataaagtaa

SEQ ID NO: 4295 - DNA, 150 bp, Escherichia coli
atgtcggaacgcatattatcagcaataaatgacgttgaaaagggtgggcgtccggttttccctttgatgccattccatgtctttcctgagtatatggcattactcagaaaagcactggaaaaaaagacacaaaagagaacagataaataa

SEQ ID NO: 4296 - DNA, 273 bp, Escherichia coli
atgacaaaacatgattttgtgtcctttgtcagtggagaattgcggcaaggcgctgtacgcttttctcttgcttttaacagcaaaggagaaattgttctgcactggactaataaagcaggaatacgagtctggcggatattaagtggtaatcgtggcaaaaaaccaagcaaagctaaccttgaaagaatgagtaacttccggcgctggctttttgatgcccgtcagggcatggaaggctacactcagcaacctgaacagagcaaccttagctga

SEQ ID NO: 4297 - DNA, 546 bp, Escherichia coli
atgaaaaaagttcaattcagaattgatgaaaatcagcatgatgatttgctggattgccttaaaactctttatccggatgaaccagctttaacagtagctaaaggcatgaaacttttagcaaatgctttattaaaaagtaaagctgtcagtaaggatataaatacgttttttgataataatgattttatcaaaacaacgatgtacttaacaggtaaacaaagggctgatattgaaagagctgctaatcgtcacggatggacgttatcacgagaatgtcgttaccgcatacagacgacacttgaaaatgaactggatttctttgaccaggaactgctgatgatgaatcgttgccgtaattcaattgataagatcggtcgtaatttccattatatcattgttaatgatcagaccagggttcttgataaagatggtttctatcaggatgcggagcgtcttacaacagaaatttttaatcttaagaatcagtttgagaattacattatgttatgtaaagggagaactgtttcaaataaagtggagatgtga

SEQ ID NO: 4298 - DNA, 1167 bp, Escherichia coli
atgggcgtttacgttgataaagaacatcgtgttaaacgaaagtcatcagaaaatggtcgtaagtcagctttcgctcacaaagtcaaaaatggtggaaagaactatagccgcaatgttcaggaacgtatcaaccgcaagggtgccagtaaggaggttgttgtcaaaatatctggaggtgctgttactcgtcaggggattcggaacagtattgattatatgagccgtgagtcagagctaccagtgatgagtgaaagcggtcgggtatggacgggtgacgaaattctggaagctaaagagcacatgatagatcgtgctaatgatcctcagcatgtgatgaatgataaaggtaaagaaaataaaaaaatcacacagaatattgtcttctcgcctccagtttcagcgaaagtaaagcctgaagatttgctggagtctgtcaggaaaacgatgcagaaaaaatatcctaatcaccgttttgttcttggataccactgtgataagaaagaacatcctcacgttcatgttgtttttcgtatccgagataatgacggtaaacgcgctgatatcaggaaaaaagatttacgggaaattcgtacaggtttttgtgaagagttgaagttaaaaggttatgacgttaaagcgacccataagcaacagcatggacttaatcagtctgttaaagatgcacataatacagcaccaaaaagacagaaaggtgtttatgaggttgttgatattggctatgaccattatcagaacgataaaacaaagtctaagcaacattttataaagctaaagactcttaacaagggggttgagaaaacatactggggggctgattttggggacttatgttcgcgggaaagcgttaaagcaggtgatcttgtcagactgaagaaacttggtcagaaagaagtaaaaatcccggcgctcgataaaaatggtgttcagcatggctggaaaacggttcacagaaatgagtggcagttagaaaatctgggggttaagggcgtagacagaacaccttcagccagcaaagagctggtactgaacagccctgatatgctgctgaagcaacaacagcgaatggcgcagtttacgcagcagaaagcatccacgttacagtcagaacagaagctgaaaacagggattaagttttttaatatttaa

SEQ ID NO: 4299 - DNA, 213 bp, Escherichia coli
atgacagctataaaaggaaagcggaaaccgcaacgcaatgtactctaccttcctacagaagttcgtgttgaagttgaaaaaattgcaattgaaataagtttcaagagggggagacgtatctctgattctggttttgttcagtatcttattaaaaaatacaaatctcaggcgatgaaagaacttattcatggggctgatattcctgacgagtga

SEQ ID NO: 4300 - DNA, 648 bp, Escherichia coli
atgttatctacttctacttttcttgcgcttgccatgcaatgcgctgccagcgttcatcctgacacaacgcacgaagtcgccagggttgaatcaggttttaacccatatgcgattgcggaaataataccaaaggttaaacgcaaacctggtgataaaggcgtagtatcttactttcctgaatcaaaggaggcagcacttaagatcgttaaaaacattgaattacggaatcatcgttactctgtaggacttatgcaaataacgagtaccaattttgcaaagtttggtacaacagcagagaaaatgtttgatccatgcgaaaatcttaaggtatcagaaaaaatactggttgactgttataaacgaggtggcgacttagtgcgtgggctgagttgctattattccggcaatccagaaacaggagtaaagccagaacctgaatttaataatacaagttatgtacaacgtataggatttagccctcctgataataaaaaaagttttattgttccctctgtaaaggaaatgattaaaaaggagaataagacgactatcacacctgaagaaatcattatatatcctcaatacgccatgcgtggcactgtatcaaatgaaaaggaaacaaaagatgttgaaattaaatctgaataa

SEQ ID NO: 4301 - DNA, 297 bp, Escherichia coli
atgttgaaattaaatctgaataaacgttatttaacgctttctatatttatggctgcgttgatgctttgtgttgcagaacctgcttttgcggatgatgtgtctacgaagacaactggttttttacagaaaataattgattttttaacagatattcgtaaacctgcaattacaattattgctcttgttattgggtatattgcaatattttctcgtcaacatacctcatggatagtcccacttgttatcggaattatcatctttattgttgcaccatatattcctgactggcttgcgtaa

SEQ ID NO: 4302 - DNA, 2754 bp, Escherichia coli
atgagtactctttttaaaggtcttacgcgccctgctttaataagggggctgggcgttccgctctacccctttcttggaatgtgcattatttgtgttctgcttggtgtctggattcatgaggctatgtatgcccttattcttcctggctggtatgccatcaggcgtgtaacacagtttgatgagcgcttttttgaccttctgtatctgagaactcttgtcaaagggcatcctttatcaaacaagcgattcagcgcagtccattatgcggggagccagtacgacgaagttgatatttcaaaagtggataactttatgaagctgaaagaccagtcttctgttgaagagttaattccgtactcttcacatatcactgataatattatcgttacaaaaaaccgggatttgctggcaacctggcagatagacggtgcttactttgagtgtgttgattctgaagatttgtcaattctgacagatcagcttaatacgcttatacgtagctttgaagggaaatctgttacgctttatcctcatcgtatcaggtgtaaaaaggacgtcagaccagtatttaacagtaaaattccttttgtgaacagagtaatgaatgattattacgagtcattccctcagtctgaatttttcgagaataaattatttctgacgatttgttttaaaccttttactacggaagataaagtaacacatttcttttcacgcagtaaaaaacaaaaagatatctttaaagagcctgttaatgaaatgaatgaaatttgcgacaggttgaatacctatctgtcccgttttcattcccgacgtcttggactttatgaagatcatggggttgtttattcagatcagttatctctgttccagtatctgctttctggtcgatggcaaaaggtcagggttagcagtagtccgttttatacatatctgggaggaaaagacctgttctttggtaatgatgccggacaaattaccgcgtcagaccatgcccggtattttcgttgcatagagattaaggattattttcaggagacggatgccggtattctggatgctctgatgtatctccccgttgagtatgtcgtgacatcgtcctttactgcgatggataagcagtcagcgattaaggcgctggatgatcagatcgataagctggaaatgacagatgatgctgccaaatctttgctggcagatctgaaagtcggactggatatggtttccagtggatatatttctttcgggaaatcgcatcagaccctggttgtctttgcggattcaccggagcgtctggtgaaagacaccaatatcgtgacttccactctggaagatttggggctgattgtcacttattcaacactgagtcttggcgcagcttattttgctcagctaccaggaaattatacgcttcgccctcgtctgagtaccctcagtagtcttaattttgctgaaatggaaagttttcataatttcttttcaggaaaagaaaaaggaaatacctggggggaaaaactgattactcttcgggggtcaggtaatgatatctaccatctgaattaccatatgacgactgaacatcagaatttcttcggtaagaacccgacgctggggcataccgaaattctcggtacgtctaacgtgggtaaaaccgtattactgatgacaaaagcatttgccgcccagcagttcggtacgccggaatcattccctgcaaacagaaaactgaaaaaactgaccacggtttttttcgataaagaccgggcaggtgaagtcggtatacgggcaatggggggatcttattaccgggtgaaggagggagagccgacaggctggaatcccgccgcactgccgccaacaaaacgtaatatcgcttttatgaaggacctggtgaggctgctttgtactctcaacagtgagccgctcgatgattaccagaacagcctgatttcagatgcggttgaacgtcttatgcaacggtcagatcgctcttatcctatcagtaaactacggcctcttatccaggagccggatgatactgaaaccaaacgtcatggacttaaagcccgtcttaagccgtggacgcagggggaagagtttggctgggtgttcgacaatcgggaagacacgtttgatgtcgataacctggatgttttcggtattgatggaacggaattcctggataataaggtgctggccagtgctgcttcattctatctcatctatcgggtcactatgctggccgatggtcgcaggcttcttatctacatggatgagttctggcaatggatcaataacgaagcgttcagggactttgtttacaacaagctgaaaaccggacgtaaactcgatatggtgcttgtcgtagccacacagtcaccggatgaactgattaaatcacccattgcggcagcggttcgtgagcaatgcgccactcatatctatctggcaaacccgaaagccaaacgtagtgaatatgttgatggtttgcaggtcagggagctttattttgacaaaattaaagctatcgatccgctgtcccgccagttccttgttgttaagaacccacagaggaaaggtgaaagtgatgattttgctgcttttgccagactggagctgggaaaagcagcgtattacttaccggttctcagtgcatcaaaaccccagttagaactgttcgatgaaatctggaaagaaggaatgaagccggaagagtggcttgatacctatctggaacaggcgaacctgatttga

SEQ ID NO: 4303 - DNA, 750 bp, Escherichia coli
atgaaaaagcaaattatggcggcattcgtcgcttcactgattgttatttccggcgctcaggcagggatacctgttgccatcgacgccaaccctgaatgggcgattgaagccggacgatggacagaacgccttaagcaatgggcggaaacggtaaaacattacgaaaatcagataaatgcgtacaaacaggagctgctgtcaaaaacgggtatccgtgatgtgcagggactggtgcagtccgcacagtcagtgagtcaggaactgatgcagatttatgatcaggggaatgcttttattgacgattacattaaaaatcctgaaggggcgttatcggaacaggccaaatcgttattgtcagattacaaagtaacggatacctgccagaacctgggatattccggcgacctggtacggggatgtgaagcgacgttcctttctcaactggcaagcgtggaatacggtaacaagctggagagcaagcttcgtcaggacaaccagacgatgaaaggccttattgatcaagtcaaaaatgcgaaggatacgaaggccacgcaggatgcaacaaacgctgttgcacttgaacaactgaagttcgagaagctcaaatttcagtatcaaatgtatcgcgataagcaacgagatcttgcagaatataaagagaagatggctcaggctgctttcagaaaacaacaactagaggctgaagaaccttcatttaaggatgcagcgagaagatacactttaaactga

SEQ ID NO: 4304 - DNA, 285 bp, Escherichia coli
atgaaaaagtcttttgttttgattggtgcactcagtattttttcccttgtcggatgtgaggaaaccaaatctgttgattggtggttggagcatcatgaagaatcattgaaaaaagaagctgagtgtaagaaaaccggaagtgacagccagaattgtcgaaatgtaaaagaagctaatttccgttatcaacaacttcatgccaaagaaccaaattttaaagagtattttaaaaaatataaagatgcttctaatcatgaagaaaaaggtgatgtgcctaaaaaataa

SEQ ID NO: 4305 - DNA, 1062 bp, Escherichia coli
atggctgaagcaagtaatttttttgtcacagcaaaagaagagatcctctcggttctcgatgcttcggtttctggtcagttaacaagtttaagtaatatagcaggcaccctaggacgctacggggtgtccatctatgtgttatggtatgcttttactgttctggctagaaaacagcaaacacctgtgcctgattttatctggaacttgtgcaggttttctataattttaatgtttgtacaaaatgcaggtgggtggctaaatacttccctggtagcaatagatggtttaaaggattcgttatctggtaataatgatgcttggttatggttagatcagttatggacgaaagtacaacaggttgctgcgcatgttatgtctaaggatacttcaacttatgtaaaaacagatggcgctatagctgctctttttacttattttggtggaatattagcattagttgcatgtgctatagtttttcttgctgcggaagtaaccctgaaattattgactgtcactgcacctgtttttatcttttgcctgctgtttggttttttgagacaaatgtttaatagctggttgcagcttattttcagttcatgcttgatatttatgttcggttcattagctttaagagccggaacatcatttctcaatatagttttatctctggcaatagatacggtagacaatcgtaatctaattaagattggcgctactgcggctgttgctggcattttcatggcctggattatctggcaggcgaaaagttatgcttcacagattgcaggtgtgggtgttgaaggtgccatgcagggcgcagccgctatggggattggtgctggcgttttcggtgcatcccgtatggcgcgtggcgcacttggtatgggcagaaatgccggtattggtgcatggaaaggtctgcgtcgtcaggaaggcgggtttggtcagtctccgggaataacgggtaagaccgctaacctggccggacagggcgttaatattggtgccaaaaagcttcgtcaggcagctattgagagggcaaagaaaatgtatggagggtga

SEQ ID NO: 4306 - DNA, 714 bp, Escherichia coli
atggaatttaaacttcccggatttaaaaataaaaaagacgttactgactcatcagtttcgtttgaagaaaaaaacattgcactacaggagagaatgaatcgtatttataaattcggtggtatcggaggcatgttaattggtgggctgtctttacttgcattaaatgcagcattaccactgaaaacaacagttgttgatgcctaccttatcgataaggttacaggtgtggctgaacgtctgacttctgttaaaaaagaaaatctttctgaaaacgaagccattgcccgatattttatcacccagtatataaaacatcgtgaaggttataattttttcagtctccagcatgattatgattatgtaatggcttacagcgcggagaatgtcgcggcagattataacgcattatttaacagtgaacaggcaccaaaacttgtttataacaaagcagaaaaaacggcaatggttcaggataatccatctgtcataatttcaccttcgtcacggacggatgataaagatatcggtgcgtatattcgttttcgtctgaccatcagggatgttgctaccggacaaacccgtcaggagttctggaatgttcgcctgacttatcgtatcgaaccgcaggttgaaatggtgtcaggggaacgtaataacaatcctcttaagttcgttgtaacaagctacgttcgcgataaagaagccagaggttaa

SEQ ID NO: 4307 - DNA, 930 bp, Escherichia coli
atgaaaatgaataaaggagcgttaattatggcgcttctgatggcggcgcacgtctgtaatgctgctgttcttccttcaggcagtcgctttgacccacgcaatcagatagtcagttataaccccaataataccaccataattaacagtgccgttggatacaccaccacactggtatttgatgaagatgaaacagttatcagtgccagaaccggttttccgcagggatgggcggttaataaagaagataacctggtatacctggaagttcgtcctgttaaacaaactgttcagaaaaataatacggatgcaaacggtaacacctcttctgaatccgtcagtgttgctcttgacccggaaaatgagcttgaacgctggcgaacgaatctgtttgttcgcaccacgaaacgtaattacagcatggagctgaacgccagaacgttccgacagccggagaaaattgcgtttgtggtgaattaccagtatccgcaggaacgccggaaggaacaggccgaaattgagaagaaacgcacagaggctcttgccagacgcctggaggaacaggcaatcaaccgttccctggaaaatgcgaaatcgccccgtaactggcagtactggaagcgggttgctgaaggcagccaggatatcagccctgattatgcatatgacgatggtcgttatacctggttcggcttcagtccgttaaagaaaattcccagcgtctttgtgatgaacggtatgcaggagactcttaccaatcctgtgattaaacagagcgggagttttacggctgttggcgtaccggttgataagcgttttgttttacgtcttggtgagcaggtggtggggattgagaacctgggcttcggaaaagtacgtttaccagccggagatacggtatccccggatgttaagaaagaggtgatccagtga

SEQ ID NO: 4308 - DNA, 1206 bp, Escherichia coli
gtgactgaacaggaaaataaaatcccgactgcaaccgaaattgaacagcagctacgggaacgcagacagaaagaactggaacaggccgggaagactccggaagaagagcctggcaagccagcattgcagcttggtattgaaaaacttaaaaagtcacgtaaagggatgattatcctcgtcgtgggttttcttctgcttgctgccggtgtttctgtttattatatcccgtccattatccgttctgtgtcgtcaggggatgagaaacccgcaagtcagccgcttgcaaccggagcggctaaacgtcagaccggactgagcgaagatatcgatccttttaataccgcacagaaaaaaacagagaaaccagaggaagaaaaagtcatttcttctgaaaagactgaaccgccggaaaataaacagcagagcttcagccgtgcacttgatgtttctcttgatggcagccaggcaggaaacagcagcagttcagcgggaacgtcagtttcacatactgcggccagtgagccagaaagcgataaaaaggatgaagcaaaagcaaccgcacaggctacagaatctgcgccactggcgaaaataacgaaacttccatatgacccaaatttgtttatcccggaagggacatcaattccctgttcactggacaggcgttttgtttctgacctggcggggaaactggaatgtacggtcaacagcgatatatacagcgccagcggtaatgtaaaacttatcgaaagaggaaccgccgcaaaactgatgtataaggccgggtctttaaatcatggacaagggcgtgtgtttgttatggcttacaagctacgtactcgcagtaagccttttattgatattcccctggttgactcacaggcggctggcgcgttaggcgaagccggtgcttctggttggattgacacgcatttcagtgaacgttttcttggtgcaatgatggtcgggatgataccggatttaagtcaggccgccagtggtattgcacagaacaacagggacagccagaccgactatacggcaaacagtcgccaggcttttgctgatatagcacgcgaagcattttctaatagtgtgaatattccgccaacgctttataaaaatcagggcgaaattattactctgattgtcggtcaggatctggatttttcaggtatttataaactgaaaatgaaagggggttaa

SEQ ID NO: 4309 - DNA, 1032 bp, Escherichia coli
gtgaataacgaaaacagacatctgatttatgatgtggtcaacgattatttttatcactggctgaatgagattgatggtgtcacggaaatcgctgttaaccgaccaggagaaatatttataaaggtcaggggaaagtggcaatggtatgaacaaaagatgaattacagtgattgtctttcttttgcatccacactggctgattttcatgatggtggttctgtgactcctgaatatcccctgcgttccgccacgcttccgggtggagaacgtgttcaggttgtgatcccaccggcaacagaaaaagatactgtttctataacaatccgtaagccgtcaggtatttttatcagtcatgacaaatttataaaacaggggttttattcacgcgtcggtggtttaagtggtgattccattatggaagataatatttctgctttaatcacttccgaatattttgaacgggttatacctgaatcactgagtcaggggaaaacgatagttttctgtggagggacggggtctggtaaaactacctttgcaaatgcctgtctggaatatataccgcatcatctgcggtgtatttctattgaagatactgatgaagcaaaattcagattccataaaaaccatgtaaaactttactatccggcagagggtgagagtaaggttattacctcagcgagtcttctgcgttcctgttttcgtatgaatccggacaggattctgatgacagaaatcaggggggctgaggcatgggattttctgaaagcatcgagttcaggccatgcaggaaacatcaccaccgttcacgaaagtagtcctgaatctgccgtgcttgggattgtccagcgatgttatatgaatcctgaatgtcagaatctaccattcaatgtcattttaagacgtgtactgagtaatattgatattatcatgagtattaaataccttgatgatgaagattttcggttcgcttccggtatttactacaaacaacttcattttgatgactatttcagaaaactgaaggagtga

SEQ ID NO: 4310 - DNA, 1836 bp, Escherichia coli
atgtctttaaaactcccagataaaggccagtgggcttttatcggtctggttatgtgtctcgtgacatattatactggttctgttgctgtttacttcctgaacggaaaaacgccgctttatatatggaaaaattttgattccatgctactgtggcgaataataacagagagtaatatacggacagatatcaggttaaccgctatcccctctcttttatcaggtatggtttcgtctctcatcgtgcctgtttttattatctggcaactgaataaaacagatgttgctctttatggtgacgcgaagtttgccagtgataatgatttaagaaaatcgaaacttctgaaatgggagaaagaaaacgatactgatattctcgtcggggcatataaaggtaaatacctgtggtataccgcaccagattttgtatcacttggcgcaggaacccgcgcaggtaaaggtgccgccattggtatccctaatcttctggtcagaaaacactctctgattgcgttagatccaaaacaggaattgtggaaaatcaccagtaaggtgcgtgaaatactgctgggtaataaagtttatctgctcgaccctttcaacagtaaaacacaccagtttaatccccttttctatattgatttaaaagcggagagtggggctaaggatctgcttaaactgattgaaattctgtttccgtcttatggcatgacaggggcagaagcgcactttaataatcttgcgggtcaatactggacaggactggctaagttgcttcatttctttattaactatgagccgtcctggcttaatgagttcgggcttaaacccgttttctcaatcggttctgtcgtcgacttgtacagcaatattgaccgggaactgatactcagtaagcgggaagaactggagggaacaaacgggcttgatgaaaacgcgttgtatcatttgcgcgatgccctgaccaaaatcagggaatatcacgaaacggaagatgaacagcgttcaagcattgatggttctttccgtaagaaaatgagcctgttttatctcccaaccgttcgtaaatgtactgatggtaatgatttcgatctccgtcagttgcgacgggaagatatcactgtttatgtcggtgttaatgcggaagatatatctctggcttacgattttctgaacctgtttttcaacttcgttgttgaagtgacattgcgtgaaaatcctgattttgatcccaccctgaaacatgactgcctgatgtttcttgatgagttcccttcgattggttatatgccaattattaaaaagggatcagggtatattgcaggttttaaacttaaactgctgacgatttatcagaatatcagtcagctaaatgaaatctatggtattgagggagccaaaacgctgatgagtgctcatccatgccgtattatctatgctgtcagcgaagaggatgatgccgcgaagatatcagaaaaacttggatatattaccactacatcaaagagcacaagcaagagccgtggacggtcaacatcacagggcgaatcagaaagtgaagcccgaagagcactggtgcttccacaggagctgggaacgctggactttaaagaagagtttatcatcctgaagggggagaaccctgttaaagcagaaaaggcactttattaccttgatccgtattttatggacagattaatgaaggtcagtcctaaactggcatcattgacgatggaactaaataagacgaaaaaaatatttggtgtgaaagggcttaaatatccgtcaaaagaaaaaatgctctccgtaggagaactggagtctgaggttttattatga

SEQ ID NO: 4311 - DNA, 414 bp, Escherichia coli
atgaaaaaaatacttatgatcagtattcttgtcctcacagcctgttcctctccacctgaaccgccacaggttgaatgggaaaaacggcctgaagttatgaatacacaaataatgaactggaaaccaacatccggtgttattaaatcagataatataaattccccatggagtaaggtgttgcctgattttaaaccagaaaaccatctttacgatgattctgttttttatgccgttgcccattctgaaaaaatagttgtaaggacatcttcttttgatagttactggtcagcgaaagactggctaagaaaaaatggtgcaacaggtgttattgaatatcagccactaaaaagatggttgaataatgactatgttgaaatttatctgtcaagaataaatattcagaggttactatga

SEQ ID NO: 4312 - DNA, 303 bp, Escherichia coli
atgaaaaggatatgcaaaggtctaatcgtaatttttactgtgtcctgttttatagcgccaacgtatgccgctgatccctgtaaatccgttttttgtctttatggtaaagctgtcggtagtagtggagggagtgagtgcagcagtgcagaaaaggatttttttaaaaatgttgaaaagaaaaaggggaaaatccgctggggtaaaacatttgatctccgtaagaattttttaaatcagtgttcaacggcagacccggctgcaatctcactgatcatgagtaagtttggtcgcgtcagaggctga

SEQ ID NO: 4313 - DNA, 1326 bp, Escherichia coli
atgaaagtaaccaaatctattatagctgttttattgtgcttatctgctggtagtgcatatgcagattgtgagtattaccttacaggtaataaggagactcttaatatttcggattgtgtcgatggggtaaaaggcatagccaatagtgcgctgtcaaactcacagaatgcacaaaatgttgcaaatggtgctgcttctacagcccaaaatgcgcagtctgtcgcgaatactgctgcgtctactgcacaaaacgcgcaaacagccgcgaataaagcgcagacaacagcaaatgaggccaattcagcggcacagaacgcactgaatacggcgaataccgcgcaaaacacagcgaactctgccaatacggttgctcaaaatgctcaatcgacagctaaccaggcaatccaggatgcggcagaaaaagctgaagcggcagaaaagaacgcaaacaactatacagacaataaaattactgatgccaaaaatgaactcaatacgaatattgatagtgcgaaaaatgacgcgatcaattcgtcgaacaactacaccgacagcaaaatcagtgacacgaagacagaactgaatgccaatattgataaggcaaagaacgacgcgatcagttcatccaacagttacactgacagtaaaatcagtgacacgaagacagaactgaacgccagtatcgataaggcaaagaacgatgcgttcagttcgtccaacagttacactgacaataaaatcagtgacacgaagacggagctgaatgccagtattgacaaggcgaagaacgacgcgatcagttcatcaaatagctacactgacaataaaatcagtgacacgaaaacagagctgaataccaatatcaacaatgcaaaaaatgaggcaatcagcacatcaaacaactatacggataagaaatatcaacaaggtatcagttataccaatgaaaaatatgagcaaagcatacagtatgctcaaaatgcagccgataaagctgaacaaaatgcgaataactatacagataaccgattcagtcagttaagcaatcagtcaaatcagcggttcgaacaattaaacagtaaaattgaacgtgcggaaaaacgccttaatgccggtattgcaggtgtaacagcaatatcatcaatcccgtatgttgctgaaaatagtttctcatatggtattggtgttggtaattatcagaatggaaatgcgattgcagcaggcattcaatataaaacgtcattaaacacaaacgtgcgccttaatgtttcatgggattcatctcataacactgtacttggcgcaggttttgcgggtggctggtaa

SEQ ID NO: 4314 - DNA, 228 bp, Escherichia coli
atgaaaccattggtttatgcaatgattctgtcactgacgaccttttctgcttttgcaaaacagaactcggctaacagtcagaaaactggtgcaagtaatatggaaagacaaagctatgagaataccgatgcggggaaaaaacaagctgaatggatgaaaggtaaattagttaaatctgattgttctccagctatgaatcgtattggctggtcagaaggttgtaagtaa

SEQ ID NO: 4315 - DNA, 510 bp, Escherichia coli
atgaaaattatattaataacatttatttttctgtttactgtttttcagtctgcaaatgcaggtggaatacctggtgttttcacattaaacctggaaatccaggggaaagttattcgtgttctcgatggcgataccatcgaagttttacaggacaaacaggacaaaaagcctgtcaggattcgcctggcaaacatcgatgcaccggagaaaaaacaggctttcgggtgctggtcagcaaatcagcttaaagctctgcttgcagcacagcctgttactgtgacgtatacgcagagagaccgctacggacgcattatcggtcgtgtgttcacgacgaacggcaccgatgccagccgctttatggttaagtctggtgctgcatgggtatatgaacgttacaacgcggatgagtcattaccggctctgcaacgggaagcgcaggaacaaaaacgaggtttatgggctgacagtaatccggttccaccgtgggaatggcgacataaacagaactga

SEQ ID NO: 4316 - DNA, 1263 bp, Escherichia coli
atgggtaaattaactctggtagagcaggctttacggcttcacaaagaatattacggtgaagataattttggaactgtcgtaaaggattgtgattactatcctaaagtggcagagatttttataaacagaaagaaccgtaaaatttattcgaatctggatatcgaacctgttgcttcaaccgttgttcatacgggaagtagccctgttatggctaaagccgggagaattaaaaaacttatgttcaaagatggttctggtgcatacaggattcatcttggtcaaaatgaagttgttcatattattcgcttcattcttaactctaaagtcaggatggagtacgccgttgggactactaaaagtatgtcaatgctccacaatctttgcgaggcaggtcgcgctaaattaaaccgctcattaccacgtaaaggtatctggaaacttgggtactatgatggtgtttattatcacggtaaggcaagaaaggaggaaattgaaaatgctatgcgtttctcagttcatccaaaatttgacgagctggaaaacgactttaatcagttcttttctgatattgatttctatacccggtatggtcagtcaggtatgcgtaaagtgctctttactggccccccaggaacaggcaagacaactatcgcaaaagctttgggggcaaagtatcaggataagtatgtttttgtttatgccgacgattactttaaagatgtttgctacgctgctgctcagaagaaaatacccgtcattattatagctgaagaggttgatgaactttatcgggctgatgccggaacgttaagttttcttgatggagctgatacaccgcgaaatgtcgcaggaacatatgtgatcttttctacaaactatccaaaacgtatcgacccacgtattagaaaacgtccaggtcgaattgacaggataatctctgtaggtgctttcagaaccaaagccgctgccgcttgcgccaaaatgtacttaccagaagatgtagaaattgaccttaaagagcttggcgcagtgctggacagaacgactccggctgaaatcaaggaaattattaatatcgcaatcggaatgattcgcggaaccaaaaatgaattatcagtggatgtaataaaaaatgctcgtgcctttttgaaaggaacccttgatctgagcgtgcaggaagcagatgaagatatagaggaaagggaagagctttataaaaagaacggggcgcaacctgactatttaagttacctggaggattaa

SEQ ID NO: 4317 - DNA, 576 bp, Escherichia coli
atgcaatatgcattgtttgatggatttgaacgaaagtttttgctggatgctcttgaatttggtgttctgaaagactggaaagaaaatccggtaaaagaacttcctgatattgatgaatctgctcaccccttccatgtctgttatggtggatatttattaaaccctggtgtatcagattctgatattagcagaaaaataaaagaccagacaggattctggctggcagctattgatgatacccgtatggattgtcattcaatagcttattatgatattcacaccctccctttaatttcgtgtggtcatcagaagatagttccttttacagcgttaataaaagctgatgaatgcatcatttcaaaaattgcttcgtattctggttttgccgtaacagcctttttgagaattaaagaccaggatatcgcaacgaatatacttaaccgtgaggggatttttgcttttaatggctgtgaacgcagattcagacatccagtaagtgaagataactggcaacaggtaatatcagaagaacgtgctatccgttgtgcaaaaagattaattcaatgtaaaggataa

SEQ ID NO: 4318 - DNA, 2154 bp, Escherichia coli
atgagactttttatcgcagaaaaacccgcagtagcaaatgatattgttaaggcacttggtggcaattttacccgccatgatggctggtttgaaagtgataacgccattgtgacgaactgttttggtcatattatcgaatcacaaccgccggaaaactataatcctgaatacaaagcctggaaggttgaaacgcttcctttacgtctttatcccgtgaagtatcagcctgttgaaagtgcagcaaaacaggttaaaacgattctcgaacttatcagacgtggagacgtgactgaaattgttcacgctggcgatcctgatgatgagggacagctacttgttgatgaagtcctggaatatgcaggaaacacaaaacccgtgaagcgcgttctgataaacgacaacacgcttccggcagtgaaaaaggcactggcaaatcttaaagataatcgtgatttcaaagggctttaccttaaggcgctggcgcgttcagttgccgatgccgtctatggattctccatgacgcgtgcttacaccattcctgcaaaagccagaggatatcagggcgttctgtctgtcgggcgcgtccagacacccgttcttggcctgattgtgaatcgtacccgtgctaaccagaaccataaatccagtttttactacaccatgaccggagtttttcagcgtggtgctgatgttctcagggcgaactggaaaccaggtgaatttgctccgctgaccgaccgtaaattacttgataaggcgtgggcagacggaacggcagcatcccttgcaggaaaaccggctacagttgaagcagcagcaactgatgataaaaaaacggctgcgccgttgccgtttaacctggtcagactccagcaatacatgaacaagaagtttaaaatgacggcacaaaaaacgctggatattacgcaacaactacgtgaaaaatataaagcaattacttataaccgctcagattgctcatatctttctgatgaacaattcagtgaagcgccgcaggttatcgatgccctgaaatcagtctttcctcagccgctggatattgattcttcacgtaaaagcaaagcgtttaacagtgcaaaggtgactgcgcatactgcgataatcccgacctccagtgtgcctgatgttaacgcactcagcaccgacgagcgcaatgtttacctggcgatcgcacaacactatcttgttcagttcatgcctgaaaaagcataccaggaagtatcggttgccattcagtgtggtgatgagtcgttctatgcccgtgccagaaaaacaactgacagcggatttgaggcgtttcttggcgcggaaatcacagacgaaggtgaatcagaagataatgatgattccgcttttgaactgctctgtaaaattcgcacaggagaaacactgacgacaaaagaagttgttgttaatgagaagaaaacaacaccgctgccgttattcaccgaagcctccttgcttgctgcgcttgttcgtgtcgcggattttgtcactgatcccacgattaaaaaattactgaaagataaggataaagacaaaaaagatgaacatggcggtattggtacgccagctacccgtgcagccattctggaaacgctgaagaagagaaactatatcacgctggaaaaagggaaacttattccgactgataccggatatgcgcttattgatgccctgccaggtatagcggttaatcctgatatgacagcattatggtctgaaaaacagtctgccattgaaaatggcgacctgacggttgaacagtttattaatgagctgtacggtgaactgacaggcatgatttctgatgttgacctgggcaagatgaagattgaacccgttgcgccagcagggcagtttcaacacctggactctccctgcccttcctgtggtaaacatattgttatcaggccgaaaggttatttctgtaccggatgtgaatttaaaatctggagtgagttttctggtaagaaaatcacccaggcacaggccgaaaaactggttaaatcagggaaaaccgatttgattaagggatttaaaaagaaaagtggtggaacgtatgatacagttcttgtccttgaggataagaaaacagggaagctgggttttccggcaagggctaagaagtga

SEQ ID NO: 4319 - DNA, 465 bp, Escherichia coli
atgagcgaactgactaaagaagatgaatacggcattatcagccggactatgatgaatattcgttcattgcgtgtgtttgcccgtgagattgattttgagcagttgctcgaaatgcaggaaaagctcaacgttgttattgaagaacgtcgtgaagatgctgaacgtgaagcggctgaacgagcagagcgtgaacggaaacgtcaggaactgcttcagttaatcgccggagagggtttctcaccggaagaactgcttggtctgtccgaagaagcaccaaaatcacgtaaaaaaacgttaccaaaagcgccacccaagtatcaatttgaagaaaatggtgaaacgaaatactggtctggtcgtggacgtgcgccaaaaccgatagctgaagcactggcaggcggtcgctctcttgatgagtttatcatcaaaaaagatgcttccagctctgctggcgacgaacagtaa

SEQ ID NO: 4320 - DNA, 408 bp, Escherichia coli
ttgagtctgacattaccattaatgtatttccagacaggtgcagatctcagcaaaatcacacatcatgaagtgcactatcaggacggctttgttcagcaggcatggttgcaacctgaaatacagctatttgttgtgtgtatcgccaggaaaaaaggctcccgtcgcgagattaaaggtggaatggccgttcttaccagtattccggccagcaatggagcggagttggcaaaagcgttggataacgttatgcgccagtctgatgagttgcggccactggcagggaaagacgaaaacgtatttatcccagccagaattggaatttctggcgaagaaccgccaacagagcaagagcttctaagtgtcttttaccagcaatgcctgaaacatggctcatggggcagtgcctga

SEQ ID NO: 4321 - DNA, 1053 bp, Escherichia coli
atggattatatattgggtcgctatgtcaaaattgctcgatacgggagcggtggattagttggtggaggcggaaaggagcaatatgttgaggatttagcgctttgggaaaatattataaaaaccgcatattgtttcataaccccatcgagttatactgcagcgttggaaactgtcaatatacctgaaaaagatttctctaattgctttaggttccttaaggaaaatttctttattatacctggtgagtataataactctactgagaataatcgttactctcgtaactttttacattatcaaagttatggtgctaaccctgttcttgtgcaagataaactaaaagatgctaaggtagtaattcttggttgtgggggtataggaaatcatgtatctgttatactcgcaacgtctggtattggcgaaattatactaattgataatgatcaaatagaaaatacaaatttgacaaggcaggttttattttcagagaatgatgtcggtaaaaataaaacagaagttataaaacgcgagttattaaaaagaaactctgaaatttcggtgtctgaaatcgctttgaatataaacgattacactgatcttcataaggtaccagaagctgatatatgggttgtttctgcagatcatccatttaatctgatcaactgggttaataaatattgcgttagagcaaatcagccctatataaatgctgggtatgttaatgatattgcagtctttggtccattatatgttcctggtaaaacaggatgttatgagtgccaaaaagtcgtggcagatctatatggttcagaaaaggaaaacattgatcataagattaagctaatcaatagcagatttaaaccagcaacatttgcacctgtgaataatgttgccgctgcattatgtgcggcagacgtaattaagttcattggaaaatactccgagccattatcacttaataaaagaataggcatctggtcagatgaaataaaaatacattcccaaaatatgggccgttcgcctgtttgctctgtgtgtggaaatagaatgtga

SEQ ID NO: 4322 - DNA, 1215 bp, Escherichia coli
gtgaatactgcaaatattttatctgtgaactatggagcttataatgctatacgtatgttaattggtgtctaccatgcagcatttcttatatctacaggtgtcactatatctcaacttgctgttttacagatcgttttttctgtgacagtgctgattcttgattttcctttatctgtcattgcagacagattttacaggaaacaggttgtagttagtggcgtattttttactattttattttaccctctttgtattcagtctcctgatatgctggcattggttttttctgaaatattttatgccattggtatttgttgtatatctggggctatagagggatgggtgttaagtgctctggatggtagaaatgaaaaatttaccttatgtgctcatttatgcgaaagggtatcttcctttgggagtgtgataactggtgctgttggaatattagttgtctacttctatgattcttataaatctggctatatagtatcgttcttcttgatgtttgttgtctttatcgtttttttatgtgtaaaaactaacggcagtgggggtgaaaaagaagcacgagatagtattattaaacaagcaaaagagagtattggattgataacaggaagttataatgggacatattttttatctataacatgtatgtttacacttggtatacaggtaatttatcatttttggcagccaattatgttatctggggaaagtattggctcattatcaaaaagagagcttataactttactgatgtgtcatattggtgcattttcaatgcaatatatagcaaactatcttatgccaaagatagatgtaaggtgtaaactttatatacttgtttgtacattatgttcatttcttagttcaatcgcctgtattttactatttatgttaataacagataataatgttgttctcggtgtagctattttctctataatccatgggatgatttcaacaatacctgttggagcacagaatatattcataagcagacttaatggcaattataagaatattatttcgggagctcttggtcttgtttctctttcatgtcgtgttgcttccatttctgtgttgggagttatatctgtattaccaggtaatatgcctgtcaccacttatatatttatctctgcaattgcatgtgtactgtgtggttgtttgttcttaatgtggtcctttaaaaaggagatggtatga

SEQ ID NO: 4323 - DNA, 804 bp, Escherichia coli
atgacgattaaacatgctgaagaattgacggaagaagtcattttaaatatgaattaccctgattttgttgctctgatgcaacaggataacactcctcctggagcagagtacaccatagactactggattaagcatggatgtattaacaaaaagtctcacctattagatttagcatgttccacgggttttagttcacgtgaatgcttcaaaaaagaaggtgcatctgcagagggtattgatatatctgaatcagctgtaatggtcgcaaatgaaaaggcaaaaaagcttaaggctaataatttattgaaatattatgtagctgatgcttgtgatttaccatttgaagataactcttttacacatgttctcggtggatgtaattttgcatttatacaaaatcggttaatagctttgaatgaaactcatcgatgtttaaaccacatgggaagcatgtgcatttcaaatttttattacaggcgtaaaatatcagataaacttatcaatgatgtatataatgcaataaatttcagacccaatcctttgtggactttggaatactggtatcagtttttttctgaaagatttactctggtttcagaagaaaatcatgagatggaatctcaaagtgaagatgagttaaaagccgatatttatgattacattttcaatagaaatgagtttacaaaaggtttgaatggttcacttcagaatgtattttttgaaagatttttaaaaatacgcagaccattaaatatccaaagagattatcagggagttacattgcaaatatggcgcaaaaaataa

SEQ ID NO: 4324 - DNA, 1770 bp, Escherichia coli
atggcgcaaaaaataacaccatctaaaattgttaaacatgcccgggagttaattattaaggggattgaatcgggtgataactcatttgtcatttttgatgtagatggagctctggagcgtctggaacattacaggtgtcaacttaagagttttttccccaacagcagtatcgcatattcatataagtcaaataatctggcacaatggtgccagattatctcaggtaaaggtttgtatgcagaggtgtgctctgttgatgaaatgaacctcgctaaaagagacggttttaaccggattgtttttgatggccctttaaaaaaaacgagtgaactattaaaggcaatagagattggggcattaattgaagttgacaatattgatgaatgtaaaagacttaatgaactatgtaaattgcataagttgacatgtagaattcatttgagattatcgcattactatgatgataatttatcaagatttggcttatctgaaagtgaggctattaatttactggagatgttgatcagtaagtcagagtatctcattttagacgggttccatttacatgttggctctaatctacccaatgcggaaaaaatatgtaaagctattatacagtatcatgagttgattcttaggtatatgccagatgatggcactcttaatcttggtagtgggatacctgcagattctttctcagcatccagtgataacccaactccatgtccggaggtatttttctcatcgatatatgatacaataaaaaattgcttcggtactgtatgtgataaatggaactatatttttgaaccagggagacatctggtcgaagactttggctactttatagggaaagttattagtactaaaaacaggtatggtgttaaagttgctcaaactaacattggtataaactggataccttcgatcagaaattgggaccattcatttacattgtttcataatcataaccatatttcagatgataaatctgatgagtatattattgctggattcaattgctttgaatgtgattgcttgtttccttcagttattcttcccagtaacttatctgattatttattttctgttcgagggtgtggtgcttatgatatgcaaacaggaaaccagtggacgcgtaatctttatgctgtatataccataacaaatgatgttgttaatatatcaaggattcacagaagagaacttgatttccggaagtatgatgtatctcttacgccatcaggaataaaagtaaatgatgagattacattattgtatccagcgttaaaatacgctgaagagttatatttgctcattaatcaaaacaaaataaatttcattaaaagcatggcatggccagcgtttgttaataacatttctgattctgtttctttcattgagcaatcaatgattgataaccagaatgaaaaagcattaatcctctttattaaatacaaaactaagatagctggcgttgtatcgtttaatattattgaccatgccaataaaacagcatatattggctattggttaggcgctaactttcagggaaaggggattgtaaccaatgccataaataaactgatacaggagtatggggattcgggcgttataaaaagatttgttataaaatgtattgttgataataaaaaaagtaatgccacggcattgaggtgtggcttcaccttagaaggtgttctgcaaaaagcagaaatactcaacggtgtatcatacgatcaaaatatttattcaaaagtaattggttaa

SEQ ID NO: 4325 - DNA, 1035 bp, Escherichia coli
atgatgatacaatctcatccactactggccgctcccctggcagtaggagatacaattggtttcttttcatcatctgctccggcaacagttactgcaaaaaatcgtttttttcggggagttgagtttcttcagagaaagggatttaagctggtatcagggaagcttaccggtaaaacagatttttatcgttcaggtactattaaagaaagagctcaagaatttaatgagttagtctacaatcctgatattacctgtataatgtcaacgatcggtggagataacagtaattcactgctaccgtttctggactatgatgctatcattgcaaaccccaaaattatcataggttactcagatacaactgctttattagcaggaatatatgcaaaaacagggttaataacattctatggaccagctcttattccttcgtttggtgaacatccacctcttgtggatataacatatgaatcatttattaaaatactaacaagaaaacaatcaagaatatatacctacacattacctgaaaagtggagtgatgagagcataaactggaatgaaaacaagatattaaggcctaagaaactatataaaaacaactgtgccttttatggttccggaaaagttgaggggcgtgtaattggaggaaatctaaatactttgacaggtatatgggggagtgaatggatgcctgaaattcggaatggagatatattgtttattgaggacagtcggaaaagcattgcaacagttgaacgattattctctatgctaaagcttaatcgcgtgtttgataaagttagtgcaataatactcgggaaacatgagctttttgattgtgcaggaagtaaacgcagaccatatgaagtattaacagaggtattagatgggaaacagattcctgtactggatggatttgattgttcacatacacatccaatgctaactcttccacttggtgtaaaattagctattgactttgacaacaaaaatatatctataacagaacaatatctatctaccgagaaataa

SEQ ID NO: 4326 - DNA, 1536 bp, Escherichia coli
atggctacatcagtacagacaggtaaagctaagcagctcacattactcggattttttgccataacggcatcgatggtaatggctgtttatgaataccctaccttcgcaacatcgggcttttcattagtcttcttcctgctattaggcgggattttatggtttattcccgtgggactttgtgctgcggaaatggctaccgtcgacggctgggaagaaggtggcgtcttcgcctgggtatcaaatactctggggccgagatggggatttgcagcgatctcatttggctatctgcaaatcgccattggttttattccgatgctctatttcgtgttaggggcactctcctacatcctgaaatggccagcgctgaatgaagaccccattaccaaaactattgcagcactcatcattctttgggcgctggcattaacgcagtttggtggcacgaaatacacggcgcgaattgctaaagttggcttcttcgccggtatcctgttacctgcatttattttgatcgcattagcggctatttatctgcactccggtgcccccgttgctatcgaaatggatgcgaagaccttcttccctgacttctctaaagtgggcaccctggttgtatttgttgccttcattttgagttatatgggcgttgaagcttccgcaacccacgtcaatgaaatgagcaaccccgggcgcgactatccactggctatgttactgctgatggtggcggcaatctgcttaagctctgttggcggtttgtctattgcgatggtcattccgggtaatgaaatcaacctctccgcaggggtaatgcaaacctttaccgttctgatgtcacatgtggcaccggaaattgagtggacggttcgcgtgatctccgcactgctgttgctgggtgttctggcggaaatcgcttcctggattgttggtccttctcgcgggatgtatgtcacagcgcagaaaaacctgctgccagcggcattcgctaaaatgaacaaaaatggcgtaccggtaacgctggtcatttcgcagttggtgattacttctatcgcgttgatcatcctcaccaataccggtggcggtaacaacatgtccttcctgatcgcactggcgctgacggtggtgatttatctgtgtgcttatttcatgctgtttattggctacattgtgttggttcttaaacatcctgacttaaaacgcacatttaatatccctggtggtaaaggggtgaaactggtcgtggctattgtcggtctgctgacttcaattatggcgtttattgtttccttcctgccgccggataacatccagggtgactctaccgatatgtatgttgaattactggtcgttagtttcctggtggtacttgccctgccctttattctctatgctgttcatgatcgtaaaagcaaagcgaataccggcgtcactctggagccaatcaacagtcagaacgcaccaaaaggtcacttcttcctgcacccgcgtgcacgttcaccacactatattgtgatgaatgacaagaaacactaa

SEQ ID NO: 4327 - DNA, 1320 bp, Escherichia coli
atggatatctgctcccgaaacgagaaattagcgattagaagaccagcgatactggttgcactggcacttttactgtgtagttgtaaaagcacgcctccagagtccatggtgacaccaccagcgggttcaaagccaccagccacgacgcaacaatcgtcacaaccgatgcgtggcatctggctggccacggtgtctcgcctcgactggccaccggtttcctcggttaacattagtaaccccaccagccgggcacgtgtacaacaacaggcgatgatcgacaaactggatcatctgcaacgtctcggcataaacacggtctttttccaggtcaagccggatggtactgccctgtggccatcgaaaattttgccgtggtccgatcttatgaccggtaagattggtgaaaatccgggttacgatccgctgcaatttatgctcgacgaagcccacaagcgtgggatgaaagtacacgcctggtttaacccctatcgcgtatcggttaatacgaagcccggtactatcagggaactgaatagcaccctgtctcaacaaccggccagcgtctatgtgcaacaccgcgactggatcagaacgtccggcgatcgctttgtcctcgacccgggcatccctgaggttcaggactggatcacatcaatagttgcggaagtggtttcccgttatccggtagatggcgtgcagtttgatgactatttctatactgaatcaccaggttcacggctaaatgataacgaaacgtaccgcaaatacggcggcgcatttgcgtcaaaagcagactggcggcgcaacaatactcagcagttaattgcgaaggtatcgcacaccattaaaagcattaagccggaagtcgaatttggcgttagcccggcaggcgtgtggcgtaaccgatcacacgatccgctcggttccgatacccgaggcgcggcagcctatgacgaatcctacgctgatacccgtcgatgggtggaacaagggttgctggattacattgctccccaaatttactggccattctcacggagtgccgcgcgttatgacgtgttggcaaaatggtgggcggatgtcgttaaaccgaccaggacccgcctgtatatcggtatcgccttctataaagtaggagaaccttcaaagatagagccagactggatgattaacggcggcgtaccagaactgaaaaagcagctcgatcttaacgatgctgtgccggaaattagcggcacaatcttgttccgtgaggactatctgaataaaccgcagactcaacaagcggtcagctatctgcaaagtcgttggggcagttaa

SEQ ID NO: 4328 - DNA, 2400 bp, Escherichia coli
atgaagctaaccgatgcggataatgccgccgatggcatttttttccccgcccttgagcaaaatatgatgggcgcggtgttaattaacgaaaatgatgaagtgatgtttttcaaccccgccgcagagaagctctgggggtacaaacgtgaagaagtcattggcaataacattgatatgctgattccgcgggatttgcgtcctgcgcatcctcaatacattcgtcacaaccgtgaaggtggtaaagcgcgcgtcgaggggatgagtcgggagctgcagctggagaaaaaagacggcagtaaaatctggacccgttttgcgctatcgaaagtgagcgccgaggggaaagtttattacctggcgctggtacgggatgccagcgtagaaatggcgcaaaaagaacagacccgacaattgattattgccgttgaccatctcgaccgaccggtgattgtcctcgatccggaacgccatattgtgcagtgcaatcgcgcatttaccgaaatgtttggttactgcattaacgaagccagcggtatgcagcccgatacactcctgaacattccagaattccctgctgataaccgtattcgtttaaaacagttgttatggaaaaccgcccgcgatcaggacgaatttctgctgttgacgcgcaccggtgaaaaaatctggattaaagcctctatcagcccggtttatgacgtgctcgcgcatctgcagaacctggtaatgacattctcggatatcacagaagaaaggcaaatccgccagcttgaaggcaatattctcgccgccatgtgcagcagcccgccatttcatgaaatgggggaaatcatttgtcgtaacatcgaatctgttctcaacgaatcgcatgtttcgctgttcgcgctgcgcaacgggatgccgatacactgggcgtcatcttcgcacggtgcagaagttcaaaatgcgcaaagctggtcagcgaccattcgtcagcgcgatggcgcgcctgcggggatcctgcaaattaaaacctcgtcaggagcagaaaccagcgcctttatcgaacgcgtggcagatatcagccagcatatggccgcgctggcgctggaacaggaaaaaagccgtcagcatattgaacaactcatccaatttgatccgatgaccggtctgccaaatcgcaataacctgcacaattacctcgatgacctggtcgacaaagccgtctctccggtggtgtatctcatcggtgttgaccatattcaggatgtgattgatagccttggctatgcgtgggccgatcaggcattgctggaagtggtcaatcgctttcgtgaaaaactcaaaccggatcagtatctctgtcgtattgaaggtgcgtcttttgtcctcgtgagcctggaaaacgatgtcagtaacattacccagatcgccgatgagctacggaatgtggtcagcaagccgataatgattgacgataaaccattcccgctcaccttgagcattggcatcagctacgacgagggtaaaaaccgcgattacctgctctccactgctcacaatgcaatggattttattcgcaaaaatggcggtaacggctggcagttcttcagcccggcgatgaacgaaatggtaaaagagcgtttggttttaggcgcagcgctaaaagaagcgattagcaataaccaacttaaactggtttatcagccgcaaatcttcgcagaaacgggtgaactgtacggcatcgaagcccttgctcgctggtacgatcccctgcatggtcatgtgcccccttcacggtttattcctctcgcagaagagattggtgaaatcgaaaatattgggcgctgggtcatcgcggaagcttgccgtcagttagcagaatggcgtagccagaatattcatatcccggcgttatccgttaacttgtctgcgctgcactttcgcagtaatcagctgcctaatcaggtatctgatgcaatgcacgcctggggtattgacggccaccagctgacggtggaaatcacggaaagcatgatgatggaacacgataccgaaatctttaagcgcattcagatcctgcgcgatatgggcatcggtttatcggtagatgattttggtacaggcttttccggattatcccgcttagtcagtcttccggtaacggaaatcaaaattgataaaagttttgtcgatcgttgtctgaccgaaaaacgcatccttgccttactcgaagccattaccagcattgggcaaagcctcaatttaaccgtcgtggctgaaggcatcgaaaccaaagagcaatttgagatgctacgcaagatccactgtcgcgttattcagggatatttcttttcccgccccctgcccgccgaagaaattccaggctggatgagcagcgtgttaccgctgaaaatctga

SEQ ID NO: 4329 - DNA, 432 bp, Escherichia coli
atgacaatccataagaaaggtcaggcacactgggaaggcgatatcaaacgcgggaagggaacagtatctactgagagcggcgtgctgaaccaacagccgtatggatttaacacgcgttttgaaggcgaaaaaggaaccaaccctgaagaactgattggcgcagcacatgccgcatgtttctcaatggcgctttcattaatgctgggggaagcgggattcacgccaacatcgattgataccaccgccgatgtctcgctggataaagtggatgccggttttgcgattactaaaatcgcactgaagagcgaagttgcggtgccgggtattgatgcctccacctttgacggcattatccagaaagcaaaagcaggatgcccggtttctcaggtactgaaagcggaaattacgctggattaccagttgaaatcgtaa

SEQ ID NO: 4330 - DNA, 216 bp, Escherichia coli
atgtttacttattatcaggcagaaaattcaacagcagaacccgctctggttaatgccattgagcaaggccttcgggcagagcacggtgttgtcactgaagatgacattctcatggagctgaccaaatgggtggaagcatctgataacgacatcctcagtgatatctaccagcaaacgatcaattatgtggtcagtggtcagcaccctacgctttaa

SEQ ID NO: 4331 - DNA, 138 bp, Escherichia coli
atgaaatcgaaccgtcaggcacgtcatattcttggactggaccataaaatttctaaccagcgcaaaatagttaccgaaggtgacaaatccagcgtggtaaataatcccaccggcagaaaacgccccgctgaaaagtaa

SEQ ID NO: 4332 - DNA, 1698 bp, Escherichia coli
atggaaccaaaaacaaaaaaacagcgttcgctttatatcccttacgctggccctgtattgctggaatttccgttgttgaataaaggcagcgccttcagcatggaagaacgccgtaacttcaacctgctggggttactgccggaagtggtcgaaaccatcgaagaacaagcggaacgagcatggatccagtatcagggattcaaaaccgaaatcgacaaacacatctacctgcgtaacatccaggacactaacgaaaccctcttctaccgtctggtaaacaatcatcttgatgagatgatgccagtcatttacaccccaaccgtcggcgcagcctgtgagcgtttttctgagatctaccgccgttcacgcggtgtgtttatctcttaccagaaccgccacaatatggacgatattctgcaaaacgtaccaaaccataatatcaaagtgattgtggtgactgacggcgaacgtattctggggcttggtgaccagggcatcggcgggatgggcattccgatcggtaaactgtcgctctataccgcctgtggcggcatcagtccggcctatacccttccggtggtgctggatgtcggcaccaacaaccaacagctacttaacgatccgctgtatatgggctggcgtaatccgcgtatcactgacgacgaatactatgaattcgttgatgaatttatccaggctgtgaaacaacgctggccggacgtactgttgcagtttgaagacttcgcacaaaaaaatgcgatgccgttacttaaccgctatcgcaatgaaatttgttcttttaacgatgacattcagggcaccgcggcggtaacagtcggcacactgatcgcagccagccgcgcggcaggtggtcagttaagcgagaaaaaaatcgtcttccttggcgcaggttcagcgggatgcggcattgccgaaatgatcatcgcccagacccagcgcgaaggattaagcgaggaagcggcgcggcagaaagtctttatggtcgatcgctttggcctgctgaccgacaagatgccgaacctgctgcctttccagaacaaactggtgcagaagcgcgaaaatctcagtgactgggataccgacagcgatgtgctgtcactgctggatgtggtgcgtaatgtaaaaccagatattctgattggcgtctcaggacagaccgggctgtttacggaagagatcatccgtgagatgcataaacactgtccgcgtccgatcgtgatgccgctgtctaacccgacgtcacgcgtggaagccacaccgcaggacattatcgcctggactgaaggtaacgcgctggtcgccactggcagtccgtttaatccagtggtatggaaagataaaatctaccctatagcccagtgcaacaacgcctttattttcccgggcatcgggctgggtgttattgcttccggcgcgtcacgtatcaccgatgagatgctgatgtcggcaagtgaaatgcttgctcagtattcgccgctggtcctgaacggcgaaggtctggtactaccggaactgaaagatattcagaaagtctcccgcgcaattgcctttgcggttggcaaaatggcgcagcagcaaggcgtggcggtgaaaacgtctgccgaagctctgcaacaggccattgatgataatttctggcacgccgaataccgcgactaccgccgtacctccatctaa

SEQ ID NO: 4333 - DNA, 1011 bp, Escherichia coli
atgaaggctgcagttgttacgaaggatcatcatgttgacgttacggataaaacactgcgctcactgaaacatggcgaagccctgctgaaaatggagtgttgtggtgtatgtcataccgatcttcatgttaagaatggcgattttggtgacaaaaccggcgtgattctgggacacgaaggtattggtgtggtggcagaagttggccctggtgttacttcattaaaaccaggcgatcgtgccagcgtggcgtggttctatgaaggatgcggtcattgcgaatactgtaacagtggtaacgaaacgctctgccgttcagttaaaaatgccggatacagcgttgatggcgggatggcggaagagtgcatcgtggtcgccgattacgcggtaaaagtgccagatggtctggactcggcggcggccagcagcattacctgtgctggggtcactacctacaaagccgttaagctgtcaaaaattcgtccaggacagtggattgctatctacggtcttggcggtctgggtaacctcgccctgcaatacgcgaagaatgtctttaacgccaaagtgatcgccattgatgtcaatgatgaacagttaaaactggcaaccgaaatgggtgcagatttagcgattaactcacgcactgaagacgccgccaaaattgtgcaggaaaaaaccggtggcgctcacgctgcggtggtgacagcggtagctaaagctgcgtttaactcggctgttgatgctgtccgtgcaggcgggcgtgttgtggcagtcggtctgccgccggagtctatgagcctggacatcccacggctggtgctggatggtattgaagtggtcggttcgctggtcggcacgcgtcaggatctaaccgaagccttccagtttgccgccgaaggcaaagtggtgccgaaagtcgccctgcgtccgttagaggacatcaacaccatctttaccgagatggaagaaggcaaaatccgtggccgtatggtgattgatttccgtcgctaa

SEQ ID NO: 4334 - DNA, 171 bp, Escherichia coli
atgggggaggaaaagaagaagagtgaaattgcggaaagcgtctcgcaaaacaggctgcgacccgaacatggcagtcgcagcaaagacctcttagcgacggaaatcaatcaccatacggccacggattttgccttcttccatctcggtaaagatggtgttgatgtcctctaa

SEQ ID NO: 4335 - DNA, 279 bp, Escherichia coli
atgataatgaatttcagacacaagggattgcgtgacttgtttcttctcggcaaaacctccggcgttataccgacgcaagtcaaacgattacgccaccgactcgctgtgattgatgcagcatgctgtcttgctgatatcgatatgcccggttaccgactacatccgttaagcggcgatcgcgatggaatttgggcgatatctgtctcgggcaactggcgaatcacatttgaattcgtcaatggcgatgcatacatactggattatgaggactatcactga

SEQ ID NO: 4336 - DNA, 285 bp, Escherichia coli
atgaaaatggccaatcatccccgcccgggggacattattcaggaatcactggacgaacttaatgtcagcctgcgcgagtttgccagagcaatggaaattgcgccctcaacggcaagccgattgctgaccggaaaagcagctttgacgccagaaatggcaataaaactgtccgtggtgatcggcagttcgccgcaaatgtggctgaatctgcaaaatgcctggagtctggcagaggcagaaaaaacagtggatgtgtcgcgactgcgccgtctggttacgcaataa

SEQ ID NO: 4337 - DNA, 654 bp, Escherichia coli
atgagtaagtcgaaaatgattgtgcgcaccaagtttattgatcgcgcctgtcactggaccgtagtgatttgcttcttcctggtggcgctgtccgggatttcgttcttcttcccgacgctgcaatggctgacgcaaaccttcggtacgccgcagatgggacgcattttgcacccgttcttcggcattgcgattttcgtcgcgctgatgtttatgtttgtgcgttttgtgcatcacaacatcccggataagaaagatattccgtggctgttgaacattgtcgaagtattaaaaggcaatgagcacaaagtggcggatgtcggtaagtacaacgccgggcaaaagatgatgttctggtcaatcatgagcatgattttcgtgctgctggtgaccggagtgattatctggcgtccgtactttgcgcagtacttcccgatacaggttgtccgttatagcctgctgatccatgcggctgcgggtatcatcctgatccacgccatcctgatccatatgtatatggcattctgggtgaaaggatcgattaaagggatgatcgaagggaaggtgagccgtcgctgggcgaagaaacaccatccgcgctggtatcgtgaaatcgagaaggcagaagcgaaaaaagagagtgaagaagggttataa

SEQ ID NO: 4338 - DNA, 885 bp, Escherichia coli
atggctatggaaacgcaggacattatcaaaaggtccgcaactaactccatcacgccgccttctcaggtgcgtgattacaaagcagaagtcgcgaaacttatcgacgtttccacctgtatcggctgtaaagcctgtcaggtggcgtgttcggagtggaacgacatccgtgatgaagtggggcactgcgtcggggtttacgataaccccgccgatctgagcgccaagtcctggacggtgatgcgctttagcgaaaccgaacagaacggcaagctggagtggctgatccgtaaagacggctgtatgcactgtgaagatccgggctgcctgaaggcatgcccgtctgctggtgcaatcattcagtacgctaacgggattgtcgatttccagtcggaaaactgcatcggctgtggttactgcattgccgggtgtccgtttaatattccgcgcctcaacaaagaggataaccgggtatataaatgcacgctctgcgtcgatcgcgtcagcgtcggccaggaaccggcttgtgtgaaaacctgtccgaccggggctatccacttcggcaccaagaaggagatgctggagctggcggaacagcgcgtggcgaaactgaaagcgcgtggttacgaacatgctggcgtctacaacccggaaggggtcggtggtacgcacgtcatgtacgtgttgcatcacgccgatcagccggagctgtatcacggtctgccgaaagatccgaagatcgacacatcggtgaacttgtggaaaggcgcgttgaaaccgctggcagcggctggctttatcgccacttttgccgggttgattttccactacatcggtattggcccgaataaggaagtggacgatgacgaggaggagcatcatgagtaa

SEQ ID NO: 4339 - DNA, 2412 bp, Escherichia coli
atgaccaaccactgggtggatatcaaaaacgctaacgtcgtaatggtgatgggcggtaacgctgctgaagcgcatcccgtcggtttccgctgggcgatggaagcgaaaaacaacaacgatgcaaccttgatcgttgtcgatccccgttttacgcgtaccgcttctgtggcggatatttacgcacctattcgttccggtacggacattacgttcctgtctggcgttttgcgctacctgatcgaaaacaacaaaatcaacgccgaatacgttaagcattacaccaacgccagcctgctggtgcgtgatgattttgctttcgaagacggtctgttcagcggctacgacgctgaaaaacgtcaatacgataagtcgtcctggaactatcagttcgatgaaaacggctatgcgaaacgcgatgacacgctgactcatccgcgctgtgtatggaatctgctgaaagcgcacgtttcccgctacacgccggacgtagtagaaaacatttgcggtacgccaaaagccgacttcctgaaagtgtgtgaagtgctggcctccaccagcgcaccggatcgcacaaccaccttcctgtacgcgctgggctggacgcagcacaccgtgggtgcgcagaacatccgtacgatggcgatgatccagttgctgctcggtaacatgggtatggccggtggcggcgtgaacgcattgcgtggtcactccaacattcagggcctgactgacttaggcctgctctctaccagcctgccaggttatctgacgctgccgtcagaaaaacaggttgatttgcagtcgtatctggaagcgaacacgccgaaagcgacgctggctgatcaggtgaactactggagcaactatccgaagtttttcgttagcctgatgaaatctttctacggcgatgccgcgcagaaagagaacaactggggctacgactggctgccgaagtgggaccagacctacgacgtcatcaagtatttcaacatgatggatgaaggtaaagtcaccggttatttctgccagggctttaacccggttgcgtccttcccggacaaaaacaaagtggtgagctgcctgagcaagctgaagtacatggtggttatcgatccgctggtgactgaaacctctaccttctggcagaaccacggcgagtcgaacgatgtcgatccggcatctattcagactgaagtattccgtctgccttcgacctgctttgctgaagaagatggttctatcgctaactccggtcgctggttgcagtggcactggaaaggtcaggacgcgccgggcgaagcacgtaacgacggcgaaattctggcgggtatctaccatcatctgcgcgagctgtaccaggccgagggtggtaaaggcgtagaaccgctgatgaagatgagctggaactacaagcagccgcacgaaccgcagtctgacgaagtggcgaaagagaacaacggctatgcgctggaagatctctatgacgctaatggcgtgctgattgcgaagaaaggtcagttgctgagtagctttgcgcatctgcgtgatgacggtacaaccgcatcttcttgctggatctacaccggtagctggacagagcagggcaaccagatggctaaccgcgataactccgacccgtccggtctggggaatacgctgggatgggcctgggcgtggccgctcaaccgtcgcgtactctacaaccgtgcttcggcggatatcaacggtaaaccgtgggatccgaaacggatgctgatccagtggaacggtagcaagtggacgggtaacgatattccggacttcggcaatgccgcaccgggtacgccaaccgggccgtttatcatgcagccggaagggatgggacgcctgtttgccatcaacaaaatggcggaaggtccgttcccggaacactacgagccaattgaaacgccgctgggcactaacccgttgcatccgaacgtggtgtctaacccggttgttcgtctgtatgaacaagacgcgctgcggatgggtaaaaaagagcagttcccgtatgtgggtacgacctatcgtctgaccgagcacttccacacctggaccaagcacgcattgctcaacgcaattgctcagccggaacagtttgtggaaatcagcgaaacgctggcggcggcgaaaggcattgccaatggcgatcgtgtcactgtctccagcaagcgtggctttatccgcgcggtggctgtggtaacgcgccgtctgaaaccgctgaatgtaaacggtcagcaggttgaaacggtgggtattccaatccactggggctttgagggtgtcgcgcgtaaaggttatatcgctaacactctgacgccgaatgtcggtgatgcaaactcgcaaacgccggaatataaagcgttcttagtcaacatcgagaaggcgtaa

SEQ ID NO: 4340 - DNA, 588 bp, Escherichia coli
atggacgtcagtcgcagacaattttttaaaatctgcgcgggcggtatggcgggaacaacagtagcagcattgggctttgccccgaagcaagcactggctcaggcgcgaaactacaaattattacgcgcgaaagagatccgtaacacctgcacatactgttccgtaggttgcgggctattgatgtatagcctgggtgatggcgcgaaaaacgccagagaagcgatttatcacattgaaggtgacccggatcatccggtaagccgtggtgcgctgtgcccgaaaggggccggtttgctggattacgtcaacagcgaaaaccgtctgcgctacccggaatatcgtgcgccaggttctgacaaatggcagcgcattagctgggaagaagcattctcccgtattgcgaagctgatgaaagccgaccgtgacgctaactttattgaaaagaacgagcagggcgtaacggtaaaccgttggctttctaccggtatgctgtgtgcttccggtgccagcaacgaaaccgggatgctgactcaaaaatttgcccgctccctcgggatgctggcggtagacaaccaggcgcgcgtctga

SEQ ID NO: 4341 - DNA, 825 bp, Escherichia coli
atggtaggattgattcgcggtgtcagtgaggggctcggcccggtcggcggcgcagctgctatctattcattaagcgggctgctgttaatcttcacggttggatttccgcgtattcggcagatcccgaaaggctatttactcgccgggagtctgttattcgtcagctatgaaatctgtctggcgctttccttagggtatgcggcgacccgtcatcaagcgattgaagtggggatggtgaactatctatggcccagcctgacaattctctttgccattctgtttaatggtcagaaaaccaactggctgattgtaccaggattattattagccctggtcggcgtctgctgggtgttaggcggtgacaatgggttacattatgatcaaattattaataatatcaccaccagcccattgagttatttcctggcgttcattggggcgtttatctgggcagcctactgcaaagtaacgaataaatacgcacgcggatttaacggaattaccgtttttgtcctgctaacgggagcaagtctgtgggtttactattttcttacgccacaaccagaaatggtatttaacacgcccgtcatgattaaactcatctctgcggcatttaccttaggatttgcttatgctgcatggaatgtcggtatattacatggcaacgtcaccataatggcggtaggttcgtattttacgcccgtcctttcctcagcgcttgcagccgtgctgctcagcgccccgctgtcgttctcgttctggcaaggcgcgctaatggtctgcggcggttccctgctctgctggctggcgacacgtcgtggctaa

SEQ ID NO: 4342 - DNA, 1389 bp, Escherichia coli
atggcactgcaaaatgagaaaaatagtcgttatcttttacgcgactggaaaccagaaaatccggccttctgggaaaataaaggaaagcaaattgcacgaagaaacctctggatatcagtcagttgcctacttcttgccttctgtgtctggatgctatttagcgcagttactgttaatctcaataaaatcggttttaatttcactaccgatcaactctttttattaaccgcattaccctccgtttctggcgcattattgcgtgtcccctactcctttatggtgcctatattcggtggacgccgatggacggtttttagtactgcaatcctgattattccttgcgtctggctcggaattgccgtgcagaatccgaatactccttttgggatatttatcgttatcgctttgctatgcggttttgcaggtgcgaactttgcttcgagcatgggcaatatcagtttcttctttccaaaagccaaacaagggagcgctcttgggattaatggcggattaggaaacttaggtgtaagtgtgatgcagctggttgcaccgctggtcatttttgtccccgtatttgcctttctcggcgtcaatggcgtaccgcaggccgacggttcggtgatgtcgctggcgaatgccgcatggatttgggtgccattactggcgattgccacgatcgccgcctggtcagggatgaatgatatcgccagttcacgcgcctcaattgccgaccagctccctgtcttgcaacgcctgcatctctggctgctgagcctgctttatcttgccaccttcggttcgtttatcggtttttctgcgggttttgccatgctggcaaaaacccagttcccggatgtgaatattctgcgcctggcgttctttggcccatttatcggtgccatcgcgcgatcggttggtggtgctatttccgataaattcggcggcgtgcgggtgacgttgatcaacttcatttttatggcgattttcagcgccctgctgttccttaccttaccgggcacaggctccggtaatttcatcgcattttacgccgtatttatggggctgtttctgaccgcgggtctgggaagtggttctactttccagatgatcgccgtcatctttcgccagataacaatttatcgggtgaagatgaaaggcggtagtgatgagcaagctcaaagagaagccgtcaccgaaacggcagccgctctgggctttatctcagccattggcgcagtgggcggcttttttattccgcaggcgtttggcatgtcgctcaatatgaccggctctccggtgggcgcgatgaaagtgtttttaatcttctacatcgtttgtgtgctactgacctggctggtttatggtcggcggaagttcagccaaaaataa

SEQ ID NO: 4343 - DNA, 3741 bp, Escherichia coli
atgagtaaacttttggatcgctttcgctacttcaaacaaaagggcgaaacctttgccgatggtcacggacaggtgatgcatagcaaccgcgactgggaggacagctatcgccagcgttggcagttcgacaaaatcgtgcgttccacccacggtgttaactgtacaggctcctgcagctggaaaatctacgttaaaaatggtctggtgacctgggaaatccaacagaccgactacccgcgcactcgccctgacctgccaaatcatgaacctcgcggctgcccgcgtggcgcaagttactcctggtatctctacagcgctaaccgcctgaaatacccgctcattcgtaaacgactgattgaactgtggcgcgaagccctcaagcaacacagcgatccggtactggcgtgggcatcgattatgaacgatccgcaaaagtgcctgagctacaaacaagtgcgtggacgcggtggctttatccgctccaactggcaggagctaaatcagctgattgccgctgctaatgtctggaccatcaaaacctatggcccggatcgagttgccggtttctcgccgatcccggcgatgtcgatggtttcttacgccgccggaacacgttatctgtcgctgttaggtggcacctgtttaagcttctacgactggtattgcgacctgccgcccgcctcgccgatgacctggggcgaacaaaccgacgtgccggaatctgccgactggtataactccagttacatcatcgcctgggggtctaacgtaccgcagacacgtacgccggacgcccatttctttaccgaagtacgctacaaaggcactaaaaccatcgccattacccctgactactctgaagtggccaaattgtgcgaccagtggctggcaccgaaacaaggcactgatagcgccctggcgatggcaatgggccatgtgattttaaaagagtttcatctcgataatcccagcgactactttatcaactactgccgccgctacagcgacatgccgatgctggtaatgctggaacctcgcgacgacagcagctacgttcccgggcgcatggtccgcgcatctgacctggtggatggactgggcgaaagcaataatcctcagtggaaaaccgtggcagttaataccgcaggtgaactggtagtgccgaacggttcgattggttttcgctggggagaaaaaggcaaatggaacctggaatccattgccgccggtacggaaaccgaattgtcgttaaccctgctcggtcaacatgacgccgttgcaggcgtggccttcccctactttggcggcattgaaaatccacattttcgcagcgtaaaacacaatcctgtcctggtgcgccaattgcccgttaaaaacctgacattagccgatggtagcacctgtccggtggtcagcgtttatgatttggtactggcgaattacggcctcgatcgcgggctggaagatgaaaacagcgcgaaagattacgctgaaatcaaaccttatacccctgcctggggcgagcaaattaccggcgttccgcgccagtatattgaaaccatcgcccgtgaatttgccgataccgcccataaaacgcatgggcgctcgatgattattctcggcgcaggtgttaaccactggtatcacatggacatgaactaccgcgggatgatcaatatgctgatcttctgcggttgtgtcgggcaaagcggtggcggctgggcacactatgtcggtcaggaaaaactgcgcccacaaaccggctggctgcctctggcctttgcgctcgactggaaccgaccaccgcgccagatgaacagcacctcgtttttctacaatcactccagccagtggcgctatgaaaaagtcaccgcgcaggaattgctctcaccgctcgccgatgccagtaaatacagcggtcacctgattgatttcaacgttcgcgccgaacgtatgggctggctaccttctgcgccgcagttggggcgtaacccgctcgggattaaagctgaagccgacaaggccggattatcccccacagaatttaccgcccaggcgctgaaatcgggcgatttacgcatggcctgcgaacaaccagatagcggcagcaatcatccgcgtaatttgtttgtctggcgttctaacctgcttggctcctccggcaaaggccacgagtatatgcagaagtatctgctgggaaccgaaagtgggattcagggtcaggaactcggtgccagcgacgggatcaaaccagaagaagtcgagtggcaaactgcggcgattgaaggcaagctcgacctgctggtgacgctcgacttccgtatgtccagtacctgcctgttctccgatatcgttctgcccaccgccacctggtacgaaaaagacgatatgaacacctcggatatgcatccgtttattcatcccctatctgcggcggtcgatccggcgtgggaatcacgcagcgactgggaaatctacaaaggtattgccaaagccttttcgcaagtgtgcgtgggccatcttggcaaagaaaccgacgtggtattacaaccactgctgcatgactccccggcagagctttcacagccgtgtgaagtgctcgactggcgcaaaggtgaatgcgatctgattccaggcaaaaccgcgccgaatattgtggcggtggagcgcgactaccctgctacctatgaacgctttacctcactcgggccattgatggacaaacttggcaacggcggtaaagggatttcgtggaatacccaggatgaaatcgatttcctcggtaaactcaattacaccaagcgtgatggcccggcacaggggcgtccgctgattgataccgccattgacgcatcagaagtgattctggcgctggcaccggaaaccaacggccatgttgcagtcaaagcgtggcaagcgctgggcgagatcaccggacgcgaacatacccatctggcgctgcacaaagaggacgagaagattcgctttcgcgatattcaggcgcagccgcgtaaaattatctccagccccacatggtctggtctggaaagcgatcacgtttcctataacgcgggatacaccaacgttcatgagttaattccgtggcgcacgctgtcgggacgccagcaactctatcaggatcatccgtggatgcgtgcttttggtgaaagtctggtggcttatcgcccgcctatcgacacccgtagcgtcagtgaaatgcgccagataccgccaaacggcttcccggaaaaagcacttaacttcctgacgccgcaccagaaatggggcattcactcaacctacagtgaaaacctgctaatgctgacgctctctcgcggtggaccgattgtctggatcagcgaaaccgatgcccgagaactgaccattgtcgataacgactgggtggaagtatttaacgccaacggcgcgctgactgcccgcgcggtggtcagccaacgtgtaccgccgggcatgaccatgatgtatcacgcccaggaacgcattatgaatattcctggttcggaagtaactggcatgcgcggcggcattcataactcggttacccgcgtttgcccgaaaccaacgcatatgattggcggttacgcgcagctggcctggggctttaactactacggcactgtcggctctaaccgcgacgaattcatcatgatccgcaagatgaagaacgttaactggctggatgatgaaggtcgcgatcaggttcaggaggcgaaaaaatga

SEQ ID NO: 4344 - DNA, 1545 bp, Escherichia coli
atgaaaatacgttcgcaagtcggcatggtgcttaacctcgataaatgtatcggctgccatacctgttcggtgacctgtaaaaatgtctggaccggacgcgaaggcatggagtacgcatggtttaacaacgtcgaaaccaaaccgggcattggttatccgaaaaactgggaagatcaggatgagtggcaaggtggctgggtgcgtgatgtgaatggcaagatacgcccgcgtctgggcagcaagatgggcgtaataaccaaaattttcgccaacccggtagtgccgcagattgacgattactacgaacctttcaccttcgactacgaacatttgcatagcgcgccggaaggcaaacatattcccacagcccgtccgcgttcactgattgacggcaaacggatggacaaagtgatctggggcccaaactgggaagaactgctgggcggcgaatttgaaaaacgagcccgcgaccgcaacttcgaggccatgcaaaaggagatgtacgggcagtttgaaaacaccttcatgatgtacctgccgcgcttgtgcgaacactgccttaaccccagttgtgtagcgacctgccccagcggcgctatctacaaacgcgaagaagacggcattgtgctgatcgatcaggataaatgccgtggctggcgtttgtgcattagcggttgtccgtacaaaaaaatctacttcaactggaaaagcggcaagtcagaaaaatgtatcttctgttacccacgaattgagtcaggccaacccaccgtgtgctcagaaacctgcgtgggtcgcatccggtatctgggcgtgctgctttacgacgccgaccgcattgaggaagcggcaagcaccgagcgcgaagttgacctctatgagcgccagtgcgaagtgttcctcgatccacacgatccctcagtgatcgaggaagccctgaaacaaggtattccacaaaacgtgattgacgctgcccagcgttcgcctgtctacaaaatggcgatggactggaaactggcgctaccgctgcaccctgaatatcgcaccctgccgatggtctggtacgttcctccgctgtcaccgattcagtcctacgctgatgcgggaggtttgccgaaaagcgaaggcgtgctgcccgccatcgaaagcctgcgtattccggtgcaatatctcgccaatatgttgagtgccggtgataccggtccggtactgcgggcgctgaaacggatgatggcgatgcgccactatatgcgttcacaaaccgtggaaggcgttactgatactcgtgccatcgacgaagtaggtctgagcgtcgcccaggtcgaagagatgtatcgttacctcgccattgccaactatgaagatcgtttcgtcatcccgacaagccatcgggaaatggcgggcgatgccttcgcagaacgcaacggctgcggttttacctttggcgacggttgccacggttcggacagcaaattcaacctgttcaacagtagccgtatcgatgccatcaacatcaccgaagtgcgcgacaaagcggagggcgaataa

SEQ ID NO: 4345 - DNA, 696 bp, Escherichia coli
atgcagatcctcaaagtgatcggcttgttgatggagtatccggacgagctgttatgggaatgcaaggaggacgcgctggcgttgatccgccgcgacgcaccgattcttacggattttacccgcaacctgcttaacgcgccgctgctggataaacaggccgaatggtgcgaagtgtttgaccgtggacgtaccacatcgctgctgctgttcgaacatgttcatgccgagtcccgcgatcgcggccaggcaatggtggacctgctggcggagtatgaaaaggtcggtctgcaactgaattgtagggaactgcccgattatctaccgctgtatctggagtatttaagcgtacttccggacgatcaggcgaaagaaggattactcaacgttgcgccgatcctcgccctgcttggcggacgcttaaaacaacgcgaggcaccgtggtacgcgttatttgacgccctgttgcaactggcaggaagccctctatcaagtgacagtgtcacaaaacagattcgcagtgaagagcgtgacgacacccgccaggcgctggatgcggtgtgggaagaagaacaggtgaagtttattgaagataacgccacggcgtgtgacagctcgccgcttaatcaatatcagcgacgctttagccaggatgtcgcgccgcagtatgtcgacatcagtgcgggaggtgggaaatga

SEQ ID NO: 4346 - DNA, 681 bp, Escherichia coli
atgattcagtatctgaacgtctttttttacgatatctacccgtacttgtgtggcacggtttttatccttggaagctggctgcgctacgattacgggcagtatacctggcgtgccgcctccagccagatgctggataaacgcgggatggtgctatggtcgaacttgttccatatcggcattctggggatcttcttcggtcatctgttcggcatgttaacgccgcactggatgtacgcgtggtttctgccggtggcggtaaaacagcagatggcgatgatcctcggcggaatatgcggggtattgacgctgattggcggtgcggggctactggtgcgtcgtttaacaaatccgcgtatcagggtgacgtcttctggtgcggatatcctgatcctcgccattttgttaattcagtgcattcttgggttaaccaccattcctttttcagcacaacatccggacggcagtgaaatgatgaagctggtgggctgggcgcaaagcattgtcactttccagggcggtgcatctacgcatcttgatggtgtcgcctttatattccgcgttcatctggtgcttggaatgaccatcttcctgctcttcccgttcacccgactggtgcatgtctggagcgcgccgtttgagtactttactcgtcggtatcagattgtgcgttcgcggcgttaa

SEQ ID NO: 4347 - DNA, 894 bp, Escherichia coli
atgaaaccgcaggtttaccacgtcgatgcttttacctctcaaccatttcgcggcaattctgccggtgttgttttccccgccgataatctcagtgaagcgcaaatgcagcttatcgcccgcgagttaggtcattcggaaactgcttttctgctgcacagcgacgacagcgatgtgcgcatccgctactttacgccaacggttgaagttccgatttgtggtcacgcgacagtagctgcgcactatgtacgtgcaaaggtgttaggtttaggaaattgcacggtctggcaaacatcgctggcaggaaaacatcgtgtgactatcgaaaagcaaaatgatgattatcgtatttcgctggaacaaggtactccaggctttgagccaccactgacaggtgaaacacgtgcagcgattatcaacgcgcttcatctcactgaagacgatattttgcaaggcttgccaatccaggtggctaccaccggacactcaaaagtgatgattccactgaagccggaagtggatatcgacgccctttcgcctgaccttgctgcgctgaccgcaatcagcaagcagattggctgcaatggtttcttcccgttccagatccgcccaggcaaaagcgaaaccgacggtcgcatgttctcgcctgcgattggtattgtggaagatccggtgaccgggaatgccaatggtccgatgggcgcatggttagtacatcacaacgtattatcccacgatggcaacgtgttgcgtgttaaaggccatcaggggcgcgcattggggcgtgatggtgtaattgatgtgacggtgacaattcgagataaccaaccggagaaagttaccatttccggcacggcggtgattctattccatgctgaatgggccattgatttttga

SEQ ID NO: 4348 - DNA, 846 bp, Escherichia coli
atgacgcccattctgaatcattattttgcccgtattaactggttgggagctgctgcggccaatattgatacgctgcgtgcattgcacctgaaacacaattgcaccattccgtttgaaaatctcgacgttttgctgccgagggaaatacagcttgatgatcaatcgctggaagataaactggtgatagcccgtcgtggcggttactgttttgagcagaatggcgtgtttgagcgggtgttacgcgagctggggtttaacgttcgcagcttgttaggtcgcgtagtgttatcaaatccgccagcattaccgccgcgcacccatcgtttgctgttggtggaactggaaggggaaaaatggattgctgatgtcggtttcggtgggcagacgctaaccgcgccgattcgtttaatgccggatatcatgcaaaccacgccacacggagagtatcggttgttgcaagagggtgatgattgggtattgcagtttaatcatcatcagcactggcagtcgatgtaccgttttgatctctgcgagcagcaacaaagcgattatgtgatgggcaatttctggtcggcgcactggccgcagtcgcattttcgccatcatttgctgatgtgtcgccatttgccggacggtggcaagctaacgctgaccaattttcattttacccattatgaaaatgggcacgcagttgagcagcgaaatctaccagatgtggcgtcgttatatgccgtgatgcaggaacagtttggtctgggcgtagatgatgcgaaacatggctttactgtggatgagttagcgctggtgatggcggcgtttgatacgcacccggaggcgggaaaataa

SEQ ID NO: 4349 - DNA, 570 bp, Escherichia coli
gtgagccaattcattcccgtcgaattacaccatgccagccgtctgttaaatcatggcccaactgtcatgatcaccagtttcgatgagcaatcccagcggcgtaacattatggcagcagcctggtcgatgcccgtagagtttgaaccgccacgcgtggcgattgtggtagataaatcgacatggaccagggagttgattgaacgtaacggtaagtttggcatcgttatcccgggcgttgcggcgactaactggacgtgggcggtgggaagtgtgtcgggtcgtgaagaagataaatttaattgctacggcattccggtagtgagaggcccggtgcttggtttgccgctggtcgaggaaaaatgtctggcgtggatggagtgtcgcctgctacctgcaacttccgcgcaagaaaaatacgatacgctatttggcgaagtggtatcagcagcggcagacgcacgggtatttgtcgaaggccgctggcagtttgatgatgataagctcaatacgttgcatcatttaggtgctggcacgtttgttaccagtggtaagcgagttaccgcgggctaa

SEQ ID NO: 4350 - DNA, 216 bp, Escherichia coli
atgtttatacgaccagtcaaaccttcagatgttgaaccattaatggatatgctgcttgacagggatcaatttgatcaagatggccttcatcatgtacaaaaaacactaacacattatttctcaggtcaatctgccgatttatggtttagtgcagaacacttgggactggcagggattgcctactgtgcttctgaaatgatgacaaatgatgtctga

SEQ ID NO: 4351 - DNA, 822 bp, Escherichia coli
atgctgcaagctataaaaaaaatcataataatgacaatcgtaaatattatatttttctattcctttcaatcgactgcggatgaaatggttttaataaaaaaatacgggtttgggcttgagagagatatcaaaggaaggccattaatttatcctatcgaaaattatgatgagtgtaagaaaaaatgcaatcatatgaattatatagcggatgtcaatgctcaattagctatgagtaaaaaaaataacaggatttttgctaacataacctttactaacaatagctctaccacgtattttttttctaaacattatctacctatgaaagtaaaagatggaaaaggagatgaatatgatgcgatatgcaaaaaaccattcagaatcaactctgggaatatcacgttggactacttaggtggttcatgtccttttgaaattaatacgaatcctgaacggtggaatactattaaaccaggtcgtagttttttgttgagtataaccttaaatgatatgtatgcctttataccaggagataattattattttataaaatcatctggctataaatttgttaatgacaagtggtttacactcaaatcaatcaataatatttttctttattttttaagtttaaaaattaattgtgctgatgatttttttgatattaataattttactacatgtaataatttgttattagatgaaaaaaaacacttttttattaatcagttatgggcaattgaggatgaaaaaaattctatttacgtcacccctgatgaaatttctataagtatagacggcgataacttaaagttgccatattag

SEQ ID NO: 4352 - DNA, 792 bp, Escherichia coli
atggacgataataatcaaacttctggacaaccaaagccagagccagaagaatgtgtgaaagagcaaaaaataacagatcattttaaaataatgattgataaggctcgtaaggcacaaaagttggttttgataaaaagagcagatgatcttttgagatggggagcacaggaggaatatgatttcagtaagatctttggtgttaaaggaaataaggaggttaatataagaaaatatggacataatacaggtaggcgcatgaatgctagatttcttatgatggatggtgtgagaagattaatgattatagctaatgatttaacaatgagcagttttataaattatacaggttgtaatgaatttgcagcattcgtcagcccaagtaaggatatgccctatataattaacataggcgcaaaatttgagtatagagatggcaaaaaaaatccagtaacgggaaaggattctcatgttgctactttatgtcatgaaatgtctcatattcagtggtattatggggataataaaaaaggtggtatgtggtcacaggattatacaactactgataaatattcaacgtgcaaagaggatgaagtttcatatgacgaacatatccgtattgcaactaaactgatctctaaacaaaaagatcaaatatttgagaatgcatataacatagaaagatattttgaaataagattaattgaaagtgagatagactcgattgatgatgaaatattaagcaattcagttaagaaaaaaatagcggaattagaaaaagcacttctccattaa

SEQ ID NO: 4353 - DNA, 867 bp, Escherichia coli
gtgaaggctgaccacacggagaccattggtaacgaccagaagataacggtggtgaaggggcagacggttcaggtcgggaccagaaaagaagggggccacgaccagagtatcacggtggcgaacgaccggtgcatcacggtacgtaatgaccagacgctgcaggtgacgaatgaccggacggtgagcgtgagtaatgatgacggcctgtacgtcagaaatgaccgtaaagtgacggtggaagggaagcaggagcataagacgacggggaaccatgtcagcctggtggagggaaagcacagcctggtggtgaagggggacctggcgaggaaggtgagtggcgcgctggggataaaggtcgacggggatatcgtgctggagagcagcagccggataagcctgaaggtgggtggctcgtttgtggtcatccattcagggggcgtggacatcgtcgggccgaaaatcagtctcaatagcggcggtagtccggggacgccggtgccggcgctgcaaccggcggtgctgaagacactgggggatgagaagagtggtgatggcagtgattccggagaagaaaatgaagactctggagggaactgcgtgaccggaagtggtggtgatgatcgaggtgacgatgaggatgaacctgaaaaatatactctccagttccattttacagacgatgacgggataccgtattcagaaacccgctacattgccttctttgaggatggcacgcagacccgcggagaaacggatgaagaggggtatacagagcgtttttttgtatctagcaaacatgaaattaaagtgaagttgctatttgcgaatgatgattttctctcaatggaaggacactatggacgataa

SEQ ID NO: 4354 - DNA, 519 bp, Escherichia coli
atgccaaccccatgttacatttcaattacaggtcagacccaggggaatatcactgccggtgctttcaccgcagattctgtcggcaatatctacgtgcagggacacgaagatgaaatgctggtgcaggagtttctgcataacgttactgttccaaccgatccgcagtctggtcagccttccgggcagcgtgctcacaaaccgttcattttcaccgtggcgctgaacaaagccgttccgctgctgtacaacgcgctggcctccggtgaaatgctgccgaaagtggagctgcactggtggcgtacctctgttgaaggcaagcaggagcactacttcaccacacgtcttactgacgcgacgattgtggacatgaacctgcatatgccgcactgccaggaccctgcacagcgtgagtttacgcaattgctcgcagtatcactggcctaccgtaaggttgagtgggagcacatcaaatccggtacttctggtgccgatgactggcgtgcaccgctggaagcataa

SEQ ID NO: 4355 - DNA, 504 bp, Escherichia coli
atgagcaaaatgaacaacaatggcggcagtgtcgcgccgaaagaaagaatcagcgttcggtatacaccaaaagttgatggggtggctgctgatatcgaattgccgctgaatttattgatcaccggcaatctgaaagggaaaccagataacacgccgttggatgagcgaactgccattgctatcaaccgctataacctcaacgcagtcatttcagaagctgacattgaacgggagtttgttgttccggctgaactcagtgacgctcccaatgagcaaatgtacgtcaacctgaaagtcaaatctatggatgacctttctcctgaccatattgccagccaggtaccagaaataaaacgtctgctcgaattgcgtgaagccctggtcgcacttaagtctccactaggcaatattccggccttccgcgcacaacttcaggcgctactggaaaacgaagacacccgcgagcagctgatccaggaactgggtatcgccgttcagaaataa

SEQ ID NO: 4356 - DNA, 1485 bp, Escherichia coli
atgtcagtaaaggaagaaattgctcccgtcagcgcgtctcaaaccgccgcgcccccatctctgcttgatgaaatcatggcgcaaacccgcgtccagcctaaatcagaaagctacgatatcacccgccagggcgtgagcgcctttattgccgccatgttacagggcgacagtagcgctgaacctatcaatatcctggccgttgacgccatgattgctgatattgatgcccgaaccagcaggcagatggatgccattattcatgccccggagtttcaggaactggaatccctgctgcgctcgctgaagctgctggttgaacgcgcggatacacgggaaaacatcaaagtccatttcctgaatgtcactcaggaagaactgctggatgatttcgaatttgcacctgaaatcacgcagtctgcgtattacaagcatgtatattcaagcggttacggacaatttggcggtgagccagtggcggcggtaatcggcaactttgcctttaagaacaccacgccggatatgaagctgctgaaatatatcagccaggtcagcgcgatggcgcacagcccgttcctgtcgtcagtatcatccgaatttttcggtctggattcatggacagagttaccggggatcaaagaaccgggtgccatctttgaaggcccggcctactcccgctggcgcgccctgcgtgaatcggaagattcccgttacctgggcctgaccgccccccggttcctgctgcgccacccttactcaccggatgaaaaccctgtcaaaaccttccgttaccatgaagatgtcagccagagtcatgagtcttatctgtgggggaatacctcgtttttactggccgccaacctggcggaaagttttgctaagtatcgctggtgcccaaatattattggcccttccagcggcggcgcagtcaaagacctcccggtgcatctgtatgaatccatggggcaaatgcaggcaaaaattccgactgaagtgttgatcactgaccggagagagtatgagctggcggaagagggctttatcacactgaccatgcgtaaagggtctgataatgcgtgctttttctcggccaactcggtgcagaaacccaaaacattccccaaaacccccgaaggcaaggctgcggagaccaactataaactcggcacccagctgccatacttgtttgttatcagcaggttagcgcattacatcaaggtaattcagcgcgaacagcttggctcatggaaagaacgtagtgacctggagcgtgagctgaatacctggattcgccagtatgttgctgaccaggaaaatccgcctgccgaagtccgcagccaccggcctttgcgtcaggctaagatcgaggtactggatgtggatggtgagccgggctggtaccaggtcgcgatttctgtcagaccgcattttaaatacatgggtgccagtttcgacctgagcctggtcggacgactggataaggaataa

SEQ ID NO: 4357 - DNA, 426 bp, Escherichia coli
atgctaagacgggattcaggaccaaccggcagtctttttgaacgtatccgtgaggcggcaaatccgccttcatatcagaatccaaaagaagcactgatacgttccatcagacgtaacctgcgacaggtcctgaatacccgctccggcagttgttatggctcaccggagctggggattactgatttaaatgatgaatcgctggcctccagcgatttcagacgagaaatccgtaagtccattagccagtgcattttacattacgaacctcgtattaccgatgttgttgttacggctgctgcaccggatgaatacgcccctgtggaactgtgttttcatattgtggctacggtcgatgtcagcgaaaccaggggagtgtttgaatttgacattttgctggacaaccatcaacgctattgtgtggagtga

SEQ ID NO: 4358 - DNA, 1842 bp, Escherichia coli
gtggcttttgaagaacgttactaccgcgaagaactggattatctgcgccagcttggcaaactgttggcgcaggaaaaaccgcatctggcccattttctggccgagaaagagggtgatccggacgtggagcgtctgatggaagcctttgcctttatgtccggtagcctgcgccagaaacttgaggacgaattccccgaattcacccatgggctaatccgtatgctgtgggcaaactatttacgcccggttccggccatgacggttattgcctatgaacccaaaaccgatcagttaaaagtccctgttcaggtctgtcgtaatgaactgatcagaagccgctcagaaaagtcctccctgactgctcagaaggtgctgcctgacaatcatgataaaatcgtttcttccgtagcctgccatttcacgctggcgcgcgatatctggctgcaaccactgcgcattctcgatacccgcaacgccagcagtctgaaagaaggcatcatagatatcagttttaccgcagataacaatgtctcccccgccatgcttgacctgaacaaaatcacgttctggctgggtaatgaagacgattatacccgacaccagctttatctgtggttttgcgaatgcctgatggatgcggaactgattgccggagagtaccgcctgccgctgccggatctgtggctggaggcggcgggttttgacaaccgggatgctctgctgccgtggccgaaaaatgtccacagcggctaccgcgtgcttcaggagtatttctgctatcccgaagccttcttctttttccatctgcgcgatgttgcgccgctaccagacgatttcccggtcaatgcgtttacgctgcgcctgcactttaaccgcccgttacctgccgacatcaagctgcgccaggattcgctgcgtctgcactgtacgccagccattaacctgtttacgcattatgcggaacccgtcaggccggatgggcggatggcggaatacccgctgcgcgccagccataagcatccggacgcctatgacatttttcaggtcagcacagtcaccagtaaagtcaaagtttcaggtactgaaatcagcccaggtagccaggcgcgtgtctggcccgaatttgaaagcttccagcaccagatggagtacagccgccagcgagaagtcgtctactggcatcaccggactaaaacgtccctgcttcaccacgggcttgaacactctatcgcctttgtccatgcagacggtagcattccgggcagctcacggtttaacgatgacgtgatcaccacgtcattaatctgtaccaaccgtatgatccctgcccggctgcataccggtgatatctgcgtggccgtcaacaaaaatccggcagtggcctcatttcgtaatgtcacgcgcccgacacagccgctctggccagtcacggacggcgacatgcactggtcgctgatttccgcgatgaacctgaactacctctccctgctggacagggagacactgatccagatcctgcggaccttcgacctgccaggcgctcaccatccgcagcgggccagactgtcacgccagaaactggatgccatagaaaaactcgaaaccaaacctgttgacaggttgtttaaaggcgtaccggttcgcgggctggcgaccacgctgtggatacgtcccgatccgtttatctgcgaaggtgaaatttatcttctgggtaccgtgctctcgcacttctttgccctctacgccagcatcaattcgtaccactgtctgaaaatcattaacacggaaagtcaggagtcctgggaatggcaggagaaaatgggccagcacgccctgatatag

SEQ ID NO: 4359 - DNA, 1050 bp, Escherichia coli
atggcaggagaaaatgggccagcacgccctgatatagcgacaaaaccgccgttaccggcggatgtgcgcaactgcaatttctatgtgctgatggaggcgctgtaccgtcggtatggcgcgccggaccaggacatttccctgcgtaccgagcccgcccgggagatcgtgcgtttcagctctgacgccagtatcggttttccgggtacggacctgagtgcgctttcccgtagccagaacggacagtatgtactgcaaacccggttcctgggtttttccggcagccagtcgccgctaccgggctattatctggatcagatggcgcaggagtccgcacagaacgaagacggcctgaaagaatttctcgatctgttcagccaccgctggacacagtttgcctatcatgcctggcgcaaataccgctactacatctgctttcgtaacggcggtactgacaccttttcacagcgcatgtacgcactggtcgggctgggtaatcagagcgtgcgtgacaggcttgccattaaccacagcaaaatgctggcctacgccggaattctggcaacaccaggccgcgcgccggaggttatctgtaatctggtgtcgcactgttttgatttgccggatgtcaccattgaacgctggcaactgcgtaaagtcgccattgatccggcacaccagaaccggctgggtgtacgtaatccgaaaggaaaaacggctggacatattccgggacgctccatactcggcgttaattttaccctcggcgcacgggtgccggatcgcagcggaaaattcctgttgcagattggcggcctgtcgcgggagcgttatctctcatttttacccgatggcgaaaatcacctgccgctgaccatgttcctttcctttattctgcgcgaccagtttgcctgggatttacggctgtgcctggcaccactgcaggctaaagggatgcgccttggcgatccggccagctcccgcctcggcagaaccagctttattggtcagccgaaagtaccgcccgccatcacaatccgaatcagggaataa

SEQ ID NO: 4360 - DNA, 1281 bp, Escherichia coli
atggctgaggaaaaacagcaatcccgccaggcctcactgactttacaggtgatgaatggcaacgaactggaaagcggacgcgccgcaaaatgcctgttcagcgaaaacggcggtgatattggccatacgccggaatgtcactggcaggtacaggaccgggcgggaagcattgctgcgcgtgcctgtaccgttatccggcacgacggagcctattgcctgcggtgcctgacgccgggactgatgattaatctggccccggtctcttccgatgcgctcatccgcctgcgccagggggatgagatccagctcggcgcactggcgctgaaagtgtttctgcatgacggtgcagctgttacctatgacgagcggatggcgaccccggaaacgattgtaatgaaccgcgacagtctggcggacaccctgttgaccaccgagggacaaccggcgtatccgggaatgccgttccagcatcagcttgcccccacggtggcgcacggtttttccagcgatccgctccaggcactccagacggaaagcctgatggtggcagatgatccgatcgccccacgcgtttcccggcccgtagcccccgcatccgatctgacaggtgcaaacgggatcaacacgccgtttatggatctgccgcccggcaatgcccgtcatgaggacggcgatgaattttctgccatggcgcagtaccacctggccgtaaccccgctgctgcgcggtatggagtgtccgctgacgctgcacaattctcaggatgcggatgagtttctcgaagaggccggacgggcgttgcaggccgccattaagggattgctgagtctgcaacaacaacagaatagcctgtcggataaacacctgcgtccactggaagacaacccgttgcgccttgatatggactatgccaccgcgctgaacgtcatgttcgccgagggtaaaagcccggtacatctcgcagcacctgcggccatcgccgaaagcctgcgcaacatccggcatcatgaagaggccaaccgggcggcgattgtggaagcgttgcgtgtcatgctggacgccttctcgccgggcaacctgatgcgccgctttgcgcaataccgccgcagccatgagctgcgccagaaaatggacaacgcctgggcatggcagatgtacagcaactattacgatgaactggcctccagccgacagcagggatttgaaatgctgttcaatgaagtttatgcccaggtctatgaccgggtgctgcgcgaaaaacagcgggagccggaagcatga

SEQ ID NO: 4361 - DNA, 525 bp, Escherichia coli
atgaacggcaaagcgtttctggcctgcgttctgatgagcgttgtgttaactggctgtgaaacagcgaaaaaaatcagccaggtgatccgcaatccggatattcaggtcggaaagctgatggagcagtcaaccgaactgaccgtcacgctgctgaccgagccggacagcaacctgacggcggacggcgaagccgcgccggtggatgtccagttggtgtatctgagcgacgactccaaattccaggccgccgattacgatcagattgccaccaccgcgctgcccgacgtgctggggaagaactatatcgatcaccaggacttcaacctgttgccggacaccgtaaaaacactgccgccgatcaagctggatgagaaaatcggttatatcggtgtcattgcctatttttcagacgaccaggccacagaatggaaacaaattgagccggtagaaagtatcggccaccactatcgcctgctggtgcatatccgcgccagtgcgattgagatgaaaaaagaggaaaactga

SEQ ID NO: 4362 - DNA, 1347 bp, Escherichia coli
atggcaacaatgaaaaacaaggtgatctggcaggaagggctgtttgccctgccgcagcattttcagcaacagcagcgtcactgcgagtacctgctgacccgtcgtctggatgcactgggtgattttttctggggttttacggaactctccatcaatacagaactgcttgcccagggcaaaatcatgattgaccgtgcggcgggctgtatgcctgacggcaccgtattcagcattcccgaccaggatctgctgccggaacctttccagccgggaaccctttcatcgaaagagagccacaatatttatctggcgctgccggtgataagcgacgtgatcaatgaaatccaggggttgcacagcgccggtcagggtacggagcgttaccgcctcacccatacccgcgtccgtgattttcacactgacgaaggcgacgaacagccagtcggtctggggcagttgatccccaggatagtcagcggcgcagatgatctcagcgcgatggtgactctccccctgtgccgtatcctcaataaaaatgccaccggcgcgctggtgctggacaacacctttattcccaccattcaggccgtccgtgtcagcgggttgctcggggcattctccggcgaggtgcagggactgcttgccacccgcgccgctgacctggccgggcgcattggttcgcctgaacagagcgggatcgccgatgtggccgaatttatgatgttgcagatgcttaaccgctatcaaatgcagttcacgcatcgttcccaactgcacacgctgcatccggaagccttctaccgggatctggtggggctgctgggagaactgatgacctttaccgaaggtaatcgcctgccctgcaccgtggagccgtataatcaccgggatcttaccgcgaccttcaccagaaccgtgatcccggaactgcggcgcgcgctcaataccgtactggtgccgcgtgcgcagaatctgccgttgttcttttcagaggggacctggatcgccaccatcaacgatcccacattgttgcagtcctgcaagatggtactggcagtgcgcgccaggatgccctacgaccaggtacaacgccagttcatccagcagtcgaaagtggccgctaccgacaaaatccgcagcgtggtcagcgtgcaggtgccgggtattccgctgcacacgcttaccgctgcgccacgtcagttgccataccacgaaggttatgtttacttcgaactggaaaaaggcaccccggcctggcaggacgtgataaaagcgggcgcactggcgctgcatatctccggcagcttccccgatctgaacctccagctctgggctataaggggataa

SEQ ID NO: 4363 - DNA, 765 bp, Escherichia coli
atgagcgatatgagtgaagcgtcggtttttcccgtggagccggagagcggaacaccaggacgccagtaccgtctcgcccttcgcggcaacagcctgaatccaatgattgacgccgccacgccgttgctcggcatggtgatgcgtctgtccactatgaacagtcaggccatgccggaacatctgtttgcccaggtagtaaccgatgtccaggccgtagagcaactactccaggaacagggatacgaaccgggcgtcattgtttcgttccgttacattctctgcacgtttattgatgaagcggcgctgggcaacggctggtccaacaaaaacgaatggatcaaacagtcgctgctggttcattttcataacgaagcctggggcggcgagaaagtgtttatcctgctcgaacgcctgatccgggagccggtacgttaccaggatctgctggaatttttatacctctgtttttcgctcggctttcgcgggcgctacaaggttgccattcagcaacaggatgaatttgagcggatctaccagcgcctgcaccatgccctgcacaaactgcgcggtgacgcgccatttccgctacttcatcagaagaacaacatacagggtgggcgttatcagttaatccgacgactgaccatcaagcatgtactgtgcggcggtcttgttgtgctgaccgtattttatctgttttatctgctgcgtctggacagccagacacaggatattctgcatcagctcaataaattactccgataa

SEQ ID NO: 4364 - DNA, 2763 bp, Escherichia coli
atgatccagattgatttagccacgctcgtaaagcggcttaacccctttgcaaaacaggcgctggaaatggctgcctcggagtgtatgagccagcaggccagtgagatcaccgttgcccatgtgctgttacagatgctggcaatcccgcgcaacgacgtaagggtgattgccgaacgcacaggcatcagtgcggaggatttacgccaggcgctgaccgtggagagttatcccggtggacgttccgccgaaggctatcccagcttctccccgatgctgatcgaatggctcaaggagtcatggctgctggcctcagcccagatgcagcacagcgaactgcgcagcggcgtcctgctgcttactctgctgcattcaccgctgcgctatattccacccgctgctgcccgtctgctgacggccataaaccgcgaccagttacagcaggatttcgcagcatggacaaaagaatccgccgaatccgtggatctggctggcgggcaaacgccccgggcaacggaaaccggcgacaccctgcttgcccgctacgccaaaaacatgaccgcagacgcccgtaacggcaggcttgacccggtactgtgccgcgactatgaaatcgacctgatgatcgacattctctgccgccgccgtaaaaacaatccggtggtagtgggcgacgcaggcgtgggtaaaagcgcgctgattgaagggctggcgctgcgcatcgtggcaggcctggtgccggacaagctgaaaaacaccgatatcatgacccttgacctgggcgcattgcaggccggtgcgtcggtgaaaggtgagtttgaaaaacgcttcaaggggctgatggcggaggtcattttctccccggtgccggtcattctgtttatcgacgaagcacataccctgattggcgcgggcaaccagcagggcgggctggatatatccaacctgctcaaaccagcgctggcgcgcggcgagctgaaaaccatcgccgccaccacctggagcgagtacaaaaaatatttcgagaaagatgcagctttgtcgcgccgcttccagttagtgaaggtcagcgaacccaacgctgccgaagccaccattattctgcgcggtttgtcggcggtctatgaacagtctcacggcgtgctgattgatgatgacgccttgcaggccgctgcgacactgagcgagcgttatctctccgggcgtcagttgccggacaaagccattgatgtgctggacaccgcctgcgcccgtgtggccatcaacctgtcatcgccgccaaaacaaatctcggcactgaccaccctgagccaccagcaggaggcagaaattcgccagcttgagcgcgagcttcgcatcgggctgcgtaccgacacctcacgaatgactgaggtgttggagcagtatgatgaaacgctgtcggcgctggacgaactggaagtcgcctggcagcagcagcagacgctggtacaggaaattatcgcgctgcgccagcagttactgggcgtggcagaagacgacgttgcgtcgttgccggacgcagatgccgtggaggatacgccgccagaggcagaacaggatagtaccgatgccgaatcggctgatgatgcaggcagcgtacagccggaagagaccgctgaaacagtttccccggtacaacggctggcacaactcactgccgaactggacgccctgcataacgaccagttgctggtttccccgcatgtcgataaaaaacagattgcagcggtgattgccgaatggaccggcgtgccacttaaccgcctgtcacagaatgagatgtcggtcatcaccgacctgtcggtatggctcggcggcaccatcaaaggccaggacctggcgattgccagcctgcataaacacctgctgaccgcacgcgccgacctgcgccgtccgggacgcccgcttggtgcgttcctgctggctggccccagcggcgtgggtaaaaccgaaaccgtcctgcaactggcggaactgctctatggcggacgtcaatacctgaccaccatcaatatgtctgagttccaggagaaacacaccgtttcgcggctgatgggctctcctccgggttatgtcggctacggtgaaggcggcgtactgaccgaagcgattcgccagaaaccgtactcggtggtgctgctcgatgaagtagaaaaagcgcacccggatgtactcaacctgttctaccaggcgtttgacaagggcgagatggcagacggtgaaggccgcctgattgactgtaaaaatatcgttttcttcctgacctccaaccttggctaccaggtgattgtcgaacacgccgatgacccggaaaccatgcaggaagccctctatccggtgctggcggacttctttaaacctgctctgctggcgcgcatggaagtggtgccttacctaccgctgtcgaaagagacgctcgctaccattattgccgggaaactggcccgcctggataacgtgctgcgcagccgctttggcgcggacgtgattattgggccggaagtgacggacgaaatcatgagccgcgtcacccgcgcggaaaacggcgcgaggatgctggaatcggttatcgacggcgacatgctgccgccgctctcgctgctgctgttgcagaaaatggcggccaacacggcgattgcccggattcgcctgtcggcggcagacggtgcgttcacggcagatgtggaagatgcgctgcctgatgatgccgtgacaccgcaaacagaggatgaaacggttttatga

SEQ ID NO: 4365 - DNA, 744 bp, Escherichia coli
atgagcaggttgtgcgttttccggcagacaggatggtttatcgcgggcctgatggcgggcttacccgccagtgccgcgcccgcagaaacatcgtcagtggccggtgtggcggtagctgtcgccacagcgacaccgccggatgcgacagccacgttacaggccatgcagtcctgccgccaggagacggcggcgctggagcggcttgactgttatgaccgcattcttgcgccggaacaggctggctttggtggtgccgctctggtgaaagctcgttaccagggtgaagcctgggcccgcgcgacagaacaggaaaaacgccgccagggcaacaccacggagctgctggtaacgcaagtaccgggtgaacgcccgacggtggtgataaccaccccggctatcggccatgttccgccacgcccggtgctgatgttcagttgcgtggacaatatcacccggatgcaggtggcgctgatgcaccctctggatgtccatgatatcgccgtcaccctgaatgccgacagccgggcattgcgcagccactggtttgtgcgcgagaacggcaccctgctggagtccagccgggggttatccggtatcgatgaaattaagcaactgttcggcgcaaaaacgctgacggtggataccggcacagacaacgccgccggaaagctgacctttaacattgacgggctggcacgggttattgcgccgctacgcgacgcctgccactgggcgggagaataa

SEQ ID NO: 4366 - DNA, 1443 bp, Escherichia coli
atggcaatggacttacgtaatcccgatgtatggcttgcacacctgctggaaaacctgccagaagataagctgtccgccgcgcttgatgatggcaatgcagactgggagtttgtcgacagcgaaatcgtcaagctcggttcactggcgcacagccagcttgatatcccggaacttcagcgccggggcctgatgcttctggcctcagaaaccaaagattttcgcctgctggcccacttgctgcgtaccctgcaacatgccggtgatattctgctggcctccaggatgctggcacaatatacagagcactactggacatgcgccgcaccgcagaacatggcccacaaaaaacgctttgccgcccaggtgataaaacgctttgagtctgccgttcaggactttgccgggaatgctgcgacaatacagcgcgatgctttgctgggagagctggcaaaactggcacagtgctggcaggcgcacaacgcgtctgagctggcaaaggcgacagacgatttattttccctgtttcagcgcgcgtttcgtgatgtagcgcctgaaatgacatcatctgcacgaagcgccgccattgcgccgcaggccacgaccggatatgtaccggatatgtcaccgcacacggttgccgctcagcctcctgttgcagccactccaatcccgcaggtcaccgttgaaagccacgacgataaagcatggcgcgacaccctgctaaaggtggccgccattctctgtgagcgccagccggagtcaccgcagggttaccgactgcgccgccatgcgctgtggcaaaccatcaccagtaccccgcaggcagaaagcgatggccggaccccactggcagccttccctgtcgatatgatggatgattacctggcgcggctgaacaatgccgacatggcgctgtggcagcaggtggaaaaaagcctgctgctggccccgtactggctggacggtcattacctctcagcacagaccgcgctgcgcctcggttataaacaggtggcggatgctatccgtgatgaagttaccgattttctggcccgcctgcccgcactgatcaacctgttgtttaacgaccgcactccgtttgtgtccgaacagacgaaacagtggctggcatcatccggctcagtcaaccagaccgtcccggttgtacagaccgatgaagaattacaggcggccaaggcgtgcttcgatgaaaacgggctggaagccgcgctgcggtacctggaaaacctgcccgaaggtgatccccgccaccagtttcaccaccagtttttcggcgcgcagttactggaagaggccggtatggttcagcttgcacaacagcagtaccggatgctcttcagaacaggattacacatgatgctatccgaatgggagccttccctgctgaaagcactggaacaaaaactcacggcagaacagtaa

SEQ ID NO: 4367 - DNA, 3528 bp, Escherichia coli
gtgttcaaatttcccacatcccgactgttcagcacgttgaaatctgcgctcaggccagcgatgccgcggtttaaagtttccgccacctggctactgacgctggcatggatttttctgctggtgtggatctggtggcagggtccaaaatggacgctctatgagcagcactggctggctccgctggcaaaccgctggctggcgaccgccgtctggggacttatcgctctggtctggctcacctggcgggtgatgaagcgtctgcaaaagctggaaaaacagcagaaacagcagcgggaggaagaaaaagatccgttgaccgtggaactccaccgccagcagcaatatctggatcactggctgctgcgcctgcgccgccatctggataaccgccgttatctgtggcagttgccgtggtatatggtcattggtcctgcgggtagcggcaaaagcacgctgctgcgcgagggctttccgtctgacattgtttacacgccggaaagcatccggggtgtggaataccacccgctgatcacaccgcgagtgggcaaccaggcggtaattttcgatgttgacggcgtactgaccactcccggcggggatgatctgctccgccgccgcctgcgcgaacactggctgggctggctgatgcaaacgcgcgctcgccagccgctcaacggtcttatcctgacgctcgatcttcccgatctgctgacggcggataaatcccgccgtgagacactggtacaaaatttgcgccagcaacttcaggagatccgtcagagcctgcactgccgtctgcccgtttacgtggtgctgacacggctggatctgctgaacggctttgccgcgctgttccattcactggataaaaaagaccgcgatgcgatcctcggcgtcacatttacccgccgcgcccatgaaagtgacggctggcgcagcgaactgggggctttctggcagacgtgggtacaacaggtgaacctggcgctgtcggatctggtgctcgcacaaaccggtgctgctccccgcagcgctgtgttcagcttctcccgtcagatgcagggaacaggagaaatcgtcaccgcactgctcgccgcattgctggacggtgagaacatggatgtaatgctgcgtggcgtctggctcacatcctcgctacagcgtggccaggtggatgatattttcacgcagtccgccgcccgccagtacggactgggtaacagctcgctggcaacctggcctctggtggagacgacgccgtattttactcgccgcctcttcccggaagtcctgctggctgagccgaacctggcgggtgaaaacagcgtctggctgaacagctcccggcgcaggctgaccgccttttccacctgtggcgcggcactggcggcattgatggtcggaagctggcaccattattacaatcagaactggcagtctggcgttaacgtactggcacaagctaaagcctttatggacgtaccaccaccgcagggaacggatgaattcggcaatctgcaattgccattgcttaacccggtacgcgatgccaccctggcctatggtgattatcgcgatcacggttttctggcggatatgggattgtaccagggcgcccgcgtagggccgtatgtggagcaaacctacattcagcttcttgagcagcgttatctcccctcgttaatgaacggcctgatccgggatctaaacattgccccgccagagagcgaagaaaagctcgctgtgctgcgcgtagtgcgcatgatggaagacaaaagtgggcgcaacaacgaggcggtaaaacagtacatggcgcggcgctggagcaatgaatttcacggccagcgcgatattcaggcgcaactgatggcgcatctggactatgcgctggagcacaccgactggcacgcgcagcgccagagcggtgacagcgatgctgtcagccgctggaccccctatgataaaccgatcattaatgcgcagcaggaactgagcaagctgcccatataccagcgtgtctaccagaccctgcgcaccaaagcattaagcgtgttgcccgccgatttgaatttgcgcgaccaggttggtcccaccttcgacaacgtgttcgtcgccggtaatgatgaaaaactggtgatcccgcagttcctcacccgctatggactgcaaagctattttgtcaaacagcgtgagggcctcgttgagctgaccgcgctggattcgtgggtactgaacctgacgcaaagcgtcgcctacagcgaggccgaccgtgaagagatccagcgccatatcactgaacagtacctcagtgactataccgctacatggcgtgccggaatggataatctcaacgtccgtgactatgagaccatgccggcgctgaccgacgcgctggagcagattatcagcggtgatcagccattcctgcgtgctctgacggcgctgcgcgataatacacacgcgctgacgctctccggcaaactggacgataaggcgaaggaagcggcgataaatgagatggattaccgcctgttatcccggctggggcatgagttcgcgccggaaaatagcgcactggaggagcaaaaggacaaggcgagtactctacaggccgtgtatcagcaactgaccgagctgcaccgttacctgctggcgatccagaactcgccagtgtctgggaaatcggcgctgaaagcagtacagctacggctggatcaaaacagcagcgatccaatcttcgccacccgtcagatggcaaaaaccctgcctgcgcctcttaaccgctgggtaggtaagctggcggatcaggcctggcatgtagtgatggtggaagccgttcgttacatggaagtggactggcgcgacaatgtagtgaaacccttcaacgagcagcttgccgataactatccgtttaatccgcgcgccacacaggatgcctcactggattcgtttgaacgtttctttaaaccggatggcattctggacaatttctacaagaacaacctgcgcctgttccttgaaaacgatctgacctttggcgacgacggcagaatgttaatccgtgaagatatccggcagcaactggatactgcgcagaaaatccgcgacatcttcttcagccagcagaacgggctgggcgcacagtttgccgtggaaaccgtatcgctttccggcaataagcggcgcagcgtacttaacttggacggccagttagtggactacagccagggacgcaactacaccgcccatctggtctggccgaacaacatgcgtgaaggcaatgaaagcaagctgacgctgattggcaccagcggcagagcaccgcgcagtatcgcgttcagtggaccgtgggcgcagttccgcctgttcggcgcgggccagttgaccaatgtgaccagtgacacctttaacgtgcgctttaacgtggacggcggcgcaatggtttaccaggtgcatgtggataccgaagataacccgttcaccggcggtctgttcagcctgttccgtttaccggatacgttgtattaa

SEQ ID NO: 4368 - DNA, 1359 bp, Escherichia coli
atgagcaattacgcactgacacaaactatcgttaccggcagcgatccgcgcgccctgccggagttcagcgccatccgcgaagaaattaacaaagctaaccacccgtcacagccggagctgaactggaaactggtggaatcgctggcgctgtcgatttttaaggccaacggggtggatttgcataccgccacctactatacgctggcacgtacacgtaatcagggactggcagggttctgtgaaggcgcggaactgctggctgcgatgatcatccacgaatgggataaattctggccgcagagtggtccggcgcggactgagatgctggactggttcaacacccgcaccgggaatatcctgcgccagcaggtttccttttccgaaaatgatctttcgttgctctaccgcacggaacgggctttgcagcttatctgcgacaaactccagcaagtggaactgaagcgccagccgcgcgtggaaaatctgctttattttgtgcagaacacacgcaagcggtttgagccgcagcccagaaaccgtactgatacggcggcacagaccatggtcagaacgctggtctatgcgcctgaaggcacggcttccgccacagcggaaaccatgccccccctacccgacctgccggaaatgcgggtgggggtgcgcggtgtggcagataacgccgacaaagcaaaacagggcgacacggtaaaaggttttgttgccggtgccgcctgtactgccgttatcgcatctgcactctggtggtggcaggcgtatccgatgcagcagcagcttacacaggtcagggataccacacagggagccaccaccgtctggttggcatccccggtactgaaagaatatgaacagtacctgcaacagcttctgaatgccccgccactacagccgctggaaaccggaatgcagatgatgcgcaccgcagacaccctctggccggaaagcctgcaacagcaggaagccagcaggatgtggagcaacacgctgagaaaccgggcgcaagccagtccgcagatgaagggctggcaacaagcgcggcagaatttgcgggattttgcagatttgatgatgaagaaggagacggagaaacagggtttcaccctatcgtatatcaaaacggtgacctggcaggccgaacggttactgaatcaagaaacaccactggagtacctgctgacgcagtaccaggagacccgtacacagaagcaggacacacaggcgttggaaaaagagatcaacgaacggctggacgggctgttaagccgctggctgctgctgaaaaataccggacaggatatggcaacggataacagaaccgaacctgtccatccaactcattga

SEQ ID NO: 4369 - DNA, 480 bp, Escherichia coli
atggcaaatcccgtctatctgacactgaacggagaacttcaggggctgatttcatccggatgctcgtcaatgccgtccatcggtaacaaagcccagattgcacatcaggatcagatcatggtgacgtcactgtcccatggtctgagccgtgcgcagaatgtcaaccatcaggagttgaccatcacgaaaccggtggacaaatcctcccctctgctgggcaaggccatttcagagaatgaatgtctgacctgtgattttgtattctaccgcaccaaccgctttggaattaatgaaccgtactacaagctgaaactggctaacgcccggctctcaaacatcggccttaccattccccataccattaacgacagtcctgggcaggcggaagagtctgtgtcatttacctatgagagcatcaattgggagcacagcgtcgccggaaccagtgcatacagcctttggagtgaacggattttctaa

SEQ ID NO: 4370 - DNA, 786 bp, Escherichia coli
atgaatttaaaaaaggtttgttgtatatgtgtattattctcgctgcttgcaggatgtgtctctgaatcacctattgatgaaaaaaagaaaaaaactcaaaccacacaaatttctattaataaaaacgttccccagcaactaacagacaaagatttatatggtaatgaaaccacactggctgtatccgaggaggatattcaagctgcgcttgaaggagatgagtttcgtgtgcctcttaattctcctgtaatacttgttcagtctggcagtcgcgcaccggaaaccattatgcaggaggagatgagaaaatattatacagttgccacattttctggcattcctgacaggaaaaaaactgtaacctgtaataaagacaaaaacaaagatgaaagcctggatattgtagatgccgaaaatatgaactggatgcaggcattgcgttttgttgcagcaaaaggccatcagaaagcgattattgttttccaggatacgttgcagacaggaaaatatgactctggattgaaatcaatagtttggacagattataaaaatcaaaaattgactgacacgatgtcactgcgttatttggttcgattcacgttggtggatgtggctacaggtgagtgggctacctggtcgcctgtgaattatgaatcgaaagtgatttttccgcagatagggaataaaaattctgacagccttgatgtggcagaacagcagatttcacaacttaagcagaaaacgtatgcagcagtggttaaagacctggtgaatcgatatcagtag

SEQ ID NO: 4371 - DNA, 741 bp, Escherichia coli
atgaccgctatgagcactgcaattacacgccagatcgttctcgataccgaaaccaccggtatgaaccagattggtgcgcactatgaaggccacaagatcattgagattggtgccgttgaagtggtgaaccgtcgcctgacgggcaataacttccatgtttatctcaaacccgatcggctggtggatccggaagcctttggcgtacatggtattgccgatgaatttttgctcgataagcccacgtttgccgaggtagccgatgagttcatggactatatccgcggagcggagctggtgatccataacgcaacgttcgatatcggctttatggactacgagttttcgttgcttaagcgcgatattccgaagaccaataccttctgtaaggtcaccgatagccttgcggtggcgaggaaaatgtttcccggtaaacgcaacagcctcgatgcgttatgtgcccgctacgaaatagataacagtaaacgaacgctgcatggggcattactcgatgcccagatccttgcggaagtttatctggcgatgaccggtggtcaaacgtcgatggcttttgcgatggaaggagagacacaacagcaacaaggtgaaacaacaattcagcgcattgtgcgtcaggcaagtaagttacgcgttgtttttgcgacagatgaagagcttgcagcacatgaagcccgtctcgatctggtgcagaagaagggcggaagctgcctctggcgggcataa

SEQ ID NO: 4372 - DNA, 468 bp, Escherichia coli
atgcttaaacaggtagaaattttcaccgatggttcgtgtctgggtaatcctggacctgggggttacggcgctattttacgctatcgcggacacgagaaaacctttagcgctggctacacccgcaccaccaacaaccgtatggagttgatggccgctattgtcgcgctggaggcgttaaaagaacattgcgaagtcattttgagtaccgacagccagtatgtccgccagggtatcacccagtggatccataactggaaaaaacgtggctggaaaacagcagacaaaaaaccagtaaaaaatgtcgatctctggcaacgtcttgatgctgctctggggcagcatcaaatcaaatgggaatgggttaaaggccatgccggacacccggaaaacgaacgctgtgatgaactggctcgtgctgcggcaatgaatcccacactggaagatacaggctatcaagtcgaagtttaa

SEQ ID NO: 4373 - DNA, 723 bp, Escherichia coli
atgaaaccggcaagagtccctcaaactgtcgtggctcctgattgctggggcgatttgccctggggagagctttatcgcaaggcgctggagcgtcagctcaacccgtggttcactaaaatgtatggttttcatctgcttaagattggtaatttaagcgcagaaatcaattgcgaagcgtgcgcggtttctcatcaagtgaatgtttctgcgcaaggaatgcccgtccaggtgcaggcggacccacttcatcttccttttgccgataaatccgttgatgtttgtctactggcacatacattgccgtggtgcactgatccgcatcgtttattgcgtgaagccgatcgggtactgattgatgatggctggctggtgattagtggcttcaatcccatcagtttaatgggattacgcaaacttgtgccggtattgcgcaaaacctcgccctataacagccggatgtttactctgatgcggcagctggactggctctctttgttgaattttgaagtgctacacgccagccgtttccacgttctcccgtggaacaaacacggaggaaaactattgaatgcgcatattcctgcgcttggttgtttacaacttattgttgcccggaaacggactattcctttaacgctaaatccgatgaaacagagcaagaataaaccgcgaattcgccaggcggttggtgccacccggcaatgtcgtaaaccacaggcttaa

SEQ ID NO: 4374 - DNA, 756 bp, Escherichia coli
atgaatcttaacagtattcccgcctttgatgacaattacatctgggttttgaatgatgaagcaggtcgctgtctgattgtcgatcccggggacgcagagccagtattaaacgccatttccgccaataactggcaaccggaggccatatttctcacccaccatcaccacgatcacgttggaggcgtaaaagaactggtggaaaagtttccgcaaattgtggtgtatggaccacaagagacacaagataagggaacaacacaggtagtcaaagatggcgaaactgccttcgttttggggcatgaatttagtgtaattgccacaccgggtcacactttaggacatatctgttacttcagtaaaccttatctattttgcggcgacacgctgttttctggtgggtgtggtcggttgtttgaagggacaccatcacaaatgtatcaatcacttaaaaagttaagtgcgttacctgacgatacattggtatgttgtgctcatgaatataccttatcaaatatgaagtttgctttgagtattcttccgcacgatttgtccataaatgattattatcgtaaagttaaggagttacgggcaaaaaatcaaataacactacccgtaattctgaaaaatgagcggcaaattaatgtttttttaagaacggaagatattgatttaattaatgtaattaatgaagaaacattattgcaacaacctgaagaacgttttgcatggttaaggtcaaagaaagataggttctga

SEQ ID NO: 4375 - DNA, 1221 bp, Escherichia coli
atggacgatgggacgtctatcgcgccagatggtgacttgtgggctttcattggcgacgagctaaagatgggaattccggaaaacgaccggattcgcgaacagaaacagaaatatttacgcaataagagctatctccacgatgtaactttacgggcagagccgtatatgtactggatagccgggcaagttaaaaaacgtaacatgcctatggaactggtactactacccatagtggagagcgcttttgatcctcacgcaacgtctggcgccaatgccgcgggcatctggcagatcattccgagcacggggcgcaattatggtttgaaacagacacgcaattatgacgcgcgtcgcgatgttgttgcttcaacaactgccgcgctgaacatgatgcagcgtctgaacaagatgtttgacggcgactggcttctgaccgtagcggcttataacagcggcgaaggtcgggtcatgaaggcaattaaaacgaacaaagcgcgtgggaaatccacggacttctggtcgttaccgttgccgcaggaaacgaagcagtacgtgcctaaaatgctggcattgagtgatattctcaaaaacagcaagcgttatggcgtacgtctgccaacgaccgatgaaagccgtgctctggcgcgtgtgcacctgagcagcccggttgaaatggcgaaggttgcagatatggcggggatttccgtcagcaagctgaagacattcaacgctggcgtgaaaggctccacgctgggcgcaagtggtccgcagtacgtgatggtgccaaagaagcatgcagatcaactgcgtgaatctctggcttcgggcgaaattgctgctgtacagtcgacgctggttgccgacaatacgccgcttaacagccgtgtttacaccgtacgctctggcgacacgctttcaagtatcgcttcacgtctcggcgttagcaccaaagatttgcagcagtggaacaaactgcgcggatctaagctgaagctaggccaaagcttgacgattggcgcaggtagtagcgcacagcggttggcaaacaacagcgatagcattacgtatcgtgtgcgcaaaggcgattcgctttcaagcattgctaaacgccacggcgtgaacatcaaagatgtgatgcgctggaacagcgatactgcgaatctgcaaccaggcgataagctgacgttgtttgtgaaaaacaacaacatgccagattcctga

SEQ ID NO: 4376 - DNA, 771 bp, Escherichia coli
atgacaacacaatcccaccatgaccacgtagaaaagcagtttagctctcaagccagcgaatatctgaccagtaccgtacatgcatccggacgagatttacagcgcctggcggtgcgtctggctgattatcctgatgcaagtgtacttgatatgggctgcggagcagggcatgccagctttgttgctgcgcaaaacgtgagcgcggtggtagcgtatgacttatctgcccaaatgctggatgtcgtggcacaagctgctgaagcccggcaactgaaaaatatcaccacccgccagggttatgccgaaagtctgccatttgccgataacgcatttgatattgttatcagccgttattctgcccatcactggcatgatgttggtgcagcactgcgtgaagtgaaccggatattgaaacctggcggtaggctgattgtgatggacgtaatgtctccgggccacccagtgcgcgacatctggttacagacggtagaagcattacgcgatacctctcacgtacgaaactacgccagcggtgagtggttgaggttaatcaatgaagccaatctgatagttgataatttaattacagataagttaccgctggaattttcttcatgggtcgcgagaatgcgtacgccagaagcgttagtagacgctattcgcatttaccaacagagcgcatcgacagaggtgaaaacgtattttgccttgcagaatgatggctctttcaccagtgatatcatcatggtagaagcacataaagcagcataa

SEQ ID NO: 4377 - DNA, 825 bp, Escherichia coli
gtgatagaggtttcaaagtcaaaagtgcgaaaaaacacctatgccatgcgctatgttgccggacaacctgcggaaaggatcttaccgccggggtcttttgcgagcatcggccaggcattaccacctggagaaccgttaagtaccgaagagcgtattcggatcctggtgtggaacatatacaaacagcaacgcgctgaatggttgtcggtattaaagaactacggcaaagatgcacatctggtgttattgcaggaagcgcagacaacgccagagttagtacagtttgcgactgctaactatcttgccgccgatcaggtacccgctttcgtgctgccacaacatccttctggcgtaatgaccctttcggcggcacatccagtgtattgctgcccgttacgtgaacgagaacccattttgcgtctggcgaaatcggcactggtgacggtctatcccttacctgacacccgcctgttgatggtggttaatatacacgccgtcaacttcagtctgggcgtggatgtctatagtaagcagttacttcctattggcgatcagatagctcaccacagtggcccggtcattatggcgggagatttcaatgcctggagccgtagaaggatgaacgcgttatatcgctttgcgcgggaaatgtcgctacgccaggtgcgttttaccgatgatcagcgccgtcgggcgtttggtcgcccgctcgattttgttttctaccgtggtctgaacgtcagcgaagcttctgtactggttacgcgcgcttccgatcacaatccgctactcgttgaattcagtcccggcaagcctgataaataa

SEQ ID NO: 4378 - DNA, 915 bp, Escherichia coli
atgaaagccacgtcggaagaactcgccatttttgtttcagtcgtcgaaagcggcagctttagccgggcagcggaacaattagggcaagcaaactcagcggtaagccgggcggtgaaaaagctggagatgaaacttggcgttagcctgcttaatcggaccacgcggcaacttagcctgacggaagaaggcgagcgttattttcatcgcgtacagtcaattttgcaggagatggcagcggcagaatcagaaattatggagacgcgtaatacaccgcgtggactgttacggatcgatgccgcaactccagtggtgctgcactttctgatgccgttgattaagccttttcgtgaacgctatccggaagtcactttatcgctagtctcctccgaaacgattattaatttgatcgaaagaaaagtggatgtcgcgatacgcgccggtacgttaacggattccagcttacgtgccaggccgttatttaacagttatcgaaaaattatcgcctcccccgattatatttcctgctacgggaagccagaaacgatcgacgatttaaagcaacatatttgcctgagattcactgaacccgcttccctcaatacctggccgatagcctgtagcgatggacaattacatgaggtgaagtacggtttgtcatccaatagtggggaaacactgaaacagctttgcctgagtggcaacgggattgcgtgtttgtccgactacatgatcgacaaagaaatcgctcgcggagaattggtggagttaatggcagataaagtgttgccagtggaaatgccattcagtgcagtctattacagcgaccgtgcggtaagtacgcgcatccgggcttttatcgatttccttagcggacatgtaaaaacagctcccggaggagctgtcagagaggcttaa

SEQ ID NO: 4379 - DNA, 804 bp, Escherichia coli
atggctatccctgcatttggtttaggcactttccgtctgaaagacgacgttgttatttcatctgtgaaaacggcgcttgaacttgattatcgcgcaattgataccgcacaaatctatgataacgaagccgcagtaggtcaggcgattgcagaaagtggcgtgccacgtcatgaactctacatcaccactaaaatctggattgaaaatctcagcaaagacaaattgatcccgagtctgaaagagagcctgcaaaaattgcgtaccgattatgttgatctgacgctaatccactggccgtcaccaagcgatgaagtctctgctgaagagtttatgcaggcgctgctggaagccaaaaaacaagggctgacgcgtgagatcggtatttccaacttcacgatcccattgatggaaaaagcgattgctgctgttggcgctgaaaacatcgctactaaccagattgaactctctccttatctgcaaaaccgtaaagtggtcgcttgggctaaacagcacggtatccatattacttcctatatgactctggcgtatggcaatgcactgaaagataaggttattgctcgtattgcagctaaacacaatgcgactccggctcaagtgattctggcgtgggctatgggggaaggttactcagtaattccttcttctactaaacgtgaaaacctggagagtaatcttaaggcacaaaatttacagcttgatgccgaagataaaaaagcgatcgccgcactggattgcaacgaccgcctggttagcccggaaggtctggctcctgaatgggattaa

SEQ ID NO: 4380 - DNA, 1590 bp, Escherichia coli
atgcaacaacgtcgtccagtccgccgcgctctgctcagtgtttctgacaaagccggtatcgtcgaattcgcccaggcactttccgcacgcggtgtggagctgctgtctacagggggcactgcccgtctgttagcagaaaaaggtctgccggtaaccgaagtttccgattacaccggtttcccggagatgatggatggacgcgtgaagaccctgcatccgaaagtacatggtggcattctgggccgtcgcggccaggacgatgccattatggaagaacatcagatccagcctatcgatatggtggttgttaacctgtatccgttcgcccagaccgttgcccgtgaaggctgctcgctggaagatgcggttgagaacatcgatatcggcggcccaacgatggtgcgctctgccgccaagaaccataaagatgtcgcaatcgtggtgaagagcagcgactacgacgccattattaaagagatggatgccaacgaaggatcgctgacgcttgcaacccgtttcgatctcgctatcaaagcctttgaacataccgccgcctacgacagcatgattgccaactacttcggcagcatggtcccagcctatcacggtgaaagcaaagaagccgccggtcgcttcccacgcacgctgaacctgaacttcattaagaagcaggatatgcgttacggcgagaacagccaccagcaggctgccttctatatagaagagaatgtcaaagaagcctccgttgctaccgcaacccaggttcagggtaaagccctctcttataacaacatcgccgacaccgatgcggcgctggagtgcgtgaaagagttcgccgagccggcatgtgtgatagtgaagcacgccaacccttgcggcgtggctatcggcaattccattcttgatgcttacgatcgcgcgtacaaaaccgacccaacctccgcgttcggcggcattatcgcctttaaccgcgagctggatgcggaaaccgcgcaggccatcatttctcgtcagtttgttgaagtgattattgcgccgtccgccagcgaagaagccctgaaaatcactgccgccaaacagaacgtacgcgtcctgacctgcggtcagtggggcgagcgtgttccgggtcttgatttcaaacgcgtgaacggcggtctgctggttcaggatcgcgatctgggaatggtcggtgcggaagaactgcgcgtcgtcaccaaacgccagccgagcgaacaggaactgcgtgatgcgctgttctgctggaaggtggcgaagttcgtgaaatccaacgccatcgtctatgccaaaaacaatatgaccatcggcattggcgcgggccagatgagccgcgtgtactccgcgaaaatcgccggtattaaagcggccgatgaaggtctggaagtgaaaggttcctcgatggcttctgacgcgttcttcccgttccgcgacggtattgatgccgccgccgctgcgggcgtgacctgcgtaatccagcctggcggttctatccgtgatgacgaagtgattgccgccgccgacgagcacggtattgcaatgctcttcaccgacatgcgccacttccgccattaa

SEQ ID NO: 4381 - DNA, 1290 bp, Escherichia coli
atgaaagtattagtgattggtaacggcgggcgcgagcacgcgctggcctggaaagcggcccagtcgccgctggttgaaactgtttttgttgctccgggtaatgcaggcactgcgctggaacccacactgcaaaacgtcgctatcggcgtaaccgatatcccggcgctgctggatttcgcgcaaaacgaaaaggtagatctaaccatcgtcggcccggaagcgccgctggtgaaaggcgtggtcgataccttccgcgccgccgggctgaaaatcttcggcccaaccgcaggtgccgcgcaactggaaggctcaaaagcgtttaccaaagatttcctagcccgccataagatccctacggcggaataccagaacttcaccgaggtagaacctgcgctggcgtatctgcgtgagaaaggcgcgccaatcgtcattaaagctgacggtctggctgccgggaaaggcgttatcgtggcgatgacgcaggaagaagcggaagcggctgttcacgatatgctggcgggcaacgcttttggcgacgcgggtcatcgcattgttatcgaagagttcctcgacggcgaagaagcgagctttatcgtgatggtggacggcgagcatgtgctgccgatggccaccagccaggatcacaaacgcgtaggcgataaagataccgggccgaacaccggcgggatgggcgcttactcccctgcgccagtagtgaccgatgaggttcatcagcgcacgatggaacgtatcatctggccaaccgtgaaaggcatggcggcggaaggcaacacctacactggttttctctacgcgggcctgatgatcgacaaacagggcaatccgaaggttattgaatttaactgccgctttggcgatccggaaacccagccgattatgcagcgcatgaagtccgatctggttgagctctgcctggcggcctgtgaaggcaagctggacgagaaaacgtccgagtgggatgaacgcgcttctctcggcgtggtgatggctgcgggtggatatccgggcgattaccgcaccggcgatgtgatccacggcctgccgctggaagaagtggcagacggcaaagtgttccacgcgggcacgaaactagcggatgacgagcaggtagtgaccagcggcgggcgcgtactgtgcgttaccgcgctgggtcataccgtggcagaagcgcagaaacgcgcttatgccttaatgaccgatatccattgggacgactgcttctgccggaaagatatcggctggcgcgctatcgaacgcgagcagaactaa

SEQ ID NO: 4382 - DNA, 1326 bp, Escherichia coli
atgacgcacgataatatcgatattctggtggtggatgatgacattagccactgcactattttgcaggctttgctgcgcggctggggctataacgtcgcgctggcgaacagcgggcgacaggcgctggagcaggtgcgggaacaggtttttgatcttgtgctttgcgatgtgcgaatggcagagatggatggtatcgccacgctaaaagagatcaaaacattaaaccccgcgattccggtgctgattatgaccgcgtactccagcgtcgagacggcggtagaggcgttgaaaaccggggcgctggattatctcatcaagccgctggatttcgataacctacaggcgacgctggaaaaggcgctcgcgcatacacacagtgttgacgctgaaacgcctgcggtgtctgccagccagttcggtatggtcggtaaaagcccggcgatgcaacacctgctcagtgaaatcgccctcgtcgcgccatcggaagccacggtgctgatccacggcgattccggcaccggtaaagagctggtcgccagggcgattcacgccagtagcgcacgtagcgaaaaaccgctggtaacgctcaactgcgcggcgctcaacgaatccttgctggagtctgaattgttcggtcacgaaaaaggggcgtttaccggggccgacaaacgccgggaagggcgctttgttgaggcggacggcggcacgttgtttctcgatgaaattggcgatatctcgccgatgatgcaggtgcgtctgctacgtgcgattcaggagcgcgaagttcagcgtgtcggtagcaaccagactatttcggttgatgtccggctgattgcggcaacccatcgcgatcttgccgcagaggtgaatgccgggcgttttcgccaggatctctactatcggctgaacgtggtggcgattgaagtaccatcgctgcggcaacggcgggaagatattcctctgctggctggccattttcttcagcgctttgccgaacgtaatcgcaaggcggtaaaaggctttacgccccaggcgatggatctgctgattcactacgactggccgggaaatattcgtgaactggaaaacgcggtggaacgggcggtggtgctgctgaccggggaatatatttccgaacgcgagctgccgctggcgattgccagtacgccgatcccgctggtacaaagtcaggatattcagccgctggtggaagtcgaaaaagaggtgattctggcggcgctggagaaaacgggcggcaacaaaaccgaagccgcccgccagttagggatcacgcgcaaaacgctattggcaaaactgtcgcgttag

SEQ ID NO: 4383 - DNA, 1377 bp, Escherichia coli
atgcgttttatgcaacgttctaaagactccttagctaaatggttaagcgcgatcctccccgtggtcattgttgggctggtggggctgtttgcggtgacagtgattcgcgattatgggcgcgagactgccgccgccagacaaacgctgctggaaaaaggcagtgtacttatccgtgctctcgaatccggctcgcgcgtcggcatggggatgcgtatgcatcatgcgcagcagcaggccttacttgaagaaatggccgggcagcctggagtacgttggtttgcggtcacggatgaacaaggaacaatcgtgatgcatagcaactccggcatggtgggaaaacagctttattccccgcaggaaatgcagcagttacatccgggagatgaagaagcgtggcggcggatcgatagcgcagacggcgagcctgttctggaaatttatcgccagtttcaaccgatgtttgctgctggaatgcaccggatgcgccatatgcagcagtatgccgcgacaccacaagcaatttttatcgctttcgacgccagtaacattgtgagtgctgaagatcgtgagcagagaaacaccctgattatcctcttcgccctggcgacggtcttgctggcaagcgtgttgtcattcttctggtatcgccgatatctgcgctcgcggcagctattgcaggatgaaatgaagcgcaaagagaagctggtggcactggggcatcttgcggcaggcgttgcccacgaaatccgtaacccactttcctcgattaaagggctggcgaaatactttgccgaacgcgcgccagcagggggagaagcgcatcaactggcgcaggtgatggcgaaagaagctgaccgtttaaaccgtgtggtaagcgagttgctggaactggttaagccaacgcatctggctttgcaggcggtggagctcaacacgctgattaaccactcattacagctggtaagccaggatgcaaacagccgggagatccagttacgctttaccgccaacgacacattaccggaaattcaggccgatccggacaggctgactcaggtcctgttgaatctctatctcaacgctattcaggcgattggtcagcatggcgtgattagcgtgacggccagcgaaagcggcgcgggcgtgaaaatcagcgttaccgacagcggtaagggaattgcagcggatcagcttgaagccatcttcactccgtacttcaccaccaaagccgaaggcaccggactggggctggcggttgtgcataatattgttgaacaacacggtggtacaattcaggtcgcaagccaggagggaaaaggcgcaacgttcaccctttggcttccggtcaatattacgcgtaaggacccacaaggatga

SEQ ID NO: 4384 - DNA, 129 bp, Escherichia coli
atgactcgctacccgcagcaggcgagtcatttttactcgtttatcatgccagattacccgtcatatcagcgtttcgccgttggcacggaagatgcaatacccgaagtaagacaaccactggaggattaa

SEQ ID NO: 4385 - DNA, 420 bp, Escherichia coli
atgaaacggaacacgaaaattgccctggtaatgatggcgctttcagcaatggcgatgggatcgacatctgcatttgctcacggcggacatggtatgtggcagcaaaatgccgcgcctttgaccagcgaacaacagacagcgtggcagaaaatccataatgacttttacgctcaaagcagcgcactgcaacagcaactggtgacaaagcgttatgaatacaatgccctgttagccgcgaacccaccggatagcagcaaaattaacgcgctcgccaaagagatggagaatttgcgtcagtcgttagatgagttacgggtgaaacgagatattgcgatggctgaagcgggtattccgcgcggtaccggaatgggttacggcgactgcggtggtggcggtcatatgggtatgggccactggtaa

SEQ ID NO: 4386 - DNA, 636 bp, Escherichia coli
atgctggcaggcgctctgtttctcactgcctgtagtcacaactcttcacttcctccctttaccgccagtggatttgctgaagaccagggcgcggtacgcatctggcgaaaagacagcggcgataatgtgcatctgcttgccgtgtttagcccgtggcgcagtggcgataccaccacgcgagagtatcgctggcagggcgataaccttacgctcatcaatatcaatgtttacagcaaaccgccggtgaacattcgcgcgcgttttgacgatcgcggcgatctgagctttatgcaacgtgaatccgatggggaaaagcagcagctttctaacgaccaaatcgatttataccgttatcgtgctgatcagatccgccagattagcgatgccttacgtcaggggagagtcgtgctgcgccaggggcgctggcatgcgatggaacagaccgtgaccacctgcgaagggcaaaccattaaacctgatttagattcgcaggcgatagcgcatatcgagcgccgccagagccgctcttctgttgatgtcagcgtggcatggctggaagcgcccgaaggttcgcaattactgttggtggcaaactctgatttctgtcgctggcaacccaacgagaaaacgttctga

SEQ ID NO: 4387 - DNA, 273 bp, Escherichia coli
atgaacaagactcaactgattgatgtaattgcagagaaagcagaactgtccaaaacccaggctaaagctgctctggagtccactctggctgcaattactgagtctctgaaagaaggcgatgctgtacaactggttggtttcggtaccttcaaagtgaaccaccgcgctgagcgtactggccgcaacccgcagaccggtaaagaaatcaaaattgccgcagctaacgtaccggcatttgtttctggcaaggcactgaaagacgcagttaagtaa

SEQ ID NO: 4388 - DNA, 591 bp, Escherichia coli
atgttacaaaacccaattcatctgcgtctggagcgcctggaaagctggcagcacgtcacttttatggcctgcttatgcgaacgtatgtaccccaattacgccgtattctgtcagcaaaccggcttcggcgatgggcagatttaccgccgcattctcgatctcatttgggaaacgctgaccgtcaaagacgcaaaagtaaatttcgacagccaactggagaaatttgaagaagcgattccttcagccgacgatttcgatctgtacggcgtttatccggcaatcgatgcttgcgtggcgttaagtgaactggtccattcgcgtttaagtggcgaaacgctcgaacacgcggtggaagtgagtaagacttccatcacgaccgtggcgatgctggaaatgactcaggctggtcgcgaaatgagcgatgaagagctcaaagaaaacccagctgtagagcaagaatgggacattcagtgggaaatattccgacttttagctgagtgcgaagaacgcgatatcgagctgataaaaggccttagggcagacctgcgtgaggcgggtgagagcaatattggtataatttttcagcaataa

SEQ ID NO: 4389 - DNA, 672 bp, Escherichia coli
atggatctcgcgtcattacgcgctcaacaaattgaactggcttcttctgtgatccgcgaggatcgactcgataaagatccgccggatctgatcgccggagccgatgtcggatttgagcagggcggcgaagtgacgcgagcggcgatggtgctgctgaaatacccctcgcttgagctggtggagtataaagtggcccgcatcgccaccaccatgccttacattcctggttttctctcctttcgtgaatatcctgcgctgctggcagcgtgggagatgctgtcacaaaagccggatttagtgtttgtcgatggtcatgggatctcgcatcctcgccgtcttggcgtcgccagccattttggtttgctggtggatgtgccgaccattggcgtagcgaaaaaacggctctgcggtaaattcgaaccgctctccagcgaaccgggcgcgctggccccgctgatggataaaggcgagcagctggcctgggtctggcgcagcaaagcgcgctgtaacccgttgtttatcgctaccggccatcgggtcagcgtggacagcgcgctggcgtgggtacaacgctgcatgaaaggctatcgtctgccggagccaacgcgctgggcggacgcggtggcctcggaacgtccggcgttcgtgcgctatacagcaaatcagccctaa

SEQ ID NO: 4390 - DNA, 1065 bp, Escherichia coli
atgaccgaacttaaaaacgatcgttatctgcgggcgctgctgcgccagcccgttgatgtcactccagtatggatgatgcgccaggcgggtcgctatctaccggaatataaagccacgcgcgcccaggcgggcgattttatgtcgctgtgcaaaaatgccgagctggcgtgcgaagtgactttgcaaccgctgcgtcgctatccgctggatgcggcgatcctcttttccgatatcctcaccgtgccggacgcgatggggttagggctctattttgaagccggagaaggtccgcgttttacctcgccagtcacctgcaaagccgacgtcgataaactgccaattccggacccggaagatgagctgggttacgtgatgaacgcggtgcgtaccattcgtcgcgaactgaaaggcgaagtgccgctgattggtttttccggcagcccgtggacgctggcgacttacatggttgaaggcggtagcagcaaagccttcaccgtgatcaaaaagatgatgtatgccgatccgcaggcgctgcacgcgctgctcgataaactggcgaaaagcgtcacgttgtatctgaatgcgcagattaaagccggtgctcaggcagtcatgattttcgacacctggggcggcgtgcttaccgggcgcgattatcaacagttctcgctttattacatgcataaaattgttgatggtttactgcgtgaaaacgacggtcgccgcgtgccagtcacgctgtttaccaaaggtggcggacagtggctggaagcgatggcagaaaccggttgcgatgcgctgggcctcgactggacaacggacatcgccgatgcgcgccgtcgcgtgggcaataaagtcgcgctgcagggtaatatggacccgtcgatgctgtacgcgccgcctgcccgcattgaagaagaagtggcgtctatacttgccggtttcggtcacggcgaaggccatgtctttaaccttggtcacggcattcatcaggatgtgccgccagaacatgcaggcgtgtttgtggaggcagtgcatcgcttgtctgaacagtatcaccgctaa

SEQ ID NO: 4391 - DNA, 774 bp, Escherichia coli
atggatcgtataattgaaaaattagatcacggctggtgggtcgtcagccatgaacaaaaattatggttgccgaagggagaattgccatatggcgaagcggcaaatttcgatcttgtgggtcagcgcgcactacaaatcggcgaatggcagggggaacctgtttggttagtacaactgcagcggcgtcacgatatggggtcggtacgtcaggtcattgatctcgatgttgggctgtttcaactggccggacgtggcgtgcaactggcggagttttaccgatcgcataaatactgtggttactgcgggcatgaaatgtatccaagcaaaaccgaatgggcgatgctgtgcagccattgccgtgagcgttactacccgcaaatcgccccctgcattattgttgccatccgtcgcgatgattcgatcctcctcgcccagcatacccgtcatcgtaacggtgtccatacagtacttgccggattcgtcgaagtgggtgaaaccctcgagcaggcagtcgcgcgggaagtgatggaagagagcggaattaaagttaaaaacttgcgttacgtgacctcccaaccgtggccgtttcctcagtcgttaatgaccgcgtttatggcggaatatgacagcggcgagatcgtgatcgacccgaaagaattgcttgaggcgaactggtatcgctatgacgatttgccgttactcccgccgcccggcaccgtagcgcgccgtctgatagaagatacagtggcgatgtgtcgggcagagtatgagtga

SEQ ID NO: 4392 - DNA, 477 bp, Escherichia coli
atgcttaaccagctcgataacctgacggagcgcgtcagaggaagtaacaaactggttgatcgctggctacatgtacgtaagcatctgctcgtggcttactacaatctggttggcattaagcctggcaaagaatcgtacatgaggctaaacgaaaaagcccttgatgatttttgtcagagcctggtcgattacttgtctgccggacatttcagtatttatgagcgcattcttcataagctggaaggcaatgggcaactcgcacgcgccgcgaagatttggccacaactcgaagccaatactcaacagattatggatgactacgattccagtctggaaaccgccatcgatcatgataattaccttgagtttcaacaggttttatctgacatcggcgaggcactggaagcgcgctttgtgctggaagataagctgattctactggtgcttgacgccgccctcgtcaaacatcctgcttga

SEQ ID NO: 4393 - DNA, 1896 bp, Escherichia coli
atgtctgcaacaaaactgacccgccgcgaacagcgcgcccaggcccaacattttatcgacaccctggaaggctccgcctttcccaactcaaaacgcatttacatcactggcacacaccccggcgtacgcgtgccgatgcgtgagatccagcttagcccgacgctaatcggcggtagcaaagaacaaccgcagtacgaagaaaacgaagcgattccggtctacgacacctccggtccgtatggcgatccgcagatcgccattaacgtgcagcaagggctggcaaaactacgccagccgtggatcgatgcgcgcggcgataccgaagaacttaccgtgcgcagttccgattacacaaaagcgcggctggcagatgatggcctcgacgagctgcgttttagcggcgtattaacgccaaaacgcgccaaagcaggacgccgcgtcacccaactgcactacgcccgccagggtatcatcacgcccgaaatggaattcatcgccattcgcgagaatatgggtcgcgagcgcatacgtagcgaagttttacgccaccagcatccgggaatgagctttggcgcacgtctgccggaaaatatcactgcggaatttgtccgtgatgaagttgctgccggacgtgcgattatcccggccaacattaatcatccggaatcggagccgatgattattggccgtaacttcctggtaaaagttaatgccaatatcggcaactcggcggtcacttcttccatcgaagaagaagtggaaaaactggtatggtccacgcgctggggagcggataccgtgatggatctttccactggtcgctatattcacgaaacccgcgagtggattttgcgtaacagcccggtgccgatcggtacagtgccgatctaccaagcactggagaaggtgaacgggatcgctgaagatcttacctgggaagtcttccgcgacaccctgctggaacaagccgagcaaggtgtggattacttcactatccatgcgggggtgctgctgcgctacgtgccgatgaccgcgaaacgcctgaccggtatcgtctctcgcggcggttcgattatggcgaaatggtgcctctcccatcatcaggaaaatttcctctatcaacacttccgcgaaatttgtgaaatctgtgctgcttatgacgtttcgctatcgctgggcgacggcctgcgccccggttctattcaggacgccaacgatgaagcacagtttgccgagctgcatacgctgggtgaactgactaaaatcgcctgggaatatgacgtacaggtgatgattgaaggcccaggccacgtgccgatgcagatgattcgccgcaatatgaccgaggagttagagcactgccacgaagcgccgttttacactctggggccgctaactaccgatatcgcgccgggctatgaccacttcacgtcagggattggcgcggcgatgattggctggtttggttgtgcaatgctctgctacgtaacgccgaaagagcatctgggcctgccaaataaagaagatgttaaacaggggattatcacctataagattgccgctcacgccgccgacctggcgaaagggcatccgggcgcgcaaattcgcgataacgccatgtcgaaagcccgcttcgaatttcgctgggaagaccagtttaatctggccctcgacccgtttactgcccgcgcttatcacgatgaaaccctgccgcaagagtccggtaaagtcgcccatttttgctccatgtgtggaccgaaattctgctcgatgaaaatcagccaggaagtgcgtgattacgccgccgcacaaaccattgaagtgggaatggcggatatgtcggagaacttccgcgccagaggcggagaaatctacctgcgtaaggaggaagcgtga

SEQ ID NO: 4394 - DNA, 636 bp, Escherichia coli
atgtatcagcctgagtttcctcctgtaccctttcgtttaggactgtacccggtggttgacagcgtacagtggatcgaacgtctgttggatgcaggcgtacgtactctccagctacgcatcaaagatcagcgcgatgaagaggtagaagccgatgtggtggcggcaattgcgctgggccgccgctataacgcgcgattgtttatcaacgattactggcggctggcgattaagcatcaggcgtatggcgtccatctggggcaggaagatttgcaagccaccgatctcagcgccatccgcgcggcaggtctgcggctgggcgtttcgacacatgatgatatggagatcgacgtcgcgctggcagcacgcccttcttatatcgcgctgggacatgtgttcccgacgcaaaccaaacagatgccttccgcaccccaggggctggaacagctggcacggcatgttgagcgcctggcggattatcccaccgtggcgattggcggtatcagtctggcgcgcgcgcctgcggtgatagcaacgggtgtcggcagtatcgccgtcgtcagcgccattactcaagccgcagactggcgtttggcaacggcacagctgctggaaattgcaggagttggcgatgaatga

SEQ ID NO: 4395 - DNA, 756 bp, Escherichia coli
atgaatgaccgtgactttatgcgttatagccgccaaatcctgctcgacgatatcgctctggacgggcagcaaaaactgctcgacagccaggtgctgattattggtcttggcgggctgggtacacctgctgcgctatacctggcgggggctggcgtcgggacgctggtactggcagatgacgacgatgtgcatttaagcaatctgcaacgacaaatcctctttaccactgaagatatcgatcgcccgaaatcacaggtcagccaacagcgactgacacagttgaatcccgacattcaactgatggcattacaacaacggttgacgggtgaggcgttaaaagatgcggtagcacgggccgatgtggtgctcgactgtaccgacaatatggcgactcgccaggagattaatgccacctgcgtggcactcaacacgccgcttatcaccgccagcgcggtcggatttggcggtcagttgatggtactgacgccgccctgggagcaggggtgttaccgctgcctgtggccagataaccaggagccagaacgcaactgccgcacggcgggcgtggttggcccggtggtcggggttatgggcactttacaggcactggaagcgattaagttattaagtggtatagagacgcctgcgggagaactccgactgttcgacggtaaatcgagccagtggcgcagtctgacgttgcgccgcgccagcggttgcccggtatgtggaggatgcaatgcagatcctgtttaa

SEQ ID NO: 4396 - DNA, 201 bp, Escherichia coli
atgcagatcctgtttaacgatcaaccgatgcagtgtgtcgccggactaactgttcacgaactgctggagcaactcgatcaacaacaagcaggtgcggcactagcgattaatcagcaaatcgtcccgcgggaacaatgggcgcaacatatcgtgcaggatggcgaccagatcctgctttttcaagttattgcagggggttga

SEQ ID NO: 4397 - DNA, 771 bp, Escherichia coli
atgttacatattgcggacaaaacgtttgattcacatctgtttactggcaccggaaaattcgcctcttcacaactgatggtggagtctattcgcgcttccggcagccaactggtgacgctggcgatgaaacgtgtcgacttgcgccagcacaacgacgctatcctcgaaccgcttatcgcggcgggtgtgaccctgctgccgaatacttccggggcgaaaaccgcggaagaagccattttcgccgcccatctggcacgtgaagcgttaggcacaaactggctaaaattggagattcaccctgacgcccgctggctgttgcccgatcccatcgaaaccctgaaagccgccgaaacgctggtacaacagggatttatcgtgctgccttactgcggggccgatccggtattgtgtaaacgtctggaagaagtcggctgtgcagcggtgatgccgctcggcgcgccgattggctcgaatcagggactggaaacccgcgccatgctggagattattatccagcaggccaccgttccggtggttgtcgatgctggcatcggcgttcccagccatgccgcgcaggcgctggaaatgggggccgacgcggtgttagtgaatacggcgattgccgtcgcggacgatcccgtcaacatggcgaaggcatttcgtctggcggtagaagcaggcctgctggcacgtcagtccggaccgggcagccgcagtcattttgctcatgccaccagcccgctgactggatttctggaggcatcggcatga

SEQ ID NO: 4398 - DNA, 1134 bp, Escherichia coli
atgaaaaccttcagcgatcgctggcgacaactggactgggatgacatccacctgcgtatcaacggcaaaacggctgctgacgtagagcgggcgctaaatgcctcgcaactcacccgcgacgacatgatggcattgctatcacccgccgccagtggctatctggaaccactggcccagcgagcgcaacgtctgactcgtcagcgatttggcaacgtcgtcagcttctacgtcccgctttatctttccaatctttgcgctaacgactgtacttattgcggattttctatgagcaaccgcatcaagcgcaaaacgctggatgaagcggatattgccaaggaaagcgccgctatacgggagatgggctttgaacatctgctattagtcactggtgaacatcaggcgaaagtggggatggattactttcgtcgtcatctccctgccctgcgtgaacagttctcttcactacagatggaagtgcaaccgctggcggaggcggaatatgccgagttaaaacagcttggcctcgatggagtaatggtttatcaggagacatatcatgaggcgacttatgcccatcatcatctgaaaggtaaaaaacaggacttcttctggcggctggaaacgccggatcggctagggcgtgcagggattgataagataggcctcggcgcgctaatcggcctttccgacagctggcgagttgactgctatatggttgccgaacatttgctatggctgcaacagcattactggcaaagccgctactctgtctccttcccacgcctgcgtccatgtactggcggcattgagcctgcgtcgattatggatgaacgccagttagtgcaagccatctgcgctttccggctgcttgcaccggagattgaactgtcactctccacgcgggaatcaccgtggtttcgcgatcgcgtaattccgctggcaattaataacgtcagcgctttttcgaaaacgcagccaggtggctatgccgacaaccaccccgagctggaacagttctcaccgcacgacgatcgcagaccggaagcggttgctgccgcgttaaccgctcagggtttgcagccggtatggaaagactgggacagctatctgggacgcccatcgcaaaggccatga

SEQ ID NO: 4399 - DNA, 4224 bp, Escherichia coli
gtgaaagatttattaaagtttctgaaagcgcagactaaaaccgaagagtttgatgcgatcaaaattgctctggcttcgccagacatgatccgttcatggtctttcggtgaagttaaaaagccggaaaccatcaactaccgtacgttcaaaccagaacgtgacggccttttctgcgcccgtatctttgggccggtaaaagattacgagtgcctgtgcggtaagtacaagcgcctgaaacaccgtggcgtcatctgtgagaagtgcggcgttgaagtgacccagactaaagtacgccgtgagcgtatgggccacatcgaactggcttccccgactgcgcacatctggttcctgaaatcgctgccgtcccgtatcggcctgctgctcgatatgccgctgcgcgatatcgaacgtgtactgtacttcgaatcctatgtggttatcgaaggtggtatgaccaacctggagcgtcagcagatcctgactgaagagcagtatctggacgcgctggaagagttcggtgacgaattcgacgcgaagatgggtgcggaagcaatccaggccctgctgaagagcatggatctggagcaagagtgcgaacagctgcgtgaagagctgaacgaaaccaactccgaaaccaagcgtaaaaagctgaccaagcgtatcaaactgctggaagcgttcgttcagtctggtaacaaaccagagtggatgatcctgaccgttctgccggtactgccgccagatctgcgtccgctggttccgctggatggtggtcgtttcgcgacttctgacctgaacgatctgtatcgtcgcgtcattaaccgtaacaaccgtctgaaacgactgctggacctggctgcgccggatatcatcgtacgtaacgaaaaacgtatgctgcaggaagcggtagacgccctgctggataacggtcgtcgcggtcgtgcaatcaccggttctaacaagcgtcctctgaaatctttggccgacatgatcaaaggtaaacaggggcgtttccgtcagaacctgctcggtaagcgtgttgactactccggtcgttctgtaatcaccgtaggtccatacctgcgtctgcatcagtgcggtctgccgaagaaaatggcgctggagctgttcaaaccgttcatctacggcaagctggaactgcgtggtcttgctaccaccatcaaagctgcgaagaaaatggttgagcgcgaagaagctgtcgtttgggatatcctggacgaagttatccgcgaacacccggtactgctgaaccgtgcaccgactctgcaccgtctgggtatccaggcatttgaaccggtactgatcgaaggtaaagctatccagctgcacccgctggtttgtgcggcatataacgccgacttcgatggtgaccagatggctgttcacgtaccgctgacgctggaagcccagctggaagcgcgtgcgctgatgatgtctaccaacaacatcctgtccccggcgaacggcgaaccaatcatcgttccgtctcaggacgttgtactgggtctgtactacatgacccgcgactgtgttaacgccaaaggcgaaggcatggtgctgactggcccgaaagaagcagaacgtctgtatcgctctggtctggcttctctgcatgcgcgcgttaaagtgcgtatcaccgagtatgaaaaagatgctaacggtgaattagtggcgaaaaccagcctgaaagacacgactgttggccgtgccattctgtggatgattgtaccgaaaggtctgccttacaccatcgtcaaccaggcgctgggtaaaaaagcaatctccaaaatgctgaacacctgctaccgcattctcggtctgaaaccgactgttatttttgcggaccagatcatgtataccggctttgcatatgcagcgcgttctggtgcatctgttggtatcgatgacatggtcatcccggagaagaaacacgaaatcatctccgaggcagaagcagaagttgctgaaattcaggagcagttccagtctggtctggtaactgcgggcgaacgctacaacaaagttatcgatatctgggctgcggcgaacgatcgtgtatccaaagcgatgatggataacctgcaaactgaaaccgttattaaccgtgacggtcaggaagagaagcaggtttccttcaacagcatctacatgatggccgactccggtgcgcgtggttctgcggcacagattcgtcagcttgctggtatgcgtggtctgatggcgaagccggatggctccatcatcgaaacgccaatcaccgcgaacttccgtgaaggtctgaacgtactccagtacttcatctccacccacggtgctcgtaaaggtctggcggataccgcactgaaaacggcgaactccggttacctgactcgtcgtctggttgacgtggcgcaggacctggtggttaccgaagacgattgtggtactcatgaaggtatcatgatgactccggttatcgaaggtggtgacgttaaagagccgctgcgcgatcgcgtattgggtcgtgtaactgctgaagacgttctgaagccgggtactgctgatatcctcgttccgcgcaacacgctgctgcacgaacagtggtgtgacctgctggaagagaactctgtcgacgcggttaaagtacgttctgttgtatcttgtgacaccgactttggtgtatgtgcgcactgctacggtcgtgacctggcgcgtggccacatcattaacaaaggtgaagcaatcggtgttatcgcggcacagtccatcggtgaaccgggtacacagctgaccatgcgtacgttccacatcggtggtgcggcatctcgtgcggctgctgaatccagcatccaggtgaaaaacaaaggtagcatcaagctcagcaacgtgaagtcggttgtgaactccagcggtaaactggttatcacttcccgtaacaccgaactgaaactgatcgacgaattcggtcgtaccaaagaaagctacaaagtaccttacggtgcggtactggcgaaaggcgatggcgaacaggttgctggcggcgaaaccgttgcaaactgggacccgcacaccatgccggttatcaccgaagtaagcggttttgtacgctttactgacatgatcgacggccagaccattactcgtcagaccgacgaattgacaggtctgtcttcgctggtggttctggattccgcagaacgtaccgcaggtggtaaagatctgcgtccggcactgaaaatcgttgatgctcagggtaacgacgttctgatcccgggtaccgatatgcctgcgcagtacttcctgccgggtaaagcgattgttcagctggaagatggcgtacagatcagctctggtgacaccctggcgcgtattccgcaggaatccggcggtaccaaggacatcaccggtggtctgccgcgcgttgcggacctgttcgaagcacgtcgtccgaaagagccggcaatcctggctgaaatcagcggtatcgtttccttcggtaaagaaaccaaaggtaaacgtcgtctggttatcaccccggtagacggtagcgatccgtacgaagagatgattccgaaatggcgtcagctcaacgtgttcgaaggtgaacgtgtagaacgtggtgacgtaatttccgacggtccggaagcgccgcacgacattctgcgtctgcgtggtgttcatgctgtgactcgttacatcgttaacgaagtacaggacgtataccgtttgcagggcgttaagattaacgataaacacatcgaagttatcgttcgtcagatgctgcgtaaagctaccatcgttaacgcgggcagctccgacttcctggaaggtgaacaggttgaatactctcgcgtcaagatcgcaaaccgcgaactggaagcgaacggcaaagtgggtgcaacttactcccgcgatctgctgggtatcaccaaagcgtctctggcaaccgagtccttcatctccgcggcatcgttccaggagaccactcgcgtgctgaccgaagcagccgttgcgggcaaacgcgacgaactgcgcggcctgaaagagaacgttatcgtgggtcgtctgatcccggcaggtaccggttatgcgtaccaccaggatcgtatgcgtcgccgtgctgcgggtgaagctccggctgcaccgcaggtgactgcagaagacgcatctgccagcctggcagaactgctgaacgcaggtctgggcggttctgataacgagtaa

SEQ ID NO: 4400 - DNA, 4029 bp, Escherichia coli
atggtttactcctataccgagaaaaaacgtattcgtaaggattttggtaaacgtccacaagttctggatgtaccttatctcctttctatccagcttgactcgtttcagaaatttatcgagcaagatcctgaagggcagtatggtctggaagctgctttccgttccgtattcccgattcagagctacagcggtaattccgagctgcaatacgtcagctaccgccttggcgaaccggtgtttgacgtccaggaatgtcaaatccgtggcgtgacctattccgcaccgctgcgcgttaaactgcgtctggtgatctatgagcgcgaagcgccggaaggcaccgtaaaagacattaaagaacaagaagtctacatgggcgaaattccgctcatgacggacaacggtacctttgttatcaacggtactgagcgtgttatcgtttcccagctgcaccgtagtccgggggtcttttttgactccgacaaaggtaaaacccactcttcgggtaaggtgctgtataacgcgcgcatcatcccttaccgtggttcctggctggacttcgaattcgatccgaaggacaacctgttcgtacgtatcgaccgtcgccgtaaactacctgcgacaatcattctgcgtgccctgaactacaccacagagcagatcctcgacctgttctttgaaaaagttatctttgaaatccgtgataacaagttgcagatggaactggtgccggaacgcctgcgtggtgaaaccgcatcttttgacatcgaagctaacggtaaagtgtacgtagaaaaaggccgccgcattactgcgcgccatattcgccagctggaaaaagacgacgtcaagctgatcgaagttccggttgagtacatcgcaggtaaagtggttgctaaagactacattgatgagtctaccggcgagctgatctgcgcagcgaacatggagctgagcctggatctgctggctaagctgagccagtctggtcataagcgtatcgaaacgctgttcaccaacgatctggatcacggcccatatatctctgaaaccttacgtgtcgacccaactaacgaccgtctgagcgcactggtagaaatctaccgtatgatgcgccctggcgagccgccgactcgtgaagctgctgaaagcctgttcgagaacctgttcttctccgaagaccgctatgacttgtctgcggttggtcgtatgaagttcaaccgttctctgctgcgcgaagaaatcgaaggttccggtatcctgagcaaagacgacatcattgatgttatgaaaaagctcatcgatatccgtaacggtaaaggcgaagttgatgatatcgaccacctcggcaaccgtcgtatccgttctgttggcgaaatggcggaaaaccagttccgcgttggcctggtacgtgtagagcgtgcggtgaaagagcgtctgtctctgggcgatctggataccctgatgcctcaggatatgatcaacgccaagccgatttccgcagcagtgaaagagttcttcggttccagccagctgtctcagtttatggaccagaacaacccgctgtctgagattacgcacaaacgtcgtatctcggcactcggcccaggcggtctgacccgtgaacgtgcaggcttcgaagttcgagacgtacacccgactcactacggtcgcgtatgtccaatcgaaacccctgaaggtccgaacatcggtctgatcaactccctgtccgtgtacgcacagactaacgaatacggcttccttgagactccgtatcgtaaagtgaccgacggtgttgtaactgacgaaattcactatctgtctgctatcgaagaaggcaactacgttatcgcccaggcgaactccaacctggatgaagaaggccacttcgtagaagacctggtaacttgccgtagcaaaggcgaatccagcttgttcagccgcgaccaggttgactacatggacgtatccacccagcaggtggtatccgtcggtgcgtccctgatcccgttcctggaacacgatgacgccaaccgtgcattgatgggtgcgaacatgcaacgtcaggccgttccgactctgcgtgctgataagccgctggttggtacgggtatggaacgtgctgttgccgttgactccggtgtaactgcggttgctaaacgtggtggtgtcgttcagtacgtggatgcttcccgtatcgttatcaaagttaacgaagacgagatgtatccgggtgaagcaggtatcgacatctacaacctgaccaagtacacccgttctaaccagaacacctgtatcaaccagatgccgtgtgtgtctctgggtgaaccggtagaacgcggcgacgtgctggcagacggtccgtccaccgatctcggtgaactggcgcttggtcagaacatgcgcgtagcgttcatgccgtggaatggttacaacttcgaagactccatcctcgtatccgagcgtgttgttcaggaagaccgtttcaccaccatccatattcaggaactggcgtgtgtgtcccgtgataccaagctggggccggaagagatcaccgctgacatcccgaacgtgggtgaagctgctctctccaaactggatgaatccggtatcgtttacattggtgcggaagtgaccggtggcgacattctggttggtaaggtaacgccgaaaggtgaaactcagctgaccccagaagaaaaactgctgcgtgcgatcttcggtgagaaagcgtctgacgttaaagactcttctctgcgcgtaccaaacggtgtatccggtacggttatcgatgttcaggtctttactcgcgatggcgtagaaaaagacaaacgtgcgctggaaatcgaagaaatgcagctcaaacaggcgaagaaagacctgtctgaagaactgcagatcctcgaagcgggtctgttcagccgtatccgtgctgtgctggtagccggtggcgttgaagctgagaaactcgacaaactgccgcgcgatcgctggctggagctgggcctgaccgacgaagagaaacaaaatcagctggaacagctggctgagcagtatgacgaactgaaacacgagttcgagaagaaactcgaagcgaaacgccgcaaaatcacccagggcgacgatctggcaccgggcgtgctgaagattgttaaggtatatctggcggttaaacgccgtatccagcctggtgacaagatggcaggccgtcatggtaacaagggtgtaatttctaagatcaacccgatcgaagatatgccttacgatgaaaacggtactccggtagacatcgtactgaacccgctgggcgtaccgtctcgtatgaacattggtcagatcctcgaaacccacctgggtatggctgcgaaaggtatcggcgacaagatcaacgccatgctgaaacagcagcaagaagtcgcgaaactgcgcgaattcatccagcgtgcgtacgatctgggcgctgatgttcgtcagaaagttgacctgagtaccttcagcgatgaagaagttatgcgtctggctgaaaacctgcgcaaaggtatgccaatcgcaacgccggtcttcgacggtgcgaaagaagcagaaattaaagagctgctgaaacttggcgacctgccgacttctggtcagatccgcctgtacgacggtcgcactggtgaacagttcgagcgtccggtaaccgttggttacatgtacatgctgaaactgaaccacctggtcgacgacaagatgcacgcgcgttccaccggttcttacagcctggttactcagcagccgctgggtggtaaggcacagttcggtggtcagcgtttcggggagatggaagtgtgggcgctggaagcatatggcgcagcatacaccctgcaggaaatgctcaccgttaagtctgatgacgtgaacggccgtactaagatgtataaaaacatcgtggacggcaaccatcagatggagccgggcatgccagaatccttcaacgtattgttgaaagagattcgttcgctgggtatcaacatcgaactggaagacgagtaa

SEQ ID NO: 4401 - DNA, 366 bp, Escherichia coli
atgtctatcactaaagatcaaatcattgaagcagttgcagctatgtctgtaatggacgttgtagaactgatctctgcaatggaagaaaaattcggtgtttccgctgctgctgctgtagctgtagctgctggcccggttgaagctgctgaagaaaaaactgaattcgacgtaattctgaaagctgctggcgctaacaaagttgctgttatcaaagcagtacgtggcgcaactggcctgggtctgaaagaagctaaagacctggttgaatctgcaccggctgctctgaaagaaggcgtgagcaaagacgacgcagaagcactgaaaaaagctctggaagaagctggcgctgaagttgaagttaaataa

SEQ ID NO: 4402 - DNA, 498 bp, Escherichia coli
atggctttaaatcttcaagacaaacaagcgattgttgctgaagtcagcgaagtagccaaaggcgcgctgtctgcagtagttgcggattcccgtggcgtaactgtagataaaatgactgaactgcgtaaagcaggtcgcgaagctggcgtatacatgcgtgttgttcgtaacaccctgctgcgccgtgctgttgaaggtactccgttcgagtgcctgaaagatgcgtttgttggtccgaccctgattgcatactctatggaacacccgggcgctgctgctcgtctgttcaaagagttcgcgaaagcgaatgcaaaatttgaggtcaaagccgctgcctttgaaggtgagctgatcccggcgtctcagatcgaccgcctggcaactctgccgacctacgaagaagcaattgcacgcctgatggcaaccatgaaagaagcttcggctggcaaactggttcgtactctggctgctgtacgcgatgcgaaagaagctgcttaa

SEQ ID NO: 4403 - DNA, 705 bp, Escherichia coli
atggctaaactgaccaagcgcatgcgtgttatccgcgagaaagttgatgcaaccaaacagtacgacatcaacgaagctatcgctctgctgaaagaactggcgactgctaaattcgtagaaagcgtggacgtagctgttaacctcggcatcgacgctcgtaaatctgaccagaacgtacgtggtgcaactgtactgccgcacggtactggccgttccgttcgcgtagccgtatttacccagggtgcaaacgctgaagctgctaaagctgcaggtgctgaactggtaggtatggaagatctggctgaccagatcaagaaaggcgaaatgaactttgacgttgttattgcttctccggatgcaatgcgcgttgttggccagctgggccaggttctgggtccgcgcggcctgatgccaaacccgaaagtgggtactgtaacgccgaacgttgctgaagcggttaaaaacgctaaagctggccaggttcgttaccgtaacgacaaaaacggcatcatccacaccaccatcggtaaagtggactttgacgctgacaaactgaaagaaaacctggaagctctgctggttgcgctgaaaaaagcaaaaccgactcaggcgaaaggcgtgtacatcaagaaagttagcatctctaccaccatgggtgcaggtgttgcagttgaccaggctggcctgagcgcttctgtaaactaa

SEQ ID NO: 4404 - DNA, 429 bp, Escherichia coli
atggctaagaaagtacaagcctatgtcaagctgcaggttgcagctggtatggctaacccgagtccgccagtaggtccggctctgggtcagcagggcgtaaacatcatggaattctgcaaagcgttcaacgcaaaaactgattccatcgaaaaaggtctgccgattccggtagtaatcactgtttacgctgaccgttctttcactttcgttaccaagactccgccggcagcagttctgctgaaaaaagcggctggtatcaagtctggttccggtaagccgaacaaagacaaagtgggtaaaatttcccgcgctcagctgcaggaaatcgcgcagaccaaagctgccgacatgactggtgccgacattgaagcgatgactcgctccatcgaaggtactgcacgttccatgggcctggtagtggaggactaa

SEQ ID NO: 4405 - DNA, 546 bp, Escherichia coli
atgtctgaagctcctaaaaagcgctggtacgtcgttcaggcgttttccggttttgaaggccgcgtagcaacgtcgctgcgtgagcatatcaaattacacaacatggaagagttgtttggtgaagtcatggtaccaaccgaagaagtggttgaaatccgtggcggtcagcgtcgcaaaagcgaacgtaaattcttccctggctacgtcctcgttcagatggtgatgaacgacgcgagctggcacctggtgcgcagcgtaccgcgtgtgatgggcttcatcggcggtacttccgatcgtcctgcgccaatcagcgataaagaagtcgatgcgattatgaaccgcctgcagcaggttggtgataagccgcgtccgaaaacgttgtttgaaccgggtgaaatggtccgtgttaatgatggtccgttcgctgacttcaacggcgttgttgaagaagttgattacgagaaatctcgtctgaaagtgtctgtttctatcttcggtcgtgcgacccctgtagagctggacttcagccaggttgaaaaagcttaa

SEQ ID NO: 4406 - DNA, 384 bp, Escherichia coli
atgagtgcgaataccgaagctcaaggaagcgggcgcggcctggaagcgatgaagtgggtcgttgtggtggcattgctcctggtagcgattgtcggcaactacctttatcgcgacattatgctgccgctgcgtgcgctggccgtagtaattctgattgctgcagcgggtggtgtcgcgctgttaacgacaaaaggtaaagcaaccgttgcttttgcccgtgaagcgcgtaccgaagtccgtaaggtcatttggccgactcgccaggaaacattgcacaccacgctgattgtggctgcggttaccgcagtaatgtcactgatcctgtggggactggatggtattctggttcgcctggtatcctttatcactggcctgaggttctga

SEQ ID NO: 4407 - DNA, 465 bp, Escherichia coli
atgagcagagtcaccgcgattatctccgctctggttatctgcatcatcgtctgcctgtcattggctgttaatcattaccgtgataacgccatctcctacaaagaccagcgcgataaagcgaaggaaaaactcagccaggcgaacgccaccattactgacatgcagcagcgccagcgtgatgttgctgcactggatgaaaaatactcaagggagttagctgatgcaaaagctgaaaatgatgctctgcgtgatgatattgccgctggtcgtcgtcggttgcgcatcagagcagtctgtcagaccggacgtgaagccaccgccgccaccggcgtgggtaatgcagccgccccccgactggcagacaccgctgaacgggattatttcaccctcagagagcggctgataataatgcaaaaacaactggaaggggcacagctatacattcgtgagcaatgcctcagataa

SEQ ID NO: 4408 - DNA, 477 bp, Escherichia coli
atgcaggtactaaattcccagcgtaaagctttcctcgatatgttggcgtggtcagaaggaacggataacgggcgacagccaacccgcaatcacggctacgacgttattgtaggtggtgagctgttcacagattactccgatcatcctcgcaaacttgttacgctaaacccgcaacttaaatcaaccgcagctggacgttaccagcttctttcccgttggtgggatgcctaccgcaagcagcttggcctgaaagacttctctccgaaaagccaggacgctgttgcactgcagcagattaaagagcgtggcgctttaccgatgattgatcgcggtgatattcgtcaggcaattgaccgttgcagcaatatctgggcttcactaccgggcgctggttatggtcagttcgagcataaagttgacagcctgattgcaaaattcaaagaagcaggcggaacggtcagagagattgaggtatga

SEQ ID NO: 4409 - DNA, 336 bp, Escherichia coli
atgcctcataacccaaatacctggccggactggctggagttgtttcagagctggtggcgtggagacacaccgctgggtgcagtgattatgtcgatcgttatggctggtttgcgcatcgcctattttggcggtggtggtggctggaagcgaaaaacgctcgagattttgctctgtggcgctctgacgctgacctttgcatccgctcttgagtatgtcggatggcctaaatcactttctgttgccattggtggcggcgtggggctgatcggtgtcgatgctattcgtggggctgcaatgcgagtaatcggtaacaagtttggtggctctaaggagtaa

SEQ ID NO: 4410 - DNA, 1053 bp, Escherichia coli
atgaaaaatactgtaaaaataaacagtgttgatttaatcaacgctgattgcctgcattttattcagtccctgcctgatgattccattgacctgattgttaccgatccgccgtacttcaaggtgaaacccaacggttgggacaatcagtggaaaggggacgaagattaccttaagtggctggaccactgtctggcccagttctggcgggtgttaaaacctgccggaagcctttacctgttctgtgggcatcgcctggcatctgatattgagatcatgatgcgtgaacgtttcaacgtgcttaaccatatcatctgggcgaagccgtccggacgttggaatgggtgtaataaagaaagtctgcgcgcatattttcctgccacagagcgcgttctgtttgctgaacattaccaggggccatatcgcggcaaaagtgacggctatgcagcaaaagaaagggaactcaaacagcacataatggcaccgctgatatcgtatttcagggatgctcgtgccgaactgggtataacggcaaaacaaattgccgaagccacaggtaagaaaaatatggtttcccactggtttggtgccagtcagtggcagttgccgaatgaggctgactatcggaagttacaggcactgttttcccgtatagcggcagagaagtttcaggaacaacaactgaaacaaccacaccaccagctggtggcatcttatgattcactgaatcgcaaatattctgaattgctggatgagtttaaatctctccggcgctatttctccgtatcagtctccgtgccttataccgatgtctggacgcataagcccgttcagttctacccgggtaaacatccgtgcgagaaaccggcggatatgctccggcaaataatcaatgccagtagtcgacctggtgatctggttgctgatttctttatgggatccggttccacaataaaagcagcaatggcgctggggcgtcgggcgttaggtgttgaacttgagtcagagcggtttaatcagacggtgaaagaggtaagtgaactggtggggaaataa

SEQ ID NO: 4411 - DNA, 204 bp, Escherichia coli
atgctaaaacagcaagatatgacagaaaccgccgccgcagtccttcatttcttacctgctgacaagtgggtaacgccacgcatgatgacgagaactaccggagtaagcgaagcccggtgccagttaatactgactcagttagttctggcgggtctggcgaaggataacggcgggtacgggaataaattcagacgctgccagtaa

SEQ ID NO: 4412 - DNA, 618 bp, Escherichia coli
atggataaaaatgtagagcatgtattagttgatgcaattgaaaataagcaatctttaacagtcgtttacttaggagggagccagcccggaacattaaggaatatttctccgattagtataaatggggataaattgcgggcaagatgccatagttctggagcagtaaaggttttcaatcttgggaaaatacagttacccagtgactcctgcgcggtatctatgcactatggagatttagaagttaaagcttatgagacgatgcagagcgtaaatgacaactttcatgccctttatcctgaaggacgatggggtgttgattttaatgagcatcgctttgctttatttgatttttttaaaaacgggaaacgaaaaaaaacggcatttatggcaattgagttcagggaaagagatgaagagaaaataataacaggtgtaacaattgatattggtatatctggaacagtgatttctgagaagtcccgaatcccaaaaagacgaccatgggtagtggttggtcccgaacacggagaatacagtacttattcaactttggacaaggctgctacagcgttttttgagaggctttcgttgatagcatccggcctggaagataattga

SEQ ID NO: 4413 - DNA, 372 bp, Escherichia coli
atgcgtgatattcaaatggttcttgaacgttggggggcatgggtggcaaataatcacgaggatgtggaatggtcatctgttgctgcaggttttaagggattaattccttcgaaagtaaaatcccgcccgcaatgtagcgatgacgatggcctgatcattagctctgcgatgacagttcttaagaaaaaggaaccgtatcaatacgaattactggaaatgtattatgtgtatggggttacattacgggcgttgggggtaaaactggggatatcacttaatcaggttgttatcagactgcagaaagctgaagggtttattgacggttgtctggcaatgttgggggtatctttagaaattgattgttacatatag

SEQ ID NO: 4414 - DNA, 990 bp, Escherichia coli
gtgagagcactactgacccctgaaattgccccgcgtatggggatcgtattgttcagaccaggttcagagctgatgcccctgtttatgcaggggcgtgtcctgctggagcctgagccggaacgttattcatctttcgccagtggtgccgtaccggcggcatcacaaccgctggcggatgatcctgccgttcgggccgtgttccgcaatgaggcagtgatccgtcgtgctggtggcgtggaatgtcttgaaagctggttacttcgtgaaaaaggctgccagtggcctcattccgactggcacagcgagaacatgacaacaatgcgacacgcgccgggcgcaatccgtctgtgctggcactgcgataaccagctgcgcgatcagttcacggaacggctggaatcaatggcaacggataactgtgcccgctgggtgttgtctgttgtgcgtcgggatctcggttttgatgatagtcacgttgtgacaatgccggaactgtgctggtggctgattcgtaatgacctggcggatgtcttaccggaaagtgcagcccgtaaggcactgagattaccaaagcctgttgtgccgtctgtcacccgggaaagtgaccttgtgccttcggttcctgccaccagcatcatccaggataaggcaaaaaaggtgctggcgctgaaagtggatccggagtcgccggagtcttttatgttacgcccaaaacgtcgccgctgggttaatgaaaagtacacgcgctgggttaagacgcagccgtgcgcatgttgtggaaagcctgctgatgatccccaccacctgataggtcacggtcagggtggaatggctacaaaagcgcatgacctctttgtgttgcctttgtgcagaaagcatcacgacgagctgcatgcggataccgtggcatttgaagagaagtatggctcccagctggagctgatatttcgttttatcgatcgtgcgctggcaataggcgtgctggcctga

SEQ ID NO: 4415 - DNA, 798 bp, Escherichia coli
atgaataatctgatggttattgatggtattgaagttcgtcgtgatgcttatgggcgttacagcctgaacgatctacacagggctgccggttctctggataagcataagcctgcattctggctccgcaatgagcaaactgaacgtttaataagcgagttgcagatttgcaactcggtcaatatagagccagttaacgttattcgtggcggaaataaccaggggacgtatgtctgcaaagaactggtgtatgcctatgcaatgtggatcagtccgtcattccatctgaaggtgatccgtactttcgatatggtaaccagcgcaccggaaaaattatccgggcaggctgctgacaagatgcaggctggagtgattctgctggactttatgcgccgggagttaaacctgtctaactcttcagtgcttggtgcctgtcagaaactccaggaggctgttggcttaccgaatctggcaccgcgctatgccattgatgctcctgctgacgcgcctgatggctcaagtcgccctacgctgtcgctgagtgcactgctgaaacagtatggtatccgccttacggctaatcaggcatatcaccagatggcgaagctggggatcgttgaacaacgcgaacgatacagccgtacctcgattaacaacatcaaaaaattctggtcgctgacagcgaaaggctgcatgttcggcaagaacatcaccagtcccgcaaatccgcgcgagacgcagccgcatttcttcgaatcccgattccctgagctgttaaagctgctcgataccgttcattga

SEQ ID NO: 4416 - DNA, 390 bp, Escherichia coli
atgaagctgatcctgccttttccgcccagcgtgaacacgtactggcgacaccccaacaaaggggcgtttgctggtaagagcctgataagcgcggcggggcgaaaattccagagcgcggcgtgtgcagcaatagttgagcagttacgtcgtctgccaaaaccaacgtcggcacctgcttcagtggagatcgtgttgtttcctccggataaccggatccgcgatctggacaactataacaaggcgctgtttgacgccctgacccacgcgggtgtgtgggaagacgacagacaggtgaaaagaatgctggtggagtggggaccggttatcccgaaagggaaggtcgagatcactatcagtaagtatgagaaaccggcgggtgcagccgcctga

SEQ ID NO: 4417 - DNA, 327 bp, Escherichia coli
atgacgacgttaactcaatgccagcagcaggtgctggatatgctgatttcttaccagcaagagcgtggctttccgccaaccaatcaggaggtggcaaccatgctgggataccgttcagtgaatgcagcggtggagcatcttcgcgcactggagaaaaaaggcgtcatcacgataaagcgtggcgtggcccggggcatcacgcttcataccacggtgaaggacgacgacagcgaggcggtcgggattatccgctcactgcttgccggtgaggaaaacgcaaggctgcgtgcagcccactggttacatgagaggggcctgaaagtatga

SEQ ID NO: 4418 - DNA, 654 bp, Escherichia coli
atgagtaataaatattgccaggcgctggtggaactgcggaacaaaccagcccatgaactgaaggaagtgggcgatcagtggcgcacgccggacaacattttctggggaattaacaccctgtttggcccgtttgttctggatctgttcactgacggtgataacgccaaatgtgctgcgtattacacggcggaagacaacgcgctggcgcatgactggtcagaacgtcttgcggagcttaaaggggctgcctttggtaatcccccatacagccgcgccagtcagcatgaggggcaatacatcaccggcatgcgttacatcatgaaacatgccagtgccatgcgtgataagggtgggcgctatgttttcctgatcaaagctgccaccagcgaagtgtggtggccggaagatgcagaccatattgcttttattcgcgggcgtattggttttgaactgcctgcctggtttatcccgaaggatgagaagcaggtgccgacaggcgcgttcttcgctggtgctattgctgttttcgacaagacctggaagggaccggcaatcagctacatcgggcgcgatgaacttgaggcatgtggtgaggcgtttttggcgcaggttcgccagcaggcagaaaaacttgtcagggagatggcggcatga

SEQ ID NO: 4419 - DNA, 489 bp, Escherichia coli
atgagtcttttgaatgaagttcagaaattcattgaagcccatccggggtgtacttccggagacattgcggatgcttttgcaggttactcacggcagcgcgttctgcagtcagcaagcaagttacgtcagagtgggcgtgtggatcaccgttgtgaaggagatacacgcagacatttcccgcgcctgactgagagagcgcaggaaccggaaccacaaccagttcgtgaaaccagacctgtgcgcaattcctatgtcggcactaacgatccccgtgtgattttgtgcctgacccgccaggctgaagaactggagtccaggggcttataccgtcgtgctgcaacggtgtggatggcggcattccgtgaaagccactcccagccagaacgaaacaattttctggcacgtcgtgagcggtgcttacggaaaagcagcaagcgcgctgcatcgggtgaagagtggtatctgtcagggaatttcgtgggggcttaa

SEQ ID NO: 4420 - DNA, 819 bp, Escherichia coli
atgagtatggagctgatggttaaagcgatgaaaattcgagtgggtaatccattgcgaaaactggttctgatcaagctggctgataatgccagcgatcagggcgagtgctggcccagctatcagcatatcgctgatcagtgcgagattagcaaacgttctgtgatgaatcatattgcggccctctgtgagtccgggctggtaaaaaaagtcacccggaaaggtgaaaaaggtaactcaagtaatatctatcttcttcatcttgatggtgcaggagattcactagggggtagtgcaaataattcactatctggtgcagcaaattcaccaggtagtgcaggagttgcaccagggggtagtgcaggagattcacccagaaccagtcactcttttgaaccagtcaaagaaccagtcaatgaaccaatagctgttggtgcatctgctgatgagtctgtgcgagttcgttcaaaccgaccggaatactctccggagtttgagcaggcatggctggcataccccaaacgtgctggtggcaattcaaaatcagcagccttcaaagcctggaaagcccgtttgaatgagggggtaaaccccgaaaccatgctggaaggtgtgaaacgctactcgtgctgggtatctgcgatgggtaacagcggcacacaatttgtgaaacaggctgtcacgttctttggtccggatcgtcatttcgaagaatcctgggaagttcctgcggtatctgcagccagacgcgaggacccgtacttcaaagccagttacgacaacgtggactacagccagatcccggcaggattcagggggtga

SEQ ID NO: 4421 - DNA, 225 bp, Escherichia coli
atgatccggaatattttcaaacggtttaccaatcagactttccgttgtcctcgtccgggtcagtggtacaccacacctgcagggcatgttctacgtgttagcctggttgaccgtgaatgtcagaaggtgatttgtgaaccgctgggccgtagttaccgcgtcagtatgccgcttatagcctttcgctccggaaaaaacatgaagcatctcggaggtgcagcatga

SEQ ID NO: 4422 - DNA, 1152 bp, Escherichia coli
atgaacagtttaacggcaaataaccgtttgtcgcaacagctggtggtcagtgtcgctgaacacctgttgttacggcatgaatgcagattaccaaatcacctggctgtaagtaaccacagagaactttacctgactgtggggggcgagttgtgcaggaacttaaccgctggtttcgtgacggaagagggctttatgtccatgttattcgttgggaaccagaaacacagcgcgttatctatcttcgcaaagactacccgcatgagtgctttagtcctttgtggaaattctggcgtgattttgttgagtgtgaaggaccaccagcacattgattctgccattccgggacgttacactgttcaggcaccttataaaacgggtgccgggcgtggaaacccggaattcaccaaagcgcacaaccgcgctcttgcggtttttttgtgtcatgagcagcattacgcccaaattatggtggggcgtgcagggccaacttcggttgggccgggttctttggtgaccggtatttccacccctgtacgtctcaccaccaataaggtcgtggaaagccttggtggtgagttattaaaaatcaccaaagaggctgccatcatggctacgatcccaaccctcactcaacctgaaattgccatcgttgatggtcaggctgttacttcatccctggctgttgccaacttcttctccaaacgtcatgacgatgtactgaaaaagatccgcacgcttgaatgctcagcatcattcactgcccgcaatttttcggtgagtgattacactgattgcacaggtcgcaaacttccttgctaccaaataacccgcgacggctttgcgtttcttgctatgggtttcacgggtaaacgtgctgcccagttcaaagaggcatacatcaatgcctttaaccagatggagaaacagctttcaaatccctctgtactgagcgacgttgcacataacgccagcgttctctattcctacatttcatcaattcatcaggtctggctgcagcagctttatcctatgttggcaaaagccgaatctccgctggctgttagcttgtatgactatattaatgatgcttcggcactggcctgcctcataaatttgtcgctgaacccttcagaggtaagggggcgcaaatga

SEQ ID NO: 4423 - DNA, 552 bp, Escherichia coli
gtgggtaagcatcactggaaagtggaaaaacaacctgagtggtacgtgaaagctgtcagaaaaactatcgcggcattgcctgggggttacgctgaagctgctgactggctggatgtaacagagaacgctttattcaaccgccttcgtgcagatggcgatcagattttcccgctgggatgggcaatggttttacagcgcgcggctggcactcactacattgcggatgctgtcgcacagtctgctggtggggtgttcgtatcgcttcctgaaattgaggaagtagagaacgccgatataaaccagcgcctgctggaagtcatcgaacagatcgggaattactcaaagcagattcgttcggcaatcgaagatggggtcgtggagccacacgagcagacagcaattaatgatgagttgtatctgtcaatttcgaagctccaggaacatgcagcactggtctacaaaatcttctgcgctccagaaaagagtgacgcccgcgagtgtgcagctccgggcgtcgtggcgttttgtgtctgtggagaaactaacgcatga

SEQ ID NO: 4424 - DNA, 261 bp, Escherichia coli
atgcaatcaccattacgaaatgtgcgtaaggcgcacgggtttactttgcagcatgttgctgcgggcgttcaggtcaatccagcgacgctgagtcgtattgaaagactggaacaaattccatctatcgatcttgcagaacgtctggccaatttttttaagggtgaaatcagcgaaatgcagattctttatccggcacgttttcaatctagccaaaaccagaatgggtttaaaccacaggaacaggaggtaagccgtgggtaa

SEQ ID NO: 4425 - DNA, 648 bp, Escherichia coli
atgaaaatcgccgatctcgctgaagcaataggagtggatgcggcgaatatctcgcgcctggaaacaggtaagcagaaacaattcactgaacaagccctgagtaatattgccaggagcttaggtgttgatattgctgatctctttacctcagacgtcaaaagtaatactgtatgtaaaaacagtattagtgaggatgttgcgcaggtgaaggatgtattccgtattgaaatgctggatgtcagtgccagtgcgggaaatggccttatccagggcggtgatgtcattgatgtgattcatgccattgaatacagaactgataatgctgtatcgatgtttggcggacgaccagccaatcacattaaagttatcaacgttcgtggggacagtatgtgtccaaccattgagccaggagatctcatcttcgttgatgtcagtatcaatcagtttgatggagatggtatctatgtatttggttttgatgataaaatttatgtcaaacgactgcaaatgatacctgacaaactactggtgatatctgataaccagatttaccgtgaatggggaattaccagcgaaaatgaacaccggtttatggtctttggaaaggtcttaatcagccagtcacaaacccttaaacgacacaattaa

SEQ ID NO: 4426 - DNA, 363 bp, Escherichia coli
atggctagcgaacgcagtactgatgtgcaggcatttatcggggagctggacggcggcgtatttgaaaccaaaatcggcgcagttctcagtgaagtcgcttccggtgtgatgaacacgaaaaccaaaggtaaggtctcactcaacctggaaatcgaaccgtttgatgagaaccgtgtgaaaatcaaacataaactctcatatgtccgcccgactaaccgcgggaaaatttccgaagaagacaccaccgaaacgccgatgtatgtcaatcgcggtggtcgcctgactattctgcaggaagaccagggacaattactgactcttgccggtgaacctgacggaaaactccgcgcaacaggtcgttaa

SEQ ID NO: 4427 - DNA, 825 bp, Escherichia coli
atgtctcagaacttagacgcaaccgcaattaatcaaatccatgcccttatttctgctcagggtgttaatgaaattatcagtaagattggtgccgatgctgtggcattgcctgagaatttccgcattcatgatctggaaaaatttaatttaaatcgcttccgtttccgtggtgcgctttccactgccagcatcgatgactttacccgttattctaaagatcttgcagatgaaggcacccgctgctttatcgatgccgataatatgcgtgccgtcagtgtgcttaacctgggtaccattgatgagccaggtcacgcagataacactgccactatcaaactgaaaaagacagcaccgttctctgctctgttgtctgttaacggcgagcgtaactcccagaagtcactggcagaatggatcgaagactgggccgactaccttgtgggctttgatgctaatggtgacgccattcaggcaacaaaagcggctgcggcagtccgtaaaatcacgattgaagcaaaccagaccgctgattttgaagataatgacttcagcggcaaacgctccctgatggaatctgtcgaagcgaagacaaaagacattatgccagtggcatttgaatttaaatgcgttccgtttgaaggcctgaaagaacgtccgtttaaattacgcctcagcattatcactggcgatcgtcctgtactggttctgcgcattattcagctggaagcagtgcaggaagaaatggctaacgaatttcgtgatctgcttgttgagaaattcaaagacagcaaagtagaaacctttattggtacttttaccgcctga

SEQ ID NO: 4428 - DNA, 537 bp, Escherichia coli
atgtcatttattaaaactttttccgggaagcatttttattatgacaagataaataaagacgacatcgtgattaacgatatcgcggtttccctttcaaatatctgtcgctttgcaggacatctttcacacttctacagtgtcgcccagcatgcagtgctttgcagccaactggtgccgcaggaatttgcttttgaagcgttaatgcatgatgcaacagaagcgtattgccaggacatccccgcaccactgaaacgacttcttcctgactataaacggatggaagaaaaaatagacgccgtaatccgtgagaaatacgggttacctcctgttatgagcacgccagtgaaatatgccgatctcattatgctggcaaccgaacgccgcgatctcggacttgatgatggctctttctggcctgtactggaaggtatcccggcaacagagatgttcaaagttattccactgtcgccaggtcatgcctacgggatgtttatggaacgttttaacgagttatcggagttacgcaaatgcgcatga

SEQ ID NO: 4429 - DNA, 363 bp, Escherichia coli
atgcgcatgaatgttttcgaaatggaagggtttcttcgcgggaaatgtgtaccgcgagatctgaaagtgaacgaaacaaatgctgagtacctagtacgtaaattcgacgcgcttgaagctaaatgtgctgcactggaaaacaaaataataccagtgtcagctgaattgccacctgcaaatgaaagtgttctgttatttgatgctaacggagaaggctggctgattggctggcgttctctctggtacacctggggacaaaaggaaaccggagaatggcagtggacatttcaggtcggggatcttgaaaacgtcaatatcactcactgggcagtaataccaaaggcaccggaggcaggggcataa

SEQ ID NO: 4430 - DNA, 621 bp, Escherichia coli
atgaccacatttaccgacaaagaactgattaaagaaatcaaagagcgcataggcagtctggatgtgcgagacaatattgagcgccgtacttatgaaattgctttggtatcgctggaagcagaaccggtggcatggctgcattcagacaatggcttaggtattccggcaataacacggagtaaaaacattgctgacagctggttatcaaagggctggtatgttcagccgctatatatagccaagccagagccggtggtgccagatgttcgtccatctttaaataatggcatagtcggttttgatgaaggctggaacgcctgccgcgccgccatgcttcatagtgccgaaactgtaagccagacttacaagttgaacgagctgtcgggcaactctccggtaactccggatggttggataagctgtagtgagcgaatgccgaacgataaacagtatgtttggtgttgggggaagtcttacggctggactgagtgcgataccttcgaagggtattacgattggtcgagaaacaaatggtgggcaattactgacgatggggaagaaccggcatcgaaagtaacccactggatgccgctaccggaaccgccgcaggaggtgaagtaa

SEQ ID NO: 4431 - DNA, 957 bp, Escherichia coli
atgattaatgaactacgttcagtgaccacctttatccggactgttgagctgggaagcctgagtaaagctgctgaagcccagcaaatatcacctcaggcggcgagtaaggccttaaagcaactcgaaagttctctgggcgtgaggctgtttcaccgtacaacacggtgtatgtcgctcactgaggaagggcaacgttttctcgaagcagccaaaccagcactgaccgggttacagcaggcttttgcttctgtccggcagacgcgggaggggttttccgggccattgcgcatagtggctccgcgttctgttgtacagaatattattcaccctgtgctgattgaatattgtcggctttacccggaagttcagcctgatgtccagcttgatgacggggtggataactgggttgagaagcgtgtggatgttggttttcggattgctgtttcaccgcaggatgggctgattgccagacgcctgtttccgttgcaactgattatatgcgcatcgcctgcgtatcttcgcaaatatggtatgccgaaatcactgcatgacctgagtaatcaccgctgtaatacatttcgacatgccgcaaccgggcgattacttccctggactgtgaaggaaggagaggacatacaggagcactatgttaagcctgccatgtcgaccaatgatgagatgctggaattacatgccgtccttgccggagaagttattgctcaggttgcagcaccgacagcagcgcaatacatacgatcaggtcagcttgtgccactgttactggagaatatcgctgatgtccacagtctgttcctctattatgggagccgggtcgctctgccacttcgtgttcgccgttttattgaccttgctgttgagcgcctgggcagtagaaagggctttgttttttcctcagaagaactgagacaggcacatattgaaggtattgcaatgtaa

SEQ ID NO: 4432 - DNA, 1149 bp, Escherichia coli
atggataatttcagtttttataacccgacccgaattgaatttggtgcagacaaagaaaagctgatcggccagatcctggcagagcagaaagtcagtaaagttctgctggcgtttggcagtgaccgcatcaagcgagatggtttgttcagcactatcagcgacagcctgacaaagcacggcattcagtatgtagagtttggcgggatagtcagcaacccactgatttctaaggtcagagaaggtattcagctggcacgtgctcaccaggttgatgccattttaagcgtgggcggcggttctgtgctggatagtgcgaaatctgtcgcggcaggcacactttatgataacgacgtctgggatttgtttatcggtaaaggacaaatcgaagcggccttacccgtgttttctgttctgactcttgcggcgaccggcagtgagatgaacggtggggccgttgtcaccaatgacgccacgctggaaaaatttgctctgcattccgtgcatacgtttccgaaagtctccgttgtgaacccggcactgatgcagacggtctcccgggactatcttgtctattcggcagcggacattatcgcccattccattgaaggctatttcacagcagcggtgcagccgaaaatccagtcacgtctggttgaatcggttatcgcaacggtcatggaaacgacggaaatgttgctggcagatgcgggtgattacaacgcccgggcggaatttgcatgggcagcaacgctggcacttaatggcctgacctatgccggaacgtcaggattcagctaccctaatcacatgattgagcattctctgtcagccctctttaatgttccccatggtgcagggttatccgttgtgatgcctgcatggatgaagtggtaccacagccagaatccttctcagtttgagcgttttgcgcagcatctgttcggtttgaaaactgctgaacaaggcatcctggcacttgaaaaatggtttgataaaattggtaccccaactcgtctgtcacaactggggataacggaggcagactttccccgtatcctggaaaacctggaagggaatacccgctggttcgggctggctgagacctacaccccggatgtgttaaccacaatccttaaactcgcattgtag

SEQ ID NO: 4433 - DNA, 828 bp, Escherichia coli
atgaaagagatcattgtggtcattggaagtggctcaattgcgcaggcgattgcgcgcagagtcagtgtgggtaagcatattttactggctgatattaaggctgaaagtgcacagtcagccgaagaaattctgtcaaaagcaggctttacggtcagtaccgctgccgttgatgttagttcccgacagtcagtccagaacctggtccgcacggccaccgagctgggggacataaaaggcgtcatccatacagcggggctctccccctcacaggccaaagcccaggatattcttcgggttgatttatatgggactgccgttgtatttgaagaatttggtaaggttattgtccccggaggctccgctgtggtgatcggttcacaatccagtcatcgtctgaatgttgatgccctgacccagtcacaggccgatgcattagccacgctaacagctgaggcattactggacttgccgttcgttaaagaaattgatgacagcctctacgcctatcaaatatccaaacgtggtaacgcgctgcgcgtgatggcggaagccgtgaaatggggtaaacgcggagcgcgcattaactgtatcagtgcagggattattttcacccctctggcctatgacgaattaacgagtccggaacgtggagagttttacaggaatatgcttgaaaaatcgccagccggacgaggtggaaccccggatgaaataggtgcattagccgaattccttttcgggccagccgggacgtatatcagcggaagtgacattctgattgatggcggcgtgacggcctcttataaatacggggaactcaggccataa

SEQ ID NO: 4434 - DNA, 1224 bp, Escherichia coli
atggcgctgtctgatgcgtggttgcgttcagtcgttggaaaggaacgtgataaggttttggttaaatccgatcgtgatggtctgtctgtcagagtatcaccgaaaggtcgcgtagtgttccaatatcgttatcaatgggcagggaaaggtgagcgtcttgatatcggaacttacccggcaactggattaaaagaggccagagaagaagttatccgtctccgtggtgaactcgagtcaaaccgcaatccgcgattggtcaagcagactgaaaaacgaaaagctactgaagccatgacgatagagtctgtgatccgtgcctggtatgaagcatattgtgtaaaaaataaaaaaggttctgaacagatactccgctcgtttgagctgcacctgttctctaaaatcgggaatatccctcacgatgcagctacattgcatgattggttagaagtcctggagcctcttagcactaagactccagcaatagcagaccgattgctaattaacgcaaagcaggcccatgtctgggcgtataagagaaagctaattgaaactcgcccgctgtcggatatcacgggtaaagatatggatatccgtaaaggtcagaagaaacggtttctgacacatgatgaaattaaaatcctttatgctgcgatcgatggttctcgaatggttcctaaataccgggccttcattaaactattgctgcattttggctgccgtagttcagagttaattactgctagggtagacgattttgatttcattaataaggtatggactgtaccaccagaacgacataagactggggagataacaggcgaaccgctaaagcggcccattattgaaccggttgaagagcttataaagtacgctatctctatgaacaatggttccgatatgctttttactaaggaaggaagcagggaacccgttggtcggacatcattgcagtcactgccttacaatttaatgcagtacgcatggcggcgtttggggtatcaattccctcattggtctcttcatgatttgaggcgaacagcacgaacaaacttttctgatcttactgcgcctcatatagcagaaataatgctaggtcataaactgccaggggtatggcagatttatgataagagcgattatctagaagaacagcgtaaagcatatcaggcatggtgggagagagttgaatcgatcgttacttgtactggttcagacagcaactga

SEQ ID NO: 4435 - DNA, 678 bp, Escherichia coli
atgaagtgggactggattttctttgatgccgatgaaacgctgtttacctttgactcattcaccggcctgcagcggatgtttcttgattacagcgtcacctttaccgctgaagattttcaggactatcaggccgttaacaagccactgtgggtggattatcaaaacggcgcgatcacttcattacagcttcagcacgggcggtttgagagctgggccgaacggctgaacgtcgaaccgggtaaactcaacgaggcctttattaatgcgatggcggaaatctgtacgccgttgccgggggcggtttccctgcttaacgccattcgtggcaacgccaaaatcggcatcatcaccaacggctttagcgccttgcaacaggtacgtctggaacgcacgggcctgcgtgattacttcgatttgctggtgatttccgaagaagttggcgttgccaaaccgaataagaaaatttttgattatgcgctggaacaagcgggcaatcctgaccgttcacgcgtgctgatggttggtgacactgccgagtccgatattctcggtggcatcaacgccgggcttgcgacctgctggctgaatgcgcacaatcgcgagcaaccagaaggcatcgcgcccacctggaccgtttcttcgttgcacgaactggagcagctcctgtgtaaacactga

SEQ ID NO: 4436 - DNA, 447 bp, Escherichia coli
atgaacacgatttcttccctcgaaacgactgatttaccagcggcttaccacattgaacaacgcgcccacgcctttccgtggagtgaaaaaacctttgccagcaaccagggcgagcgttatctcaactttcagttaacgcaaaacggcaaaatggcggcgtttgcgattacgcaagtggtgctggatgaagctacattgttcaatattgcggtcgatcctgactatcagcgtcagggattgggaagggcgctgctggaacatctgatcgacgaactggaaaaacgcggcgtggcgacgctatggctggaagtccgtgcctcaaatgctgccgccattgccctgtacgaaagtttaggctttaacgaggcgacgattcgccgcaattactaccccaccacggacggtcgcgaagacgccatcatcatggcgttaccaatcagtatgtaa

SEQ ID NO: 4437 - DNA, 414 bp, Escherichia coli
atgacatcccgacgagactggcagttacagcaactgggcattacccagtggtcgctgcgtcgccctggcgcgttgcagggggagattgccattgcgatcccgccacacgtccgtctggtgatggtggcaaacgatcttcccgccctgaccgatcctctggtgagcgatgttctgcgtgcgttaaccgtcagccccgatcaagtgctgcaactgacgccagaaaaaatcgcgatgctgccgcaaggcagtcgctgcaacagctggcggttgggtactgacgaaccgctatcactggaaggcgctcaggtggcatcaccggcgctcaccgaattacgggcaaacccaacggcacgcgccgcgttatggcaacaaatttgcacatatgaacacgatttcttccctcgaaacgactga

SEQ ID NO: 4438 - DNA, 1032 bp, Escherichia coli
atgtctgcatttaccccggcaagtgaagtcttgctgcgtcacagtgatgatttcgaacaaagccgtattctgtttgccggagacttacaggatgacctgcccgcgcgtttagataccgcgaccagccgtgctcatacccagcaattccaccactggcaggtgttaagccgccagatgggggataacgcccgttttagcctggtcgccacggcagatgacgtcgcagattgcgatacgctgatctactactggccgaagaacaaaccggaagcccagttccagttgatgaatttactttctctgcttccggtgggcacggatatttttgtcgttggcgagaaccgcagcggcgtgcgcagcgccgagcagatgctggccgattatgcaccgttgaataaggtagacagcgcccgtcgctgcggcctctattttggtcgtctggaaaagcagccggtatttgatgccaataaattctggggcgaatacagcgtcgatggcttgacggtcaaaacgctgccgggcgtgtttagccgcgacggtctggatgtcggcagtcagttgctgctctcgacgctaactccacacacgaaaggtaaagtgctggatgtcggctgcggcgcgggagtgctttccgttgcttttgcgcgccattcaccgaagatccgcctcactctgtgtgatgtttctgcaccagcggtagaagccagtcgcgcaacacttgcgaccaacggtgttgaaggtgaagtctttgccagtaacgtcttttccgaggtgaaaggtcgctttgatatgataatctccaacccgccgttccacgatgggatgcaaaccagcctggatgccgcgcaaacgctgattcgcggcgcggtgcgtcatctgaacagcggcggcgagttgcgaattgtagcgaacgccttcctgccttacccggacgtgctggatgagacatttggtttccacgaagtgattgcgcaaaccgggcgcttcaaggtgtatcgcgccattatgacccgccaggcgaagaaaggttga

SEQ ID NO: 4439 - DNA, 309 bp, Escherichia coli
gtgtgcctgaaaggaaaaacgctgggcgaactggtgcgcgaccggatggcagcgtttccggcaagcggtgagatcaacagcaaactggcgcaacccgttgaggcgattaaccgcgtcgaacagcattttagccgtgaggcgctggcggtggatcgtaccgatggcatcagtatgacctttgccgactggcgttttaacctgcgctcctccaacaccgaaccggtggtgcggttgaatgtggaatcgcgcggtgatgtgccgctgatggaagcgcgaacgcgaactctgctgacgttgctgaacgagtaa

SEQ ID NO: 4440 - DNA, 1395 bp, Escherichia coli
atgacaaatctaaaaaagcgcgagcgagcgaaaaccaatgcatcgttaatctctatggtgcaacgcttttcagatatcaccatcatgtttgccgggctatggctggtttgcgaagtcagcggactgtcattcctctacatgcacctgttggtggcactgattacgctggtggtgttccagatgctgggcggcatcaccgatttttatcgctcatggcgcggtgttcgggcagcgacagaatttgccctgttgctacaaaactggacgttaagcgtgattttcagcgccggactggtggcgttcaacaatgatttcgacacgcaattgaaaatctggctggcgtggtatgggctgaccagcatcggactggtggtttgccgttcatgtattcgtattggggcgggctggctgcgtaatcatggctataacaagcgcatggtcgcggtggcgggggatttagccgccggacaaatgctgatggagagcttccgtaatcagccgtggttagggtttgaagtggtgggcgtttaccacgacccgaaaccgggtggcgtttctaacgactgggcgggcaatctgcaacaactggtcgaggatgcgaaagcgggcaagattcataacgtctatatcgcgatgcagatgtgcgacggcgcgcgagtgaaaaaactggtccatcaactggcggacaccacctgttcggtgctgctgatccccgatgtctttaccttcaacattctccattcacgtctcgaagagatgaacggcgtaccggtggtgccgctgtatgacacgccgctttccggggttaaccgcctgctcaaacgtgcagaagacattgtgctggcgacgctgatcctgctgctgatctccccggtgctgtgctgcattgcgctggcggtgaaactgagctcaccggggccggttattttccgccagactcgctacggcatggatggcaagccaatcaaagtgtggaagttccgttctatgaaagtgatggagaacgacaaagtggtgacccaggcgacgcagaacgatccgcgcgtcaccaaagtggggaactttctgcgccgcacctcgctggacgaattgccgcagtttatcaatgtgttgactggcgggatgtcgattgtcggtccacgtccgcatgcggtggcgcataacgaacagtatcgccagctcattgaaggctacatgctgcgccataaagtgaaaccgggcattaccggctgggcgcagattaacggctggcgcggcgaaaccgacacgctggagaaaatggaaaaacgcgtcgagttcgaccttgagtacatccgcgaatggagcgtctggttcgatatcaaaatcgttttcctgacggtattcaagggcttcgttaacaaagcggcatattga

SEQ ID NO: 4441 - DNA, 1479 bp, Escherichia coli
atgagcttacgtgaaaaaaccatcagcggcgcgaagtggtcggcgattgccacggtgatcatcatcggcctcggtctggtgcaaatgactgtgctggcgcggattatcgacaaccaccagttcggcctgctgactgtgtcgctggtgatcatcgcgctggcagatacactttctgacttcggtatcgctaactcgattattcagcgaaaagaaatcagccaccttgaactcactacgctgtactggctgaacgtcgggctggggatcgtggtgtgcgtggcggtgtttttgttgagtgatctcatcggcgacttgctgaataacccggacctggcaccgttgattaaaacattgtcgctggcgtttgtggtgatcccccacgtgcaacagttccgcgcgttgatgcaaaaggagctggagttcaacaaaatcggcatgatcgaaaccagcgcggtgctggcgggcttcacttttacggtggttagcgcccatttctggccgctggcgatgaccgcgattctcggttatctggtcaatagtgtggtgagaacgctgctgtttggctactttggccgcaaaatttatcgccccggtctgcatttctcgctggtgtcggtggcaccgaacttacgctttggtgcctggctgacggcggacagcatcatcaactatctcaacaccaacctttcaacgctggtgctggcgcgtattctcggcgctggcgtggctgggggatacaacctggcgtacaacgtggccgttgtgccaccgatgaagctgaacccgatcatcacccgcgtgttgtttccggcgttcgccaaaattcaggacgatacagaaaagctgcgcgtcaacttctacaagctgctgtcggtagtggggattatcaactttccggcgctgctcgggctgatggtggtgtcgaataactttgtaccgctggtatttggcgaaaagtggagcagcattattccggtgctgcaattgctgtgtattgtggggctactgcgctccgtgggtaacccgattggttcgctgctgatggcgaaagcgcgggtcgatatcagctttaaattcaacgtattcaaaacctttctgtttattccggcaatcatcattggtgggcagatggcgggcgcaatcggcgtcacgcttggcttcctgctggtgcagattatcaacaccattctgagctatttcgtgatgattaaaccggtgctcggttccagttatcgccagtacatcctgagtttgtggctgccgttttatctctcgctgccgacgctggtggtcagttatgcgctgggcattgtgctgaaagggcaactggcgctggggatgctgctggcggtgcaaatagccgcgggcgtgctggcgtttgtggtgatgattgtgctgtcgcgccatccgctggtggtggaagtgaagcgtcagttttgtcgcagcgaaaaaatgaaaatgcttttacgggcggggtga

SEQ ID NO: 4442 - DNA, 1281 bp, Escherichia coli
atgaaattactgattctgggcaaccacacttgcggcaatcgtggcgacagcgccatcttgcgcggcttacttgatgccatcaacatcctcaatccacacgcagaagtggacgtgatgagccgctatccggtcagttcttcctggctgctcaaccgcccggtaatgggcgatccgctgttcctgcaaatgaaacaacacaacagcgcggcgggcgttgtcgggcgtgttaaaaaagtcctccgtcgccgctaccagcaccaggtattgctctcacgcgtcaccgacactggcaagctgcgtaatatcgccatcgcccagggattcactgacttcgtgcgactgctgtcaggttacgacgccattattcaggtcggcggatcgttttttgtcgatctctacggcgtgccgcagtttgaacatgcgctttgcactttcatggcgaaaaagccgctgtttatgattggtcacagcgtcggccccttccaggatgagcaatttaaccaactggcgaactatgtctttggtcactgcgacgcgctgatcctgcgcgaatcggtcagccttgatttgatgaaacgcagcaatatcaccactgcaaaagtggaacatggcgtcgataccgcgtggctggtcgatcaccacattgaagacttcaccgccagctatgctgttcaacactggctggatgttgccgcacaacagaaaacggtggcaattaccctgcgcgaactggcaccgttcgacaaacgtctcggcaccactcaacaagcgtatgaaaaagcctttgccggggtggtcaatcgcattctcgatgaagggtatcaggtgattgcgctctccacctgtacgggcatcgacagttataacaaagacgaccgcatggtggcgctcaatctgcgccagcacatcagcgatcctgcccgttatcacgtagtgatggatgaactcaacgatctggaaatgggcaaaattctgggggcctgtgaacttaccgtcggtacgcgcctgcactctgctattatctcgatgaactttgccactccggcgattgccatcaactacgaacataaatccgccgggatcatgcaacaactggggctaccagaaatggcgattgatatccgtcatttactggacggcagcctgcaagcgatggttgcggataccttaggccagcttccggcgctgaatgcacgacttaacgaagccgtcagtcgcgaacgtcagacgggaatgcagatggtgcagtctgtgcttgagcgcatcggggaggtgaaatga

SEQ ID NO: 4443 - DNA, 1221 bp, Escherichia coli
atgaaggttggcttctttttactgaaattcccgctgtcttcagaaaccttcgtccttaaccaaattaccgcgtttattgatatgggatttgaggtggagattctcgcgctgcaaaaaggcgacacccagaacacccacgcggcatggacgaaatacaaccttgccgccagaacccgctggttacaggacgaacctacgggcaaagtggcgaaactgcgtcaccgcgccagccagaccttacgcggcattcatcgtaaaaatacctggcatgcgctcaacctcaaacgctatggtgccgagtcgcggaacctgattttgtctgccatttgtggtcaggtcgcaacaccgtttcgcgccgatgtgttcatcgctcattttggccctgcgggggtaaccgcagcaaaactacgcgaactgggtgtcattcgcggcaaaattgccaccatcttccacggtattgatatctccagtcgggaagtgctcaaccactacactcccgaatatcagcaactgttccgccgtggcgacctgatgctaccgatcagcgatctgtgggccggaaggctgcaaaaaatgggctgcccgagggaaaaaattgccgtatcgcgcatgggcgtggacatgacgcgctttagcccgcgtccggtgaaagcgcctgcaacgccgctggaaatcatttccgtcgcacgcttaaccgagaaaaaaggcctgcatgtggcgattgaagcctgccgtcagttgaaagagcagggcgtggcatttcgctatcgcatcctcggcattggcccgtgggaacgacgcctgcgcaccctcatcgaacaatatcaactggaagatgtggtagagatgccgggctttaaaccgagccacgaagtgaaagcgatgctagacgacgcggatgttttcctgctgccttcggtaacgggtgcggacggcgatatggaaggcattccggtggcgctaatggaagcgatggcggtcggcattccggtggtttctactctgcatagcggaattcctgaactggtggaggccgataaatccggctggttggtgcctgagaacgatgctcgcgcactggcgcaacgactggcggcgtttagccaactggacaccgacgaactggctccggttgtcaaacgtgcgcgcgaaaaagtcgaacacgattttaaccagcaggtgatcaatcgagaactcgccagcttgctgcaggctttatag

SEQ ID NO: 4444 - DNA, 1395 bp, Escherichia coli
atgccatttaaaaaactctcccgacgcaccttcctgacggcaagctcggcgcttgccttcctccatacccctttcgcccgtgcaattcccgctcaacaaagcgttaacattaacgactacagccctcacgactggatcgcctcatttaaacaagccttcagcgaagggcaaacggtcgtcgtgcctgccggattggtttgtgacaatatcaacactggcatcttcattccttctggcaaaacgttacacatcctcggaagcctgcgcggcaacggcagagggcgatttgtcttacaggacggcagccaggtgacaggggaggagggcggcagtatgcataacatcaccctggatgtgcgcggctctgactgcaccatcaaagggctggcgatgagcggctttggtccggtaacgcagatttatatcggcggcaaaaacaaacgggtcatgcacaacctgaccatcgataacctgaccgttagccacgctaattacgccatcttacgccagggatttcataaccagataatcggtgccaacatcaccaactgtaagttcagcgacttacagggcgacgctattgaatggaacgtggcgattaacgacagtgatattttgatatccgaccatctcattgagcgcattaactgtaccaacggcaaaatcaactggggcatcggcataggccttgcgggaagtacctacgataataattatccggaaaaccaggcagtgaaaaactttgtcgtggcgaatatcacgggatcggattgtcggcaactgatccatgttgaaaatggtaaacattttgttatccgtaatatcaaagctcgtaatatcacgccggatttcagtaagaaagcaggtattgataacgccacagttgctatttatggttgtgacaactttgtgattgataatattgaaatgattaatagtgccgggatgttaatcggctatggggtaattaaaggcaaatatctctcgataccgcagaatttccgagtgaatgatattcaactggataatactcatcttgcttataaattgcgcggcatccaaatctccgccgggaatgctgtctcctttgtggcgctgactaacattgagatgaagcgtgcgtcgctggagttacacaacaaaccgcaacatctttttatgcgcaatatcaatgtgatgcaggaatcctcagttggacccgcattgagcatgaactttgacatgcgcaaagacgttcgaggcgtttttatggcaaagcgtaaaacgctgctttcactcacgaatattcatgcagtgaatgaaaaagggcaaagctccgtcgatatcgacaggattaatcaccatattgttaatgtggaaaagattaactttagattgccggaacggagggagtag

SEQ ID NO: 4445 - DNA, 894 bp, Escherichia coli
atgacgaatttaaaagcagttattcctgtagcgggtcttgggatgcatatgttgcctgccactaaggcgattcctaaagagatgctaccgatcgtcgacaagccaatgattcagtacattgttgacgagattgtggctgcagggatcaaagaaatcctcctggtaactcacgcgtccaaaaacgcggtcgaaaaccacttcgacacctcttatgaattagaatctcttcttgaactgcgcgtgaagcgtcaactgctggcggaagtacagtccatctgtccgccgggcgtgaccattatgaacgtgcgtcagggggaacctttaggtctgggccactcgattttgtgtgctcgaccagccattggcgataacccgtttgtcgttgtgctgccggatgttgttatcgacgacgccagtgccgatccgctgcgttacaacctggccgcaatgattgcgcgctttaacgaaactggccgcagccaggttctggcaaaacgcatgccgggcgatctctctgaatactccgtcatccagactaaagaaccgcttgatcgcgaaggtaaagtcagccgcattgttgaatttatcgaaaaaccggatcagccgcagacgctggactcagacatcatggccgttggtcgctatgtgctttctgccgatatttggccggaacttgaacgcactcagcctggtgcatgggggcgtattcagctgactgatgctattgccgaactggcgaaaaaacagtccgttgatgcaatgctgatgactggggacagttacgactgcggtaaaaaaatgggctatatgcaggcgtttgtgaagtatggactgcgtaacctaaaagaaggggcgaagttccggaaagggattgagaagctgttaagcgaataa

SEQ ID NO: 4446 - DNA, 1086 bp, Escherichia coli
gtgaaaatacttgttactggtggcgcaggatttattggttctgctgtagttcgtcacattataaataatacgcaggatagtgttgttaatgtcgataaattaacgtacgccggaaacctggaatcacttgctgatgtttctgattcggaacgctatgtttttgtgcatgcggatatttgcgatgcagctgtaatggcacggatttttgctcagcatcagccggatgcagtgatgcacttggctgctgaaagccatgttgaccgttcaattacaggtcctgcggcatttattgaaaccaatattgttggtacttatgttcttttggaagccgctcgcaattactggtctgctcttgatagcgacaagaaaaatagtttccgttttcatcatatttctactgacgaagtttatggtgatttgcctcatccagatgaagtaaataatacaggagaattacccttatttactgagacgacagcttacgcgccaagcagcccttattccgcatccaaagcatccagcgatcatttagtccgcgcgtggaaacgtacctatggtttaccgaccattgtgactaattgctctaacaattatggtccttatcatttcccggaaaaacttattccattggttattctcaatgctctggaaggtaaagcattacctatttatggtaaaggggatcaaattcgcgactggttgtatgttgaagatcatgcgcgtgcgttatataccgtcgtaaccgaaggtaaagcgggtgaaacttataacattggtgggcacaacgaaaagaaaaacattgatgtagtgctcactatttgtgatttgctggatgagattgtaccgaaagagaaatcttatcgtgagcaaatcacttatgttgccgatcgtccgggacacgatcgccgttatgccattgatgctgagaagattggtcgcgaattgggatggaaaccacaggaaacgtttgagagcgggattcggaagacagtggaatggtacctgtccaatacaaaatgggttgataatgtgaaaagtggtgtctatcaatcgtggattgaacagaactatgagggccgccagtaa

SEQ ID NO: 4447 - DNA, 900 bp, Escherichia coli
atgaatatcctcctttttggcaaaacagggcaggtaggttgggaactacagcgtgctctggcacctttgggtaatttgattgctcttgatgttcactctactgattattgcggtgattttagtaatcctgacggtgtagctgaaaccataagaagcattcggcctgatattattgtcaacgcagccgctcacaccgcagtagacaaagcagaatcagaaccggagtttgcacaattacttaacgcaacaagtgtcgaagcgattgcgaaagcagcatatgaagtcggcgcctgggttattcactactctactgactacgtatttccggggaccggtgaaataccatggcaggaggaagatgcaaccgcaccgctaaatgtttacggtgaaaccaagttagcaggagaaaaagcattacaagagcattgtgcgaagcaccttattttccggaccagctgggtctatgcaggtaaaggaaataacttcgccaaaacaatgttgcgtctggcaaaagagcgtgaagaattagctgttattaatgatcagtttggtgcgccaactggcgcagagttgctggctgattgtacggcacatgccattcgtgtggcactgaataaaccggaagttgcaggcttgtaccatctggtagccagtggtaccacaacctggtacgattatgctgcgctggtttttgaagaggcgcgcaaagcagacattccccttgcactcaacaagctcaacgcagtatcaacaactgcctatcctacaccagctcgtcgtccacataactctcgccttaatacagaaaaatttcagcagaactttgcgcttgtcttgcctgactggcaggttggcgtgaaacgcatgctcaacgaattatttacgactacagcaatttaa

SEQ ID NO: 4448 - DNA, 879 bp, Escherichia coli
atgaaaacgcgtaagggtattattttagcgggtggttctggtactcgtctttatcctgtgactatggcagtcagtaaacagctgctaccgatttatgataaaccgatgatctattatccgctctctacactgatgttggcgggtattcgcgatattttgattattagtacgccacaggatactcctcgttttcaacaactgctgggtgacggtagccagtgggggctaaatcttcagtacaaagtgcaaccgactccagatgggcttgcgcaggcatttatcatcggtgaagagtttattggtggtgatgattgtgctttgattcttggtgataatatcttttacggtcacgatctgccgaagttaatggatgccgctgttaacaaagaaagtggtgcaacggtatttgcctatcacgtaaatgatcctgaacgctatggtgtcgttgagtttgataaaaacggtactgcaatcagcctggaagaaaaaccgttacaaccaaaaagtaattatgcggtaaccgggctttatttctatgataactacgttgtggaaatggcgaaaaatcttaagccttctgcccgcggtgaactggaaattaccgatattaaccgtatctatatggaacaggggcatttatctgttgccatgatgggacgtggatatgcctggctggacacggggacacatcaaagtcttattgaagcaagcaacttcattgccaccattgaagagcgccagggcttgaaagtttcctgcccggaagaaattgcttaccgtaaagggtttattgatgctgagcaggtgaaagtattagctaaaccgctgaaaaaaaatgcttatggtcagtatctgctaaaaatgattaaaggttattaa

SEQ ID NO: 4449 - DNA, 552 bp, Escherichia coli
atgaatgttattaaaacagaaattccagatgtactgatttttgaaccgaaagtttttggtgatgagcgtggtttctttatggaaagctttaatcagaaagttttcgaagaggctgtagggcggaaggttgaatttgttcaggataatcattctaaatcgtgtaaaggtgtacttagaggtttacactttcagcttcctccctttgagcaggcaaaattagtaaggtgtatagttggcgaggtatttgatgttgcagtagacattagacctaattctgaaacatttggttcatgggttggagtaactctttcgtcagaaaataaaaggcagctatggattccagaaggattcgcccatggttttttaactttaagtgatattgcagagtttgtttataaaactaacaactattattctttaaatcatgaaaggggagtcatttggaacgatgaggaaattaacattgcctggccctctcaatcagagaagattctgtcacagaaagatattaatttaccatcatttagatttgttcaaatgtttagcaagtag

SEQ ID NO: 4450 - DNA, 1104 bp, Escherichia coli
atgactaaaatagttgtggtttctacagctccaatattcccgacaaataatgggtacaaaagttctgtattaggaagaattgatgagttattaaatgaggataatgaggtcgttttgattgaaataaaccttgaaaatgttacggaaaagaaagatgaattaataccaacaagatttaataatattcaaagatatgaagtaaaaaaaatatctagatcatttattgccgagttacaaatattatttgatatcagaactcggtatgaacaattattttcttctgctgacattagagataacataaaaaagataattgatttagaaaaaccttctattattattgctgagtctatatgggcgttgcaagcattgcctattgaaattagtgcgagaatacactgtgttattcatgatgtggcaactgatttctttaaagaaatgtttgtatctcataatgaggttgtacgaaaaattttgttttttaatgattacctaaagttgaaaattactgaagaaaatattatcaaacgtttgagagttgagcaatttatctttctgacagaagaagataaatgttggtataaaacaagatacaatattgatgagggttgttgttccttagcgagcaatcatctttatgtagaaaagattaagagaactatcaatttccaaacccctttcctgcttattcccggtagcattgaattttcacaaaatttttacggcttaaattggtttataaaaaatatatatcctggattaaataggaaaataagaatagttgtaacaggaaaggcatcagataaaaaaataaagatgttaaactgtggagaggaaattacctttacgggagagcttgacttttccacatataataaacttagctcaacatgcttgtgtgttattgcaccgattacaacgggcactggaattaaaataaaaatattagaagctgtacaaaaaggtattcctgtacttacaacaaaatttgcttcaaaaggaatatgttccgatttatgtttttattgcgaggaggatactgacacaaactttgtcaatttaattaacagttttcttgaaacgacattaagagtccaagaatga

SEQ ID NO: 4451 - DNA, 1074 bp, Escherichia coli
atgaatttattgcttttttcagtccttgcgtttggtttaatattggctttggcccataataataaaagtggagatattaacgcatacttaatgttttttctcgtggtcctaatggtattaatatcagggctgcgtatgaatgatagtgattatatcgaatacaggaaaatgtataatgaagtgcctattttatgtgactttagtctcgcatctataagagatatacatggggaggtaggctatctattcttatcatcaatctttaaaactttatgcttgccatttcaattatttcttttttttattgcttttttatcactcctgcttacatatttttcattcagaaaaataagtttaataccgatactatcgttagttttttatttaagccatgcttttatagttagagatttgattcaaattagggcaggattagctgttagcatatcattatattcaataattaaatttaaaggaaataaaagtataattacaggagttttatttgcttctttgattcattctggggcgcttattattgctctttgttatccttttttcaaaaaaaaatacataacattaaaaatgatgttgtttttatttttagtgtcaattattttttcttatttgaatgggcttaatttatcgatacaactcttatctcaatatagtttgcttccaactgcaatttcgaattatgttggttgggaagaatatgattatcgggtgagtatatttactaatccggtttttattaaaggtgtttttttaattgtcttaatgcacaaatatgtactttcagatattaaaaatgagaaaattatagtgctttataacttatatgttttaggtgtattagctatggttgcattgagtgggatggctattctttcaggccgtctttcatcctttctgacactaggtgaaagcattttaattgtatatgctctgttctacaaaagaaatacacctctggcgtttctaattttttcttttttaacaattgtgcaattaggatatgatctatttatttctaatgtgcatcctgagcttactctgattatatttgggtga

SEQ ID NO: 4452 - DNA, 810 bp, Escherichia coli
atgttttcttactttctgaatggcgtgaaaatatctactattcacaatagactagatgaggattatatcccattatttggcgcggttaaagggaatgctatatattatcttcatcgttttatattacgaagatttaatcatatcgttgcttgctcagcagcggtccaatcaaaactgaaacaatcgaaagtaaaaactaaaataaccaccatccagaatgggattgatataactaggtttaagacacttgagtctgataaaaaaaaattattgagggaaaaacacggatttgatagtgaaaaaagaatatttatatattgtggctcgttatcattaaggaaaaatattgcttacctcttggaacacttagccatcgaagaaaatgatatatttttaattctaggtgatggtgaactttttagatattgtaaggataaatattctaaagatttacggtatatatttatggggaaagttgaatgccctcttgaatattatcaattatcagatatttttgtttccgcttctttatcggaagggctccccttggcactattagaagctgcctctactgggtgctatttatatgttagcgatatagagccccatagagaaattgcatctctattaggagaggaaaatatttctatgtttaaaattaaggatggatcatataattatttgcaacctaaaataaaaaaagctgactataacgctctttctgacgataaactttacaatatatccgataaaaaaatgtcaaatctttatgacaaactttttgtttctttattagagcagaggcactaa

SEQ ID NO: 4453 - DNA, 774 bp, Escherichia coli
atgatttatgtttcggtaatttctcatggtcatttcaaaactcttaaggaattaggagcagtatcaaaattaaataatcacagcagaattaaagttatcatcaaagataatttaggagagagcgagcttttggatttttgtcaggaaaacaaaataacttatttaaggtctaaagagaaaaaaggatttggagagaataataatgaagttttttcctctatatcctccttaattactaaggaagatttttttgtggttatgaatcctgatatatatattgagtgctctgatctattagatgtcgtagatgagtgtggttcagcgaatgttaatctagcaacgataaatttatacagggattttgataaaaaaacatatgataactcagtaaggaaatttccctcggcaattgatttttttatgtcatttttatttaagaaaaatgactgtgtagtaaataagaacaaaataacgaaaccaacatatgttgattgggctgcaggttcttttctaatatttaatgccttcttttattcaaaactcaacggattcaacgaaaagtattttatgtattgcgaagatattgatatatgttggcgagctaaaaaacacttcaatacttcagttttatactatccatgctatgcagcaattcatttggcacaatttaacaatcgtaggatttttagtagacatttcatttggcatataaaaagtattatcctttttttattatataaaaatggtatgctgcgttctagtaagttgctttaa

SEQ ID NO: 4454 - DNA, 540 bp, Escherichia coli
atgttgaaattcagtggtgttaataatatggtggtaattgaagatggagccacttttaaggattctacaattttattaaatagtggaggttatgttcatttaggaaattcaaaatataataacttatcaatattgaataataatatcggtggaaaagtatttattggaaactcatgcattattgataagcagctagatatttatttgaatggcgatagttgttgtaaaataggagatggttgcgttataggtagcgatgttaagatttgttgtcaggacgagcattcccttcttgatagcaatggctacttattaaattcgggccagcctataaatataggggatagggtttggattgggtcacgtgtgatgttgctaaaaggaacacatatttctgatgaatgttatgtgtctgccggttgtattgtggaaaataaattttttacatctaatcagattatatccggggcaccggcaaacaccatatcttctggagtaacctgggcaatgtcatcacccgaaaattataggtgtaaataa

SEQ ID NO: 4455 - DNA, 1248 bp, Escherichia coli
atgcaaggtaatgcactaaccgttttattatccggtaaaaaatatctgctattgcaggggccgatgggaccttttttcaataacgtcgccgaatggttagagtcattaggccgtaacgctgtgaacgttgtattcaacggtggggatcgtttttactgccgctatcgacaatacctggcttactaccaaacgccgaaagagttccccggatggttacgggatctccaccggcaatatgactttgataccatcctctgctttggtgactgccgcccattgcacaaagaagcaaaacgttgggcaaagtcgaaagggatccgctttctggcatttgaggaaggatatttacgcccgcaatttattaccgttgaagaaggcggagtaaacgcatattcatcgctaccgcgcgatccggatttttatcgtaagttaccagatatgcctacgccgcacgttgagaacttaaaaccttcaacgatgaaacgcattggccatgcgatgtggtattacctgatgggctggcattaccgtcatgagttccctcgctaccgccaccataaatcgttttccccctggtatgaggctcgttgctgggttcgtgcatactggcgcaagcaactttacaaggtaacacagcgtaaggtattaccgaggttaatgaacgagttggatcaacgttattatcttgccgttttgcaggtatataacgatagccagattcgtaaccacagcaattataacgatgtgcgtgactatattaatgaagtcatgtactcattttcgcgtaaagcgccgaaagaaagctatttggtgatcaaacatcatccgatggatcgtggtcacagactctatcgaccattaattaagcggctaagtaaggaatatggcttaggtgagcgagtcatttatgtgcacgatctcccgatgccggaattattacgccacgcaaaagcggtggtgacgattaacagtacggcggggatctctgcactgattcataacaaaccactcaaagtgatgggcaatgccctgtacgacatcaaaggcttgacgtatcaagggcatttgcaccagttctggcaggccgattttaaaccggatatgaaactgtttaagaagtttcgggggtatttattggttaagacgcaggttaatgcggtttattatgggagagtaagcattggagaaaaaaataggtatggaagtgattactcctattattcaaagaaaccacatcataatgactaa

SEQ ID NO: 4456 - DNA, 2028 bp, Escherichia coli
atgattggcatttactcgcctggcatctggcgtattccgcatctggagaaatttctggcacaaccgtgccagaaactttctctgctgcgtcctgttccgcaaaacgtcgatgctatcgccgtgtggggacatcgccccagcgcggcgaaaccagccgccatcgctaaagcagcgggaaaacccatcatccgtctggaagatggatttgtgcgttcgctggatcttggcgtcaatggcgcgccgccgctttctctggtggtggatgattgtggcatttactacgatgccagcaagccttcagcattggagaaactggtacaggataaagccggaaatacagctctgataagccaggccagagaagcgatgcacaccatcgtgaccggggatttgtcgaaatataacctggcgcctgcatttgtggctgatgagtcagaacgtgcagacatcgttctggttgtcgatcagacatttaatgacatgtccgtgacgtatggcaatgctggcccgcatgagtttgctgccatgctggaagctgcgatggcggaaaatcctcaagccgaaatttgggtgaaggtgcatccggatgtcctggaaggaaagaaaacaggttatttcgctgatctgcgtgccacgcaacgagtacgtttgattgccgagaatgtcagcccgcagtcgctattgcgacacgtttcccgggtttacgtcgtgacatcccaatacggctttgaagccttgctggcaggaaaaccagtaacatgtttcggccagccctggtatgcaggctggggcttaaccgacgatcgccatccgcagtccgctttgttatctgcccgacgcggttctgccacgctggaagaacttttttccgctgcatacctgcgttactgtcgctatatcgacccgctcacgggggccgcaagcgatctgtttaccgtactgcaatggctgcaattacagcgcaaccatcagcaacagcgtaatggctatttatgggcgccaggcttaacgctgtggaagtcagcgatcctgaaacctttcttgcgtaccgcaacaaacagactgagttattcacgccgttgtactgcggcgacggcttgcgtggtatggggtgtaaagggagagcagcaatggcgagccgaagcgcagcgaaaatcactgccgttatggcgaatggaagatggttttctgcgttcatccggacttggctctgacctgctgccgccgctatcgctggtgctggataaacgcggtatttactatgacgccacgcgccccagcgatctggaagtgctgctgaatcatagccagctaacgctggcgcagaagatgcgagctgaaaaattacgccagcgactggttgaaagcaaactgagtaagtacaacctgggagccgatttctctctaccagccgaagccaaagataaaaaagttatcctggtgccaggtcaggtagaggacgatgcctctattaaaacaggcactgtgtcgattaagagcaaccttgagttattacgcacagtacgcgagcgcaatccgcacgcctacattatttataaaccgcacccggatgtattagtggggaatcgcaagggcgatattccggcagaacagattgctgaactcgctgattatcaggcactggacgcagatattattcaatgcattcagcgcgcagatgaagtgcacaccatgacatcattgtccgggtttgaagcgttattacatggcaagcaagttcattgttacggcctgcccttctatgccggttggggtttaaccgttgatgaacatcactgcccgcgccgcgagcaaaaattaacgttagcagatttgatctatcaggcgttgattgtttatccaacctatatccacccaacacggctacaacctattacggtagaagaagctgcggaatatttaatcaagacgccgcgcaagccgatgtttattacccgaaaaaaagcggggcgggtaatacgctattaccgcaaattaattatgttctgcaaggtcagatttggctaa

SEQ ID NO: 4457 - DNA, 741 bp, Escherichia coli
atgagcaaagctgttattgtcatcccggctcgttatggctcatcgcgcctgccgggtaagccactgctcgatattgttggtaaaccgatgatccagcatgtttacgagcgtgcgttacaggtggcgggcgttgcggaagtttgggtggcaacagacgatcagcgtgttgaaaaggccgtgcaggcatttggcgggaaagccatcatgacgcgcaacgatcatgaatccggcaccgatcggctggtcgaggtgatgcataaagtcgaggcagatatctacattaacctgcagggcgacgaaccaatgattcgcccgcgggatgtagaaacgctgttacaaggaatgcgtgatgaccccgcgttgccagtggcaacgctatgccacgcgatttctgccgaagaagcggctgagccaagcacggtaaaagtggtggtaaatacccgccaggatgcactttatttcagccgttcgccgattccctatccgcgcaatgctgaaaaagcgcgctacctgaaacacgttggtatttacgcttatcgtcgcgatgtgctgcaaaactacagtcagttaccaaggacggcattaagtcaaatcgaggaactggagcagctacggttaatgaacgcggggatcaacatccgtacatttgaggttgccgcaaccggtccgggcgtcgacaccccagcatgccttgaaaaggtgcgtgccctgatggcgcaagaactggctgaaaacgcatga

SEQ ID NO: 4458 - DNA, 1677 bp, Escherichia coli
atgaaattatttaaatcaattttactgattgccgcctgtcacgcggcgcaggccagcgcggccattgatattaacgctgacccaaaccttacaggagccgcgccgcttaccggtattctgaacgggcaacagtcggatacgcaaaacatgagcggcttcgacaataccccgccgccctcaccgccggtggtaatgagccgtatgtttggtgctcaacttttcaacggcaccagcgcggatagcggtgcgacggtaggattcaaccctgactatattctgaatccgggtgatagcattcaggttcgcttgtggggtgcgttcacctttgatggtgcgttacaggttgatcccaaaggtaatattttcctgccgaacgttggtccggtgaaagttgctggcgtcagtaatagtcagctaaatgccctggtcacatccaaagtgaaggaagtataccagtccaacgtcaacgtctacgcctccttattacaggcgcagccagtaaaagtgtacgtgaccggatttgtgcgtaatcctggtctgtatggcggtgtgacgtctgattcgttactcaattatctgatcaaggctggcggcgttgatccagagcgcggaagttacgttgatattgtggtcaagcgcggtaaccgcgtgcgctccaacgtcaacctgtacgacttcctgctgaacggcaaactggggctttcgcagttcgccgatggtgacaccatcatcgtcgggccgcgtcagcatactttcagcgttcagggcgatgtctttaacagctacgactttgagttccgcgaaagcagcattcccgtaacggaagcgttgagctgggcgcgccctaagcctggcgcgactcacattacgattatgcgtaaacaggggctgcaaaaacgcagcgaatactatccgatcagttctgcgccaggccgtatgttgcaaaatggcgataccttaatcgtgagcactgaccgctatgccggcaccattcaggtgcgggttgaaggcgcacactccggtgaacatgccatggtactgccttatggttccactatgcgtgcggttctggaaaaagtccgcccgaacagcatgtcgcagatgaacgcagttcagctttatcgcccatcagtggctcagcgtcagaaagagatgctgaatctctcgctgcaaaagctggaggaagcatcactttctgcccagtcatccaccaaagaagaagccagcctgcgaatgcaggaagcacaactgatcagccgctttgtggcgaaagcacgcaccgttgttccgaaaggtgaagtgatcctcaacgaatccaatattgattctgttctgcttgaagatggcgacgtcatcaatattccggagaaaacatcgctggttatggttcatggcgaggtgctgttcccgaacgcggtgagctggcagaagggtatgaccaccgaggattacatcgagaaatgtggtggcctgacgcagaaatcgggtaacgccagaattatcgtcattcgtcagaacggtgctgccgtcaacgcggaagacgtggattcactcaaaccgggcgatgagattatggttctgccgaaatatgaatcgaaaaatattgaagttacccgtggtatttccaccatcctctatcagctggcggtgggtgcaaaagtgattctgtctttgtaa

SEQ ID NO: 4459 - DNA, 1149 bp, Escherichia coli
atgttgataaaagtgaagtctgccgtatcctggatgcgtgctcgtctgtctgccatctcactggcagatatccaaaaacacctggcgaaaatcatcattctggcaccgatggcggtgctgctgatctatctggctatcttcagccagcctcgctatatgagcgagtcgaaagtcgccattaaacgctcggatgatttaaacagcggcagcctgaattttggtctgcttctgggtgcctctaaccccagttccgcagaagatgcgttgtatctgaaagagtacatcaactcgccggatatgctggcggcgctggataagcaactaaattttcgtgaagcgtttagccacagcgggctcgattttcttaatcatcttagcaaggatgaaaccgcagaaggcttcctgaagtactacaaggaccgtatcaacgtctcgtatgacgataaaaccggattactgaatattcagacgcagggctttagcccggagtttgcgcttaagtttaaccaaaccgtgctgaaagagtcagagcgctttatcaatgagatgtcacatcgcatcgcgcgtgaccagcttgcctttgcagaaacggagatggaaaaggcacgccagcgtctggacgccagcaaagcggaattgctctcttatcaggacaacaacaacgttctggatccacaggcacaggcacaggcggcgagcacgttagtcaatacgctgatgggccagaagatccagatggaagcggatctgcgtaacttgctgacgtatctgcgtgaggacgccccgcaagtagtgagtgcgcgtaatgcgattcagtcattgcaggcacaaatcgatgaagaacaaagcaaaatcactgcgccacagggtgacaagctaaaccgtatggcagtggattttgaagaaatcaaatcaaaagtagagttcaacaccgagctgtacaaactgaccctgacctccattgaaaagacccgtgtagaagcggctcgtaagctcaaggtgctgtcagtgatcagttcgccacagttgccgcaggaatcgtcttttccaaatatcccttatttgatcgcctgctggttactggtgtgctgcctgctgttcggcaccctgaaactgttgctggctgttattgaagatcaccgagactaa

SEQ ID NO: 4460 - DNA, 984 bp, Escherichia coli
atgtctgaaagacatttacctgatgaccagagcagtactatcgatccatatctaattacctctgttcgccagactctggcagaacaaggcgcagcattacaaaacttgtctaaacaactggattccgggcagtaccagcgtgtccttaatttgataatgaactgtaaagggcacgttattctttcgggaatgggtaaatcagggcatgtcggtcgtaaaatgtcagcgacgctggcctctacgggtacgcctagtttctttattcatcctgcagaagctttccatggcgatctgggcatgattacgccttacgatcttctgatccttatttctgccagcggtgaaacggatgaaatcctcaagctagttccttcactgaaaaatttcggcaaccgaattatcgccattaccaataatggaaattccacgctggcgaaaaatgctgatgccgtgctggaactccatatggcgaatgaaacctgcccgaataatcttgcaccaacaacgtctaccacgctgacgatggcgatcggtgatgcgctggcgattgccatgatccaccaacgcaaatttatgccgaatgattttgcgcgctatcacccgggcggttcattaggccgtcgcctgctgacccgcgttgctgatgtcatgcagcatgatgttcctgcggtacagctggatgcgtcatttaaaaccgtgattcaacgtatcaccagcggatgccagggaatggtgatggtagaagacgcagaaggtgggctagcgggcattatcaccgacggtgacctgcgtcgctttatggaaaaagaggattctctgacatccgccacggctgcgcagatgatgacacgtgaaccgctgacgctaccggaagacaccatgatcattgaagcggaagaaaaaatgcaaaagcaccgcgtctcaacgttattggtgaccaacaaggcaaataaagtcactggccttgtgcgcattttcgactaa

SEQ ID NO: 4461 - DNA, 570 bp, Escherichia coli
atgtctgaaatcacagtctcccgtccggaagtggtcaacgagaatacggacgttatctgctccacctcagtcaggtccaggtcactggaatatgataattttccggaaatcagcgaagcgaacattctgagcacatttgaacaactgcaccagaacaaagatgaagtgtttgaacggggagtgatcaacgtcttcaaagggctgagctgggattacaaaaccaactcaccctgtaaatttggcagtaaaattatcgtcaacaatctggtgagatgggaccagtggggatttcatcttatcagtggaatgcaggcagatcgcctggctgacctggaaagaatgttgcatctgctcagcggtaaaccgatccccgacaaccgagggaatatcaccattaatctggatgaccacatacagtccgttcagggtaaaggacgctatgaagatgagatgttcatcattaaatactttaagaagggatctgcacacatcactttcaaaaggctggagctgattgacagaattaacgatataatagccaggcactttccttctgtgctctcagcctga

SEQ ID NO: 4462 - DNA, 198 bp, Escherichia coli
atgaaatcattaaccacggaaaccgcactggatattctgattgcgtggctgcaggacaatatcgactgcgaatcgggaattatctttgacaacaatgaggataaaacggattcagcagcactgttgccctgtatcgaacaggccagagaggatatccgtaccctgcgccaactgcagcttcagcaccagaaccggtga

SEQ ID NO: 4463 - DNA, 489 bp, Escherichia coli
atgaaactttccctgatgctggaagccgacagaattaatgtgcaggcactgaacatggggcaaattgtcgttgacgtcgatggtgttaatctcactgaactgattaacaaggtcgctgaaaacggttattcactccgcgtggtggaggaatccgaccaacagtcaacctgcacactaccaccgtttgcaacccttgccggcatacgctgcagtaccgcacatatcacggaaaaggataacgcctggctgtactcgctgtcgcatcagaccagtgacgttggtgaatcagaatggattcatttcacaggtagcggatatctgttacgtaccgatgcgtggtcatatccggttctgcggcttaaacgcctggggctgtcaaaaacgttccgtcgtctggttatcacacttacccgacgttatggcgtcagtctcattcatctggatgccagcgctgaatgcctgccgggtttacccactttcaactggtaa

SEQ ID NO: 4464 - DNA, 375 bp, Escherichia coli
atgaaaacattacccgatacacacgtacgggaggcatcgagctgcccgtctcccgtcaccatctggcagactctgctctcccgactactgggccagcattacggccttacactgaatgacacaccgttcgccgatgaacgtgtgattgagcagcatattgaagctggcatttcactgtgtgatgcggtgaattttctcgtggaaaaatacgcgctggtgcgtaccgaccagccgggattcagcacttgtccccgctctcagttaataaacagtattgatatcctccgggctcgccgggcgaccggcctgatgacccgcgacaattacagaacggtaaataacattaccctgggtaagcatccggagaaacgatga

SEQ ID NO: 4465 - DNA, 492 bp, Escherichia coli
atggatcatgagttgaaaaacctggtgctgaatattaatcaactggcggctttatctggtctgcaccgtcagactgtcgtggcaagactgaaaaacattcgtcccgctggtggacatgacaaactcaagctataccggttgaccgatattctgactgaatttatggggttaccaccgccggttgctgagggcgaaatggatccacatgaacgcaaagcctggtatcagtctgaacgtgagcgtcttaagttcgaacaggaaacggcacaactcattccggccagtgatgtcagacgggagtttgccatctgggcaaaagcggtcgtgcaggtgctggagacattaccggatattctggaacgtgactgcggcctgcagcctgccgctgtgagccgtgttcagtccattattgatgatctgcgcgatcagatagccctgcgggtgaccgaagcaggtgcggatgatgaggaggaattacagcaggaggagtaa

SEQ ID NO: 4466 - DNA, 2103 bp, Escherichia coli
atgctgaatcaggaaaccgcaaaggcagcacgaaccgattcaggttatatccttcgcgcaccgagacgaatgcgggttgctgatgccgttgctcagtatatgcgggtgcccatgggggcagggaactcagtcccgtgggatccgctggtggcaccgtatgttattgagccgatgaactgcctggcctcgcgtgaatacgacgcagtgatatttgttggcccggcacgaaccggcaagactatcggcctgattgacggctgggtgatttacaacgtgatttgcgaccctgcggatatgctgatcattcagatgacggaggaaaaagcccgcgaacactccaaaaaacgactcgccagaacgtttcgcgtcagcccggaagtggtcagtcgcctgagtccgaacaaaaatgacaacaacgtttatgacagaacattccttgctggcaactacctgaaaatcggctggccgtcagtcaatatcatgtcctcatcagattataaatgcgtcgcgctgacggattatgaccgttttccggaagatattgatggcgagggggatgctttctctcttgcctcaaaacgtaccacaacatttatgtccagtggtatgacgctggtggagagttcccccggcagggatgtgaaggatgtgaaatggcgacggacttcaccgcatgaggctccaccaaccacggggatactgtcgctctataaccgtggcgatcgccgtcgctggtactggccctgtccacactgtggtgagtattttcagccctgcggcgatgtggttgctggtttccgtgatattgccgatcccgtgctggcaagtgaggcggcttatattcagtgtccttcctgttcaggacggattatgcctgaacaaaaacgtgagctgaacggacgtggggtctggttgcgggatggtgaatccatcaatgcggatggcagtcgttatggtgatccccgacgctcacgtattgcgtcattctggatggagggtccggcagctgcttaccagacactctcgcaactcgtttacaaactgcttactgcagaacaggaatacgagacaaccggaagtgaagaaacactcaagacggttatcaataccgactggggattaccttatcttccccgtgccagcatggagcaacgaaaaagtgaactgcttgagcagcgggcagagccagttccttcccgcagtgtgccggatggcgttaatttcctggtggcgacagttgatgtgcaggcgggacgtcatcgccgttttgtggttcaggtaacgggctatggcagccgtggcgaacgctggattattgatcgttacaacatcacgcagtcattgcgcggtgacagcgacggggagagccagcgaattgatccggccagctatccggaagactgggatgtcctgctgacggatgtttttcataaaagctggccgctggcctccgatccttctcaacaaatgcgactgatggcaatggcggtggactccggcggtgaagacggggtcactgataatgcctataaattctggcgtcgttgccgtcgtgatggccttggtaaacgtatttacctgtttaagggcgacagcatccggcgcgcaaaactgatcacccgtacattccctgataacaccggacgaacgggccgacgggcgcaggccgcaggtgatgtgccgctctggcttcttcagacggatgccctgaaagaccgggtgaataacgcgttatggcgtgactctccaggtcccggctatgtgcatttccctgactggctggggagctggttttacgacgaactgacgtatgaagagcggagcagtgacgggaaatggagtaagccgggtcgcggtgccaacgaagcttttgacctgatggtgtatgccgaggctctggtcattctgcatggatacgaaaagatccgctggccggatgcaccggagtgggcgagccgggaaacctggctggagtgtgtcccggacagtaccgaaccgtcaccctcaccggaaccggtatccacgcctgttaaaaaacaaaaacggaagaaaacagtaactgacgatgttaacccctggctgacttccggaggatggttatga

SEQ ID NO: 4467 - DNA, 213 bp, Escherichia coli
atgaaccagaatgatatcgaagccatgattcagcgttatacggaagctgaaatggcggtgctggacggaaaatccgtcacctttaatggtcagcagatgaccatggaaaacttatctgagatccggcagggacggcaggagtgggagcgccgccttgcggctctgattacacgacgacgggggcatcccgggtaccggctggcgaggttctga

SEQ ID NO: 4468 - DNA, 570 bp, Escherichia coli
atggtgaagtcggatcgcccaaatcctaaccttgaaacttttcgtaatgctcagttgcgtgccgtggcggcgggcagtcgtctgagtttttccagtacagcgcgcaactataacggcacttacagcgcccagcgtcaggagctggttgagtctactgatggctacctgatcctgcaggactggtttattggtgccgtcacccgcccgatgtatcgtgcctggctgaaacaggctgtggcatccggtgttatcaggctaccccgcgatcttgaccgttcttcactgtataccgcggtgtattccggaccggtgatgccgtggattgaccctgttaaggaggctgaggcctggaaaatccagattcgtggtggagcggcgacagaatcagactgggtacgtgcaggtggtcgtaatccggatgatgtcaaacgtcggcgcaaggccgaaattgatgaaaaccgcaagctggatctggtatttgataccgatccggccagtgataaaggaggcagcagtgccgcaacgaaacgacaggagccgcagcacaccgacgaccagtccgaagaataa

SEQ ID NO: 4469 - DNA, 2028 bp, Escherichia coli
gtgccgcaacgaaacgacaggagccgcagcacaccgacgaccagtccgaagaataattcctggttcaggatgcaggctggtcaccagagtgacgcggatatttatatttatgacgagattggtttctggggtgttacagcgaagcagtttatcagtgatctgaatgcactgggcgatatcacccacattaatctccatattaattcaccgggtggcgatgtctttgaaggcatcgccatttttaatgcgctgaaaacacatggtgcgtccattaccgtttatgtcgacggtgtggcggcgtcaatggcgtcggtcattgcgatggtgggaaacccggtcattatgccggaaaacaccttcatgatgattcataaaccatttggctttacgggcggtgatgcggaggacatgcgcacctatgccgacctgctcgataaagttgaggcggttctgttacccgcttatgcacagaaaaccgggaaaaccaccgatgaaattgctgccatgctggcggatgagacctggatgtccggtgccgaatgtctggcacatggatttgctgatcaggtaacgccagccgttaaggcaatggcatgtattcagtcaaaacgtacagaggaatttaaaaagatgccggaatccattcgaaacatgattactccgccacgcaacagtgctccacgcgtacaggatgatgaacctgcagcctcccggacgccagtgcaggcagcagcacccgtggtggatgaaaacagcatccgtgcgcaggtactggcagagcaaaaagcgcgtgtaaacggtattaatgatctgtttgccatgtttgacgggcgttatcagtcgctgcaggctcagtgtcttgctgatcctgaatgttcgctggagcaggcccgcgaaaagctgttgaacgagatggggcgcgagtccacgccatccaataaaaataccccggctcatatttatgccggtaacggtaattttgtgggggacggaatccgccaggcgctgatggcgcgtgccggatttgaaaaaaccgaacgtgataatgtctacaacgggatgaccctgcgtgaatatgcccgtatgtcactgactgaacgggggattggggtttccggttataacccgatgcagatggtcggtgcggcgttcacacacagtacgtctgacttcggtaatattctgctggatgttgcgaacaaagccattctgcagggttgggaagatgcccctgaaacctatgaacagtggacgcggaaaggtcagttgtctgattttaaaattgcccatcgtgtgggtatggggggcttcagtgctctgcgtcaggtgcgtgaaggggcggaatataaatacgtcaccaccggagataaacaggccactattgcactggcgacctatggcgagctgttcagtatcacccgtcaggccattatcaatgatgatctgaatatgctgaccgatgtcccgatgaaactgggccgtgcggcgaaatccactattgccgatctggtttatgccattctgacgtctaacccgaaaatctccacagataatgtaagtctgttcgataaagcgaaacatgcaaacgtactggagagcgctgcaatggacgtggcatcgctggataaagcccgccagttgatgcgcgttcagaaagagggggagcgtcatctgaatattcgtcctgcgttcgtactggtaccgacggcgatggagtctgttgctaaccaggtcattcgctcctcaagtgtcaagggggctgacattaacgccggtattattaacccggtgaaagattttgcgaccgttattgcagagcctcgtcttgatgataacagccagaccaccttctacctgactgcgtcaaaaggctccgatacgattgaagtggcttatctcaacggtgtggatacgccatatattgatcagatggagggcttcagtgtggatggcgtgacaacgaaagtgcgtattgacgccggtgtcgcgccagttgatcaccgcggtctggtgaaatgtacggcgtaa

SEQ ID NO: 4470 - DNA, 324 bp, Escherichia coli
atggcaaagaattttgtagaagaaggaaaaacggtggcgattgttgccagtgcagccatcagcagcggagatctggtgcaggtgggtgatgtttttgcggtggcgctgaccgatattccacagggtgaaacaggcgacggcatgaccgaaggtgtgtttatgctgcctaagctgaaaacggatgatatgaaaacgggtaagaaggtttatctgaagtccggaaaagttcagctgactaacagcggctctgatccgctggtcggggttgtctgggcagatgccggaaccagtgcagaagaagtgccggtaaaactcaatgtctga

SEQ ID NO: 4471 - DNA, 276 bp, Escherichia coli
atgtctgatcccttttcccggctggcagcgcgtatggatgcgatcacggtcagaaagatgggaaagacagcctcgattaatgatgtcgatatgactgtgatcccgggagaaacactggcagagctgaatgctctgtccggacctgcggtctctctggtggtgttttcttcgggataccgcccacggcgcggggatcgcgttgtttatgacggacaacaatggacggtcacacggcatgaacgctttaacggtaagccaatgatctttattgagtaa

SEQ ID NO: 4472 - DNA, 579 bp, Escherichia coli
atgaaggggcttgagaatgccatccgcaatctgaacagccttgatacccgtatggtgccacaggccagcgcatgggcgataaaccgtgtggcgcagaaagcggtctcggttgccacccggcaggttgccgggaataccgttgcgggagataaccaggtgaaagggatccccctgaaactggtacgtcagcgtgtccgggtgtttaaagccagtccgtcaggaaaaatgacggccaggatccgcgttaaccggggcaatctgcccgccattaagctggggacagcccgggtcagactggcccggcgtggtggaaaactgcagtaccgtggcagtgtgctgaaggttggtaaatatcttttccgggatgcgtttattcagcaactggcgaatggtcgctggcatgtgatgcggcgtattgatggcaaaaatcgttaccccattgatgtggtgaaaatcccgctgtccggaccgctgacacaggcatttgaagatgcccgcgaccacatcattgctgcggaaatgccgaaacagctggggtatgcactgaaacaacaactgaggttatggctgacccgatga

SEQ ID NO: 4473 - DNA, 402 bp, Escherichia coli
atgaaccgacatacacaaatccgccaggtcgtactggcacgccttcgggaacagtgtggagacagcgccacgttttttgacgggcttccggcatttattgatgcgcaggaactgcctgccgtggcggtgtggctgagtgatgctcagtacaccggaaaaatgacggatgaagatgactggcaggctgttctgcatattgccgtcttcatccgggcacaggcaccggattcagagctggatatgtggatggagagcaccattttccctgccctgaatgatataccggcactttccggactcatcgacaccctgatcccactcggttttaactatcaacgtgataatgagatggccacctgggcgatggcggaaatcacgtaccagatcacgtacacgaattaa

SEQ ID NO: 4474 - DNA, 744 bp, Escherichia coli
atgaccacaccaaatccactggcaaagacgaaaggtgcggggacgacgttctggatgtataccggcaacggcgatgcgtttgcgaatcctttgtcggacactgactggctgcgtcttgcgatggtgaaggatctgcaacctggcgaaatgaccgctgatgcagaagatgacacttatctcgatgatgaagatgcagactggaaaacgacaacccaggggcagaaatcagtcggtgatacttcggcgacgctggcctggcgtccgggtgacagcgggcagaaaaaactggttcagttgttcgactccggtgaagtctgcgcgtttcgtatcaaatatcccaacggtactgttgatgttttccgtggctggctgagttcactgggtaaaaccattgcctcaaaagacgtgatgacccgcacagtgaaaatcagcggtgtggggcgtccgtatctggcagaggaaggcactgaaacagtgagcgttaccgggctgacggtggcaccggcatctgccagtgtaaaagtgggagcaaccaccacgctgacctttacagtaaaacctgacggagccagtgacaaagcgatcagtgtgcattcgacagatccacagactgccacggtgaccctgaacgggcttgtggccacggtgaaaggcgtgaagcagggcagtgtcagcattgtgggcatgacttctgacggcgattttgtggcagtggctacggtggctgtcagcgccgcaggttaa

SEQ ID NO: 4475 - DNA, 387 bp, Escherichia coli
atgtttctgaaacagggcacgtttaattatgaaaagcagtccgtggtgctcagtgagctgtccgggctgcagagaattgaatatctggcgtttgttcagcagcgaacggcaaagtttgatgccgaagagggagaactgccggaggctgaacgacagattgcttttctgcggatggggatggatatcaatgcctggctggtttcccgctcactgtggaatgcggaacagtctcaggatgttgagacgctttgcgcatccgttattacaacatggtcgtatgatgccctgggagcgggggcggagatggttctgtcgctgagcggtatgggggccattgataatgccgtggatgatgagcatgaggcgctgacgccggaaaagtcctga

SEQ ID NO: 4476 - DNA, 330 bp, Escherichia coli
atgcagtttgtcatgcggcttgcccgggagttccggcgggcagactggcggcggatgctgtcggaaatgtcggccactgagcttggtgagtggggcgattatttccggatgcagagcttcagtgatgtgtggatggatgcgcagtttgcctcgctgaaggcattgatcgtgagaatggtatccggcagcagtgatgctgcggtggctgatttcagccttttaccggaagagaacgggataccggagcgaacggacgaagaactgatgcatcttggggaaggtatttccggaggtgtgcgttatggaccagatagccaacctggtcattga

SEQ ID NO: 4477 - DNA, 252 bp, Escherichia coli
atgctggcctgtggtcatttccgccgtggcttcacggtagttgtagtcccgcgtggagacacttttttccaccacgctgtacgcggtgttcagcccccatacggcttccgtttcaccatcaaacagcccagaaggatggcgaagcggcagcgtcagcccgcgctcgtagccgctctggtcgtcgtaaaattcgataacttcgattttcaaccgggcgtcggtggcaaagcggaaccagatacccacctctga

SEQ ID NO: 4478 - DNA, 354 bp, Escherichia coli
atgcttaaagccggtaatgacgccgtacagggtgcgcaggggcgtcatcaccggcattccctgtacgggcggggcgctcaggctgaatgcgccgtcctgcatcagcaccgactccggcgcgatggctttatcggtactggtaaactcaatgtcgtagcggaacggggcgctgagctgttcgcggcctgtaaaagtcagcacgtccaccggactttgcaggccgcgaattttgagcttgtggtgtgcgtggtcgaagaactgtacgttcataagagcctccattatttctcatcaaattccagcacaatcccgtcttcatcatcccagtcaagccgcagtcgggcaggcttatga

SEQ ID NO: 4479 - DNA, 2637 bp, Escherichia coli
atgacaggaaatcaccccgccacgctgctgcgtcgccttaacccatactgtgcacgggcgctggacgccgccgcctcgctgtgtcagacccgcgcccatgcggaaataaccattgaacactggctgctgaaactgctggagcagggagaaggcgatatcacggtgattgcccgccgctatgaatgggatatcgacacgctctggcagtctctgctggcacatctggacaccttaccccgcccggtccgcgaacgtcctcaactttctgaaccgctggcagcgcttatccgacaggcgtggctgatagcgtcactggaaggcgacgatccacaaatccgcagccagcatctgctgatggcgctgacagaaaaaccgatgctgcccgcctgtaatgacctgtgggtattgctgagtctgagccgcgtgcagcttgagcggctgcgtcccctgctggatgcgcagtcggatgaatgtccggcacgtcagccacaggtcaccgcaccgctgacctctgcactgccggagacggcaacggcggacgcaccggcaaaaacgctgacggagaaacaggatgacgccctgctggcggtgcttaaccgctttaccgaagacgtgacggaaaaagcccgcagcgggcgaatcgacccggtattcgggcgcgacacggaaattcgccagatggtcgatatcctctcccgtcgccgcaaaaacaacccgattctggtgggagaaccgggtgttggcaaaaccgcgctggtggaagggctggcgctgcgtatcgccgaaggcaacgtgccggacagcctgaaaacggtgcatatccgcacgctggatttggggctgttgcaggccggggcgggtgttaaaggtgaatttgaacagcggctgaaaaacgtgattgacgcggtgcagaaatcgccggagccggtgctgctgtttattgatgaagcccataccattatcggcgcggggaatcaggcaggcggcgcggatgcggcgaacctgctgaaaccggcgctggcaaggggcgaactgcgcaccatcgccgccacaacgtggagcgaatacaaacagtattttgagcgcgacgccgcgctagagcgccgcttccagatggtgaaagtggacgagccggatgatgacaccgcctgcctgatgctcagggggctgaaagcccgctatgcgcagcaccacggcgtacatatgctggacagcgccattcagaccgccgtgcgcctgtcgcgccgctatctgaccggacgccagttgccggacaaggcggttgatttgctggataccgccggggcaagagtccgcatgagcctcgacaccctgccggaaccgttgacgcagcttcatgcgcgactggcggctctggatattgagcgggaagcgattgagcaggactgcgtgttttatcccgaagccagcccggagcggctggcggaactgaccgatttgcgtgatgagctacaggcagaagccgggcatctggaagcgcagtatcagcaggaaaaggcactggcgcagcagattatgacgttgcgtcaggaagggacagacagcactgaactgcaacagcaactgcgaacgcatcagggctttgcaacgctgctggcgctggatgtggacgcccgcgccgtcgccacggtggtggcggactggaccggcatcccgctctcttccctgctcaaagacgagcagagcgacctgctcagtatggaaaagagccttgaaaaccgcgtggtcgggcaaagcccggcgctctgcgccatcgcacagcggctgcgggcggctaaaaccggcctcacgccggagaacggcccacagggggtattcctgctgaccggccccagcggcaccggtaaaaccgaaactgcgctcacactggccgacaccctgtttggcggtgaaaaatcccttatcaccattaatctttcggaatatcaggaaccgcataccgtttcccagttgaaaggttcgcctccgggctatgtcggctacggtcagggcggcgtgctgaccgaagcggtacgcaaacgcccttacagcgtggtgctgctcgacgaagtggaaaaggcgcatcgcgacgtgatgaacctgttctatcaggtgttcgaccggggctttatgcgcgacggcgaagggcgggaaatcgacttccgtaacaccgtgattctgatgaccgccaatctgggcagcgaccacatcatgcagctgctggaggaaaaaccggacgccacggacgcagacctgcatgaactgctgtaccccctgctgcgagaccattttcagcctgcactgatggcgcgctttcagacggtgatttaccgcccgctgggacaggaggcgatgcgcgccattgtggaaatgaaactggcgcaggtggcccgccgtcttcaccagcactatgggctggaaacggaaatcagtaacagcctgtacgacgccctgaccgccgcctgcctgctgccggacaccggtgcgcgtaatatcgacagcctgctgaaccagcaaatcctgccggtcttaagccagcagttgctggcgcagcaggccgtgcatcataagcctgcccgactgcggcttgactgggatgatgaagacgggattgtgctggaatttgatgagaaataa

SEQ ID NO: 4480 - DNA, 492 bp, Escherichia coli
atggctattcctgcttatctctggctgaaagatgacggcggcgcggatatcaaaggttccgtggacgttcaggggcgcgaaggtagcatcgaagtggtggcgctggatcacgatgtgtacatcccgaccgacaacaacaccggcaaactgaccggtacccgtactcacaagccctttacgtttaccaaagaaatcgatgcgtccagtccgtatctctacaaagctgtgaccaccggtcagaccctgaaaacggcagaatttaagttttaccgcatcaacgatgccggtcaggaagtggagtacttcaacatcacgcttgataacgtcaagctggtcagagtcgctccgctgatgcacgacatcaaggatccttccagagagaagcataaccacctggaacgtattgagttccgctacgagaaaatcacctggacttacaaagacggcaacatcattcattccgactcgtggaatgagcgtccttccgcctga

SEQ ID NO: 4481 - DNA, 1653 bp, Escherichia coli
gtgaggaacacgctgaaacaggccatcgtgctgtggggaatggtgttactgctggtgctgtggtgggtgtttgtcagtccgtctggcgtactgagatgggccggtgcagcagttatcgttctggcggttgccgcattgttgatttaccggcgcaggcagacgtggacggagatgaccggcgatgccgggttgttatcgctgccgccggaaacgtaccgacaaccggtagtgctggtctgtggcgatatgtcggcgcatctgttcactgacagcccggtccggcaggtttcagaagggctgtatctgcatgtttctgatgaagaacagcttgtggcgcaggtggagcgattactgacccttcgcccggcgtgggcatcgcagcttgccgtggcgtataccgtcatgcccggcatgtaccgggatgcggcggttctggccggacaactgcgccggttcgcccacagtatggcgacagtgcgtcgccgggcgggcgtaaacgtcccctggcttctctggagcgggctgtccggctcgcccttgccggagagagcgaattcaccgtggtttatctgtaccggagacgaagttcaggtagcaacatccacagagaacgcgatgcccgcgcagtggattgcacaatccggcgtacaggagcgcagtcagcgactctgttacctgctgaaagctgaaagcctgatgcagtggctgaatcttaatgtgctgacggcactgaacggcccggaggcgaaatgcccgccactggcgatggccgtggggctggtcacctcgttgcctgcggtggataacaacctgtggcaagtgtggatcaccgccagaaccggcctgacgacggatatcgcggacaccggcacagacgccacgctgccgtttccggatgccctgttacggcagttgccgcgtcagtcgggctttaccccgctgcggcgggcctgcgtgaccatgctgggcattaccaccgcggcgggtatcaccatgttgtgcctgtcagccacggcaaatcgccagttattacggcatatcggtgacgatctgcaccagttttatgccgttccggcggaggaatttatcaccaaagcccgtcacctgtcggtgctgaaagacgatgcggtcatgctcgatgggtattaccgggaaggagagccactgcgtctcggtctggggttataccccggtgaacaaatccgccagccggtattacgcgccattcgcgactggcgtccgcctgagcaaaaaatggaagtgacagcctcgcttcaggcgcagaccgtgcgtcttgacagtatgtcgctgtttgacgtcggacaggcccgcctgaaagacggctcgacaaaagtgctggtggacgcactggtgaacatccgggcaaaaccgggctggctgatcctcgtggccggatataccgacgccaccggcgacgaaaaaagcaatcagcagttatcgctgcgacgtgccgaagcggtgcgtaactggatgctgcagaccagcgacatcccggccacctgttttgccgtacagggactgggcgagagccagcctgcggcgaccaacgacacgccacagggccgggcagtcaaccggcgtgtcgaaatcagtcttgttccgcgttctgacgcctgtcaggacgtgaaataa

SEQ ID NO: 4482 - DNA, 666 bp, Escherichia coli
atgaaaaaagagacggatatcaatatcgacgcgctgctgcgcgatacgtttctgacggtggtggaactgcgtcagggaaccaccgtgcgtcacggtatggagctgtatcgccactgccagcggcaggtggaactggtccgcgaacgcctgaaagatgccgggttcagccgggagagcgtggagcacattacttacgcgcagtgcgccctgctggacgaaacggtcctgagccgtggcggcatggacgacggtcaggccatctggatgaaggatccactccagtcgcatttcttcaacactctgcaggcaggcgagctgctgtacgaacggatgaagcaggtgttgcaggagcccgcccccgcgcaggcagtgctgacctgctttcaccgtgtcctgctgctgggatttcgcgggcgttatcaggatccggtggccccggagcgtgaccagcttatttcgacgctcaacgggctggtcgcgccatttggcgtgctgccggaaacggcggtactgaacgtgccgttatccccccgtcagcatcctttgctgcattcgccgtttttctggctggtaacgctgacgctgctactggccggtgtctggtggggactgcaccactggctgaacgtgctggtggatgaactgctgccgcaaagcctgcgttaa

SEQ ID NO: 4483 - DNA, 1338 bp, Escherichia coli
atgaaaattcatcgaccactgtgggctgaggggacattcctgtcctctcagcagtttcagcagcaggcccgctgggaagcgttcagcaatgacagcattgcgcaactttgtattcgtcatccgtgggggatcgcaaacgtgctctttgaccgggatcccctgacgcccggaaagctgaaaacgcaggcagtacgcctgcgttttgctgatggtacgctgatcgattcagacgtggcggatattctgcctcctgcctgtgacctgcgcacgctggagggcggcagcgcgattgttttgctggcgctgccgcttgcgcatggtaacggcggtaatctcggtcagggcgagcaggctgaaaggccgctgcgctatcgtcaggaatggcaaaaggtgcaggatatctacggcagtgacagtgaagatatggccgttgagcgccatgcactgtccctgcgctttgcccatgataacaatcaggattacatcacctgtccgctggcgcgtctggtgcgggatgttcagggcaactggacgcaggatgagggctatattccgccgttactggcgtttaacgcccatgacgggctggtacagcgtctggacacactgctgttgcagctacgggcgaagtgccagcgtctgatggcgatgcgccgggaaagcaaccagcgtatggcggactttgccgtcgccgatgtctccctgttctggctgcttaacgcgctgaactccgccgagccggtactgagtgatttcctgcgctacccggcggttcatcccgaactggtctggcgggagctggcgaggcttgccggtgcgctgctgacgttttcccttgaacataacgtcagcgccgttccgccctatgtccacgaatcgccgtccatcgtctttccgccacttttctccctgctcagcgaactgctggaagccagcctgccgtcacgggtgatcgcgctggatctggcgtccctgccgggcaaccgctggaaagcagacctgcacgatccgcgcctgcgggaagaggccgacttttacctgtccgttcgttcctctctgcctgcgcatcaggtactgcaccagctaccgctggtctgcaaaatcggtgcgcctgatgacgtcacgctgcttatcaatgtggcgctgaatggtgttccactggtgccgcttacctcagttccggcagcgctgccactgcggctggagaaccagtattttgcgctggatatgcacagtgacgcggctaaatcgatgctggagtccgggtgctgcatgatttatgcgccgggaaccatgggcgacctgaaacctgaactgtttgcggtgctgcgcacatga

SEQ ID NO: 4484 - DNA, 1539 bp, Escherichia coli
atgtctgtacaacaagaacatgccacctctgaaactgcaacactcaccaccactgagtccggcggcgtttatcagtccctgttcgataaaattaatttaaccccggtctcttccattcaggaaatcgatttatggcaaaacagcgaaacgctggccgatgcctcacccgatgagcgcgtgacggcggcgattcacgttctgctttcctgtctggcgaaatcaggcgaggacgtggttaagctcgacaagagcctgctggattttcatatcgacgatctggatcagaaaatcagtaaacagcttgatgcggtcatgcaccaccctgaattccagaaagtcgagtcgctgtggcgtggtacatggttcgtcgtacagcgcactgattttcgcaaaaatgtcagaattgaattgctggatatcagtaaagaacatctgcgtcaggattttgatgattcaccggaaatcattcagagtggtttatatcgccatacatacattcaggagtacgatacgccgggtggcgaacctgtagcctcattaatatccagctatgaatttgataacagcccgcaggatattgccctgctgcgtaatatttccagagtgtctgccgcttcccatatgccttttatcggttctgtcggaccgaaattcttccttaaaaattcgatggaagaagtcgccgcgattaaagatatcggcaactactttgaccgcgcagaatatattaaatggaagtcgttccgcgatacggatgacagccgctatgtgggattagtgatgccgcgcgtgctgggccgtctgccctatgggccggacacggtgccggtacgcagctttaactatgtggaagaagtcaaaggcccggatcacgaaaaatacctgtggacaaacgcctcgttcgcctttgccgccaatatggtgaagagctttgtgaataatggctggtgtgtgcagatccgtggtccacaggcaggtggcgcagtggccgatctgcccatccatctttacgatctcggcaccggcaatcaggtcaaaattccgtccgaagtgatgatcccggaaacccgcgaatttgaatttgccaaccttggctttattccgctctcttattataagaatcgcgattacgcctgcttcttctcggcaaactccgcccagaaaccggcgttgtatgataccgctgacgccaccgccaacagccgtattaatgcccgtttgccctatattttcctgctgtcccgcattgcgcattacctgaaaatcatccagcgcgagaatatcggtaccaccaaagaccgccgcgtactggaactggaactgaacacctggatccgcacactggtgacggagatgaccgatccgggtgatgaactgcaggcgtctcacccgctgcgcgacggcaaggttatcgtggaagatattgaggacaatccgggcttcttccgcgtcagactctttgccgtgccgcatttccagattgaagggatggatatcaacctgtcactggtttcccagatgccgaaagcgaaagcctga

SEQ ID NO: 4485 - DNA, 420 bp, Escherichia coli
atgagacgttccggcggcacactgtatcttatcgccctgctgacagcggcaacggtcctgacagcctgcacgccaaagggcagtgtggaacaacatacccggcattacgtttatgcatcagacgatggttttgatcctaacttttccacccagaaggccgacacaacacgaatgatggtgccttttttccggcagttctgggatatgggagcaaaggataaagcgacaggaaaatcacggagtgatgtgcagcaacgcattcagcagtttcacagccaggaatttttaaactcactccggggcacaactcaatttgcgggtactgattaccgcagcaaagaccttaccccgaaaaaatccaggctgctggctgagacgatttctgcggtttatctcgatggctacgagggaagacagtaa

SEQ ID NO: 4486 - DNA, 234 bp, Escherichia coli
atgacggagctggaaaaacatttgctgaacgcattagagcaactgcaacaggactatatgcagcggctgaacgaatgggagagcgccttcgtggaattgcagaaaatgttttcgcttacgcaacgggacaacgcgatgctgaacgagcgggtcatgaagttgagtcagcaggtgcagcacttgagcgagcggacagagcgcttgagccagttatacagcgagaacaggagataa

SEQ ID NO: 4487 - DNA, 531 bp, Escherichia coli
atgagcaatcttttacagacgggcgcggagttcgagaaaaagctgaaagagagagccgaatctacagagaaaatgctgaacgacgagttcaggaagctcgaagaatctgtaaacagggaactgacctcaaacgaatctttaatcaggaacgctatcaacgaccatacaacagccctgaaagaactgctggagagatatcagaaaacgaccgtcagcgcgatggatacacactggcaaaccgtactgaaaatgagcgtgaaacgctggctgtggctgattatcgtctcagtgctgatgtttgccacgaccgggagtctgctgtggtatcagggcatgaagataaacgtaaacatgaatattctccgcgagcagaaagagagtctggagaagctgaacgcgaagacatggggcgtgcgttatcacgaggacagcaacgggcgttttctggtgttgccgaaggggatgaaagccgaaacgaactggacggaggacaacggcaaactgaacgcagtgagactggtacaggagtga

SEQ ID NO: 4488 - DNA, 357 bp, Escherichia coli
atgggggtaatgataccgatgaaacgcgagaggatgctcactatacgggttactgatgatgaacatgcccggttacttgaacgctgtgagggtaaacaactggcggtatggatgcggcgggtctgcctgggggagccggttgcccgttccgggaaactgccgacactggcaccgccgttactgcgtcagctggctgccatcgggaataacctgaatcagacagcgaggaaggtgaacagcggacagtggtcttccggtgaccgggttcaggtggtggccgcactgatggccatcggggatgagctgcgccggctgcgtctggccgtcagggaacaggggacgcgggatgatagttaa

SEQ ID NO: 4489 - DNA, 192 bp, Escherichia coli
gtgactaaacaggaaaaaaccgcccttaacatggcccgcttcatcagaggccagacattaacgctgctggagaaactcaacgaactggacgcggatgaacaggcagatatctgtgaatcgcttcacgaccacgccgatgagctttaccgcagctgcctcgcacgtttcggggatgacggtgaaaacctctga

SEQ ID NO: 4490 - DNA, 138 bp, Escherichia coli
atgaggaaaagattttttgtgggaatattagctataaacctccttgttggatgtcaggctaactatatacgtgatgttcagggagggactgtggctccatcatcttcttctaaactgacggggatctctgttcagtag

SEQ ID NO: 4491 - DNA, 1566 bp, Escherichia coli
atggaaacagctgtagcgtactataaagatggtgttccttatgatgataaggggcaggtaatcattactcttttgaatggtaatccagacgggagtggctctggcggcggtggtggaactggaggtagcaaaagtgaaagttctgcagccattcatgccacagctaaatggtctactgctcaattgaagaaaacgcaggcagaacaggctgcccgggcaaaagctgccgcagaagcacaggctaaagcaaaagcaaaccgggatgcgctgactcaacatctgaaggatattgtgaatgaggcgcttcgtcataattccactcatccggaggttattgacctggctcatgccaataatgcagcgatgcaggcagaagcagagcggttgcgccttgcaaaagcagaagaaaaagcccgtaaagaagcggaagctgcggaaaaggcttttcaggaggcagaacaacgacgtaaagagatagagaaggagcaggctgaaacagaacgccagttgaaactggctgaagctgaagagaaacggctggcagcattgaatgaagaggcccgggcagtggaggtggcacaaaaaaatcttgctgctgcacaatctgagctggcgaaagtggatgaagagattaagactctcaatacccgtttaagctccagtattcatgcccgtgatgcagaaatgaatacgctgtccggaaaacgaaatgagctggctcaggcatctgctaaatataaggaacttgatgaactggtcaaaaaattgtcaccaagagctaatgatccgcttcagagtcgtccttttttctatgccaccagtcgacggacgggagccggtaagattatggaggaaaaacaaaaacaggtaacagcatcagaaacgcgtattaaccaacttaatgctgagataaatggaattcagggggctatgtctcaggctaataataatcgtaatacagctgttttacgtgttcatgaatctgaagaaaatttgaaaacagcgcagactaatctcctgaactcgcagattaaggatgctgtggatgcaacagttagcttttatcaaacgctatctgaaaaatatggtgaaaaatattcaaaaatggcacaggaacttgctgataagtctaaaggtaagaaaatcagcaatgtgaatgaagctctagctgcttttgaaaaatacaaggatgttttaaataagaaattcagcaaagcagaccgtgatgcgattttcaatgcactggaatcggttaagtatgaagactgggctaagcatttagatcagtttgctaagtacttgaagattacgggacatgtttcttttggatatgatgtggtatctgatatcctaaaaattaaggatacaggtgactggaagccactatttcttacattagagaagaaaactgtagatgctggagttagttatattgttgttttactttttagtgtgcttgctggaactacattaggtatctgggggattgctattgttacaggcattctatgtgcctttattgacaagaataaacttaatactataaatgatgtgttgggtatttaa

SEQ ID NO: 4492 - DNA, 2877 bp, Escherichia coli
atgaccatcagtaccgggctggaactggggccggacagtgaagaaaacaccggtgggcaatggatacagaatggcgggatagccggaaacaccactgttaccacaaatggtcgtcaggtcatgctggaggggggaacagccagtgatacggttattcgtgacggcgggggacagagcctgaacgggctggcggtgaacaccacgctgaataacagaggcgagcagtgggttcatgagggcggggttgccaccggtacaattatcaaccgcgacggttaccagagcgttaaaagtggcgggctggcaacaggaaccatcatcaacaccggcgcagaaggcggcccggattctgacaactcgtacacgggtcagaaggtccagggaacagcagaatccaccaccatcaacaaaaatggacggcagattatcttattttccgggatagcccgtgacactctcatttacgcaggtggtgaccagtcggtacacggaagggccctgaataccacactgaatggcggttaccagtatgtgcacaaggacggacttgcgctgaacacggtaattaacgaggggggctggcaggttgttaaggcaggtggtgctgtcggtaacaccaccgttaatcagaacggtgaactgagggtacatgccggcggggaagccactgcagtcacccagaacacgggcggtgcactggttaccagtacggctgcaaccgttaccggcataaaccgccttggagcattctcggttgtggagggtaaagctgataatgtcgtactggaaaatggcggacgcctggatgtgctgaccggacacacagccactaatacccgcgtggatgatggcggaacgctggatgtccgcaacggtggtaccgccaccaccgtatccatgggaaatggcggtgtactgctggccgattccggtgccgctgtcagtggtacccggagcgacggaaaggcattcagtatcggaggcggtcaggcggatgccctgatgctggaaaaaggcagttcattcacgctgaacgccggtgatacggccacggataccacggtaaatggcggactgttcaccgccaggggcggcacactggcgggcaccaccacgctgaataacggcgccatacttaccctttccgggaagacggtgaacaatgataccctgaccatccgtgaaggcgatgcactcctgcagggaggctctctcaccggtaacggcagcgtggaaaaatcaggaagtggcacactcactgtcagcaacaccacactcacccagaaagccgtcaacctgaatgaaggcacgctgacgctgaacgacagtaccgtcaccacggatgtcattgctcagcgcggtacagccctgaagctgaccggcagcactgtgctgaacggtgccattgaccccacgaatgtcactctcgcctccggtgccacctggaatatccccgataacgccacggtgcagtcggtggtggatgacctcagccatgccggacagattcatttcacctccacccgcacagggaagttcgtaccggcaaccctgaaagtgaaaaacctgaacggacagaatggcaccatcagcctgcgtgtacgcccggatatggcacagaacaatgctgacagactggtcattgacggcggcagggcaaccggaaaaaccatcctgaacctggtgaacgccggcaacagtgcgtcggggctggcgaccagcggtaagggtattcaggtggttgaagccattaacggtgccaccacggaggaaggggcctttgtccaggggaacaggctgcaggccggtgcctttaactactccctcaaccgggacagtgatgagagctggtatctgcgcagtgaaaatgcttatcgtgcagaagtccccctgtatgcctccatgctgacacaggcaatggactatgaccggattgtggcaggctcccgcagccatcagaccggtgtaaatggtgaaaacaacagcgtccgtctcagcattcagggcggtcatctcggtcacgataacaatggcggtattgcccgtggggccacgccggaaagcagcggcagctatggattcgtccgtctggagggtgacctgatgagaacagaggttgccggtatgtctgtgaccgcgggggtatatggtgctgctggccattcttccgttgatgttaaggatgatgacggctcccgtgccggcacggtccgggatgatgccggcagcctgggcggatacctgaatctgatacacaacgcctccggactgtgggctgacattgtggccctgggaacccgccacagcatgaaagcgtcaacggacaataacgacttccgcgcccggggttggggctggctgggttcactggaaaccggtctgcccttcagtatcactgacaacctgatgctggagccacaactgcagtatacctggcagggactttccctggatgacggtaaggacaacgccggttatgtgaagttcgggcatggcagtgcacaacatgtgcgtgccggtttccgtctgggcagccacaacgatatgacctttggcgaaggcacctcatcccgtgcccccctgcgtgacagtgcaaaacacagtgtgagtgaattaccggtgaactggtgggtacagccttctgttatccgcaccttcagctcccggggagatatgcgtgtggggacttccactgcaggcagcgggatgacgttctctccctcacagaatggcacatcactggacctgcaggccggactggaagcccgtgtccgggaaaatatcaccctgggcgttcaggccggttatgcccacagcgtcagcggcagcagcgctgaagggtataacggtcaggccacactgaatgtgaccttctga

SEQ ID NO: 4493 - DNA, 2517 bp, Escherichia coli
atgttacagatagtcggcgcgctgatcctgctgatcgcaggatttgccattcttcgccttttgttcagagcattaatcagcacggcttctgcgctggcagggctcatattgctgtgtctgttcggcccagccttactggctggctatatcaccgaacgcataacccggttgttccatattcgctggctggcaggcgtatttctgacgattgccggaatgatcatcagcttcatgtggggacttgatggtaaacatatcgcgctggaggctcacgcctttgactctgtgaaatttattctgaccaccgctctcgccggtggtctgctggctgttcccctgcagatcaaaaacattcagcagtacgggatcacaccagaagatatcagcaaggaaattaacgggtattactgctgtttttatactgcctttttccttatggcgtgttctgcatgcgcaccattgatcgcgttacagtacgatatttcaccgtcactgatgtggtggggcgggttgttgtactggctggctgcattagtgacgctgctatgggcggccagccagatccaggcgctgaaaaaactgacctgtgccatcagccagacactggaagaacaaccggtgctcaacagcaaatcgtggctgaccagtttgcaaaacgattacagccttcctgactcactgacggagcgcatctggctgacgctcatttcacaacggatttcccggggagagctgagggaatttgaactggcagacggaaactggttactgaacaatgcctggtatgaaagaaacatggcagggtttaacgaacagttgaaagagaacctgtcattcacacctgatgaactgaaaacgctcttccggaaccgcctgaatttatcaccggaagcgaatgacgattttctcgatcgttgcctggacggcggtgactggtatcccttttcagaaggtcgccgttttgtatcattccatcacgtggatgagcttcgtatctgtgcctcctgcgggctgacagaagtacatcatgccccggaaaatcataagccggatccggaatggtactgctcctctctttgtcgcgaaacagaaacactgtgtcaggaaatttatgaacgcccttacaacagctttatttccgatgcaacggcgaatggtctgattctcatgaaactgccggaaacctggagtacaaatgagaaaatgtttgcttccggagggcagggacatgggtttgccgctgaacggggaaaccatattgtcgacagagtccgtctgaaaaacgcacggatcctcggtgataataatgccagaaatggagcagacagactggtcagcggaacagaaatccagacgaaatattgttcaactgcagcccgtagcgtcggtgcggcattcgacggacaaaacggacagtatcgttacatgggaaataatggccccatgcaactggaagtcccccgtgatcagtatgccggcgctgttgaaaccatgaggaataagatccgcgaaggtaaagtacccggtgtaaccgatcccgcagaagcgtcccggctgattcgtcggggacatctgacttatactcaggcccgtaatatcacccggttcgggaccatcgaatcggtcacttatgatattgccgagggttcggttgtcagtctggcggccggagggatcagttttgccctgacggcatcggtcttctggctcagcaccggcgatcgcgatgctgccctgcagacagctgctgtccaggcaggaaaaaccttcacccgcacactggctgtctacgtcacaacccagcaactccaccggctcagtgttgttcagggtatgctgaagcacattgatttttcgactgccagcccgactgtccgactggctcttcagaaggggaccggtgcaggaaatatcagtgccctgaacaaagtaatgaagggtacgctggtgacatctctggcactggtagctgtcacaaccggccctgacatgatcaaaatgttgcggggacggatctccggtgcgcagttcatcaggaatcttgccgtggcatcttccggtgtggcagggggagctgtcgggtcagtggcgggcgggatactgttcagtccactgggaccatttggtgcactgacagggcgtgtggttggcggtgttctggggggaatgattgcctccgctgtatcaggaaaaattgccggagcgctggttgaagaagatcgcgtcaaaattctggcaatgattcaggagcaggtgacatggcttgccggcagtttcctgctgaccggacatgagattgaaaatctgaacgagaatctggcccgtgttatcgatcagaatgctctggagatcattttcgccgccggtatacaacaacgggccgcgaccaatatgttaatcaaaccactggtggtcagtatcatcaggcaacgccccgtcatggaatatgatgcatcccatctcggcaatatggttaaccgactggaagaagcattacccccggagttaccggcataa

SEQ ID NO: 4494 - DNA, 456 bp, Escherichia coli
atgattcacctgttcaaaacctgcatgattaccgccttcattctggggttaacgtggtctgccccactccgggcacaggatcaacgttacatcagtatacgcaatacagatacgatatggctcccgggaaatatttgtgcttaccagttccggctggataatggcggaaacgatgaaggatttggccccctcaccatcactctgcaactcaaagacaaatatggtcagacgctggtgaccagaaaaatggaaacggaagcttttggtgacagtaatgccacgcgaaccacagacgcatttctggaaacggagtgcgtggaaaatgtcgccacaaccgaaatcattaaagcaactgaagaaagtaacggccatcgtgtcagtctgccgttatcggttttcaatccccaggactaccatccactgctgattaccgtttccggaaaaaacgttaactga

SEQ ID NO: 4495 - DNA, 234 bp, Escherichia coli
atgccgggttacacagagtatgtcctggctgaaggatctttctcatacgggcaggcggttgctgtcataaccgcttaccgcaatgtgtttatccaggatgacccgggaatgcatttccgtcgggttatccgcaacgcggaaggtcagcgacgctggcgctgccggaattctgaacccgatgccggaaaggtgcttaatacgcggctcgccagtgacggtcttctcagacaataa

SEQ ID NO: 4496 - DNA, 180 bp, Escherichia coli
atggattttatgagcattttggggcgctgtttacttcttcctttccctgttgcgatgtttgtcggttgcctgtttctaggcattgatgatcgttttactggaatgttcatgagttttattgtcggttgtctatcgtggtatatcaccaagccaaaaccgcaaaaggctgaggtcgcgtaa

SEQ ID NO: 4497 - DNA, 1902 bp, Escherichia coli
atggaaatagtatcatttaaagtttctcagtataggtctatttcaggggagatatcctctgataactttaatggattaaccattgttgggcaaaacaacagtggtaaaacaaacctattaaaagctatgagggttttttttgaaggaaaatttaatcctgacttatatgactatgaaaaagataagccacatggtgttaagcaaggacaaactagttttgctgtaagatttactttttctgaaagtgagctagatgatgtctctgaggatttgagccaagacgatgatgatgacgatgatgactcgattattgaacttggtgttttaggggagcaagaagaacctagtaattctatttcatttgatgatggcagctctaaacaacaagaatcaaaaccaactcaatcaagaggcagaaagctaagtttgagagatagatatttgcagctatttaacatgattgatgactccaggttaagttcacctcaaaacgaagtgaccgtacatctgacaatatctaataaaaacaattacttctacactgtctttaaaggttacaagaggaaacctgaagtaacttcctccatgtatacatctgttgaaagaaggttcatagaaaaaatactttctagttttgagtgtgtgtatataccatcgtcaaaaagtattgatgatatatatcataatctattagttccatatgttaggagtgaagtagcttcagccatgaaaacatcggttcaagtgattcatgataaactgttggaagtttctgaaaagataacaaatgaaatgattctaagcggtatagatgactgtagctttatgattaaagctccgccatctcttgatgagttatttggtcgctttgaggtttcaataaaagatactattgagaatgtgatatcgagtaaaggtatggggctacaatgcttatctttattttcttcatttaaatctatttcagagagaaaacttactctaggtaagaaaacgatttggatggttgaggagcctgagtctttcttgcatccctcattaggccggtcatgtaatcacattttcaaatcactgatggatgttgcttatgttcttattacaactcattccttatcatttgtcagtgatgagccaagtaagatcattgagttatataaagatgacgccggtgttacaaaagacaaaaagcatgaaaaaagatttaatgcagttgcaagcataagagaaaatcttggggtcagattttctgatttctttaacatatcaagtagtgcagttttcgttgaaggtatcaccgacaaacaatatatagaatcaatattgaaattgacatctgaacatgatgagtttaagaacagatggccttttctgaggagtgctaaagttgatgagtttggtggagtcagtcaacttggaggattcttgaaagggtgctacgagtttatttctaaagatgtccccgtaatatctgtttttgacggtgatgaagctggggtcaaagaaagaaccagattacaaagctactttggtaaaaaacaaattagatttgagtcaaataaagactatatttctgtaagaagtggttttgctattgaaggcctcttccctgacgatttcatttctgacgcaatggaaacccatccgtcgtggtttatcggaggaaaatctgttgatgccgatgatgtaattgaaccattcaaagtgcaagataataaaaaaactaacttattaaatttcttcctggaaagatgtcgtgttcaacctatatgcggttggatttctcggtgggaaaaggtgtttaacgtcatagactcagccttgcgagataaaagtgaatccatcacaaacaaaaaacgaaccgaagatacttccggtaacacttcagatcatcaagctgcataa

SEQ ID NO: 4498 - DNA, 510 bp, Escherichia coli
atggcaactgagtgggtagatgtggctgataatgccgttaaaattgggctgggtgcattaatcaccattgttggtggctggattacactgaaattaacacactgccacgaaataagaaaagatgcaatagctcagcgactgcgggatatagataaaaaaactgaccgctatatagattttctttcttcatcgcaaacgctaatgcagaaatatctttatgaatcatgtaatccaggtagcgaggactacaccaattatatgcggttgcataatattgtaagcctgacatcctcccctgaattgcgaatctatgcttttgatactcagtccaaagtatcgcaatttatcctgctcagaaagcccaacgaaccagaggttattgattcctgtcgcaatgccgcgagaaacgccgtttctgtgcttcagggggcagtgagtgctgaattgcttcaggataaagcagcacttcaggacaaacaacatgcatggtgggctttctggcgaaaataa

SEQ ID NO: 4499 - DNA, 612 bp, Escherichia coli
atgagtggacgaatcacaaccttatgcactgcatttggggtggttatcgcagcagtgggactttacctaccatataaaaatgaattgaatgctgctctttatcaaagagaattccttaccggaaaatggtcaacagatgctgaatatattattaatagtggggatcttggactagataaaccgcaatcaattatgactatacaattatttgttgataaagatggttctattgatggtgaatttatctcagaaggattatgtgatgcaatgcctttgacgtggaatataacttttaatagtgacagtccatctctaattaattttatttttgcgagaaaattccaaattagacaactagttaacggggcaatggataaaagccctgttgtagctacattaaaattagttgatgaagatcataaacataattcgatagtgtttgatgtggtcaacgattctaccggaaccttacctaaacagatcactttagctaaaaaccttccgaaattcgaagaaaactataaatacctacagagttattgcgctaactcaactgaaaagatgtacgaaaagatgatgccagagatcaggaatttgaacaaaggtttataa

SEQ ID NO: 4500 - DNA, 459 bp, Escherichia coli
atgcgtatgtttctcggtggcagatgttacaccgctgaaaatcttgaaagggatttcctttcagaactgaccagatacagcgatgaacgctgggaagccccgcaacgtggcgcacgtctggcggcagcggtgaagcgttacaaaacctcggaaatgctgcggtttatttttgccaccatagcatatgaccctgacccggatttaacaccgctggccgttaaacggttgtgcaatgcgttgtttggcagaacggggagccagtggctgattgtggaattattcggggataaggagcggcagcaccgcagcaacgacagcaccctggaggccgtggaaaaaatggctgccagatatcgtcatgcggcaagacagcactgggcggcaacgctggacgaaattgaacgggtaaagcgtctgtatcaggagggaatcaaggcatccagaataaaagagagttaa

SEQ ID NO: 4501 - DNA, 627 bp, Escherichia coli
atggggcggacgtaccatgaagataaccgctccccgggtgacctgccgggaacgaagacgcagatgaccatccggtcaaaaacctataaaggaagcggatttaacgagctgcggtttgaagacgccaccagtaatgagcaggtgtatatccatgcgcagaagaacatggatacggaggtgctcaacgaccggacaacggatgtgaaacatgaccatacggaaaccatcggtaacgaccagaagataacggtggggttggggcagacggtgaatgtggggagcaaaaaggaaggtggtcatgaccagaaagtgacagtggcgaatgaccagaccattacggtacaaaacgatcagcggctggatgttacccacgatcgtcacaaggatgtagggaacgatcaaatcagtaagataataggaaaagataccgaagaagtcgtgaaatcccaggatattaaagttggagaagattacagcctgacagttaccaacagcctcaccattaaagtcggtgaatgcttactgaaaatgaataaggacggtactatcattctcaatggtaaaagtatccagattgaaggaaaagataaaataaatattttcggcgcagatattgatctggattaa

SEQ ID NO: 4502 - DNA, 942 bp, Escherichia coli
atgaatattgaaaatgaaactggttttcctcactttcagttcgaaaaagtgggatattatggtgagttattcacagtagtggtagttaatcagacatttgatttttcatatagcggcggtctttgtctgattgcggatgagcagcgactgccactgatgaccgactcctggttcggcgaaccggaaagcagcagtcttaaaacagcaaccgatttggtttgcagaaaagtcagggcagatgttttattaaatggacacgcatggcatgccaccggggaaaccactcgatggcaggccagtttacaggtgggtaatcttcagcgccaatttgatatatgtggcccttgccaatggcaatatatatctaaccgctggcaacttagcgaacctgaattaactgatcgggtactgttacgccatgaactggcgtcagccagtgaatttaatcctgtaggcattgttattccctccctgataacgcctggcgataaatcgccctgtccagctccacagttatctgcctcaccaggagctatttgccgtagctggccttcacgattgcgctatgccagaggttttacagaacagtggcaaaagactgttcagcctttttatccagatgaattcgattttgcattcatgaattattctccaccagaacaacaatacgatggttatttaattggcaatgaaaaaattatattgaacggcctgttaccttctaaaatggaacaaacttgtttccttccagatattagactattggcgtatttgttttaccgctctgataaaaacgtagaactgcgcccattgttggctgacacactgaccatccacacagacgatgagcaactaacactactctggcgcttaacgctccccgtggattcacttccacaacgtattgttttgacgacggagcagaggggacctcatggctga

SEQ ID NO: 4503 - DNA, 1134 bp, Escherichia coli
atggctgaaaatcatattggttgtcgtgaatctaagtacgttgcgatatgtattgcgcctgatgtctgcaaggttggtgatgcgatagtgccgtttgacagctttcaggacctgacacatgagaaaatttatatcagcaatgtcagggcacggggcaatccaatactgaccgtggactgtattattgcaggtacacgaagtaatgccgggaaaggtgtcagttctggcaccagtctaggcagcggtgactgccggatattgacaggcgtggatcatataaagtgcaagggaaagccggtagccaggaatctttcgctggttgccatgaataatgataatacagttggtaaactgtatacccagacaaacccgccaaatcagataatacctgttaaagaatcatcgctctgggccaggtatctggaactgcaaagacaacagcaagagtttgagcttgagtccaaaaagcaagaagcagatgcaatgataggattaggcaaggcatttattaatggctggtatatgttgggtgcattgattgccaaaggtcagatgcaaaatgacattgcccaaatggaaagtaatattgctctggcgagagggttgggaatggatacccaaattatggagcgggcgaatgagaccaacagggaggtaatggaaactattgatcctagagagccattgttgaaacctgccaatgaaacccaagcaatggcgatggaggttgagccatggctggaacttatgaccggggttggagcactggtgaaaggtttggtcaagttttcagcgaagtttgcaataaaatcggttggcagaatggggaggagcggtgctaaaattgtgctggatgcaaatggattgcctattcctgttcctccaagcgttggcgctgcgggaagtgttccgagagtattacaaactggaggtaatactcttgaggcaagaactgccagggagttaaatgaattttttggtaaaaatattaacaggagagaatgggggaaagctttagaaaagttgaaaaaagatttacgcttacgaggtgatcaccatggtcgaatacttgataatggtgattatattgatgactcaggaaatattttaggaaacatagaggattatttatga

SEQ ID NO: 4504 - DNA, 480 bp, Escherichia coli
atgattaagaatatacaatcaaggcttaccccgatatctcatgaatatccaagttgtgatgagtgctatgctagcctcttgatttacacaggtaatactcaccctaatgaaataagtattcacttagaacttgagccaacatcaatcaatataaaaggagatgaaattattactctatcgggaaagaaaagatatgcaaaaaattcatattggatgctctcgtcagaaaatctagtgaactcgaaagatattcgagaacatctggattggctacttcacaaacttggacctaaatcatcaaatattgcaaaattgcaagcattagaaaatatttcaatgggtattgactgtacctggagatcattgaattggcacggtgggccaactttatggcctgagcagatgaaaataatggctaatcttggattggagtgttcatttgatatttatttcgtcggcaatgaagatggcaatctttaa

SEQ ID NO: 4505 - DNA, 672 bp, Escherichia coli
atgaataagtggctgcatcgtaatggtttcacctacaaaaaaccgtcaggcgtcccccataaattcagtgaagagaaacaaaggcaattcattgaatattataaggaactgaaaacaactgtgggtgatgagccgattctttttattgatggagtccatccgactcaggccactaaaatcagctatggctggatacgcaaaggccagaaaaaagcagtaaaaacaacaggcagccgcacacgcctgaatatcatgggggcgctgaatctgaaagcactgacgtcaccgctaatctgcgaatataaaaccattaatgaatataatgtatcccgttttttcaatgagatacgaaaggtttatcctgattataaccagaaaatccacgttattctggatggagcaggttaccaccgttcacagttagtgaaagactgggcggaagtggtaaatatcaggctgcattaccttcccccttacagcccaaacctgaatccgatagaaagaatgtggaaattaatgaacgaacatgcccggaataatcgctacttcagcagtacgcgagagttcagggaagcaatatctgtcttttttaaccagacactgccggatatagcggactcactgacatcccgaattaacgatcactttcaggtgctcacacccgcatcttga

SEQ ID NO: 4506 - DNA, 372 bp, Escherichia coli
atgagtgaaaagcgtcatggcagagaagaaattcgtcttcacattgtctgcgatatccctgatgaacttattgatttcacgtttgaatggaaagggctgaagaaattatgcatggcagtctcctttcgttcaataataacagaacaaaagaaagagccagaaatgacggtcagatattatatcagttctgctgatttaaccgcagagaagttcgccacagcaatccgaaaccactggtacgtggagaataagctgtactggcgtctggacgtggtaatgaatgaagacgacagcaaaataagaagaggaaactcagcagaattatttttagggatacggcatatcgctattcagggcagggttaagacgtaa

SEQ ID NO: 4507 - DNA, 927 bp, Escherichia coli
atgacgccttacctacagtttgaccgcaaccagtgggcagctctgcgtgattccgtacctatgacgttatcggaagatgagatcgcccgtctcaaaggtattaatgaagatctctcgttagaagaagttgccgagatctatttacctctgtcacgtttgctgaacttctatataagctcgaatctgcgccgtcaggcagttctggaacagtttcttggtaccaacgggcaacgcattccttacattatcagtattgctggtagtgtcgcggtggggaaaagtacaaccgcccgtgtattgcaggcgctattaagccgttggccggaacatcgtcgtgttgaactgatcactacagatggcttccttcaccctaatcaggttctgaaagaacgtggtctgatgaagaagaaaggcttcccggaatcgtatgatatgcatcgcctggtgaagtttgtttccgatctcaaatccggcgtgccaaacgttacagcccctgtttactcgcatcttatttatgatgtgatcccggatggagataaaactgttgttcagcctgatattttaattcttgaagggttaaatgtcttacagagcgggatggattatccacacgatccacatcatgtatttgtttctgattttgtcgatttttcgatatatgttgatgcaccggaagacttacttcagacgtggtatatcaaccgttttctgaaattccgcgaaggggcttttacagacccggattcctattttcataactacgcgaaattaactaaagaagaagctattaagactgccatgacattgtggaaagagatcaactggctgaacttaaagcaaaatattctacctactcgcgagcgtgccagtttaatcctgacgaaaagtgctaatcatgcagtagaagaggtcagactacgcaaataa

SEQ ID NO: 4508 - DNA, 966 bp, Escherichia coli
atgaaggataacaccgtgccactgaaattgatcgccctgttagcgaatggcgaatttcactctggcgagcagttgggtgaaacgctgggaatgagccgggcggctattaataaacacattcagacactgcgtgactggggcgttgatgtatttactgttccgggtaaaggatacagcttgcccgagccaatccagttacttaatgccgaaaagatattgagtcagctggatgacggcagtgtagccgtgctgccagttattgactccacgaatcagtatctcctggaccgcatcggagagcttaaatctggcgatgcctgtgttgcagaataccagcatgctggccgtggtcgtcgtggtcggaaatggttttcgccttttggcgcgaacttatatttgtcgatgttctggcgtctggaacagggcccggcggcggcgattggtttaagtctggttatcggtatcgtgatggcggaagtattacgcaagctgggtgcagataaagttcgtgttaaatggcctaatgacctctatctgcaggatcgcaagctggcaggcattcttgtggagctgactggcaaaaccggcgatgcggcgcaaatagtcattggtgcagggatcaacatggcaatgcgtcgtgttgaagagagtgtcgttaatcaagggtggatcacgctgcaggaagccgggatcaatctcgatcgtaatactcttgcggccatgctgatacgtgaattacgcgcggcgctggaactcttcgagcaagaaggattgacaccttatctttcgcgctgggaaaagttggataattttattaatcgcccagtgaaacttatcattggtgataaagaaatatttggcatttcacgcggaatagacaaacagggtgctttattacttgagcaggatggaataataaaaccctggatgggcggtgaaatatccctgcgtagtgcagaaaaataa

SEQ ID NO: 4509 - DNA, 1029 bp, Escherichia coli
atgaaccactccttaaaaccctggaacacatttggcattgatcataatgctcagcacattgtatgtgccgaagacgaacaacaattactcaatgcctggcagcatgcaaccgcagaaggacaacccgttcttattctgggtgaaggaagtaatgtactttttctggaggactatcgcggcacggtgatcatcaaccggatcaaaggtatcgaaattcatgatgaacctgatgcgtggtatttacatgtaggagccggagaaaactggcatcgcctggtaaaatacactttgcaggaaggtatgcctggtctggaaaatctggcattaattcctggttgtatcggctcatcacctatccagaatattggtgcttatggcgtagaattacagcgagtttgcgcttatgttgattgtgttgaactggcgacaggcaagcaagtacgcttaactgccaaagagtgccgttttggctatcgagacagtatttttaaacatgaataccaggatcgcttcgccattgtagccgtaggtctgcgtctgccaaaagagtggcaacctgtactgacgtatggtgacttaactcgcctggatccttcaacggtaacgccacagcaagtatttgatgcggtgtgtcatatgcgcaccaccaaactccctgatccaaaagtgaacggtaatgcgggtagtttcttcaaaaatcctgttgtttctgccgaaactgctaacgcgttgttggcacaatttccaacagccccacattacccccaggtggatggttcagtaaaactggccgcgggttggcttattgatcagtgccagcttaaagggacgcaaattggtggggctgcggtacaccgtcaacaggcgctggttctcataaatgagcacgatgcaaaaagcgaagatgttgtacagctggcgcatcatgtaagacaaaaagtgggtgaaaaatttaatgtctggcttgagcctgaagtccgctttattggtgcatcaggtgaagtgagcgcagtggagacaatttcatga

SEQ ID NO: 4510 - DNA, 2847 bp, Escherichia coli
atgaaacgacatctgaacaccagctacaggctggtatggaatcacattacaggcaccctggtggtggcttccgaactggcacgctcacggggaaaaggcgccggtgtggcggttgctctgtctcttgctgctgtcacgtcagtcccggcactggctgctgacacggttgtacaggcgggagaaaccgtgaacggcggaacactgacaaatcatgacaaccagattgtcctcggtacggccaacggaatgaccatcagtaccgggctggagtatgggccggataacgaggccaataccggcgggcaatggatacaaaatggcggtatcgccaacaacactactgtcaccggtggtggtcttcagagagtgaatgccggaggaagcgtttcagacacggttatcagtgccggaggcggacagagccttcaggggcaggcagtgaacaccactctgaacggcggtgagcagtgggtacatgaaggcgggattgcaacgggtaccgtcattaatgagaagggctggcaggccgtcaaatccggtgcaatggcaaccgacacggttgtgaataccggcgcggaaggaggaccggatgcggaaaatggtgataccgggcagaccgtctacggagatgccgtacgcaccaccatcaataaaaatggtcgtcagattgtggctgctgaaggaacggcaaataccactgtggtttatgccggcggcgaccagactgtacatggtcacgcactggataccacgctgaatggggggtaccagtatgtgcacaacggaggtacagcatctgacactgttgttaacagtgacggctggcagattatcaaggaaggtggtctggcggatttcaccaccgttaaccagaaaggtaaactgcaggtgaacgccggtggtacagccacgaatgtcaccctgacgcagggcggcgcactggtcaccagtacggcggcaaccgtcaccggcagcaaccgtctgggcaatttcactgtggaaaacggtaatgctgacggtgttgttctggagtccggtggtcgcctggatgtactggagggccattcagcctggaaaacactggtggatgacggcggtaccctggcagtgtctgccggtggtaaggcaacagatgtcaccatgacatccggtggtgccctgattgcagacagtggtgccactgttgaggggaccaatgccagcggtaagttcagtattgatggcatatccggtcaggccagcggcctgctgctggaaaatggcggcagctttacggttaatgccggaggactggccagcaacaccactgtcggacatcgtggaacactgacgctggccgccgggggaagtctgagtggcagaacacagctcagtaaaggcgccagtatggtactgaatggtgatgtggtcagtaccggcgatattgttaacgccggagagattcgctttgataatcagacgacaccggatgccgcactgagccgtgctgttgcaaaaggcgactccccggtaacgttccataaactgaccaccagtaacctcaccggtcagggtggcaccatcaatatgcgtgttcgccttgatggcagcaatgcctctgaccagctggtgattaatggtggtcaggcaaccggcaaaacctggcttgcgtttacaaatgtcggaaacagtaacctcggggtggcaacctccggacagggtatccgggttgtggatgcacagaatggtgccaccacagaagaaggtgcgtttgccctgagtcgcccgcttcaggccggcgcctttaactacaccctgaaccgtgacagcgatgaagactggtacctgcgcagtgaaaatgcttatcgtgctgaagtccccctgtatgcctccatgctgacacaggcaatggactatgaccggattctggcaggctcccgcagccatcagagcggtgtaagcggtgaaaataacagcgtccgtctcagcattcagggcggtcatctcgggcacgataacaacggtggtattgcccgtggggccacgccggaaagcaacggcagctatggcttcgtccgtctggagggtgacctgctcagaacagaggttgccggtatgtcactgacgacaggagtgtatggtgctgcaggccattcttccgttgatgttaaggatgatgacggctcccgcgccggcacggtccgggatgatgccggcagcctgggcggatacctgcatctggtacacacgtcctccggcctgtgggctgacattgtggcacagggaacccgccacagcatgaaagcgtcatcggacaataacgacttccgcgcccggggctggggctggctgggctcactggaaaccggtctgcccttcagtatcactgacaacctgatgctggagccacaactgcagtacacctggcagggactctccctggatgacggccaggataacgccggttatgtgaagttcgggcatggcagtgcacaacatgtgcgtgccggcttccgtctgggcagccacaacgatatgaactttggtaaaggcacctcatcccgtgacaccctgcacgacagtgcaaaacacagtgtgcgtgaactgccggtgaactggtgggtacagccttctgttatccgcaccttcagctcccggggagatatgcgtgtggggacttccactgcaggcagcgggatgacgttctcaccgtcccggaatggcacgtcactggacctgcaggccggactggaagcccgtgtccgggaaaatatcaccctgggcgttcaggccggttatgcccacagtgtcagcggcagcagcgctgaagggtataacggtcaggccacactgaacgtgactttctga

SEQ ID NO: 4511 - DNA, 594 bp, Escherichia coli
atgaagaatttgctcgttaaaaaacctgaagttaaagattttttttcaaaagataaattcccactcaatttagttgatgggtcttatccaatatttatttcactgaaagatcgagggatatacgctgcgcactcaatatttatttgctcggatgatgagcttcatgcaataaaggaacatttatctaatatatttaatgtaaataaagatgctatcggaaacgaaggggtcatttacgatagtggcattgtacaccaccccctctttagagatgctattgagatacaaaaaacatactctttaatttacacattcactaaatcattcaaagggaatttgattgatttagtgacgaactcttctttttttgttgaaactattaaatctgctggaataaaagaacctgtgccatgggatgtttttcctgagttggaacccgatactttcggtagcttacaaggagaacttgagttctggtgggagagtatctggtctccgttctggcacagtctatcacctgatgaaagaaacgatttcttagtgaaaaataatgcgacaccacaatggcgagagttcattgagtttcattgttga

SEQ ID NO: 4512 - DNA, 819 bp, Escherichia coli
atgcctgcaagaggtttcttttttatagttatcgatgaaccgggaaaagatggctttcttgtcagaaaaatatatgcttcaccaaatagcccctacctgacaaagatgaatctggatcctcttagattattatcagaaacagagcctgaacgctatgggttgatgccaaaagattattcagcacccactactgtagcagaacatgttatggggaacaacaaatcctcgttgatttctacaagctctatatttcctgatggctctccgagatttgaggggaaaaccatatttattgatgttcacaaagcaaaaaatgccgggttgaagttaatctcgaccgcagagattattactgctcttgaggagtataagaaacaataccctcatttggctaagcgtgttgaaaaaatttcaggctatgttgatgatattgataaagaggtcttgatcgaaggtagaaaagtaccagcacaaacaatttttacaccagagtctctaaaaacgactcaaaacattgttaaggccgggcgtgtcgtacaggtttttagtatttttttcactgcatatgatttagaacaggcaactgaaaaatcgtttgaaacaaaaagcataaaacctataggtgcagaagcaataaggcaaattggaggatggggaggagccgtagctggtgctaaaattggaacagtgataggcgcgtccctgggtgttactactgggccaggagcagtggctaccgggattattggcgggattgtttttggtgcagctggttattttggtgcagattgggtagcggattatatagatgaaaactaa

SEQ ID NO: 4513 - DNA, 1164 bp, Escherichia coli
atgaggaaaacgacagtagtactttcagccgttgcggtagcggtcatggttgctaccggcgctcaggcggcggaggtttataataaggatggaaataaagtcgatatttatggccgtgcgacagctcttcactatttctcagatgataaaggtgacaatggtgataagacctatgcacgtcttggttttaaaggtgaaacgcaaattaatgatcaactgacaggttttggccggtgggagtatcagttctcgggcaataaggctgagtcagaggggactgccggcaacaagacgcgtctggcgtttgcaggcctgaagtttgctgagcttggcagtattgactatgggcgtaattatggcatcgcttatgatgtcgggtcatatactgacgttctgccggagtttggtggagacggctggacccatacagataatttcatgaacgcccgtaccactggtgtgctgacctaccgtaatacagatttctttggacttgttgatggacttaattttgctgcacagtatcagggaaaaaatgaacgggatgatcttcgtaagtccaatggagacggatacggtttttctgccagctatgaacatgatggctttggccttgtggctgcttatacaaactctgaccgtaccggtagccaggttaacggtctgaatggtaagaaaacaaccgagtttgttgacccagttacgggagatgtaacaaagaaagagttgattgttgattcaggtagcgttgcaaaaggtaaacgcgctgagatgtgggggacggggttgaaatatgatgccaataatctgtatctggcagccacctattctgaaacacagaatatgactgctttcggcgataagggtgtggcagataaagctcaaaatattgaggctgttgtccagtatcagtttgatttcggcctgcgtccttctcttgcttatctgcagtcccgtgggaaggatgtgatcgtcagagggatgaattatagtgatcaggatcttgtaaaatatattgatgttggcacaacatattatttcaacaagaatatgtccacatatgtagattataaaataaacctgattgataaaaataaattcgctcaggatgctggcgtggctacggataatatcgttgctgtaggtatggtctatcagttctga

SEQ ID NO: 4514 - DNA, 543 bp, Escherichia coli
gtgaaaacgggggctgaagccatccgggcgctggccacgcagcttccggcgtttcgccagaaactgaatgagggctggtatcaggtgcgcatttccgggcgtgatgcaggcgaaaacgaattatctgcccatcttaatgagccgctagcaaatggtgccgtgatccacatcgtaccgcgtctggcgggtgccaaaagtggcggtatttttcaggcagtgctgggtgcggcgctaattgctacggcaatctggatgccggggcttagtattgttgcaagtaatctcatgttctctcttggggcaggtatggttttaggcggtgttgcgcagatgctggcaccgaaagccaaaacgcctaaagtgtcagccactgataacggtaagcaaaatacctatttttcctcattggataacatggttgcccagggcaatgtcctgcctgttctgtacggtgaaatgcgcgtggggtcacgtgtggcatctcaggagatcagcacggcagatgaaggggatggtggtcaggttgtggtaattgggcggtaa

SEQ ID NO: 4515 - DNA, 600 bp, Escherichia coli
atgtcgccggaggactggctgcaggcagaaatgcagggtgagattgtggcgctggtccacagtcaccccggtggtctgccctggctgagtgaggccgatcggcggctgcaggtgcagagtgatttgccgtggtggctggtctgccggggggcgatttacaagttccgctgtgtgccacatcttaccgggcggcgctttgagcacggggtgactgactgttacacgctgttccgggacgcttaccatctggcgggaattgagatgccggattttcatcgcgaggacgactggtggcgtaatggtcagaatctctatctggataatctggaggccacagggctgtatcaggtgccgttgtcagcggcgcagccgggcgatgtgctgctgtgctgttttggttcatcggtgccgaatcatgccgccatttactgtggtgacggcgagctgctgcaccatattcctgaacaactgagcaaacgagagaggtataccgacaaatggcagcgacgcacacactccctctggcgtcaccgggcatggcacgcatctgcctttacggggatttacaacgatttggtcgccgcatcgaccttcgtgtga

SEQ ID NO: 4516 - DNA, 432 bp, Escherichia coli
atggaaaagacatattattttaatccctctgattcgggattttatatttcacaagatagccaaaccattcctgagaacgctacgaaaataaactttactatttattctgagttcgcaggagttgcatggcctgatggtaaaatacttggttcagataaaaatggttttccagcatggcaggatgcgccaccacttaccagcgaagaattaatctcaatcgctgaatcaaataaacagcgattagttaatcaggccaacgaatacatgaacagtaaacaatggcctggtaaagcggtgattggtcgtctgaaaggtgaggaactggcgcaatataatttgtggctggattatctggacgcactggaactggtcgatacttccagtgcgccagatattgaatggcctactcctccggcagttcaggccagatga

SEQ ID NO: 4517 - DNA, 603 bp, Escherichia coli
atgaataacgcagaattaaacagtgaattaattgccactatggcaggagaaattactgtttataactttgatgtcatgagtcgggaatatatttcagcttcaactgaatatcttgctgttggtgtcggcattccggcatattcctgtttagatgctccaggcacctacaaagctggttatgcaatctgccgctctgcagattttaactcatgggaatatgtaccagaccatcgcggtgaaatcgtctataacaccgaaacgggagacgccaaagaaatcacaactccgggtgattaccccgaaaaaacaaccactatcgccccgttaacgccatacgataaatgggatggtgagaaatgggtgacggatactgagacacagcatagcgccgcagtagacgcggcagaagcacaacgtcagtcactgattgatactgcaatggcttccattagtctgattcaactgaaattgcaggccgggcggaagctgatgcaggcagagaccacccgacttaacactgtgctggattacattgacgcggtgacggcaacagataccagtaccgcgccggatgtcatctggcctgaactgccggaggagtag

SEQ ID NO: 4518 - DNA, 477 bp, Escherichia coli
atgcaacagctttcctttctgcccggagagatgacgcccggcgagcgcagtctcattctgcgggccctgaaaaccctggaccgccatcttcatgaacccggcgtggccttcacctccacccgtgcggcacgggaatggctgattctgaacatggcgggactggagcgtgaagagttccgggtgctgtatctgaataaccagaatcagctgattgccggtgaaaccctcttcaccggcaccatcaaccgcacggaagtccatccccgggaagtgattaaacgcgccctgtatcacaatgccgcagccgtggtgctggcacacaatcacccgtccggtgaagtcacccccagtaaggcagaccgccttatcacggaacgtctggtacaggcactgggcctggtggatatccgggtgccggaccatctgatagtcggtggcagccaggttttctcctttgccgaacatggtctgctttaa

SEQ ID NO: 4519 - DNA, 222 bp, Escherichia coli
atgaaaatcatcacccgtggtgaagccatgcgtattcaccaacagcatcctgcatcccgtctttttccgttctgtaccggcaaataccgctggcacggcagcactgaaacgtataccggtcgtgaagtgcaggatattcccggtgtgctggccgtgtttgctgaacgccgtaaggacagttttggcccgtatgtccggctgatgagcgtcactctgaactga

SEQ ID NO: 4520 - DNA, 645 bp, Escherichia coli
atgagcagaattatcaccaccaccgtgtatacactgcatgagctatcctccaccgcacaggaaaaagcccgcgactggtaccgtcagcatcatgctgacagcaactggtatgaaaacgtgtatgaggacttcagggaggtctgtggcattttcggaattgacctccgccagcgcgttttccggctcagcaacggcaggtttatggaagagccgtgcatctggttcagcggattctgcagtcagggggacggagcctgttttgaagggcgctggcactggcagccagcgacaccccggaaaatcagggaatatgcccctcaggaccgtgagcttcatcgtatcgcggatgccctgcaggcggtacagaagcgtaacttctggcagttacaggctgaaatcagtcaccggggacgttactgccatccgtacagcatggatatcaccgtcacccggaacagtccgactggtcaggcactgacagccgatgcggaagccgctgtcagcgaagccctgcgcgacctggccttctggctgtaccgccagctggaaaacgagtacgactggctgacctcagacgccgctgtagatgaggccattcacatcaatgcatataccttcaccgaagccggtctccacgccggctga

SEQ ID NO: 4521 - DNA, 573 bp, Escherichia coli
gtgaaaacgggggctgaagccatccgggcactggccacacagctcccggcgtttcgtcagaaactgagcgacggctggtatcaggtacggattgccgggcaggatgtcagcacgtccggattaacggcgcagttacatgagactctgcctgacggcgctgtgattcatattgttcccagagtcgccggggccaagtcaggtggtgtattccagattgtcctgggagcagccgccattgccggatcattctttaccgccggagccacccttgcagcatggggggcagccattggggccggtggtatgaccggcatcctgttttctctcggtgccagtatggtgctcggtggtgtggcgcagatgctggcaccgaaagcccggacgcccacagcgaccagcacggataacggtaagcagaacacgtatttctcttcactggataacatggttgcccagggcaatgttctgcctgttctgtacggtgaaatgcgcgtggggtcacgcgtggtttctcaggagatcagcacggcagacgaaggggatggtggtcaggttgtggtgattggtcgctga

SEQ ID NO: 4522 - DNA, 600 bp, Escherichia coli
atggctccggaggactggctgcaggcagagatgcggggtgagattgtggcactggtccacagtcatcacggtggtctgccctggctgagtgaggctgaccggcggctgcaggtgcagagtgatttgccgtggtggctggtctgccggggtgagattcacaagttccgctgtgtgccgcatctcaccgggcgtcgctttgagcacggggtgacggactgttacacgctgttccgggacgcttaccatctggcgggaattgagatgccggattttcatcgcgaggacgactggtggcgtaatggtcagaatctctatctggataatctggaggccacagggctgtatcaggtggcgttgtcatcagcacaaccgggcgatgtgctgctgtgctgttttggttcatcggtgccgaatcatgccgccatttactgcgacgacggtgagctgctgcaccatattcctgaacaactgagcaaacgagagaggtataccgacaaatggcagcgacgcacacactccctctggcgtcaccgggcatggcacgcatctgcctttacggggatttgcaacgatttggccgccgcatcgaccttcgtgtga

SEQ ID NO: 4523 - DNA, 819 bp, Escherichia coli
atggcgaagcccttctgcgcccacgctgaaatccacggtctgcgtttccagcagttccgttttaatcagccacagcccggctcggtgtgcctgcccccggctggtacaaccaaaggcatccatcttcgtgacattacgaccgtaacgggcaatggcctgcgtatcttcaacaagctctgttgccgtttcccagccgttatccgggtcaatccagttcacctcaacggcattatggcggtccttcagggcgctgaagctgtagcggaacggcgcgccatcatccggcatcaccacattactgcggttataggtccacaccttatccgactgtcggtcctgcacgaacgtcagcgtctgcccgttccataccggcatacagcgcatcgccgagcagaaatcactgagcacatcccacgccttgcgctgtgtggtcaggtaagcgttacaggtgatgcgcggctccgtgccaccaaagccatccggcaccgactggtcgcaattctggccgatgacatacagcgcccatttgtccacatccgccgcaccgagacgcttccccatgccgtagcgcggatgggtcagcatatcccacagacaccaggccatgttgttgctgtatgccggtttaaacgtcccgtcccagataccgctgtattgccgcgtctgcgggttatagttcgacggcacctgcagaatgcgcccgcgaagatgataattacggctcacctgctggctgccgaactgctccgaatccacctgcacgccgaccagtgccgtgttcgggtagcactgtttcacatcgatgatttcggtgtatga

SEQ ID NO: 4524 - DNA, 909 bp, Escherichia coli
gtgctccactgtgtccgtcgtgccgtccggtttagtgaccgtcagtgtcagggtatcaccggcagcactgcctttcggtaccgtgacttcggtctgcacaccgtccttcagctcttcggcattcacgccgtctgctgcttccggaatggtcactaccggtgttgcatccaccacaccgtcaccgtcagtatcgcccgggatctgagtatcgacagtaaagtctgtcggctggccctggccactcgtgttacctgccgggtctgtgatttccgcagttacagaatactggccatctgccgtcactttatctgcaggaatggtcacatctgctttacctgcagtcacttcatctgcggtcagcgtgtgctccactgtgtccgtcgtgccgtccggtttagtgaccgtcagtgtcagggtatcaccggcagcactgcctttcggtaccgtgacttcggtctgcacaccgtccttcagctcttcggcattcacgccgtctgctgcttccggaatggctactaccggtgttgcatctgttgcaccatcaccatcggtatcccccgggatctgggtatcggcagtaaaatcaaccacattcccgggcttcgccgggttactgccctgagtcagactgacactgacgctgttctgcccgtcaatcaccgcatccttcggaatatccatggatactttaccggcagccacttcatctttagtcacggtatgcgtcacgttctccgtggttttatccggacgggtcacagtcagtgtaataaccgcaccttctgccgtgcctgccggcaacgtgacctctgcctgcaaaccatccttcagctcatcggcattggcataaccgtcagccacttcaggaatgctcaggaccggggcatctgccacaccatcagtttttga

SEQ ID NO: 4525 - DNA, 603 bp, Escherichia coli
atgcaacagctcggcctgaagtctcctgtgcgcctgaagaaataccggtcttaccggggaaatatgggactcgctgcagaaaatatccttcagcgacagttcaaagcggaagctccctgtgagaaatgggtgacagatatcaccgaattcagggctggcggacaaaaactgtacctgtccccgatacttgatttgtttaacggggaaatcgtggcgtgggaaacggcctgcaggcctacagaggagctggtgaagcggatgttaaaaaagggtctggaaagccttgctgaaggggagaaaccgctgctccacagtgatcaaggatggcattaccggataaaaagttatcagtccgccctggcggacagagggttagtgcagagcatgtcgcgcaagggcaactgccttgataatgcggtaatggagaacttctttggtcacctgaaagaagaaatgtactatcgccgggactacagaaatgtagaagagctggaaaatgccgttaacgaatacataacttactggaatcaaaaaagaataaaactcagtcttgggggactcagcccggtagaataccggactgagtatcaaaaagccggttaa

SEQ ID NO: 4526 - DNA, 174 bp, Escherichia coli
atgacccgttctgatgatacccatgaaaacgaggcaaacatgacgccggaagagatgaagaatgagctgcgttatcttcgcgcagaaaatgcatatctgaaagccatgcaggagcatcttctggaaaaaaagcgccaggagctggagaaaaaacgaaagtcatccagagcctga

SEQ ID NO: 4527 - DNA, 420 bp, Escherichia coli
atgctctttgccacgttcgtcatccagccggattttgttgttcgccggggtacgcagcacgttgcgcttgtagttctggatggtcacatggtcggtgtgcgccgagtcgtgttttaccccggcgatatacggcctgtccgggttgccttcctcaaaggcgatgctgacctccgttcccgccagcagcggcaggtgcaggccgtaggtgtctcccgcatacgggcgcgactggcgtacccacaggctttcataacccggtttccacgtatcgcggtcaaagtcaaggttgacccggtagcgcccgtccttgtcgatatgggcatagatatcgttcttcaccgtgctggtgacccgcgccgggagcgtgccggccattacggggcgggggataagcgccgggcggtagccatagcgctctga

SEQ ID NO: 4528 - DNA, 873 bp, Escherichia coli
atgaatccgtctgatgccattgaggcaattgaaaaaccactttcttccctgccttactcgctttcccgtcacatcctggaacatctgcgcaaactcaccagtcacgaacccgtgattggcattatggggaaaagcggggccggtaaatcctcactctgtaatgcactgtttcagggggaggtcaccccggtcagtgatgttcacgccggcacccgggaagtgcggcgcttccgtctgagtggccatggtcacaacatggttatcactgacctgcccggggtgggcgagagccgggacagggatgcagagtatgaggccctgtaccgtgacattctgcctgaactggacctggtactgtggctgattaaagccgatgaccgtgccctgtctgtggatgagtatttctggcgacacatcctgcaccggggacatcagcaggtgctgtttgtggtgacgcaggccgacaaaacggagccctgccatgaatgggatatggccggtattcagccttctcctgcacaggcacagaatattcgcgaaaaaacggaggcggtattccgtctgttccggcccgtacatccggttgttgccgtatcggtccgcaccggctgggaactggatacgctggtcagtgcgctcatgacagcgcttcccgaccatgccgccagtcccctgatgacccgactgcaggacgagctgcgcacggaatctgtccgcgctcaggcccgtgaacagtttaccggtgcggtggaccggatatttgacacggcggagagcgtctgtattgcctctgttgcacgcacggttctgcgtgccgtccgtgactcggtggtctctgttgcccgcgctgtatggaactggattttcttctga

SEQ ID NO: 4529 - DNA, 1176 bp, Escherichia coli
atggatttatccattaacaaaaactggatcgacaaagaagaatatccgcaatccgctgcaatcgacctgcgttgcgtaaacatggttgccgatctgtggcatgcgcctgcaccgaaaaatggtcaggccgttggcaccaacaccattggttcttccgaggcctgtatgctcggcgggatggcgatgaaatggcgttggcgcaagcgtatggaagccgcaggcaaaccaacggataaaccaaacctggtgtgcggtccggtacaaatctgctggcataaattcgcccgctactgggatgtggagttgcgtgagatccctatgcgccccggtcagttgtttatggacccgaaacgcatgattgaagcctgcgacgaaaataccatcggcgtggtgccgactttcggcgtgacctacaccggtaactatgagttcccgcagccgctgcacgatgcgctggataaattccaggccgacaccggtatcgacatcgacatgcacatcgacgccgccagcggtggcttcctggcaccgttcgtcgccccggatatcgtctgggacttccgcctgccgcgtgtgaaatcgatcagtgcttcaggccataaattcggtctggctccgctgggctgcggctgggttatctggcgtgatgaagaagcgctgccgcaggaactggtgttcaacgttgactacctcggcggtcagattggtactttcgccatcaacttctcccgcccggcgggtcaggtgattgcacagtattatgaattcctgcgcctcggtcgtgaaggctataccaaagtacagaacgcttcctaccaggttgccgcttatctggcggatgaaatcgccaaactggggccgtatgagttcatctgtaccggtcgcccggacgaaggcatcccggcggtttgcttcaaactgaaagatggtgaagatccaggatacaccctgtacgacctctctgaacgtctgcgtctgcgcggctggcaggttccggccttcactctcggcggtgaagccaccgacatcgtggtgatgcgcattatgtgtcgtcgcggcttcgaaatggactttgctgaactgttgctggaagactacaaagcctccctgaaatatctcagcgaccacccgaaactgcagggtattgcccagcagaacagctttaaacacacctga

SEQ ID NO: 4530 - DNA, 486 bp, Escherichia coli
ttgccagtaacggcgattctcattcagttgtcggttcaggctctccgtcagcgcctgctcggcctttctgtagtcatccgtgttatatgtccctttctgctcactatcccgcctcaactgctccagctgttgctggtatttctggcgaagactcagttgtacctgatatcgctgccgctgctgatcacccatacccaccgtggcgatatccaggtcatgttgctgacgctgagcgcgctcttcttcagccagttgactggtcagctgaattgtttttttcttcagctcgttgagtgccgtctgtttctgaagctcctgctgttttacatccagcagcgtcagtgcctgaatcagttcatctttacgggccagcacactcttttcatctgccgtcagttttttcccgtccaggtcgctgatgcgctgctgcagagccagaagctgtttatacgcttctgtcatcctttccgtggcaatgcctgctga

SEQ ID NO: 4531 - DNA, 315 bp, Escherichia coli
atgagagttgagcagaataatttcagggacatgttctccgtttatctctccggcccgccgcagacgcagcatgtgttttgtgtatccccggcggcccgggtcgcgcacacgggtctggcaggcgaagaatggctgaaagccttcccgctgcagactttccagcacggtgatggtgggaatgtacgcataccgtttactgcgggaagtatgccggtctttaccgaaaatactgggaacatagtgcatcagttcttcgtgtgtcagcggacggtcacggcgtatctggttcgcagcataaccaaaacgactggctag

SEQ ID NO: 4532 - DNA, 243 bp, Escherichia coli
atgcacccgatgctcatggcgaccatcagctttgatctgctcgaccactttcttcacatcctgcaccgcattacggtcggcaatcagcactgcatctttggtctgcactaccaccaaatctttcaccccgacggtggtgaccaggccagattcggcgtacacatagctgttttcagttttgtgattaatcacatcgccgtggcaaacgttgccctcggcggtgtgggcgctgatctcccataa

SEQ ID NO: 4533 - DNA, 246 bp, Escherichia coli
atgcagcatgtccctgaaggcgtgattcaggcaccagaatcacccgacgccccggaggcgctgccggggtgtcgttccatttctgatgatgacctgtgcgcctggtgtacccgtctgctttaccgtcccggagaaatcagtctgtgcagactgagtacaggcaatggcatctggccatccgtctgtgaccggaacggttacgcgtacggctgtccggaatttcagccgaatatcattcatccctga

SEQ ID NO: 4534 - DNA, 459 bp, Escherichia coli
atggggaacgaaaagagcttagcgcacacccgatggaactgtaaatatcacatagtatttgcgccaaaataccgaagacaggtgttctacagagagaagcgtagagcaataggctgtattttgagaaagctgtgtgagtggaaaagtgtacggattctggaagctgaatgctgtgcagatcatatccatatgcttgtggagatcccgcccaaaatgagcgtatcaggctttatgggatatctgaaagggaaaagcagtctgatgctttacgagcagtttggtgatttgaaattcaaatacaggaacagggagttctggtgcagagggtattacgtcgatacggtgggtaagaacacggcgaagatacaggattacataaagcaccagcttgaagaggataaaatgggagagcagttatcgattccctatccgggcagcccgtttacgggccgtaagtaa

SEQ ID NO: 4535 - DNA, 393 bp, Escherichia coli
gtgagcgctcatttcgccaccgtagatggcgtcttccttgcgcatacgttctttaataaaggcgtgtccggttttcgacatcaccggcgtgccgcccgcggccgtcaccacatcaacggtgttccaggagagacgtggatcgtggatgatcttcgcgccgggatttttttcgaggaacgcttctgccagcaggccgacaatgtagtagccctcaataaactgccctttttcgtcaaacaggaaacagcggtcaaaatcgccatcaaaggcaatgcccatatccgcgccgtgtttgatgaccgcattgcgggtgtcgtcgcgacattccggcagcaacgggttaggaataccgttggggaaattgccgtccggcgtgttatgcactttgattaa

SEQ ID NO: 4536 - DNA, 501 bp, Escherichia coli
gtgaatgcgaactccgggacgctcaacaacgtcacgattaacgagaactgtcgggttctgggaaaactgtccgcgaaccagattgaaggcgatctcgttaaaacagtgggcaaagctttcccccgggactcccgtgcaccggagcggtggccatcagggaccattaccgtcagggtttatgacgatcagccgtttgaccggcagattgttattccggcggtggcattcagtggcgctaaacatgagagagagcatactgatatttactcctcatgccgtctgatagtgcggaaaaacggtgctgagatttataaccgaacggctctggataatacgctgatatatacgggtgttattgatatgcctgcaggcagtggtgtaatgacactggaattttctgtatcggcatggctggtaaatggctggtatcccacagcaagtatcagcgatttgctggttgtggtgatgaagaaagccaccgcaggcatcagtatcagctga

SEQ ID NO: 4537 - DNA, 198 bp, Escherichia coli
atgctggccaacacctgcacctggacctatcgcggcgatgagtgcggttatagcggtccggcagtcgcggatgaatatgatcagccgacgtccgatatcacgaaggataaatgcagcaaatgcctgagtggctgtaagtttcgcaataacgtcggcaactttggcggcttcctttccattaacaaactttcgcagtaa

SEQ ID NO: 4538 - DNA, 309 bp, Escherichia coli
gtgatcagccgctggcgcatcgagcagtgcagcgaactgagcgcggtgagcgcctcttttgtactgtccacgccgacggaaacggatggcgctgtttttccggggcgcatcatgctggccaacacctgtacctggacctatcgcggtgatgagtgcggttatagcggtccggctgtcgcggatgaatatgaccagccgacgtccgatatcacgaaagataaatgcagtaaatgcctgagtggctgtaagtttcgcaataatgtcggcaactttggcggcttcctttccattaacaaactttcgcagtaa

SEQ ID NO: 4539 - DNA, 846 bp, Escherichia coli
atgacagcctttcgtgccgcatttaaggcatatcgtatgcatcaggtgttaatactgcctcgctttgcacggcttacctttgcccttggcttagcaactgcggtttttcccgttgacgcagagtattattttaatccacggtttttaagcaatgaccttgctgaatctgtcgatttatctgcctttactaagggacgcgaggccccacctggtacatatcgggtcgacatttatttgaacgacgaatttatggctagtcgggatattacttttattgcagatgataataacgcagatctcatcccatgcctgagtacagaccttcttgtcagtcttggcataaaaaaatcagcattattagacaacaaggaacattcggcagataaacatgtgccggacaacagcgcatgcacaccacttcaggatcgtttggctgatgcatcatctgagtttgatgttggtcagcaacatctgtcactctccgttccgcaaatatatgtcggcagaatggctcgcggctatgtttctcctgatctgtgggaagaaggaataaatgcagggctactaaactatagttttaatggtaattctattaataaccgtagtaaccataatgcaggaaaatccaactatgcatatttgaatttacagagtggcatcaacattggtagttggcgactgcgcgataactcaacgtggagttataacagtgggagtagcaattcatctgacagcaataaatggcagcatatcaatacgtcggctgaacgtgacattattccgttacgctcacggttaacagtgggtgatagttataccgatggcgatatttttgacagtgtgtag

SEQ ID NO: 4540 - DNA, 711 bp, Escherichia coli; identical to SEQ ID NO: 3256

SEQ ID NO: 4541 - DNA, 783 bp, Escherichia coli
atgagaatactcgttgctggcgcaacaggaagtattggtattcatgttgtgaatactgctattgcaatgggccatcagcccgtgactctggtcaggaatcggcggaaaatcaagttactccctcgtggaacagatattttctatggcgatgtttcaatacctgaaacacttaccgatttaccgaaagatattgatgccatcatttttacactcggctctgatggtcagggacgtattggcgccagagcaatagattacggcggtgtacgtaacattttgcgaatattcatggatacacctgttcgcatcgccctgatgacaacgattggcgtaactgagcggctcagtagctggaatcaacgtactgaagttcatgactggaagagacgctctgaacgcctggtcagagccagtgggcatatctacactatcgtcagacccggctggtttgattacaacaatgatgatgagcacagaatcgtcatgcttcagggggacagacgccatgcgggaacgccggaagatggtgttatctcccgggagcaaatcgcccaggttcttgtaacagctctgagcaacgatgcggcaaaaaataaaacgttcgaactggtcgcagagcgaggagaagcacagcaggatctcactcctctgtttgcagagctgcggaatgataatccacaaaaaaatgatggggttttcgatatagacaatatgccccttactgaagaacctgagtgcgttattaacgacctgaatctgtattcgaaaaattcaaaaatctaa

SEQ ID NO: 4542 - DNA, 1323 bp, Escherichia coli
atgcctaaactagtcacttggatgaacaaccagcgggtaggcgagttaacgaagttagccaacggcgcgcacacctttaagtatgcacctgagtggttagccagccgttatgccagaccgttgtcactttcgctgccattgcagaggaggaatatcacctctgatgccgtatttaacttcttcgataacctgttacccgatagcccgattgtacgtgaccggatcgttaaacgttatcatgctaaatccagacaaccgtttgatttattgtcagaaatagggcgagacagcgttggtgccgtgacgttaatccccgaagatgaaaccgtaatgtgtccgataatggcatgggaaaagcttactgaagccagacttgaagaagtattaacggcttataaagcagatatcccgttaggcatgattagagaagaaaatgactttcgcatctcggttgctggcgcacaggagaagactgcgctgctcagaataggcaatgactggtgcattccgaagggaataacgccaacgacgcacattatcaaattgccgattggcgaaatcagacagcccaatgcgacgctcgatcttagccaaagcgttgataatgagtattactgtttgctgctggcgaaagaactcgggttgaatgttccggacgcagaaatcattaaagcgggaagggtgcgcgcgttagcggtcaaacgttttgacaggcgttggaatactgagcgaacggttttacttcgcttgccacaggaggatatgtgccagacattcggtttaccttcatcggtgaaatatgaatcagatggaggccccggtatcgcgcaaattatggcttttttgatggggtccagcgaggcgctgaaagatcgctatgattttatgaagtttcaggtcttccagtggttgattggcgcaacagatggccatgcaaaaaacttctccgtatttattcaggctggcggcagttatcggctcacaccattttatgacatcatttcggcatttccggtccttggcggtacgggaatacacatcagcgatctcaaactggcaatggggcttaacgcatccaaaggcaaaaaaacggcaatcgataaaatttatccgcgacattttctggcgacagcaaaggtgctgaaattcccggaagtgcagatgcatgaaatcctgagtgactttgccagaatgattccggcagcactggataacgtgaagacttcattaccgacagattttccggagaacgtggtgacggcagttgaaaccaatgtgttgaggttgcacggtcggttaagccgagaatacggtattaagtaa

SEQ ID NO: 4543 - DNA, 759 bp, Escherichia coli; identical to SEQ ID NO: 3264

SEQ ID NO: 4544 - DNA, 147 bp, Escherichia coli
atgcaatatgttctaccactttatgatccaagaaaaggcctgtttcctcgattaaaccatgatccgcgccacacttttctcataaaactgctcattaatcatcaggagttgatcaaaacaggggttcggcgtattaaagtttgctaa

SEQ ID NO: 4545 - DNA, 1419 bp, Escherichia coli
atgcatgtacagcccatttcaactttccgtttgttccaggaaggtcatctgctacgtaatagcatcgctatttttgtgctaaccacgctgttctattttattggtgcagagttacgactggttcacgaactttctcttttctggccgctgaatggcgtaatggcgggggtgtttgcccgctatgtctggcttaatcgactgcattactatgcgatcagttatgtggcgatgctggtttatgatgccataaccaccgaatgggggctggtttcactggctatcaatttctccaatatgatgtttattgttaccgtcgccttactggtcgcgcgggataagagtctgggaaaaaataagtatgagccagtaagtgccttacggctatttaattactgtctgcttgccgcattattatgcgctattgtcggggcgattggttcggtcagtattgatagtctggatttctggcctttgcttgccgactggtttagtgagcaattctcaacgggcgtgttgatcgtgccttgtatgctgacgttggcaattcctggagtgctgccgcgctttaaagcagagcagatgatgcctgctatcgcgcttattgtgtcggttattgcctcggtagtcattggtggagcggggagtctggcgtttccgctccctgcattaatctggtgtgcagtgcgctatacgccgcaggtaacatgtctgttgacctttgtcaccggtgcggtggaagtcgtactggtggcaaattcggtgattgatatctcggtcggttcgccgttctctattccgcaaatgttctccgcacgtctcggtattgccacgatggcgatatgcccaattatggtttcctttagcgtggcagcgatccattcgctaatgaagcaagttgcgctgcgagccgactttgattttctgactcaggtttactcacggtctggtctttatgaggcgctgaaaagtccatcgctgaaacagacacaacatctgacggtcatgctgcttgatatcgactatttcaaaagcattaacgataactatggacatgaatgtggcgataaagtgttaagcgtgtttgcccagcatattcagaagattgtcggtgataaggggctggtggcgcgaatgggcggcgaagaatttgctgttgcagtgccgtcggtgaatcctgtcgatggcctgctaatggcggaaaaaatccgtaaaggcgtagaacttcaaccgttcacctggcaacaaaaaacgctttatctcacggtaagtattggcgtcggtagtggttgcgcatcgtaccgaacgctgaccgatgactttaataaattgatggtcgaagccgatacgtgtctgtatcgctcgaagaaagatgggcgcaaccgtaccagcactatgcgttacggtgaggaagttgtctga

SEQ ID NO: 4546 - DNA, 882 bp, Escherichia coli
atggatctgacccaactggagatgttcaacgcggttgccgaagctggcagcattacccaggctgcagcaaaagtgcatcgcgtgccgtcgaatctcactacccgtctacgccagctggaaacagaactgggggttgatctgtttattcgcgagaatcagcgtttacgtctctcgcctgccgggcataactttttacgctatagccaacaaattctcacgttagtggatgaagcgcggagcgttgtcgctggcgatgagccgcaaggtttattttctctgggatcgctggaaagcaccgctgcagtgcgcattccggccacgctggcggaatttaaccgtcgttatcccaaaattcagttttcactttccaccggcccttccggcactatgctggaaggtgtgctggagggaaaactgaatgcggcgtttattgatgggcccattaaccatactgccattgacgggataccggtataccgcgaggaactgatgatcgtcacgccacaaggacatgcgccagtaacccgtgccagtcaggtgaatggcagtaacatttatgccttccgcgccaattgttcgtatcgtcgccacttcgaaagctggtttcatgctgacggtgccgctccgggaactattcacgagatggagtcttatcacgggatgttggcctgtgtggtcgcaggagcaggcattgcgcttattccacgctctatgctggaaagtatgccggggcatcaccaggttgaagcgtggccgttagctgagcaatggcgttggttaacaacctggctggtctggcgtcgtggtgcgaaaacgcgtccgcttgaggcatttattcaactgctggatgcgcctgactcggcaaaacagggttaccaatga

SEQ ID NO: 4547 - DNA, 1596 bp, Escherichia coli
atgaaacctgtaaaaccacctcgtattaatggacgagtgccggtcctgtcggcacaggaagcggtgaattatattcccgacgaagcaacactttgtgtgttaggcgctggcggcggtattctggaagccaccacgttaattactgctcttgctgataaatataaacagactcaaacaccacgtaatttatcgattattagtccaacagggcttggcgatcgcgccgaccgtggtattagtccgctggcgcaagaaggtctggtgaaatgggcattatgcggtcactggggacaatcgccgcgtatttctgatctcgcagaacaaaataaaattattgcttataactatccacaaggtgtacttacacaaaccttacgcgccgccgcagcccaccagcctggtattattagtgatattggcatcgggacatttgtcgatccacgccagcaaggcggcaaactgaatgaagtcactaaagaagaactgattaaactggtcgagtttgataacaaagaatatctctattacaaagcgatagcgccagatatcgccttcattcgcgctaccacctgcgacagcgaaggctacgccacttttgaagatgaggtgatgtatctcgacgcattggttattgctcaggcggtgcacaataacggcggtattgtgatgatgcaggtgcagaaaatggttaagaaagccacgctgcatcctaaatctgtccgtattccgggttatctggtggatattgtggtggtcgatccggatcaaacccaactgtatggcggtgcaccggttaaccgctttatttctggtgacttcacccttgatgacagtaccaaacttagcctgcccctaaaccaacgtaaattagttgcacggcgtgcattattcgaaatgcgcaaaggcgcagtggggaatgtcggcgtcggtattgctgacggcattggcctggtcgcccgggaagaaggttgtgctgatgactttattctgacggtagaaacaggtccgattggcggtattacttcacaggggatcgcctttggcgcgaacgtgaatacccgcgccattctggatatgacgtcccagtttgatttttatcacggtggtggtctggatgtttgttatttgagttttgctgaagtcgaccagcacggtaacgtcggcgtgcataaattcaatggtaaaatcatgggcaccggtggatttattgatatcagtgccacttcgaagaaaatcgttttctgcggcacattaactgcgggcagtttaaaaacagaaattaccgacggcaaattaaatatcgtccaggaaggacgggtgaagaaatttattcgggaactaccggaaattactttcagtggaaaaatcgctctcaagcgagggctggatgttcgttatatcactgagcgcgccgtattcacgctaaaagaagacggcctgcatttaatcgaaatcgctcctggcgtcgatttacaaaaagatattctcgacaaaatggatttcaccccagtgatttcaccagaactgaaactgatggacgaaagattatttatcgatgcggcgatgggttttgtcctgcctgaagcggctcattaa

SEQ ID NO: 4548 - DNA, 552 bp, Escherichia coli
atggatgcactcgaactattgatcaatcgccgtagcgcctcccgcctggctgaacccgcgccaacgggtgaacaactgcaaaacatcctgcgtgcgggtatgcgtgcgccggaccataagtccatgcaaccgtggcatttctttgtgattgaaggggaagggcgcgagcgtttcagcgctgtactggagcagggggcgattgctgccggtagtgataacaaagcaatcgacaaagcgcgtaatgcgtcgttccgcgcaccgctcatcataacggtggtggcgaaatgcgaagaaaatcataaagtcccgcgctgggaacaggaaatgtctgcgggatgcgcggtcatggcgatgcaaatggcagcagttgcccaggggtttggcggcatctggcgcagtggtgcattaactgaaagtccggtagtgcgtgaagcattcggttgccgtgagcaggataaaattgtcggttttctctacctcggtacgccgcagttgaaagcatctacgtcgataaacgtcccggacccgacgccgtttgtgacttatttctga

SEQ ID NO: 4549 - DNA, 657 bp, Escherichia coli
ttgatcaacgttctacttgttgatgaccacgaactggtgcgcgcagggatacgacgcattctggaagatataaagggtataaaagtcgtcggtgaggcatcgtgcggtgaagacgcagttaagtggtgccggacaaatgccgttgacgtggtgctaatggacatgagtatgccgggcattggcggtcttgaggcgacgcgtaaaatcgcgcgttccacagctgatgtcaaaatcatcatgcttaccgtccatacagaaaaccctttaccagcgaaagtcatgcaggccggtgctgcgggctacctcagcaaaggcgcggctccgcaggaagtcgtgagtgcgattcgttctgtctattcagggcagcgttacattgcttctgacatcgctcaacaaatggcgttaagccagatcgaaccagaaaaaacagaaagcccatttgccagtttgtctgaacgtgaattgcagattatgctgatgatcaccaagggccagaaggtcaatgagatctcagaacagctcaatctcagtccgaaaacggtgaacagctaccgctatcgtatgttcagtaaactaaacattcatggcgatgttgagctgactcacctggcaattcgccatggtctgtgtaatgcggagacattatcaagtcagtga

SEQ ID NO: 4550 - DNA, 987 bp, Escherichia coli
atgccactgcataatttaacccgttttccacggttggagtttatcggcgcgccaacaccgctcgaatatctgccgcgcttttctgattatcttggacgggaaattttcatcaaacgggatgacgtcacacccatggcaatgggcggcaataaattacgtaagctggaatttctcgcggcagatgccctgcgcgaaggtgccgatacgctgattactgccggcgcgatccagtctaaccatgtgcggcagactgccgcagttgcggcgaaactcggcctgcactgcgtggcgctgctggaaaatcctattggcacaaccgcagaaaactatttaaccaacggcaatcgtttgttgctggatctgttcaatacccagattgaaatgtgcgacgcactgaccgatcccaatgcccaactggaagagctggcgacgcgagtcgaagcacaaggctttcgcccgtatgtcattccggttggcggttctaatgctctgggcgcgctgggttatgtggagagtgcgctggaaatcgcgcaacagtgtgaaggggcggttaatatttcgtcggtggtggtcgcatcgggcagtgccggaactcacgccggattggctgttgggctggaacacctgatgcctgaaagcgaactgattggcgtgaccgtgtcgcgttccgttgccgatcaattgccgaaagtggttaacctacaacaggcgattgcgaaagaactggagctgaccgcatcagcggaaattttactctgggatgactattttgcacctgtctacggcgtgccgaacgacgaaggcatggaagcagtgaaattgctggcgcgtctggaaggcattctgcttgatcctgtgtataccggaaaagcgatggcggggctgattgacggtatcagtcagaaacgcttcaaagatgaagggccgattctgtttattcataccggcggcgcgcctgcgctgttcgcctatcatccccacgtttag

SEQ ID NO: 4551 - DNA, 1416 bp, Escherichia coli
atggctagtatttcaacgcttggggttgggtcggggctggacttaagcagcatccttgacagtctggaggcggcagaaaaatctaccctgacgccgatatcaaaacagcaaagctcttacaccgcgaaactgagcgcctacgggacgctgaaaagtgcactagagagtttccagacagccaacacagcactgaataaagccgatttatttaccgccacctcaaccaccagcagttcatcggctttcagcgccaccaccacgggcagcgcgattgctgggaaatacaccattagcgttagccaactggcgcaggcacagacgctgacaacaaaaaatagtcaaaaagacagtaaagccgccatcgccaccagcgatagcgtactgaccatccaacaaggcggcggtaaagatccggtcacgattgatatcagcgcgggtaactcgtcactttccggcattcgcgatgccattaacaacgccaaagctggtgtcagcgccagtatcatcaatgtgggaaacggcgaatatcgtctgtccatcaccgctaacgatacgggcagcaataacgctatgaaacttagcgtcagcggcgacagcgccctggaaagttttatgggttacaacggaacgccgggtgatagcagcaatggcatgattgaaagcgtcaccgcgcaaaacgccaaactgacagtcaataacgttgagattgaaaacagcagtaacactatcagcgactcactggaagatatcaccctaaacctgaatgacgtcaccaccggtaatcagacactgaccatcagtaaagacacatccaaagctgaaaatgcggttaaagcgtgggtggatgcctataacacattgcaggatacattcagcagcttaaccaaatacaccgctgtcgatgccggagctgaaagtcaggactccagtaatggcgcattactcggtgactccacactgcgtaccatccagactcagcttaaaaccttgctcgccaatactcacagcagttcaaactataaaacgctggcacagattggcattaccagcgatgccagtaccggcaagctggaaatcgcgaccgacaaactgcaaacggcgctaaaaaatgatgccgctggtatcggtgaaatgtttataggtgacggcaaaagtactggggtaaccaccggcattagtaacaacctgaccagttggctctcttccaccgggataatccaggcagcaaaagatggcgtcagcaaaacgctgaataatttgaccgaccagtacaacgcagccagtgaacgtatcgataccttaatgacgcgctataaagcccagttcacccaattagatgtgttaatgaactcgctgaactccactagtagctatctgacacagcagttcgacacctcaaatagcaactcgaaataa

SEQ ID NO: 4552 - DNA, 1206 bp, Escherichia coli
atgtcatggcagcaattcaaacacgcctggttgattaaattctgggcgcccatccccgcggtcatcgcggcgggtattctctccacttactattttggcatcactggcaccttttgggctgtcacaggtgaatttacccgttggggcggtcagctcctgcagttgttcggcgtccatgctgaagagtggggttattttaaaattatccatctggaaggatcgccattaacccgcatcgacggaatgatgatcctcggtatgtttggcggctgttttgccgcagcgctgtgggccaacaatgtcaaactgcgcatgccgcgcagccgtatccgcattatgcaggccatcattggcggtattatcgccggttttggcgcacgtctggcaatgggctgtaacctggcggcgttctttaccggaattccacagttctcgctgcacgcctggttctttgccatcgccactgccattggttcatggtttggcgcgcgctttacccttctgcccatcttccgtattcccgtgaaaatgcagaaagtttctgctgcctcaccgttgacgcaaaaaccggatcaggcgcggcgtcgttttcgtctcgggatgctggtctttttcggcctgctgggctgggcgctgctgacggcgatgaaccagcccaaactggggctggcaatgctgtttggcgtcggctttggtttactgattgaacgtgcgcaaatctgctttacttcggcgttccgcgatatgtggatcaccggacgtacccatatggcgaaagcaatcattatcggtatggcggtaagtgccatcgggatcttcagttacgtacagttaggcgttgaacccaaaatcatgtgggcgggaccaaacgcggtaattggtggtttactgtttggttttggcatcgtgctggcaggcggctgcgaaaccggctggatgtaccgcgcggtagaaggccaggtgcactactggtgggtcggtctgggcaacgtgatcggctcaacgattctggcgtactactgggatgatttcgctccggcgctggccaccgactgggacaaaatcaacctgctgaaaacctttggcccgatgggcggcctgctggtgacatatttgctgttgtttgctgctctaatgttgattattggctgggaaaaacgcttcttccgccgtgcggcaccgcagactgctaaggagatcgcatga

SEQ ID NO: 4553 - DNA, 1059 bp, Escherichia coli
atgaaaagaaaagttctggcaatgctggtcccggcgttattagttgctggcgcagcaaatgcggctgaaatttataataaagatggcaataaactggatctgtacggcaagatggttggtgagcgcattctgaccgaccgtgaaaatggtgaaaaaggcgataattctcaagatacctcttatgcccgtgtaggcgtgaaaggtgaaactcagatcaaccctgaattgactggttacggtcagtttgaactagacctggaagcatcaaacagacacaaccctgaccaaactcgtttggcttatgctggtttgagttacaaagattttggttcattcgactatggtcgtaatgtcggtgtcgcgtatgatgcagaagcatttactgatatgtttgttgagtggggcggtgattcatgggctggtactgacctgttcatgaccaaccgtaccaacggtgttgcaacctatcgtaacacagatttctttggcatggttgaaggtctaaattttgctctgcaatatcagggtaaaaatgaaggtacaggcaactacaaagcaaatggcgatggccatggtttatctgtaacttacactattgacggtttctcatttactggtgcttacgcaaactctgaccgtactgatttccagtctagtgatagtaaaggtgaaaaagcagaagtttgggcactgtcaacaaaatatgatcccaacaacgtctatgctgctgtgatgtacggtgaatctcacaacatgaattccgacgacggtgatgttgtgaacaaaacacaaaacttcgaagctgttctgcaatatcagttcgacttcggtctgcgtccatccatcggttactcctattctaaagcactggacgtagcaggttacaaagattctgatcgtctgaactacattgaaatcggtacctggtattacttcaataagaacatgaacgtatataccgcttatcagatcaacctgcttgataagagtgattatgttctcgctcatggactgaacaccgacgaccaactcgcatttggtatcgtctaccagttctaa

SEQ ID NO: 4554 - DNA, 477 bp, Escherichia coli
gtgcaatcaggtacaaacgtgccctatatgaaaattagcgcaattgattacagtcaaaatatcaacggtgattacaaagctactgttacaggaggcggagagggtatcgcaacgctgatccccgtattgaatggtgttcatcaggcgggtctgagtaccacgatagaattcattagcgcggaaaccagaccaatgacgggtacagtgtcagtgaatagtgcaaacctaccgacagcttcattcccttcgcagggatttaccggggcgtattatcagttgaataatgacaactttgcaccaggaaaaacggcggctgattattcgttttcaagctcggcctcctgggtaggcgttgatgctactggtaaagtgacattcaaaaatgacggtgatagcaatactgtaataatcacagcgcccccaagatccggtggtgctatttaccaaacagttcctcctgaatcgcgttcggtgtga

SEQ ID NO: 4555 - DNA, 1053 bp, Escherichia coli
atgtttttagtatcattgttgagacgtattgcatttagttactacgattataaagcttataattttaatattgaaaaaacagactttgttgtcatacatattcccgatcagattggcgatgctatggccatctttcctgttattcgggcgcttgaattgcataaaattaagcatctattaattgttacgtcgacaattaatttagaagtctttaatgcgctcaaacttgaacagactaaattaacattagtcacaatgactatgcaggatcacgcaacattaaaagaaataaaagatttagcgaagaacataacactgcaatacggtacgccggatctttgtatagaggcgatgcgtaaaaagaacctgaaaacgatgatatttatcagtcagttgaaagcaaaaacgaatttccaggtcgtcggtttaaccatgaagtgctattcccctttgtgtaagaacgcgtcccggatggatcagaatctccggactcctgtacccatgacatgggcatttatgatgcgtgaggcgggttttccggcagtcaggtcaatatatgaattgccattaagcgatgatgtactcgatgaggtacgcgaggaaatgcgatcgttaggatcttacattgcgctcaatttagacggtagctcgcaggaacgtacattttcattatcgattgcagaaaatctaatagcaaaaattcaaagtgaaacagatattccaatagtgatcgtttatggacccaaaggggaagataaagccagggcattagtggattgttataataatgtctaccgtttatccttatcaccctcgattaaacgttcagcagcaatcataaaagatgcttatattgcaataactcctgacacctcaatattacatatggcaagtgcctataatacccctgttgttgcaatttatgctgattacaaaacgcgatggcccgcaatggccgatgtttcggagtcagtcgtcgttgggcaaaaaattgacaatataagtctggatgaattcgcaaaggcattaaaaagtgttttggcgagaatttga

SEQ ID NO: 4556 - DNA, 951 bp, Escherichia coli
gtgaatttccaacaactaaagataatccgcgaggctgcacgtcaggattacaacctgacagaggttgcgaatatgctttttacctcacagtcaggcgttagccgtcatattcgggaactggaggatgaacttggcatcgaaatatttgttcgacgaggtaagcgactgctgggcatgactgaaccgggcaaagcattactggtcattgcagaacgcattctgaatgaagccagtaatgttcgtcggctcgcagacctgtttaccaacgatacgtctggcgttctcactattgcaacgacgcatactcaggcacgttatagcttgcctgaggtcattaaagcttttcgcgaacttttcccggaggttcggctggagctaatccagggtacaccacaggaaattgcgacgttgttgcaaaatggcgaagctgatattggtatcgccagcgagcgtttgagtaatgacccgcagctcgtcgccttcccgtggtttcgttggcaccatagtttgcttgttccactcgatcatcccttgacgcaaattacaccgttgacgctggaatcaatagcgaagtggccgttaattacttaccgacaggggattacggggcgctcacgcattgatgacgcatttgcccgcaaaggtttgccggcagatattgtattaagtgcacaggattctgatgtcattaaaacctatgttgctcttgggcttgggatcggattagttgccgaacaatccagcggcgaacaagaggaaaagaatttaatccgcctggatacgcggcatcttttcgatgctaatactgtctggttgggactgaagcgagggcaacttcagcgtaactatgtctggcgctttctggaactttgtaatgcaggactgtcagttgaggatatcaagcgccaggtgatggaaaacagtgaagaggaaattgattatcagatatag

SEQ ID NO: 4557 - DNA, 687 bp, Escherichia coli
atggcgcaagtcgtgagaatggtgttgatcgacgtcttcaaagaagcacaacacgcaggacatgttccgccaggatttaacccagcgcaggcaacaaaacaaccgcgaaatcgagtaaaccgccaaagattgtcactgcccgaatggcaggcaatatttgacagcgtaagcagacggcagccctatttaaaatgcggcatgctacttgctcttgttactggacaacgtttaggcgatatctgcaatttgaaattctctgatatatgggacgacatgttgcacattactcaggaaaaaaccggttcaaaacttgctattccgcttaacctgaaatgcgatgctctgaatattacccttcgtgaagttatatctcagtgcagggatgctgttgttagtaaatatctggtccattaccgtcacactacctctcaagcaaacagaggagaccaggtttctgcgaatactctgacaacggcttttaaaaaggcccgggaaaaatgtggcataaaatgggagcaaggaactgcgcccacatttcatgagcagcgatctctgtcagaacggttatatcgggaacagggtctggatacgcaaaagttgttaggccataaatccagaaaaatgaccgaccgatacaatgatgatcgtggtaaagactggattatcgtagatatcaaaacagcatag

SEQ ID NO: 4558 - DNA, 1368 bp, Escherichia coli
atggaaaaagactatttgggaattagtagtactgtattagtgagcttattgtttgggcttgcattggttttggttaatagttggttcaatcagccaaccgttgaggaagttgttccacgatcaacctatctgatggttatgattgctttattttttatcgatactgttgcatttatttttatgcagttgtatttcatttatgaccgtaggcaattttcaaactgtatacttagtttggcttttctaagttgtttgatttactttattaaaaccgtcattatcattcagcaaattattgaggggcgtttgacaagcagtgttgttcaaaatgacattgcaatctattatttgtttcgtcagatgagtttgtgcatattaatatttctggcattggtgaataaagttagtgaaaacacaaaacagcgcaatttattttccaaaaaaatgactttgtgcataagtttgttttttgttgttggggggccgatagttgctcacatactttctagtcattatgagagctacaatttacacattgccgagttaaccaatgaaaatgatcaggtggtttggaaaacatcatatgttaccataatgattttcatgtggttaaccttgctttcagttaatctatactttaatggtttacgctgtgatatctggaatggagtgacggtgattgctttttgtgccgtactgtacaatgtctctcttttatttatgagcaggtatagcgtgtccatttggtatattagtcgcactattgaagtagtcagtaagttaaccgttatggtaatatttatgtgccatatattcagtgcgctacgagtaacaaaggacattgcacatcgcgattccttaaccaatatatttaacagaaattatttttttaatgaactgacagttcaatcagcatcggccaaaaaaacgccttattgcgtcatgattatggatatcgaccacttcaaaaaagtcaacgacacctgggggcatccggttggcgatcaggtgataaaaacagtggtgagtatcattgggaaaagcatacggccagatgacctttttgcgcgcgtcggcggcgaagagtttggcgtcttgctgacggacatcgatactgaacgtgcgaaagctttagcggaaaggattcgggaaaatgttgagcgtttaactggtgataatcctgaatacgccataccacaaaaagtgacgattagtattggcgctgttgtaacgcagaaaaatgagttaaaccctaaggagatctatcaactggctgataacgcactttacgaggcgaaagagaccgggcgtaataaggtggtagtaaaagaggcagaaattcttatcaaccgcaaggatgatgaatga

SEQ ID NO: 4559 - DNA, 2424 bp, Escherichia coli
atgtattcaagtagcagaaaaaggtgcccgaaaaccaaatgggctttgaaacttcttactgccgcatttttagcagcgagtcccgcggcgaagagtgctgttaataacgcctatgatgcattaattatcgaagctcgcaagggaaatactcagccagctttgttatggtttgcacaaaaatcagcactcagtaataaccaaattgctgactggttacagattgccttatgggccgggcaagataaacaggttattaccgtttacaaccgctaccgtcatcagcaattaccagcgcgtggttatgcagctgtcgccgtcgcttatcgtaacctgcaacaatggcaaaactcgcttacactgtggcaaaaggcactctctctggagtcgcaaaataaggattatcaacggggacaaattttaaccctggcagatgcgggtcactatgattctgcgctggttaaacttaagcagcttaactctggagcaccggacaaagctaatttactcgcagaagcctatatctataaactggcggggcggcatgaggatgaattacgggcgatgacagggtcattacctgaaaatgccttaacgcaacaatatcccacagaatacgtgcaggcattacggaataatcaacttgctgccgcgattgacgatgccaatttaacgccagatattcgcgctgatattcatgccgaactggtcagactgtcgtttatgcctacgcgcagtgaaagtgaacgttatgccattgccgatcgcgccctcgcccaatacgctgcattagaaattctgtggcatgataactcagaccgcactgcccagtaccagcgtattcaggttgatcatcttggcgcgttattaactcgcgatcgttataaagacgttatttctcactatcagcgtttaaaaaatacgaggcaaattattccgccctgggcgcaatattgggttgcgtcggcttatctcaaagaacagcagccaaaaaaagcacagtcaataatgacagagctcttttatcacaaggagaccattgccccggatttatccgatgaagaacttgcggatctcttttacagccacctggagagtgaaaattatcccggcgcgctaactgtcacccaacataccattaatacttcgccgcctttccttcggttaatgggcacgcctacgagcatcccgaatgatacctggttacaggggcattcgtttctctcaaccgtagcaaaatatagtaatgatcttcctcaggctgaaatgatagccagagagcttgcttataacgcaccaggaaatcagggactgcgcattgattacgcgagtgtgttacaagcccgcggttggcatcgtgcagcagaaaatgaattaaaaaaagcagaagtgatcgagccacgtaatattaatctggaggttgaacaagcatggacagcattaacgttacaagaatggcagcaggcagctgtcttaacgcacgatgttgtcgaacgtgaaccgcaagatcccggcgttgtacgtttaaaacgtgcggttgatgtacataatcttgcagagcttcgtatagctggttcaacaggaattgatgccgaaggcccggatagtggtaaacatgatgtcgacttaaccaccatcgtttattcaccaccgctgaaggataactggcgcggttttgctggattcggttatgccgatggacaatttagcgaaggaaaagggattgttcgcgactggctggcgggtgttgagtggcggtcacgtaatatctggctcgaggcggagtacgctgaacgcgttttcaatcatgagcataaacccggcgcgcgcctgtctggctggtatgattttaatgataactggcgtattggttcgcaactggaacgcctctctcaccgcgttccattacgggcaatgaaaaatggtgttacaggcaacagtgctcaggcttatgttcgctggtatcaaaatgagcggcgtaagtacggtgtctcctgggctttcactgatttttccgacagtaaccagcgtcaggaagtctcacttgagggtcaggaacgcatctggtcttcaccatatttgattgtcgatttcctacccaatctgtattacgaacaaaatacagaacacgacactccatactacaaccctataaaaacgttcgatattgttccggcatttgaggcaagtcatttgttatggcgaagctatgaaaatagctgggagcaaatcttcagcgcaggtgttggtgcctcctggcaaaaacattatggcacggatgtcgtcacccaactcggctacgggcaacgtattagctggaatgacgtgattgatgctggcgcaacgctacgctgggaaaaacgaccttatgacggtgacagagaacacaacttatacgttgaattcgatatgacattcagattttaa

SEQ ID NO: 4560 - DNA, 2019 bp, Escherichia coli
atgttacgtaatggaaataaatatatcctgatgctggtgagtataattatgctcactgcgtgcattagccagtcaagaacatcatttataccgccacaggatcgcgaatctttactcgccgagcaaccgtggccgcataatggttttgtggcgatttcatggcataacgttgaagacgaagctgccgaccagcgttttatgtcagtgcggacatcagcactgcgtgaacaatttgcctggctgcgcgagaacggttatcaaccggtcagtattgctcaaattcgtgaagcacatcgaggaggaaaaccgctaccggaaaaagcagtagtgctgacttttgatgacggctaccagagtttttatacccgcgtcttcccaattcttcaggccttccagtggcctgctgtatgggcccccgtcggcagttgggtcgatacgccagcggatgaacaagtaaaatttggcgatgagatggtcgatcgagaatattttgccacgtggcaacaagtgcgagaagttgcgcgttcccggctcgttgaggtcgcttctcatacatggaattctcactacggtattcaggctaatgccaccggcagcttattgcctgtatatgtaaatcgtgcatattttactgaccacgcacggtatgaaaccgcagcagaataccgggaaagaattcgtctggatgctgtaaaaatgacggaatacctgcgtacaaaggctaaggtaaatccacacgtttttgtttggccttatggcgaagcgaatggcatagcgatagaggaattaaaaaaactcggttatgacatgttcttcacccttgaatcaggtttggcaaatgcgtcacaattggattccattccgcgagtattaatcgccaataatccctcattaaaagagtttgcccagcaaattattaccgtacaggaaaaatcaccacaacggataatgcatatcgatcttgattacgtttatgacgaaaaccaccagcaaatggatcgcaatattgatgtgctaattcagcgggtgaaagatatgcaaatatcaaccgtgtatttgcaggcatttgctgatcccgatggtgatgggctggtcaaagaggtctggtttccaaatcgtttgctaccaatgaaagcagatatttttagtcgggttgcctggcaattacgtacccgctcaggtgtaaacatctatgcgtggatgccggtattaagctgggatttagatcccacattaacgcgagtaaaatacttaccgactggggagaaaaaagcacaaattcatcctgaacaatatcgccgtctctctcctttcgatgacagagtcagagcacaagttggcatgttatatgaagatcttgccggacatgctgcttttgatggcatattgttccacgatgatgctttgctttcagattatgaagatgccagtgcaccggctatcacggcttatcagcaagcaggctttagcgggagtctgagcgaaattcgacaaaacccggagcaatttaaacagtggacccgctttaaaagtcgtgcgttaactgacttcactttagaacttagtgcgcgcgtaaaagccattcgcggtccacatgttataactgcacgaaatatttttgcacttccggtaatacaacctgaaagtgaagcgtggtttgcacagaattatgctgatttcctaaaaagctatgactggaccgctattatggctatgccttatatggaaggtgtcgcagaaaaatcggctgaccaatggttaatacaattgaccaatcaaattaaaaacatccctcaggctaaagacaaatctattttagaattacaggcacaaaactggcagaaaaatggtcagcatcaggctatttcttcgcaacaactcgctcactggatgagcctattacaactgaatggagggaaaaactatggttattatcccgacaattttctgcataaccaacctgaaatagacgttattcgtcctgagttttcaacagcctggtatccgaaaaatgattaa

SEQ ID NO: 4561 - DNA, 1326 bp, Escherichia coli
atgattaatcgcatcgtatcgttttttatattatgtctggtgttatgcatccccctatgcgtagcgtactttcactctggtgaactgatgatgaggttcgttttcttctggccgttttttatgtctattatgtggattgttggcggcgtctatttctgggtctatcgtgaacgccactggccgtggggagaaaacgcaccagccccccagttgaaagataatccgtctatctccattatcattccctgttttaatgaggagaaaaacgttgaggaaaccatacacgccgctttagcacagcgttatgagaacattgaagttattgccgtaaatgacggttcaacagacaaaacccgtgccatcctggatcgcatggctgcacaaattccccacctgcgggtcattcatctggcgcaaaaccaggggaaagccattgcgcttaaaaccggagctgccgcggcgaaaagtgaatatctggtgtgcattgatggcgatgcgttattagaccgcgatgcggcggcatatattgtggaaccgatgttgtacaacccgcgtgtgggtgccgtaaccggtaatcctcgtattcgaacacgttctaccctggtgggtaaaattcaggttggcgagtattcctcaattattggtttgatcaagcgaacccagcgtatctatggaaacgtatttaccgtttccggtgttattgccgcatttcgtcgcagcgccctggcagaagtgggttactggagtgacgatatgatcaccgaagatattgatattagctggaagctgcagttgaatcagtgggcgattttttacgagccacgggcgctgtgctggatattaatgcctgaaacgttaaaagggctgtggaaacagcgcctgcgctgggctcagggcggtgcagaagtattcctcaaaaatatgacaaggttgtggcgcaaagaaaactttcgaatgtggccgctgttttttgaatactgcctgacgacaatatgggccttcacttgcctggtcggtttcattatttacgcagtccaacttgccggtgtaccgttaaatattgaattgacacatatcgctgcgacacatactgccggaatattattgtgtacgttatgtttactgcaatttattgtcagcctgatgatcgagaatcgctatgagcataatctgacttcatcgcttttctggattatttggttcccggttattttctggatgctgagtctggcaacgacattggtatcatttacacgagtcatgttgatgcctaaaaagcaacgcgcccgttgggtaagtcccgatcgcgggattctgagaggttaa

SEQ ID NO: 4562 - DNA, 297 bp, Escherichia coli
atggtaacgtcctgttctggacaatgttttattaagcaacgctccaccacttgcggagatttctcctccggtagcaacttcgtcactctgtatttttctcacttcctctctttactcgtgttaccgacgccgcaaacggtgtgcgtagccgtttttcggcattttatccaaaagcaaactatggcttacaaggaagccaaccctctgatgttcgtgcgcataatcgcgctgccaacggcgcgtgtgatgaatacaaacaactcaaggtgctctccatgggaagacaaaaagcagtga

SEQ ID NO: 4563 - DNA, 696 bp, Escherichia coli
atgatgacgaccttaaccgcacgaccggaagccattaccttcgatccgcagcaaactgcgctgatcgtggtggatatgcaaaatgcctatgccacgccaggcggctacttagatctcgccgggtttgatgtctcaaccactcgcccggtcattgccaacattcaaaccgccgtgaccgcagcgcgaacggcagggatgctgatcatctggtttcaaaatggctgggatgaacagtatgtcgaggctggcggccccggctcaccgaattatcataaatcgaacgccctgaaaaccatgcgtaatcagccgctgctgcaggggaaattgctggcgaaaggctcctgggattatcaactggtggatgagctggtgccgcagcctggcgatatagtgctgccgaagccgcgctacagcggtttcttcaatacgccgctggacagcattttgcgcagccgcggaatacgccatctggttttcaccggcatcgctaccaacgtctgcgtagaatcgacgctacgcgacggcttttttctggagtatttcggcgtggtgctggaagacgcaacacaccaggcggggccggaatttgcacagaaagccgcgttgttcaatatcgaaaccttttttggctgggtcagcgacgtcgaaacgttctgcgacgcgctttcttccacgtcctttgctcgtatcgcttaa

SEQ ID NO: 4564 - DNA, 531 bp, Escherichia coli
atggcaatgttcggttttcctcactggcagttaaaatcgacctctacagagagcggcgtggtcgcgccggatgaacgattgccgtttgctcaaacggcagtaatgggcgttcaacacgcggtggcgatgtttggcgcgacggtgttaatgccaattctgatggggctggatcccaatctttccattttaatgtcggggatcggcacgttactgtttttctttattaccggcgggcgcgtgcccagttatctcggttccagcgcggcttttgtcggcgtggtgattgccgcgacgggctttaatggtcagggaattaatccgaatatcagcatcgcgctgggcgggattatcgcctgtgggctggtttataccgtcattggcctggtggtgatgaaaatcggtacgcgctggattgaacgactaatgccgccggttgtgacgggtgcggtagtgatggcgattggcctgaacttagcgcctatcgcagtgaaaaatgtatcggcttcggcctttgatagctggatggcgtga

SEQ ID NO: 4565 - DNA, 1242 bp, Escherichia coli
atgaacaaaacgctaatcgccgcaactgtggcagggatagttttactcgcttcaaatgctcaggcacaaaccgtaccggaaggctatcagctacagcaagtccttatgatgagccgtcataacttacgtgcgccgctggcgaacaatggcagtgtgctggagcagtcgacgccgaataaatggcctgaatgggacgtccccggtgggcagctcaccactaaagggggcgtgctcgaagtgtatatgggccattatatgcgtgaatggctggcagaacaggggatggtgaaatcaggggaatgcccgccaccggacaccgtttatgcctatgccaatagtctgcaacgcaccgtcgcgaccgcgcagttctttattactggcgcattccctgggtgtgatattcatgttcatcaccaggaaaaaatgggcactatggaccccacctttaacccagtgatcaccgatgattccgccgcattcagtgaacaggcggtggcggcaatggagaaagagctcagcaaactccagcttaccgacagctacaagctactggaacaaatcgttaactataaagattcccctgcctgtaaagagaagcaacaatgttcgcttgtagatggcaaaaatacctttagcgcgaagtatcaacaagaaccgggcgtttccgggccgctgaaagttggcaactcgctggtagatgcgtttactttgcaatactacgaaggttttccgatggatcaggtggcctggggagaaattaaatctgaccagcagtggaaggtgttgtcgaagctgaaaaacggttaccaggacagcctgtttacctcaccggaagtggcgcgcaatgttgcgaaaccgctggtcagttatatcgacaaagccctggtcaccgatcgcaccagtgcaccgaaaatcacggtattagttgggcacgactccaacattgcctctctgttaacggcgctggatttcaaaccgtatcagttgcatgaccagaacgaacgcacgccgattggcggcaaaatcgttttccagcgttggcatgacagcaaagccaatcgcgacctgatgaaaattgaatatgtgtaccagagtgcggaacagttacgtaatgccgatgcgttaaccctgcaggcacctgcgcagcgcgtgacgctggaattaagcggttgcccgatagatgccaacggtttttgcccaatggataagtttgatagcgtattgaatgaagcggtgaaataa

SEQ ID NO: 4566 - DNA, 216 bp, Escherichia coli
atgagttatctgctcttgttaccccatatacgcatcgaaaacgctaacgctgtctccgggttgacctggggattcccgtcgatgacccattttctcggttatgtccatgcgctttctcgcaaagtcgtggatgaatttggcgtaagttttgatggttgtgcggtagtaagccatgaacagcatattcaggcgtacagctctgggcgcgatttttag

SEQ ID NO: 4567 - DNA, 846 bp, Escherichia coli; identical to SEQ ID NO: 816

SEQ ID NO: 4568 - DNA, 1113 bp, Escherichia coli; identical to SEQ ID NO: 812

SEQ ID NO: 4569 - DNA, 2262 bp, Escherichia coli
atgatcaagttatctgaaaaaggcgtgtttctcgccagcaataacgaaataattgccgaagaacatttcaccggcgaaataaaaaaagaagaagcaaaaaaaggcactattgcctggtctattctctcttctcataatacgtccggaaatatggataaacttaaaattaagtttgattcattagcctctcacgatattacctttgttggtattgtacagaccgctaaagcgtccggtatggaacgtttcccgctgccgtatgtgctgaccaactgccataactcactctgtgctgtgggcggcaccattaacggtgatgaccatgtttttggtttatcggcggcccagcgttatggcggtatttttgtgccaccgcatattgcggtcatccatcaatatatgcgtgaaatgatggcgggcggcggcaaaatgatcctcggatcagacagccatacccgttacggtgcgttagggacaatggcggttggcgagggcggcggcgagttggtaaaacagctgcttaatgacacctgggatatcgactatccgggcgtggttgcggtgcatctgaccggaaaacctgcgccgtatgtggggccgcaggatgtggcgctggctatcatcggtgccgtgttcaaaaacggttacgtcaaaaacaaagtgatggagttcgtaggtcccggtgttgcagcgctctctaccgatttccgtaacagcgttgacgtgatgaccactgaaacgacctgtttaagttctgtctggcaaaccgatgaagaagtccataactggctggcgctgcacggtcgcggccaggattactgccaacttaaccctcaaccaatggcgtactacgatggcagcatcagcgttgatttaagcgccatcaaaccaatgattgcgctgccattccacccgagcaacgtgtatgaaatcgacacgctgaaccagaatctgaccgacattctgcgtgagattgaaattgagtccgaacgcgtggcgcacggtaaagccaaactctcgctgctggataaagtggaaaatggtcgcctgaaagtgcagcaggggattatcgcgggctgttctggcggtaactacgaaaacgtcatcgcggcggcgaatgcgctgcgcggtcaatcctgcggcaacgataccttctcgttggcggtttacccgtcatcacagccggtgtttatggatctcgccaaaaaaggtgtggtagcagatttgattggcgcaggcgcaatcatcagaaccgcgttctgcggcccatgctttggtgcgggcgatacgccaatcaacaacggtttgagtattcgccacaccacgcgtaacttcccgaaccgcgaaggctctaagccagctaatgggcagatgtcagcggtggcgttgatggacgctcgttctatcgctgcgactgcggcaaacggtggctatttaacctctgccagcgaactcgattgctgggacaacgtgccggagtacgccttcgatgtaacgccgtataaaaatcgcgtctatcaaggctttgtgaaaggggcgacccagcaaccgctgctctacggaccgaacatcaaagactggccggaattgggcgcgctgactgacaatatcgtcctcaaagtgtgctcgaagatcctcgacgaagtaaccaccaccgacgaactgattccttccggtgaaacctcttcttatcgttcaaatccgattggtctggcggagtttaccctgtcacgccgcgatccaggttatgttggcagaagtaaagcgactgctgagctggaaaatcagcgtctggcgggaaatgtcagtgagctggcagatatgtttgcgcgcattaagcagattgctggtcaggaacatgttgatccgctgcaaactgaaattggcagcatggtttatgcggtgaaaccaggcgatggttctgcgcgtgaacaggcggcgagttgtcagcgtgtgattggcggtctggcgaatattgccgaggagtacgcgactaaacgctatcgttctaacgtcatcaactgggggatgttaccgctgcagatggcggaagtaccgaactttgacgtaggtgattacatttatatccctggcattaaagcggcgctggataatcctggaacgacgtttaaaggttatgtgatccatgaagatgcaccggtaacggagattacgctctatatggaaagtctgactgctgaagagcgcgagattatcaaggcgggtagtttgattaacttcaataaaaaccgtcagatgtaa

SEQ ID NO: 4570 - DNA, 486 bp, Escherichia coli
gtggttaaaaataaaggcggctggaataccttaatctggtacggcggtattatcggcttaagctccttattatcgaaagttaaattcttcgaatggttagctgaagtctttaaaaataacctggcatttgatggtcacggtaacgttgctttcttcgttattattttcctcagcatcatcgtgcgttatttcttcgcttctggtagtgcctatatcgttgccatgttaccggtatttgccatgctggcgaacgtctccggcgcaccgttaatgttaaccgcgctggcactgttgttctctaactcctatggcggcatggttactcactatggcggcgcggcaggtccggtcatctttggcgtgggttacaacgatattaaatcctggtggttggtcggtgcggtactgacgatattaaccttcctggtgcatatcaccctcggcgtgtggtggtggaatatgctgatcggctggaacatgctgtaa

SEQ ID NO: 4571 - DNA, 819 bp, Escherichia coli
atgaccacacgcgtgattgctctcgacttagacggcaccttattgaccccgaaaaagaccctgcttccttcatcgatagaagccctggcccgcgctcgcgaagcaggctatcaattaatcatcgtcacaggtcgccatcacgtcgctattcatcctttttatcaggcgctggcgctggatacacctgctatttgctgtaatggcacctatttgtatgattatcatgcaaaaacagtgctggaagcggacccaatgcccgttaataaagccctgcaactcattgagatgctgaatgaacaccacattcacggtctgatgtatgtggatgatgcgatggtctatgagcacccgaccgggcatgtcattcgcacgtctaactgggcgcaaaccctgccgccggaacagcgtccgactttcacacaagtcgcttctctggctgaaacggcgcaacaagttaacgccgtatggaagttcgccctgacgcacgatgacctgccgcaattgcagcattttggtaagcatgtcgaacatgaactgggacttgagtgtgaatggtcctggcacgatcaggttgatattgcacgcggcggcaacagcaaaggtaaacgtttgacgaaatgggttgaggcgcaaggctggtcgatggaaaacgtcgtggccttcggcgataactttaatgatatcagtatgctggaggccgctggtacaggcgtggcgatgggcaacgccgatgacgcggtaaaagcgcgcgccaacattgtgattggtgataacaccaccgacagcattgcccagttcatttatagccacctgatttaa

SEQ ID NO: 4572 - DNA, 735 bp, Escherichia coli
atgttaagactcaagactcaagactcaagactcaagactcaagactcaagactcaagactcaagactcaagactcaagactcaagactcgttttccgttgatgataatgggtcaggtaatgtttttgtatgtggagatcttgtaaatagcaaagagaataaagttcagttcaatggaaacaataacaaacttattatagaagatgatgttgagtgtcgatggcttaccgtaatatttaggggtgataataattacgtaagaatacataaaaacagtaagattaaaggtgatattgtcgcaacaaaaggttcaaaagttattatcggtagaagaacgacaataggtgcaggttttgaagtcgtcactgataagtgcaatgttacaattggccatgactgcatgatagcaagagatgttattttgcgtgcatcagatgggcatcctatatttgatattcatagcaaaaaaaggattaattgggcaaaagatatcattatatctagttacgtatgggtagggagaaatgtctctataatgaaaggagtatctgttggaagcggatctgtcattgggtatgggagtattgtaactaaagatgtgccatctatgtgtgcagcagccggtaatccagcaaaaataataaaaagaaatataatatgggcaagaacggataaagcggagctaattagtgatgacaagagatgctccagctatcatgcgaagctcacgcaataa

SEQ ID NO: 4573 - DNA, 1158 bp, Escherichia coli
atgctcaccgttaagcagattgaagcagcaaagccgaaagaaaaaccataccgcctactcgatggtaatggcctgtacctttatgtccctgtatcagggaaaaaggtatggcagcttcgctacaagattgacggtaaggagaaaatcctgaccgtcggaaaatatccacttatgactttgcaggaggcaagagataaagcatggaccgcgaggaaagacatctcggttggcatcgatccggtaaaagcgaaaaaggcttcgtctaacaacaattcctttagtgcgatttacaaggaatggtacgagcacaagaagcaagtctggtcagtaggctatgcaactgaacttgcaaaaatgtttgatgacgacattttacctatcatcggcggccttgaaattcaggatattgagccgatgcaactgctggaagtaatccgcagatttgaagatcgcggtgcaatggagcgagccaacaaagcccgcagaagatgcggcgaggttttccgttacgctattgtcactggtagggctaaatataacccggcacctgaccttgctgacgccatgaagggataccgcaagaagaacttcccgtttcttcctgcagaccagatccctgcattcaacaaagcactggcaacattttcaggaagtatcgtatcgctcattgcgaccaaagttttacgctacacagccctaagaacgaaagagcttcgttccatgctatggaagaacgtcgattttgaaaacaggattatcaccatcgacgccagtgtgatgaagggacgcaaaattcatgtggtcccgatgtcagaccaggtggttgaacttctcactacgctaagctccatcaccaaaccagtatcagagtttgtttttgccgggcgcaacgataagaagaagccaatctgcgagaacgcggttctacttgtgatcaaacaaatcggctatgagggtctagaaagcggtcacggattcaggcatgaattcagcacgattatgaacgagcacgaatggcctgctgacgctattgaagtgcaactggcacatgccaacggcggatctgtgcgcggtatttacaaccatgctcagtatctcgataagcgcagagaaatgatgcagtggtgggcggattggcttgatgagaaggtagagtga

SEQ ID NO: 4574 - DNA, 843 bp, Escherichia coli
atgaaaatactgcgtttttgggcctgtttactcgtcctgatcttttcaagtactggtgggctggcggcgaagaaaattgcaacattggtgactccgataggattttctgctgttacaacccagattcattactatcttgaaattctgacgccagaaggcgttgcctatggcgtgtacaagcaacacagtcgtatgcttcaaacagaaaagttagatttagtcagttggagcggtaacacgactgcacctgagttgacagttgatgatggctatgaggtagcaaaatccaattgtgttggacttgaagcatatgatgctttatcgagtaggacgaattggatttgtgagaatatggtccttagcgtgtatcacgatggacctgtacaagggtgcccatggttagtttcaacatacactgatagtgttctcccgtatgatgtaccgaccccatatgtggggccaaaagtgcataactcgtcatgtcctgtctccgttgccacttatgatatttcgtggagtgaagattatgttgcccattcgaaagtgctgtcgttgcaatcgacgggcggaacgattgagaaaacgctgcccaccttcttgatggaaagcggcaagctctgtgacggcagagtgatggacgatcgaggtgcatactgccgctttgtggcgcaaatgatcaccttctccacctccggctgtgacagttcgaaagtgacggtcacacccaaccagcatcccatcactgacaagcaactgcacgacatggtagtgcgtgtcgataccagcagccgccagccgattgattccacctgccgcttccagtacacgctcaacgagctgtag

SEQ ID NO: 4575 - DNA, 939 bp, Escherichia coli
atgataagtgcaaatcgtccgataattaacctcgacctcgatctgctgagaacatttgttgctgttgccgatctgaacacttttgctgccgcagctgccgctgtgtgtcgtactcagtccgccgtaagtcagcaaatgcagcgtctggaacaactcgttgggaaagaactgttcgctcgtcacggtcgcaacaaactgttaactgaacatggcattcaacttcttggttacgccaggaaaatcctgcgttttaatgatgaggcctgctcatcattaatgttcagtaatcttcagggcgtgttaactatcggtgcttcagatgaatctgccgatacgatcttacctttcctgttaaatcgcgtgagttcggtttatccgaaactagcgctggatgtccgcgttaaacgtaatgcctacatggcagaaatgctggaatcccaggaagtggatttgatggtaaccacccatcgtccttctacctttaaggcattgaacctgcgtacctcgccaacacactggtactgcgcagcggaatacgtattgcaaaaaggtgagccgatccctcttgtgttgctggatgatccaagtccgtttcgcgatatggtgctggcgacgcttaataaagcagatattccctggcgactggcttatgtcgcctcgacgcttccggccgttcgtgcggcagtgaaagccggtcttggcgtgacggcaaggccggtcgagatgatgagtccggacctgcgtgtgctgagtggagtagatggcttaccgccgctacctgataccgaatatttgctgtgctatgacccgtccagtaataatgagctggcccaggtgatctatcaggcgatggagagctaccataatccgtggcaatacagcccaatgtctgctccggaaggagatgactcattgttgattgaaagggatatcgagtaa

SEQ ID NO: 4576 - DNA, 501 bp, Escherichia coli
atgcacgagaatcaacaaccacaaaccgaggcttttgagctgagtgcggcagagcgtgaagcgattgagcacgagatgcaccactacgaagacccgcgtgcggcgtccattgaagcgctgaaaatcgttcagaagcagcgtggctgggtgccggatggcgcgatccacgcgatcgccgatgtgctgggtattccggcgagcgacgtcgaaggcgtggcaacgttttatagccagatcttccgtcagccagtaggccgccatgtgatccgttattgcgacagcgtggtctgtcacatcaacggttaccagggtattcaggcggcgctggagaaaaaactgaacatcaaaccagggcaaacgacatttgacggtcgcttcacgctgctgccaacttgctgcctggggaactgtgataaagggccaaacatgatgatcgatgaggacactcacgcgcatctgaccccggaagcgatccctgaactgctggagcggtataaatga

SEQ ID NO: 4577 - DNA, 1743 bp, Escherichia coli
atgcgaaataaaaatataatcatgttgcttataagtagtttgattttgtcaggatgtgggccggaacctgaggataagaaaagtcagcaacaacaatctactacacccactgaccagcaagtgcttgccgcgcaacaagcggcaacaaaagtggctgagcaaagcgccgccaaagccgctgcagacgcgaaagccttagcccagcaagaagtgcaacaatattcagacaaacaggctttgctggggcgattgcaggcggctccaaaatatcaacatgcagccagagaaaaagcagcctcccaaatcgcaaatccaggaaccgctcgctaccagcagttcgatgataatccggttaagcaggtagcgcaaaacccgttggcgacgtttagccttgacgtcgatactggcagttatgcgaatgtgcggcgtttccttaatcaagggctgttacctccgccagacgctgtgcgggtggaggagatagtcaattatttcccgtctgactgggatatcaaagacaaacaatctattccggcctctaagccaatacctttcgctatgcgctacgaattggcacctgcaccctggaatgaacagcgaacattgctgaaagttgatatcctggcgaaagatcgcaaaagtgaagagttacccgcttctaatctggtctttcttatcgacacgtctggttcaatgatttctgatgaacgtttgccacttatccagtcttcgttgaaattattggtcaaagaacttcgtgagcaggataacattgccatcgtgacctacgctggcgactctcgtattgcgttgccttctatctccggtagtcacaaggcggaaattaatgctgcaattgattcgctggatgcagaaggcagtaccaatggcggtgccgggctggagatggcttatcagcaggcagcgaaggggtttattaaaggtggtatcaatcgcattttattggccactgacggtgactttaacgttggcattgacgatccaaaatcgattgaatcaatggtcaaaaaacagcgtgagtccggtgttactctgtcgacgcttggcgtgggggatagcaattataacgaggcaatgatggtaagaattgccgatgttggtaacggcaactatagctacattgataccctctcagaggcgcagaaagtgttgaacagtgaaatgcggcagacgttgattaccgtagcaaaagatgtcaaagcgcaaattgagtttaaccccgcgtgggtaacggaataccgtcagataggttatgaaaagcgccaacttagggcagaggattttaataacgacaacgttgatgcgggtgatattggcgcaggtaaacatataacatttttatttgaattaacgctgaaagggcaaaaagcatcaattgataagttacgctatgccccggataacaaatcagcgaaatcggacaaaacaaaagaacttgcctggttaaagattcgttggaaatccccacagggaaaagaaagtcagttagttgaattcccgttggcattcgcaataaaggcaccttcagaagatatgcgttttcgcgcagcagtggctgcatatgggcaaaagttacgcggttctgaatacctgaataatacctcctggcagcagatcaaacagtgggctcagaaggcaaaaggggaagatccacagggttacagagcggaatttattcgcctgattggactggcgaaagatctggacaattcacaaaactaa

SEQ ID NO: 4578 - DNA, 339 bp, Escherichia coli
atgtttgaaatccaccctgttaagaaagtctcggtggttattcccgtttataacgagcaggaaagcttaccggaattaatcaggcgcaccaccgcagcctgtgaatcactggggaaagagtatgaaatcctgctgattgatgacggcagtagcgataattccgcgcatatgctggtcgaagcctcacaagcggagggcagccatattgtgtctatcttgcttaaccgcaattacgggcaacattcagcgattatggcgggattcagtcacgtcaccggcgacttaattattaccctcgatgccgatctccagaatccgccaggacagctggtttcgtaa

SEQ ID NO: 4579 - DNA, 1203 bp, Escherichia coli
atgttaaaagtggaaatgttatccaccggggatgaagtgttacacgggcaaatcgttgacactaacgctgcctggctggccgattttttctttcatcaggggctgccattatctcgccgcaatacggtgggggataaccttgatgacttagtcaccattcttcgcgaacgtagtcagcacgccgatgtgttgatcgttaacggcgggctgggaccgaccagtgatgatttaagcgcactcgccgctgcgacagcaaaaggtgaaggcctggtgctgcatgaagcctggctcaaagagatggaacgctatttccatgaacggggacgagtaatggcaccgagcaaccgtaaacaagcggagctgcctgccagtgctgaatttatcaataacccggtaggcactgcctgtggttttgccatacagcttaatcgttgcctgatgttctttacccccggcgtaccgtcagaatttaaggtgatggtcgagcacgaaatcctgccgcgcctgcgcgagcgtttttctttaccacagccgccggtttgcctgcgtttgactacctttggtcgttcggaaagcgatctggcacaaagcctggacactctacaactgccgccgggcgtaacaatgggctatcgctcctcaatgccgattatcgaactgaaactcaccggaccggcaagcgaggaacaggcgatggaaaaactgtggctggacgttaaacgtgttgccggacagagcgtgattttcgaaggcaccgaaggactgcccgcgcagatcagtcgcgaattgcagagccgccagttcagcctgacgctgagcgagcaattcaccggtggtttattggctttgcaactttctcgcgcagatgctccattgctggcgtgtgaagtggttccttcacaggaggaaaccctggcgcaaacggcgcactggattacagaacggcgggcgaaccattttgctgggttggcactggctgtttctggtctggaagatgagcatctcaactttgcactagccacgccagacggcactttcgctttgcgtgtacatttcagtgccacacgctacagtctggctattcgccaggaagtctgcgcaatgatggcgcttaatatgctacgccgttggttaaacggccaggacatcgccagcgagcatggctggattgaggttgttgagtccatgaccttatctgtctga

SEQ ID NO: 4580 - DNA, 1206 bp, Escherichia coli
atgaccctaccaaaaattaaacaggttcgcgcctggtttactggcggtgcgatagcagaaaaaggcgctggcggcggtgattatcacgaccagggggcgaatcactggatagacgatcatattgccaccccgatgagtaaataccgcgattacgagcagtcacgccagtcatttggcattaacgttcttggcacgttggttgttgaagtcgaagcagaaaacggccagaccggattcgccgtttcgacagccggtgaaatgggctgttttattgtcgaaaaacaccttaaccgtttcattgagggtaaatgtgtcagtgatatcaaactgatccacgatcaaatgctcaatgccaccctgtattactccggctctggtggcctggtgatgaatacgatttcctgtgtcgatctggctctgtgggatctgttcggcaaagtggtcgggcttccggtttataaacttttaggcggcgcagttcgtgatgagattcagttctacgccacaggtgcgcgtccggatctggcaaaagagatgggctttatcggtggcaaaatgccgacgcactgggggccacatgatggcgatgcggggatccgcaaagatgccgctatggtcgcggatatgcgtgaaaaatgcggtgaggatttctggttaatgctcgactgctggatgagtcaggacgtgaactatgccaccaaactggcccacgcttgcgcgccctataacctgaaatggatcgaagagtgcctgccgccacagcagtatgaaggttatcgcgaactgaaacacaacgcaccagcggggatgatggtcaccagcggtgagcaccacggcacactgcaatctttccgtacgctttcagaaaccggtatcgacattatgcagccggatgttggctggtgcggtggcttaaccacgctggtggaaattgccgcaatcgccaaatccagggggcaactggtggtgccacacggttcgtctgtttactcccaccatgcggtgatcaccttcaccaatacgccattcagcgaattcctgatgaccagcccggattgttcaacgatgcgtccacaatttgatccgattctgcttaatgagccagtaccggtgaatggtcgtattcataaatcagtgcttgataaacccggtttcggcgtcgaactcaatcgtgactgcaatttgaaacgcccctacagccactaa

SEQ ID NO: 4581 - DNA, 1290 bp, Escherichia coli
atgagcaccgctttgcttgacgccgtggtgaagaaaaaccgcgcgcgtttaattccgtttatgttggcgctgtatgtgctggcgtttctcgaccgttcgaatattggttttgccaaacagacctaccagattgataccgggctgagtaatgaagcttatgcgctgggagcaggcattttctttgtggtatacgcgtttctgggggttccggcgaatcttttgatgcgcaaactgggggccagaacctggattggtacgacaacactgctgtggggatttctttcggctgccatggcatgggccgatactgaagcgaaatttctgatcgttcgcactctgcttggtgctgcggaggccgggtttttccctggtatgatttatctcacttcgcaatggtttccgcagcgtaatcgcgccagcattatggggctgttctatatgggcgcaccgctggcgttaacactgggatcaccgctttccggcgcgctgctggagatgcatggatttatggggcatcccggctggttctggatgtttgtgattgaaggattgctggcagtcggcgctggggtattcacattcttttggcttgatgacacaccggagcaggcacgttttctgagtaaacaagaaaaaacgttacttatcaatcaactggcaagtgaagaacaacagaaagtgacttcgcgactgagcgatgcgttgcgtaatggccgagtctggcaactggcgattatctacctgaccattcaggtagcggtttacggattaattttcttcctgccgacccaggttgcggcattgctgggaacaaaagtgggctttacggcgtcggtggtcaccgccattccgtgggttgcggccttgtttgggacctggcttattccgcgctactccgataaaaccggcgaacggcgtaatgtcgcagcgctgacattactggcggcgggcattggtattggtctgtccgggctgctttctccagtactggcgatcgtagcactgtgtgttgcagccatcgggtttattgccgtgcaaccggtgttctggacgatgccgacacagcttctttccggtacggcgctggctgcggggattggttttataaacctgtttggtgcagtgggcgggtttattgccccgatcctgcgcgtgaaagcagaaacgttattttccagcgatgcggcgggattactgacgctggcagcggtggcggtcatcggttcgctgattattttcactctgcgtgtaaatcgcactgttgcgcagaccgacgtggcacatcattaa

SEQ ID NO: 4582 - DNA, 186 bp, Escherichia coli
atgactattgctgaacggttacggcaggaaggacatcaaattggctggcaggagggtaaattagaaggcatgcatgaacaagccattaaaattgccttgcgcatgctggaacagggcattgatcgtgaccaggtgctcgcggccactcagctaagcgaagccgatctggcagcgaataaccactaa

SEQ ID NO: 4583 - DNA, 1359 bp, Escherichia coli
atgttgagtatttttaaaccagcgccacacaaagcgcgcttacctaccgcggagatcgatccgacttatcgtcgattgcgctggcaaattttcctggggatattctttggctatgctgcttactatttggttcgtaagaactttgcgctcgctatgccttatctggttgagcagggattctcacgcggtgatttaggttttgccctttcggggatctcgattgcttatggattttcgaaattcatcatgggttcggtatcggatcgctcgaatccgcgcgttttcctgcccgcaggtttgattctggcggcggcagtgatgttgtttatgggctttgtgccatgggcgacgtcgagcattgcggtgatgtttgtactgttgttcctctgcggttggttccaggggatggggtggccgccgtgtggtcgtactatggtgcactggtggtcgcagaaagaacgtggcggcattgtgtcagtgtggaactgtgcgcacaacgtcggtggtggtattccgccgctgctgttcctgctggggatggcctggttcaatgactggcacgcggcgctctatatgcccgctttctgcgccattctggtggcactgttcgcctttgcgatgatgcgcgataccccgcaatcctgtggcctgccgccgatcgaagagtacaaaaatgattatccggacgactataacgaaaaagcggaacaggagctgaccgcgaagcagatcttcatgcagtacgtgctgccgaacaaactgctgtggtatatcgccatcgccaacgtgttcgtttatctgctgcgttacggcatcctcgactggtcaccgacttatctgaaagaggttaagcatttcgcgctggataaatcctcctgggcctacttcctttatgaatatgcaggtattccgggcaccctgctgtgcggctggatgtcggataaagtctttcgtggtaaccgtggggcaaccggcgtcttctttatgacactggtgaccatcgcgactatcgtttactggatgaacccggcaggtaacccaaccgtcgatatgatttgtatgattgttatcggcttcctgatctatggccctgtgatgctgatcggtctacatgcgctggaactggcaccgaaaaaagcggcaggtacggcagcgggttttaccgggctgtttggttacctcggcggttcggtggcggcgagcgcgattgttggctacaccgtggacttcttcggctgggatggcggctttatggtaatgattggcggcagcattctggcggttatcttgttgattgttgtgatgattggcgaaaaacgtcgccatgaacaattactgcaaaaacgcaacggaggctaa

SEQ ID NO: 4584 - DNA, 1053 bp, Escherichia coli
atgaggtttttattgggcgtgctgatgctgatgatctccggctcagcgctggcgaccatcgacgtgttgcagtttaaagatgaagcacaggaacaacagttccgtcagctcactgaagaactgcgctgcccgaaatgccagaacaacagcattgccgattccaactcgatgattgccaccgacctgcgccagaaagtgtatgaactgatgcaggaaggcaaaagtaagaaagagattgtcgattatatggtggcgcgttacggcaacttcgtcacttacgatccgccgttaacgccgctgaccgtgctgctgtgggtgctgccagtagtggctattggcattggcggttgggtcatatacgcccgttcgcggcgtcgggtacgcgtggtgctggaagcgtttccagaacaaagcgtgccggaaggtaagcgtgccggatatgttgtttatctgccgggtattgtggtggcgttaattgtggctggcgtcagctactaccagactggcaattatcagcaggtgaaaatctggcagcaggccacggcacaggctccggcgttactggacagggcgctggatccgaaagccgatccgctcaacgaagaagagatgtcgcgccttgcgctggggatgcgtactcaactgcaaaaaaatccgggagatatagaaggctggattatgttgggccgcgttggcatggcgctgggtaacgccagtatcgccaccgatgcatacgccactgcgtatcgcctcgatccgaaaaacagcgatgctgcactgggatacgctgaagcgttgacacgttcatctgatcccaacgacaaccgcctcggcggcgaactgctgcgccagttggtgagaacggaccatagcaatatccgtgtgttaagcatgtatgcatttaatgcctttgagcagcaacgatttggcgaagccgttgccgcgtgggagatgatgttgaaactcttacctgccaacgatactcgccgtgcggtgatcgaacgtagtatcgcgcaggcgatgcaacatttgtcgccgcaggagagtaaataa

SEQ ID NO: 4585 - DNA, 942 bp, Escherichia coli
atgcgcgaaaaggactacatagtaattattggctcggcgaatattgatgtggctgggtattcacatcatccattgaattatgcggattcgaatcccggaaaaattaaatttaccccaggtggcgtgggaaggaatatcgctcataatctggcgttactggggaaaaatgcctggcttttaagtgcagtaggtggtgatttttatgggcaatcattactggcgcaaactaatcaatccggtgtttatgtcgataaatgcttaattgttccgggtgagaatacatccagctatttatcactgctcgataatacaggagaaatgcttgtcgcgataaatgatatgagtattagtgactgtatttctgcagaatttcttgcccagcatcaggagtttattcgcggtgcaaaggttattgtcgcggattgcaaccttagtgaagaggcgctggtctgggttctggaaaatagcggggaaacgcctgtatttattgatccggtatcggcatggaaatgcgtcaaaatccgcgatcatctgagcaaaatccatacgttaaaacctaaccgtcttgaagccgaaacgttgagcggaattgcactttccggacgtgaagatgtcgcaaaggtcgccgcctggtttcatcaacacggcctgaaccgcctggtgcttagcatgggaggggatggcgtttactacagtgatatcaacggtgaaagtgggtggtcggcccctattaaaacgaatgtcatcaatgttactggggcaggcgacgccatgatggcggggctggcctcctgttgggtagacggtatgccgtttatcgattctgttcgatttgcgcagggatgttcgtcaatggcacttgcctgtgaatataccaacaaccctgaattatcaattgccaatgttacatcgttagtggagaacacagaatgtctgaattaa

SEQ ID NO: 4586 - DNA, 1416 bp, Escherichia coli
atgacagatcttcccgacagcacccgctggcaattgtggattgtggctttcggcttctttatgcagtcgctggacaccaccatcgttaacaccgcgcttccctcaatggcgcaaagcctcggggaaagtccgttgcatatgcacatggtcattgtctcttatgtactgaccgtggcggtgatgctgcccgccagcggctggctggcggacaaagtcggcgtgcgcaatattttctttaccgccatcgtgctgtttactctcggttcactgttttgcgcgctttccggcacgctgaacgaactgttgctggcacgcgcgctacagggcgttggcggcgcgatgatggtgccggtcggcaggttgacggtgatgaaaatcgtaccacgcgagcaatatatggcggcgatgacctttgtcacgctgcccggtcaggtcgggccgctgcttggcccggcgctcggaggtctgctggtggagtacgcatcgtggcactggatctttttgatcaacattccggtggggattattggcgcgatcgccacactgatgttaatgccgaactacaccatgcagacgcggcgctttgatctctccggctttctgttgctggcggttggcatggcagtcttaaccctggcgctggacggcagtaaaggtacaggtttctcgccgctggcgattgctggcctggtcgcagttggcgtggtagcactggtgctttatctgctgcacgcccaaaataacaaccgcgccctgttcagtctgaaactgttccgcactcgtaccttttcgctgggcctggcggggagctttgccggacgtattggcagtggcatgttgccctttatgacaccggttttcctgcaaattggtctcggtttctcgccgtttcatgccggactgatgatgatcccgatggtactcggcagcatgggaatgaagcgaattgtggtacaggtagtgaatcgctttggttatcgtcgggtactggtggcgaccacgctgggcctgtcgctggtcaccctgttgtttatgactaccgctctgctgggctggtactacgttttgccgttcgtcctgtttttacaaggaatggtcaactcgacgcgtttctcctccatgaacaccctgacgctgaaagatctcccggacaacctggcgagcagcggcaacagtctgctgtcgatgattatgcaattgtcgatgagtattggcgtcaccatcgccgggctgttgctgggactttttggttcgcagcatgtcagcgtcgacagcggcaccacacaaaccgtctttatgtacacctggcttagcatggcgtttatcatcgcccttccggcgtttgtctttgccagagtgccgagcgatacgcatcaaaatgtggctatttcacggcgaaaaaggagcgcgcaatga

SEQ ID NO: 4587 - DNA, 411 bp, Escherichia coli
gtggatgatgctgcaacaggaacagccggagatttcgtaattgctaccggcgttcagtactccgtgcgtcagttcgtagaaatggcggcggcacagttgggtatcaaactgcgctttgaaggcacgggcgttgaagagaagggcattgtggtttccgtcaccgggcatgatgcgccgggcgttaaaccgggcgatgtgattatcgccgttgacccgcgttacttccgcccggcagaagttgaaacgctgctcggcgacccgaccaaagcgcacgaaaaactgggctggaaaccggaaatcaccctcagagagatggtgtctgaaatggtggctaatgacctcgaagcggcgaaaaaacactctctgctgaaatctcacggctacgacgtggcgatcgcgctggagtcataa

SEQ ID NO: 4588 - DNA, 966 bp, Escherichia coli
atgcgtaaacaacgaatctttatcgctggccatcgtgggatggttggttccgccatcaggcgtcagctcgaacagcgcggtgatgtggaactggtattacgcacccgcgacgagctgaacctgctggacagccgcgccgtgcatgatttctttgccagcgaacgtattgaccaggtctatctggcggcggcgaaagtgggcggcattgttgccaacaacacctatccggcggatttcatctaccagaacatgatgattgagagcaatatcattcacgctgcgcatcagaacgacgtgaacaaactgctgtttctcggatcgtcctgcatctacccgaaactggcaaaacagccgatggcagaaagcgagttgttgcagggcacgctggagccgaccaacgaaccttatgccattgccaaaatcgccgggatcaaactgtgcgaatcttacaaccgccagtacggacgcgattaccgctcggtcatgccgaccaacctgtacgggccgcacgacaacttccatccgagtaactcgcatgtgatcccagcattgctgcgtcgcttccacgaggcgacggcacagaatgcgcctgacgtggtggtgtgggggagcggtacaccgatgcgtgaatttctgcatgtcgatgatatggcggcggcaagcattcatgtgatggagctggcgcacgaagtctggctggagaacacccagccgatgctgtcgcacattaacgtcggcacgggcgttgactgcactatccgcgagctggcgcaaaccatcgccaaagtggtgggttacaaaggtcgggtggtttttgatgccagtaaaccggatggtacgccgcgcaaactgctggatgtgacgcgcctgcatcagcttggctggtatcacgaaatctcactggaagcggggcttgccagcacttaccagtggttccttgagaatcaagaccgctttcgggggtaa

SEQ ID NO: 4589 - DNA, 483 bp, Escherichia coli
atgatgtttttacgtcaggaagactttgccacggtagtgcgctccacaccgcttgtctctctcgactttattgtcgagaacagtcgcggcgagtttctgcttggcaaaagaaccaaccgcccggcacagggttactggtttgtgccgggagggcgcgtgcagaaagacgaaatgctggaagccgcatttgagcggctgacgatggcggaactggggctgcgtctaccgataacagtaggccagttttacggtgtctggcagcacttttatgacgataacttctccggcacggatttcaccactcactatgtggtgctcggttttcgcttcagagtcgctgaagaagatctgttactgccggatgagcagcatgacgattaccgctggctgaccccggacgcactgctcgccagtgacaatgttcacgctaacagccgcgcctattttctcgctgagaagcgtgccggagtacccggattatga

SEQ ID NO: 4590 - DNA, 1224 bp, Escherichia coli
atgaaaatactggtctacggcattaactactcgccggagttaaccggtatcggcaaatacaccggagagatggtggaatggctggcggcacaaggtcatgaggtgcgggttattaccgcaccgccttactacccgcaatggcaggtgggcgagaactattccgcctggcggtacaaacgagaagagggggccgccacggtgtggcgctgcccgctgtacgtgccaaaacagccgagcaccctgaaacgcctgttgcatctcggcagttttgccgccagcagttttttcccgttgatggcgcaacgtcgctggaagccggatcgcattatcggcgtagtgccaacgctgttttgcacgccgggaatgcgcctgctggcgaaactctctggcgcgcgtaccgtgctgcatattcaggattacgaagtggacgccatgctggggctgggccttgccggaaaaggcaaaggcggcaaagtggcacagctggcaacggcgttcgaacgtagcggactgcataacgtcgataacgtctccacgatttcgcgttcgatgatgaataaagccatcgaaaaaggcgtggcggcagaaaacgtcatcttcttccccaactggtcagaaattgcccgttttcagcatgtcgcagatgtcgatgttgatgcccttcgtaaccagcttggcctgccggataacaaaaaaatcattctttactccggcaatattggtgaaaagcaggggctggaaaacgttattgaagctgccgaacgcctgcgtgatgaaccgctgatttttgccattgtcgggcagggcggcggcaaagcgcgactggaaaaaatggcgcaacagcgtggactgcgcaacatgcaattcttcccgctgcaatcgtatgacgctttacccgcactgctgaagatgggcgattgccatctggtggtgcaaaaacgcggcgcggcggatgccgtattgccgtcgaaactgaccaatattctggcggtaggcggcaacgcggtgattaccgcagaagctcacaccgaactgggacagctttgcgaaacctttccgggcattgcggtttgcgttgaaccggaatcggtcgaggcgctggtggcggggattcgtcaggcgctcctgctgcccaaacacaacacggtggcacgtgaatatgccgaacgcacgctcgataaagagaacgtgttacgtcaatttataaatgatattcggggataa

SEQ ID NO: 4591 - DNA, 1437 bp, Escherichia coli
atggcgcagtcgaaactctatccagttgtgatggcaggtggctccggtagccgcttatggccgctttcccgcgtactttaccccaagcagtttttatgcctgaaaggcgatctcaccatgctgcaaaccaccatctgccgcctgaacggcgtggagtgcgaaagcccggtggtgatttgcaatgagcagcaccgctttattgtcgcggaacagctgcgtcaactgaacaaactcaccgagaatattattctcgaaccggcagggcgtaacactgcaccggccattgcgctggcggcgctggcggcaaaacgtcatagcccggagaacgacccattaatgctggtgctggcggcggatcatgtgattgccgatgaagacgcgttccgtgccgccgtgcgtaacgctatgccgtatgccgaagcgggcaagctggtgacctttggcattgtgccggatctaccagaaaccggttatggctatattcgtcgcggtgaagtgtctgcgggtgagcaggatatggtggcctttgaagtggcgcagtttgtcgaaaaaccgaatctggaaaccgctcaggcctatgtggcaagcggcgaatattactggaacagcggtatgtttctgttccgcgccggacgctatctcgaagaactgaaaaaatatcgcccggatattctcgatgcctgtgaaaaagcgatgagcgccgtcgatccggatctcgattttattcgtgtggatgaagaggcgtttctggcctgcccggaagagtcggtggattacgcagtcatggaacgtacggcagatgccgttgtggtgccgatggatgcgggctggagcgatgtcggctcctggtcctctttatgggaaatcagcgcccacaccgccgagggcaacgtttgccacggcgatgtgattaatcacaaaactgaaaacagctatgtgtatgccgaatctggcctggtcaccaccgtcggggtgaaagatttggtggtagtgcagaccaaagatgctgtgctgattgccgaccgtaacgcggtgcaggatgtgaaaaaagtggtcgagcagatcaaagccgatggtcgccatgagcatcgggtacatcgcgaagtgtatcgtccgtggggcaaatatgactctatcgacgcgggcgaccgctaccaggtgaaacgcatcaccgtgaaaccgggcgagggcttgtcggtacagatgcatcatcaccgcgcggaacactgggtggttgtcgcaggaacggcaaaagtcactattgacggtgatatcaaactgcttggtgaaaacgagtccatttatattccgctgggggcgacgcactgcctggaaaacccggggaaaattccgctcgatttaattgaagtgcgctccggctcttatctcgaagaggatgatgtggtgcgcttcgcggatcgctacggacgggtgtaa

SEQ ID NO: 4592 - DNA, 414 bp, Escherichia coli
atgatggatattaaattaatctctttgcaaaaacatggggatgagcgcggtgcattaattgctcttgaagagcaacgaaatatacctttcgaagtcaaaagaatatattacatacttgagactcttaatggagtaagacgcggatttcatgcgcacaaggttactcgtcagttagctattgtagtcaagggagcttgtaaatttcatctggataatggtaaagaaacaaagcaggtggaacttaatgatccaacaattgcgttgctgatagaaccctatatatggcatgaaatgtatgattttagtgatgattgtgtgctgcttgtaattgcggatgatttctataaagagtctgattatatccgcaattatgatgattttattagaagagtaaattcaattgagaattcataa

SEQ ID NO: 4593 - DNA, 468 bp, Escherichia coli
ttgagaattcataagctaagtgacgtccagacaacatcaattggtgatggaacaactatctggcagtttgttgtgatactaaaaggtgctgtaattggtaataattgcaacatctgtgcaaataccttaattgaaaataacgttgtaattggtaacaatgtcacagtcaaaagcggtgtgtatatttgggatggcgttaaaatagaggataatgtttttattggtccttgtgtagcatttacaaatgataagtatcctcgctctaaagtctatcctgatgaatttttgcaaacaataatacgcaaaggagcatcaataggtgctaacgcaaccatcctgccaggaattgaaattggtgaaaaagcaatcgttggtgcggggagtgttgtaaccaaaaatgtaccgccatgcgcaatagtagtaggtaatccagctcgatttattaaatgggtagaggataatgaataa

SEQ ID NO: 4594 - DNA, 1107 bp, Escherichia coli
atgaataaaattgattttttagatctttttgcaattaaccagcgacagcacaaagaattagtctctgcgtttagtagggtgctagattctggttggtatatcatgggcgaagaacttgagcagttcgagaaagagttcgcagaatactgtggagttaagtattgcattggtgtagcaaatggccttgatgcgttgatactagtattgagggcatggaaagaacttggctatcttgaagacggtgacgaggtattagtaccggcaaatacatatattgcttctattcttgctataacagagaacaaacttgttcctgttcttgttgaaccagatatagaaacttataatattaatcctgctttaattgaaaattacattacggaaaaaactaaagcaatattaccggttcacttatatggtctattgtgcaatatgccagaaattagtgcaatcgccagaaaatataatctgttgattcttgaagattgtgcacaagcacatggtgcaatacgtgatggtcgcaaagctggagcttggggggatgctgcaggatttagtttttatccaggaaaaaaccttggagctttgggggatgcgggagctgttactacaaataatgcagaattatcctcaactataaaagctttgcgaaattatgggtcacataagaaatatgaaaatatttatcagggattgaatagtcgattggatgaactgcaagcagccttattgcgtgtaaaaatccatacattaccggaagatactgcgattcggcaaaggattgctgaaaaatatattcgtgaaataaaaaaccctgcgattacgttaccagtgtacgaaggccaaggtgcgcacgtttggcatttatttgtagtaagaatcgctaatcgtgaaaaattccagtcatacttattagagaagggtatcaaaaccttaattcactatccattaccaccccataagcagcaagcatatcaaaatatgtctagccttagccttccaattactgagcaaattcatgatgaagtcatttctttacctataagtccggtaatgagtgaagatgatgtcaattatgtaatcaaaatggtcaatgattacaagtaa

SEQ ID NO: 4595 - DNA, 1263 bp, Escherichia coli
atgaaaaaatttcttcaggtaactatattatccgctatctatacattcattaaaatgattgcgggttttatcatcggtaaggtagtagcaatttatacagggccatcaggggtagcaatgcttggccaagtgcaaagtttaatcacaatagttgcaggtactacctctgcacctgtaagcactggccttgttcgatatactgcggaaaattggcaagaaggacaagaagcatgcgcgccatggtggcgcgcatgcttaagggttactctgtttttattcttgcttattattcccgttgttattatattgtcgaaaaatattagtgagttactttttagcgatggacaatacacatggttaatcattttcgcatgttgtatattgccattctccattataaatacattgatcgcttcagttttaaatggtcaacaattttataagcaatatatattggttgggatgttttctgtattcatttctactatgtttatgattttgttgattgtagcttataatcttaaaggtgcattgattgccacagctataaatagtgctattgctggtcttgtattggttttattttgtctcaataaatcttggtttagatttaaatattggtggggtaaaacggataaagacaaaattataaaaattattcattatactctgatggctctggtttctgttatctccatgcctacagcattgatgtgtattagaaaaatattgattgctaaaactggttgggaggatgcagggcaatggcaggccgtatggaagatatctgaggtttatcttggtgttgtgacaattgctttgtcaacatatttcttaccaagattgacaattataaaaacaagtttccttataaaaaaagaagtaaatagtactatattatacataatatctattacttcattcatggcgttgagtatctatttattccgcgatttggtaataacagttttatttactgaacagtttcgctcagctcgtgaattatttttattacaacttataggggatgtaataaaaattgctgggtttctttatgcataccctcttcaaagtcaggggcatactaaactattcatcagttcagaagtgattttttctatgctctttatcattaccacctatatttttgttgtaaattatggagtacatggtgctaacataagttatgtcattacatatagtttatattttgtgtttgcatttgtgtttactaattttattaatgttagaagaaataattaa

SEQ ID NO: 4596 - DNA, 1050 bp, Escherichia coli
ttgaaaataattatacctgtcttaggatttggcagggctggtggtgaaagagttctttctaagctggcaactgaattgatgaattatggacatgatgtaagttttgttgttccagataatagaactaatccatattatgctaccacagcaaaaattgtcacgagtaaatctagtcaaaaccgtgtaaaaatattgagaatcattaaaaattactataatctgtggcgtaaatgcatagagttaaatcctgatgctgtagttgctagttttcatttgactgcctatcttgtcgcattattaccaatcacccgtcgtaagaaatattattatattcaggcgtatgaagttaatttttttgataatataatatggaaattaatagcgggtttaacatattatttaccgcttaaaaaaatactaaatagtcctaatttgcttcctcataaacatgatgattttataggagtagttcctgcaggagtagatttaaacgttttctatccgaaaccatcaaataggttattaaatggtcacacatcaatagggattattggtagaaaagagaagcacaaaggaactagcgaaattatttcagtattgtgttcactggaaaataaagctggaattataatcaatattgcgatctatcttgaagaagttgataagcagcgtttaatcgctgccgggtttcaggttaatttttttccgattacttctgatttagaattggcatccttttatcgaagcaatgacatcatgattgctgttgggttaattgaagatggcgctttccattatccttgtgctgaatcaatggcttgtggttgtcttgttatttcaaattatgcgccacttactgaaactaacagtgtacttaaattagtcaagtttgatgcttgcaaacttggtgaagcaattaatctttgtctcaatcttgacctagaagaaaaaagcaaagaaatccaatctaatatttctgtgttgaataaatatgactggaaaattgttggtgaaactttcaatagtttattgttagatgcaaataaatag

SEQ ID NO: 4597 - DNA, 558 bp, Escherichia coli
atgaatattgttaaaactgatattccagatctgatcgttcttgaaccaaaagtgtttagtgatgaacgcggcttttttatggagagttataatcagattgaatttgagaaggcaataggaaggcacgtaaattttgttcaggataatcattcaaaatctagtaaaggcgtactacgtgggttgcattatcaattagcaccgtatgcacaggctaaattagttcgatgtgttgtaggtcaggtatttgatgttgctgttgatcttagaaaaaattcaccaacgttcaaaaaatggtttggaataaccctttccgcagaaaataaacgacaattatggatacccgaaggatttgctcatggtttcttggtgaccagtgatgaagctgagttcatttataagacaactaactactatgctcctggtcatcagcaagcaattatttacaatgatcctattttaaacatcgattggcctttctgcagtagtgctctgtcattatcacaaaaagatcaagaagcaaaattattttcagaattattggacagtgaactgttctaa

SEQ ID NO: 4598 - DNA, 963 bp, Escherichia coli
atgacagaaaatagtccgaaatataaacacgataaaagcttaataagttttatctacttattttttatatttacacttattgtaggctttattatcgcaaatacccagtttttggggcgaagtagagactatgataattatatacagatcttttctggtaaagaaggggagggggttcttgaattattttatcgcggattgatgttaataacgaccagctatgaaactatcatttttataattttaacatgttctttttttataaaggcaaggtttctcgctaactattcgcgtaatttttcaggcttgaccttattctttatttattatgcaagcgttgcactttgggttttagattatactcaattcagaaatggtctatgtatttccattttaatgttttccgtatactatttatttataaataaaccgacttatttttatttctcggtattatgtgcaattgcaactcattggtctgctttgccttttttgcttttatatccttttgtctattcaacaaaaataagacgccttggttatttttgtttcagtattcttgttttgattgcgatctcaggagaaggaaaagagatcatatcttttataagaaattttggagtgggacaaaaaataggaaatgaagctggtgtaaatttaataaattcattatcccttaccgctatttcctggtttattattagttacatatcaagcattggaaatgaaaggagaaatttaaggcttttcttttgttatggtgtcatgcaatacgtgacttttagccttttctctctacctgttatggctttccgtattttggaaatgtattttttccttatgctaaccattggggtgtttattaagcaaaaaaagaattattattttgttttttgcaaagtgttaattttattgtatctaacatactattatcatatggtctttggagtgattaatgtgtaa

SEQ ID NO: 4599 - DNA, 888 bp, Escherichia coli
atgtgtaaggctaaggtgttggctataattgttacttacaacccggaaattattcgattgacggaatgtattaactctttagccccacaagttgagagaataattcttgtagataatggctcaaataatagtgatttgataaaaaatatcagtattaataaccttgaaattattttactttcggaaaacaaaggcattgcatttgctcagaaccatggtgttaagaagggcctggaagcaaaagagtttgactatttatttttctcagatcaggatacttgctttcctagcgatgttattgaaaaacttaagagtacatttacgaaaaataataaaaaaggtaaaaatgttgcttgtgcttctcctttttttaaagaccatcgttcaaattatatgcatccgtcagtcagcctaaatatttttacgagtacaaaagttatatgtagtgaagtagacgatgatctttatccctcgcatgttattgcttctgggatgttaatgtctcgtgaagcatggcgcgtcgtcggaccattttgtgaaaaactctttatagactgggttgatacagaatggtgttggcgtgcattagctaataatatgattattgttcagacaccatcagtcatcatttctcatgaacttgggtatgggcagaaaatttttgctggtcgatctgttacaatacataattctttcagaaatttttataaaatacgcaatgcaatatacttaatgctgcattcaaattatagcttcaagtatcgttatcatgctttttttcatgcgacaaagaatgttgtatttgaaattttatattcgaaagaaaaattaaattcactgaaggtttgttttaaagctgtacgtgatggtatgttcaataatttttaa

SEQ ID NO: 4600 - DNA, 1077 bp, Escherichia coli
atggaagaaaataatatgaagacggtcgctgtagttggcacagtgggtgttcctgcttgttatggtgggttcgaatcacttgttcagaatctaattgattatcaatctgatggtatacaatatcagatattttgctcttcaaaaaaatatgataaaaaatttaaaaattataaaaatgcagaattaatctatttgccgataaatgccaatggcgtctctagcataatttatgatattatgtgtttaattatttgtttattcaaaaggccagatgttgttttaatattgggggtgtctggttgtttatttctaccaatttataaactattttcaaaatcaaagattattgtcaatattgatgggcttgaatggcgtagaaataaatggggaacgtttgctaagaaatttcttaaaatatctgaggcgatatctattagaatagctgatattatcatttcagataatcaagcaatagctgattatgtggaaaataagtacaagaaaaaaagtgtagttatagcttatggcggagatcatgccactaatcttagtacaccgatagacaatgatcaaaaaaaagaaggttattatttggggctttgtaggatagagcctgagaataatatagaaatgattctgaatgccttcattaatacagataaaaaaattaaatttatgggtaattgggataacagcgagtatggacgccagctaaaaaaatattattcaaactatccaaatatcaccctactagaacctaactataatattgaagagctttataaactaagaaaaaattgtcttgcatacattcatggacactcggctggtggaacaaacccttctttagttgaagcgatgcattttaatattcctatttttgctttcgattgtgactttaatcgttacacaactaacaatttagctcattactttaatgattctgaacaacttagcttattagcagaaagtttgtcttttggaaatcttaaatgtcgagtattagatttaaaaaattatgctgaagatatgtataactggaggcatatagctgctatgtatgaatctatttattaa

SEQ ID NO: 4601 - DNA, 252 bp, Escherichia coli
atgataaggcaggttatccagcgaataagcaaccctgaagcaagcatcgagagcttgcaggaacggcgtttttggttgcagtgtgagcgtgcttacacctggcagccgatctatcaaacatgcgggcggttaatggccgtggagctattaacggtggtcacgcatcccttgaacccttcgcaacgcctgccgccggatcgctattttactgaaatcaccgttagccatcggatggaggttgtgaaagagtag

SEQ ID NO: 4602 - DNA, 159 bp, Escherichia coli
atgaacctaaagaaaacactgttaagcgtgttaatgatattgcaactttgcttattggtagggtgtgactatattgaaaaagcgagtaaggtcgacgatctcgttacacagcaagagttacaaaaaagcaaaatcgaggcgcttgaaaaacaacaataa

SEQ ID NO: 4603 - DNA, 1656 bp, Escherichia coli
atgaatctctggcaacaaaactacgatcccgccgggaatatctggctttccagcctgatagcatcgcttcccatcctgtttttcttctttgcgctgattaagctcaaactgaaaggatacgtcgccgcctcatggacggtggcaatcgcccttgccgtggctttgctgttctataaaatgccggtcgctaacgcgctggcctcggtggtttatggcttcttctacgggttgtggcccatcgcgtggatcattattgcagcggtgttcgtctataagatctcggtgaaaaccgggcagtttgacatcatccgctcgtctattctttcgataacccctgaccagcgcctgcaaatgctgatcgtcggtttctgtttcggcgctttccttgaaggagccgcaggctttggcgcaccggtagcaattaccgccgcattgctggtcggtctgggctttaaaccactgtacgccgccgggctgtgcctgattgttaacaccgcgccagtggcatttggtgcgatgggtattccgattctggtcgccgggcaggtaacaggcatcgacagctttgagattggtcagatggtggggcgtcagctgccgtttatgaccattatcgtgctgttctggatcatggcgattatggacggctggcgcggtatcaaagagacgtggcctgcggtcgtggttgcgggcgggtcgtttgccattgctcaatacctcagctctaactttattgggccggaactgccagacattatctcttcgctggtatcgctgctctgtctgacactgttcctcaaacgctggcaaccagtgcgcgtattccgcttcggtgacttaggggcgtcacaggttgatatgacgctggctcacacaggttacacggcaggtcaggtgctgcgcgcctggacaccgttcctgttcctgaccgccaccgtaacgctgtggagtatcccgccgtttaaagccctgttcgcttcaggcggtgcgctgtatgagtgggtgatcaacattccggtgccgtacctcgataaactggttgcccgtatgccgccagtggtcagcgaagcgacagcgtatgccgccgtgtttaagtttgactggttctctgccactggcaccgccattctgtttgctgccctgctctcgattgtctggctgaagatgaaaccatctgacgctatcagcaccttcggcagcacgctgaaagaactggctctgcccatctactccatcggtatggtgctggcattcgcctttatctcgaactattcaggactgtcatcaacactggcgctggcactggcgcacaccggtcatgcattcaccttcttctcgccgttcctcggctggcttggggtattcctgaccgggtcggatacgtcatctaatgctttgtttgccgctttgcaggctaccgccgcacaacaaattggcgtttctgacctgttgctggttgcagccaacaccaccggtggtgtcaccggcaaaatgatctctccgcaatctatcgctatcgcctgtgcggcggtaggtctggtgggcaaagagtctgatttgttccgctttactgtcaaacacagcctgatcttcacctgtatggtgggcgtgatcaccacgcttcaggcctatgtcttaacgtggatgattccttaa

SEQ ID NO: 4604 - DNA, 777 bp, Escherichia coli
atgattgttttacccagacgcctgtcagacgaggttgccgatcgtgtgcgggcgctgattgatgaaaaaaacctggaagcgggcatgaagttgcccgctgaacgtcaactggcgatgcaactcggcgtgtcgagaaattcactgcgcgaggcgctggcgaaactggtaagcgaaggtgtgctgctcagtcgacgtggcggcgggacgtttattcgctggcgtcatgacacatggtcggagcaaaacatcgtccagccgctgaaaacgctgatggccgatgatccggattacagtttcgatattctggaagcccgatacgccattgaagccagcaccgcatggcatgcagcaatgcgcgccacacctggcgaaaaagaaaagattcagctttgctttgaagcaacgctaagtgaagacccggatctcgcctcacaagcggacgttcgttttcatctggcgattgccgaagcttcacataacattgtgttgctgcaaaccatgcgcggtttcttcgatgtcctgcaatcctctgtgaagcatagccgccagcggatgtacctggtacccccggttttttcacagctgaccgaacaacatcaggcggtcattgacgccatttttgccggtgatgctgacggggcgcgtaaagcaatgatggcgcaccttagctttgttcacaccaccatgaaacgattcgatgaagatcaggctcgccatgcacgtattacccgcctgcctggtgaccataatgagcattcgagggagaaaaacgcatga

SEQ ID NO: 4605 - DNA, 723 bp, Escherichia coli
atgaaattaatcattaccgaagattaccaggaaatgagccgtgtcgcggcacaccatctgcttggttatatgtcgaagacgcgtcgtgttaacctggcaattaccgccgggagcacgcccaaaggcatgtacgaatatctcatcactctggttaaaggtaagccctggtacgataactgctatttctataatttcgatgaaattccatttcgcggcaaagagggagaaggcgtaacgattaccaatctgcgtaatctgtttttcacccctgcggggatcaaagaagagaatatccagaagctcactattgataactaccgcgagcatgatcagaaactggcgcgtgaaggcggcctggatttggtggtgttgggattaggtgtagatggtcatttttgtggcaatctgccaaatacgacccatttccatgagcaaaccgtggagttcccgatccagggagagatggttgatattgtggcgcatggcgagttgggcggcgacttttcattagtgcctgacagctacgtgacgatggggccgaaaagcatcatggcggcgaaaaacttgctgataattgtcagtggcgcaggtaaagcgcaggcactgaaaaatgttctgcaaggtccggttaccgaagatgttccagcttccgtgttgcagctgcatccttcgctgatggtaatcgctgataaagccgctgccgcagaattagcgctcggttaa

SEQ ID NO: 4606 - DNA, 1617 bp, Escherichia coli
atgtttagacgaaatattattacctctgccatcttattaatggcaccgttagccttttccgcacaatcattggctgaatcattaacagtggaacaacgccttgagctattagaaaaggcgttaagagaaacgcaaagcgaactgaaaaaatataaagatgaagagaagaaaaagtatacgccagcgacggtgaatcgtagcgtaagtacgaatgatcaagggtatgccgccaatccattcccgaccagtcgtgccgcaaagcctgatgctgtactggttaaaaatgaagagaaaaatgccagtgagacaggctcgatttattcttccatgactctgaaagatttcagtaaatttgtgaaagatgaaatcggctttagttacaacggctactaccgttctggttggggaacagcctctcatggttcacctaaatcatgggcaattggttctctgggccgctttggtaacgaatactccggctggtttgatttgcagttaaaacaacgtgtctacaacgaaaacggcaaacgggttgatgccatcgtgatgatggatggtaacgtgggtcagcagtactctactggctggtttggcgataacgccggtggtgagaactttatgcagttctctgatatgtacgttaccaccaaaggtttcctgccctttgcgccagaggctgatttctgggtgggtaaacacggtgcgccgaaaattgaaatccagatgcttgactggaaaacgcagcgtaccgatgctgccgcaggtgtaggtctggaaaactggaaagtcggtccgggtaaaattgatatcgcgctggttcgcgaagatgtcgatgattacgatcgcagcctgcaaaacaaacagcagattaataccaataccattgatttacgctataaagatatcccgttatgggataaagtcaccttaatggtgagtggtcgttatgtcacggcaaacgaaagcgcatcggaaaaagataatcaggataataacgggtattatgactggaaagatacctggatgtttggcacatctttaacgcagaaatttgataaaggtggcttcaacgaattctccttcctggtcgcgaataactctatcgccagtaactttggccgttatgctggcgcaagtccatttaccacctttaatggtcgttattatggttatcacaccggcggaacagcagttcgtctgacttcgcagggcgaagcctatatcggcgatcattttattgtggctaacgcgattgtttactccttcggtaacgatatttatagctacgaaacaggcgcacactctgatttcgaatctattcgtgcggttgttcgcccggcctatatttgggaccaatataaccagacaggtgttgagttgggctatttcacccagcaaaacaaagatgcgaatagtaataaatttaatgagtctggttataaaaccacgctcttccatacctttaaagtcaataccagtatgttgacctcgcgcccggaaattcgtttctacgccacgtatatcaaagccctggaaaacgaactggatggcttcacctttgaagacaataaagacgaccagtttgctgtcggtgcccaggctgaaatctggtggtaa

SEQ ID NO: 4607 - DNA, 282 bp, Escherichia coli
gtggatggttcgatacaggacgattatcgaattgcctatttaaacgatcacctggtacaggtaaatgaagcgattgccgatggtgtggatattatggggtacaccagttgggggccaattgatttagtcagtgcatctcattcacaaatgtctaagcgctacggctttatttatgtggatcgtgatgataatggtgaaggaagcctcacaagaacgcgcaagaaaagcttcggatggtatgcagaagtgatcaaaactcgggggctatcattaaaaaaataa

SEQ ID NO: 4608 - DNA, 453 bp, Escherichia coli
atgtacaccgccagtagtgctctgccaaaagacagagaaagtgtgttctggtttaacgtactggaagttccaccaaaacccgatgcagcaaaagcagcaaatcaaagcctgctacaactggcatttcgcacacgtataaaactgttctatcgcccggaaggattgagtggaatttcatctgatgcaccattggctctgaagtggtcctgggcaacatctgaaggcaaagcagcattacgcgttgataaccctacgccctactatgtctcttttagcagtggtgatttagaagccaacggcaaacgctatcccctggatatgacaatgattgcgccgttcagtaacgacgtcatcaaggtaaatgggatgagtggcagaacaagctctgcaaaagtgcattttttcgccattaatgattttggtggatctattgaaggcaacgccaacctttaa

SEQ ID NO: 4609 - DNA, 1266 bp, Escherichia coli
atgaagatattcttcagatactttctttttttagcactgtgctcttgttgttatatagcaagtgccggtaccgatgatcacgtcggctatgttgttgggaataattacggtgttggtccatcaggccaaaaatggcgagagacaggtcctaatggagatgttaccgtcaaattccggtatggctcagtcaccaataatttagttttttataaaccaacccaacttggcccaaccggggtgtcattaaaatgggcgcagttagattccgcttcaggtggaggtttcctttactgtaacaggagtggtagcacaagcggcgggccaatgcatattgaaaataaaatggttgattccggtaaaagttatggcggacataaactctttaagacatctgttccaggcctgtattacacgttagcaatatcaaacatttggtcaacatatacatatactgatatcaacccatcaggcatgtatattggcgattctacgagccaatcttttaactggcgtggcgaaagcgagcaaacactatattggtcttgcaacaatgcgaatacaaaaaataaatattgggccgttggcggcgttatgcaaacgctcacgattgaattttataccgataccgactttaacccgacaacgaatcaacgggtaacattatccagaacagataattacctctactcattcaaagcatatggtgctggcattggtatcaatgactacagctattttcttaaaatagactttgacctgacagatatcgtattaacaaaccctacctgttttactgcggcgcttagtggctcatcggtaagtggttcaacggttaaaatgggtgattataccccagcgcaaataaaaaatggcgcaacagcggttccttttgatatcacgctacagaactgtattcgtgttcgcaatatagaaacaaaactcaagtcaaacaaggtgggtagtgtaagcaaagaacttctggctaacacactcacaggaaatgacgcagcaaaaggcgttggtgtactgattgaaggtttaaaaaacactaaaagtgcacaaatggtactgaaaccaaatgatgcaacgtctatttataaagattatgaaacagaagatgacactaccggaggaatttacccggataaaggaaacggtacctcacaacctcttcatttccaggctacattaaaacaagacggtaatattgctatagaaccgggggattttaaagccaccagcacttttcaggttacctacccctga

SEQ ID NO: 4610 - DNA, 291 bp, Escherichia coli
atgcatgatttaaaatataaaatatatttttacacagaaggtgaatttcttgaaatgcttgaggagatagtaaatgcaactagcaaagataaatccctaaaagggaaaaaattagaaaaatatctcgataccttagtggatcatttcattaaaattactgaacatcctaaaaagggagatctcattttctatcctaattccccagaagatggtaaacctgaaaacatcctgaaaatcgtcaaagaatggcggcgttcgcaaggattgcctttgttcaaagattcagaatga

SEQ ID NO: 4611 - DNA, 291 bp, Escherichia coli
atgtataattttaaagatgaaatagaagattacacagagcgggaattcattgagttgcttggcgagtttacaaatccaaccggggataacgctcaattaaaaggggaagagcttgacaaatattgggatgatctagaagaacatcttaccagaattacacaacatccgttgatgagcgatcttatctactatcctgcaaagaagggagatgatgaacctgaaaacatcctgaaaattgtcaaagaatggcggcgttcacaggggctacccttgtttaaagactctaaataa

SEQ ID NO: 4612 - DNA, 1203 bp, Escherichia coli
atggcgagtaagcaactctggcgctggcatggcataaccggcgacggcaatgcgcaagatgggatgctatgggcagagagccgtgctttgctgctcatggcactacagcaacagatggttaccccactaagcctgaagcgaatcaccatcaattctacgcagtggcgaggagatataagcgcggaagtcattcatcaactggcgacgctactcaaagccgggttaacgctttctgaagggcaggctctgctggcggaacagcatcccagtaagcagtggcaagcgttgctgcaatcactggcgcacgatcttgaacagggcgttgccttttccaatgccttattaccctggtcagaggtatttccgccgctctatcaggcgatgatccgcacgggtgaactgaccggtaagctggatgaatgctgctttgaactggcgcgtcagcaaaaagcccagcgtcagttgaccgacaaagtgaaatcagcgttacgttatcccattatcattttagcgatggcaatcatggtggttgtggcaatgctgcattttgtactgccggagtttgccgctatctataagacctttaacactccgctaccggcgctaacgcaggggatcatgacgctggcaagttttagtggcgaatggggttggttgctggtgctattcggctttctgctggcgatagccaataagctgctgatgcgccacccaaccaggcttatcgcacggcagaaattgctgttacgcatcccgattatgggttcactgatgcggggacaaaaactcacgcagatctttacgattctgacactgacacaaagtgcaggcatttcttttttacagggcgttgagagcgtcagagaaacaatgcgctgcccgtactgggtgcaacttctgacacaaatccagcacgatatcagtaacggtcaccccatctggctggcgctaaaaaatgccggtgagtttagcccgctctgtttgcaattagtgagaacaggagaggcatccggctcgctggatctcatgttagacaacctcgcccatcatcatcgggataacacaatggcgctggcggataacctcgcagccttactggaaccggcgttgctgatcataacgggaggaattatcggtacgctggtggtggcaatgtatctgccaattttccatttaggcgatgcgatgagtggaatgggataa

SEQ ID NO: 4613 - DNA, 1218 bp, Escherichia coli
atggatcatctacccatgccgaaattcgggccgctggccggattacgcgttgtcttctccggtatcgaaatcgccgggccgttcgccggacaaatgttcgcagaatggggggcggaagttatctggatcgagaacgtcgcctgggccgacaccattcgcgttcaaccgaactacccgcagctctcccgccgcaatttgcatgcgctgtcgttaaatattttcaaagatgaagggcgcgaagcgtttctgaaattaatggaaaccaccgatatcttcatcgaagccagtaaaggtccggcctttgcccgtcgtggcattaccgatgaagtcctgtggcagcacaacccaaaactggttatcgctcacctttccggttttggtcagtatggcaccgaggagtacaccaatcttccggcctataacactatcgcccaggccttcagtggttacctgattcagaacggtgatgttgaccagccaatgcctgccttcccgtataccgccgattacttttctggcctgaccgccaccacggcggcgctggcagcactgcataaagtgcgtgaaaccggtaaaggcgaaagcatcgacatcgccatgtatgaagtgatgctgcgtatgggccagtacttcatgatggattacttcaacggcggcgaaatgtgcccgcgcatgaccaaaggtaaagatccctactacgccggttgcggtctgtataaatgcgccgacggctacatcgtgatggaactggtgggcattactcaaattgcagagtgctttaaagatattggcctcgcacatctgctcggtacgccggaaatcccggaaggcactcagcttatccaccgtatcgaatgcccttacggcccactggtagaagagaaactcgatgcctggctggcggcacataccatcgcagaagttaaagaacgctttgccgaactgaatatcgcctgtgccaaagtactgaccgtgccggaactggaaagcaatccacagtatgtggctcgcgaatcaatcactcagtggcaaacgatggatggtcgcacctgcaaagggccgaatatcatgccgaaattcaaaaataaccccggacaaatctggcgcggaatgccctcacatggcatggacacggctgccattttgaaaaatatcggctacagcgaaaacgacattcaggagttggtcagcaaaggtctggccaaagttgaggactaa

SEQ ID NO: 4614 - DNA, 915 bp, Escherichia coli
atgcgtttacctatcttcctcgatacagaccccggcattgacgatgccgttgccattgccgccgcgatttttgcccccgaactcgatctgcaactgatgaccactgtcgcgggtaatgtttcggtagagaaaaccacccgcaacgccctgcaactgctgcatttctggaatgtggatattccgcttgcccagggcgctgccgtaccactggttcgtgcgccgcgcgatgcggcatctgtacacggtgaatcgggaatggctggctatgactttgttgaacacaaccgtcagccactgggtataccggcgtttctggcaattcgtgatgccctgatgcgtgcgccagagcccgttaccctggtggccatcggcccgttaaccaatattgcgctgttactttcacaatgcccggaatgtaagccgtatattcgccgtctggtgatcatgggcggttctgctggtcgcggcaactgcacaccaaacgccgagtttaatatcgctgccgatccagaagcggcagcctgtgtcttccgtagcggcatcgaaatcgtcatgtgcggtctggatgtcaccaatcaggcaatattaacccctgactatctcgctactttgccggaattgaatcgcaccggaaaaatgctacacgccctgtttagccactaccgtagcggcagtatgcaaagtggactacgtatgcacgatctttgcgctatcgcctggctggtgcgcccggaattgttcactctcaaaccgtgttttgtcgcggtagaaactcagggtgaatttacctcaggcacgacggttgttgatatcgacggttgcctgggcaaaccagccaatgtacaggtggcgctggatctggatgtgaaaggcttccagcaatgggtggctgaggtgctggccctggcgctctaa

SEQ ID NO: 4615 - DNA, 714 bp, Escherichia coli; identical to SEQ ID NO: 2819

SEQ ID NO: 4616 - DNA, 1332 bp, Escherichia coli
atgagcgaattgaccgatcttttattgcaagggccgcgttctgccccggaattgcgccagcgtctggcaatcagtcaggcgacgttctcacgccttgttgccagagaagatcgggtgattcgctttggtaaagcacgggcaacgcgatatgcactgctgcgtccttatcgcggaattgagcgtattcccgtatggcgagtggatgatgccggaaaggcgcataaattcgccgacatccggttgtgctggccgcagggaagttgtctggtaacaggcgcagatggcgacgaacggtggtttgatggtttgccctggtatttgaccgatctgcgaccgcaggggtttttggggcgcgcgtggggcaggaagttagccgcgcaactgaatcttactgaagatatccgtctctggcaggaagaagatgtgctctacgccctgaccgtatttagcggtgaatacaccggcggctggctggtcggggaggggaattatcagcgatggattactgcacaacgccctgcggcaattcctctggatcaaaaactcacccattacgaacaactggcaagcgatgcactggcaggagaaattgtgggttcttctgcgggcggtgagcagccaaaatttacctgctatgcacaaacgccgtcaggcaataaacatgtgctggttaaattcaccgtgccacagcaaaccgcggtcagccaacgttggggcgacttgcttattgcggaatctattgccgcgcaaatcctgcgcgacggcgggatccacgccatcgagtcaacggtgcttgtaacaagtaacaggcaggtattccttgaagcggaacgatttgactgcaaaggtaacgatggtcgcttgcccattgtgtcgctggaggcggtgcagagtgagtttatctcttctccgggatcgtggccggaggctatgcgccgtttgtgtgagcaacaacttgtcactcaccagagcgtggcgcaaacagaagtgatctgggcgtttgggcgacttatcgccaacagcgatatgcacgcaggcaatttatcattttatttatctgaaccaccatttgcgctgacgcccgtctacgacatgctgccgatggcctatgcaccaaacagcgccggaatgttgcgtgatgctgccattgaggtgaggtttgatcttaacgtcagtaaaagtgcatggttaacggcgatcccgctggcgcagcagttctggcaaacggtcgccggagatccgcgtatcagcgaggcatttcgccatattgcacaagaaatgccggaaaaaatccggcaaatcgaagggaaagttgcccgcatgggcgggtaa

SEQ ID NO: 4617 - DNA, 1551 bp, Escherichia coli
atgcccacttctcatgaaaatgcactgcaacaacgttgccagcaaattgtcaccagcccggtacttagcccggagcagaagcgccattttctggcactggaagcagaaaacaatctgccttacccacagctgcctgccgaagcccgccgcgcgctggatgagggggtaatctgcgatatgtttgaaggtcatgcgccgtacaaaccgcgctatgtcttacccgattacgcccgttttttggccaacggttccgaatggctggagctggaaggcgcgaaagaccttgatgacgcactctctctgctgaccattctttaccaccatgtaccgtcggtcacatcgatgccggtctacctggggcaactggatgcgttgttgcaaccgtatgttagaattctaacacaagacgagatcgatattcgaataaaacgtttctggcgttacctcgacagaaccctgccagacgcctttatgcatgccaatatcggcccgtctgattcgcccattacccgtgcgatattacgtgcagacgcagagctgaagcaggtttcaccgaacctgacctttatctacgatcctgatatcacccctgatgacctgctgctggaagtggcgaaaaacatctgtgaatgtagcaaaccgcacatcgccaacggtccggtgcatgataaaattttcacaaaagggggctacgggattgtgagctgttacaactcactgccgctggcgggtggtggcagcacgctggtacgcctaaacctgaaagccattgccgagcgcagtgaatcgctggaggacttctttacgcgcactctaccgcactactgccaacagcagatcgccatcatcgatgcgcggtgtgaattcctctatcaacaatcacacttctttgagaatagcttcctggtgaaagaagggctgattaaccctgaacgttttgtgccgatgtttggcatgtatgggctggcggaagcggttaacttgctgtgtgaaaaagaagggattgccgcacgctacggtaaagaggccgccgcaaatgaagtgggttatcgcattagcgcgcaactggcggagtttgtcgccaatacccccgtgaaatatggctggcaaaaacgcgccatgttacacgcacagtcggggataagttccgatatcggcaccacgccgggcgcgcgtttgccgtatggtgatgagccagatccgattacccatctgcaaactgtcgccccgcatcatgcttattattattccggcatcagcgacattctgacgctcgacgaaaccatcaaacgtaatccgcaggcgctggtacagctttgcctcggtgcctttaaagctggaatgcgtgaatttaccgccaatgtcagcggtaacgatctggttcgcgttaccggttatatggtgcgtttgtcggatttagaaaaatatcgcgccgaaggttcacgcaccaacaccacctggctgggagaagaagccgcacgcaacactcgtattctggaacgccagccgcgcgtgataagccatgaacagcagatgcgctttagtcagtaa

SEQ ID NO: 4618 - DNA, 288 bp, Escherichia coli
atggatatcacgtcgatacttcatgcgctttgtgccgtggcggtgcaggtactggctggtctttttaccggaaactgggcttacggggcgatagccggttgtacgttcttcattgcgcgtgaacacacccaggcagaatatcgctggattgaaatgttcgggcatggcaagcggattaacatgccgtggtggggcggttttgatccacgtgcgtgggatgtggcaagcctgatggattttgctgtgccggtggtggcgtgtctgctgatctggatgttgatccgttaa

SEQ ID NO: 4619 - DNA, 279 bp, Escherichia coli
gtgagagatttcacgttgcgtttcagtgataaagcagatttcagggcatttctcaggaaacttaactgggaagaggacgaagagctgcagaatgccgttctggttgatgagattggttttacgttcagggagacagatgtttctgatgacggagaaccagaatacacgcgaaacgaagggtactttgttaatatccgtcttcttgacgatggatttgatgattccgtgttccgtgagtgggtggttacaccagagcgcccgctcagggagtggttttaa

SEQ ID NO: 4620 - DNA, 1785 bp, Escherichia coli
atgacggaggatgatgcccgtccggaggcactgcgccgttttgagctgatggtgaatgaagtggcacgtcatgccggagcgtcatcacagagtgcagcggcggcaaagaaatccgaaacggcagcggcatcatcgaagaacgcggcgaaaacctcagaaacgaatgcagctaacagcgcacaggcggcagcggcctcgcagactgcatcggcaaactccgcgacagcagccaaaaaatcagaaaccagcgcgaaaaatagcgagacagccacaaaggccagcgaaaaaaacgcaaaatccagccagacggcagcgaaaaccagtgagacgaatgccaaagacagtgaagccaacgcaaaggtgagcgaaacagcggcggcgaactcggcgaaagcatcggcagcaagccaggcggcagcaaaagcaagtgaagatgctgccagagaatacgcaaaccagacagcagagccgtacagatatgttttacagccgctgccggatgtgtggataccctttaatgattcgctggatatgattacgggctattctccgggttataaaaaagtgaagattggtgataatgtggttcaggttgccagtgataaacaggttaatttcagtcgcgcatcaacggcaacatatatcaacaaatctggcgaactgaaaacggcggaaattaatgagccacgatttgaaaaagaaggtttattgattgaaggtcagcgaaccaactacatgttgaattcagcaactccagcttcttggggtaaatctgcaaatatgaatgtcgctgaggttggaactgatagttttggttttacttatggaaagtttgtttgtaatgaatcattaattgggcaaagtacaacccttaatatggcagtagtttcaacctcgggggctgtcgatgtatcaggcgataataagtgtgtgacgacatcgtgcagatttaaaacggatttggaactcctgttaaggatcaggtttgaagccttcgatggcagcgcttcatctaatcttggatatgccattgttaatacgcggtctttattggttgaaatcaccggtgtagctgccgacaggctcaccgcacgagttaacaaagatgaagctacgggctggatttttgtagaggcaacgattcaagcaagtaaagaaacttacataacctctgcaatacaatacgcaccaaaaaaaggtggtgtcgttgaatctggtgactatatttatttggccacccctcaggttgaggatggttcgtgtgtatcatcttttattatatcaggaacgacggcggcgacccgcgcaagcgatatggttacagttcccattaagaataatctttataatcttccttttacggttctttgtgaggtacataagaactggtataaaacgccaaatgcagcgccgcgtgtttttgatacaggcggtcatcaaaccggagcggctattattcttgggttcggatcttcggcagatgggccagacggatttccttattgcgatattggaggagctaacagacgggtaaacgaaaacgcatcgcttgaaaaaatggttatggggatgcgtgtaaaatcagatcagtctacgtgctcagtaagtaacgggcgcatatccagcgaaaaaaagactacgtggtcctatattcagaactctgcaaccatccgtattggaggccagactacagcagggttacgtcatttatttgggcatgtgaggaattttcgtctctggcataaagagctaacagatgcgcagcttggggaggttgtggagtga

SEQ ID NO: 4621 - DNA, 483 bp, Escherichia coli
atgatctgggcattcgcaaaagcatactggaaacagttggttatcatggcgatgcttgctgttctggtcatatcaggagttgtagcctggaatgcacacggcagtcgtcagtacgatgccgggtatgcgcaggcgaaggaagaccgcaaagctgaagatgagatagttcgtcagcactacgaacaggagaaatcgatcaatgaacgtgaagcgcagcagaggatcgaccaggcgcgcaatgatgctcttgatgctgccgctcgcgctggccggttgcagcaacaactctttgccatccgtgagcagctcaggcagtataacgccattgtcggcgctgggacgtcagccgcagacaccggagttttgcttgccgacgtgctcagcaaatctctcgagagaaacagacaactggcagagtatgctgaccgggcagccgaagccggaagagtctgcgaaaaacaatacgataccctgaccagatag

SEQ ID NO: 4622 - DNA, 630 bp, Escherichia coli
atggagattaaacaattccagcgagctgctggtattagcgaggcgctggccgcacgctggttctcgcatataacttctgcgatgaaagagtttggtatcagcaaagcagaagatcaggcaatgtttattgctcaagtcgggcatgagtctgggggcttcacccggttgcaggagaatttcaactacagcgtcagcggactggctaacttcgttcgggctgggcgtctcactcaggggcaggctaatgcacttggtcgccgtgctggtgagccaccattgccactcgagcgccagcgagcgatcgccaatctggtgtacagcaaacgcatggggaacaatgcccctggtgatggctggaattaccgtgggcgcgggcttatccagattaccggtttgaataactatcgtgactgtggaaacggtctgaaagttgacctgctggagaatcctgaactgttggcgcaggacgaatacgcggctcgtagcgcggcgtggttcttctccagcaaaggttgcatgaagtataccggagatattgcacgtgtaactctgcttatcaatggtggccggaacggcattgatgaccggcgcgcgcgatacatcactgccagtaaggtgctggcggtatga

SEQ ID NO: 4623 - DNA, 309 bp, Escherichia coli
atggtaacgcatgagttttttttgcttatcaccaatgcagttatttgtactggcatagcaattcgcgttgtcacattccggcgtaacggctctcaacatcgaagatggggagggtggcttgcttatttccttattgttgctgcggccagtattcctgttcgtgtcgtctatgcaatctggttacgcacgccaatggctgtggatttatctgaggtcattatcaacgctgtcatgcttgccgcggttattaaaacacgcggtaacgttgttcagattttcaaaatatcgaggtctaaacatggagattaa

SEQ ID NO: 4624 - DNA, 405 bp, Escherichia coli
atgtcagttcagctaaccagcgaatctttaaatcaatggcttagtatgagttctcttgctgcggttatagcaggagttcctcctgaggttgctttagggtctttggctggtgcggtaatttttgttacctctgcggtagagtacccaattcatcgtcgcgtactcttatcgatgcttagctttctctgcggacttcttttctacaaaccagcagcatcaattcttatcggcatagccagcctgatccctaccatcacgcaggactcttttgaaaaagggattgttttctctgctggcgcattcgtgtcagcaattgtcgctgtgcgtattggtatatggctctaccaccgttcagacaatccacgcgatttaattccggggagaaaagacgatggtaacgcatga

SEQ ID NO: 4625 - DNA, 1941 bp, Escherichia coli
atgtcttatttaaaatacagaacagatattgatgggctgcgagctattgcggttttgctggtcgtgctgtaccacgcaaactttcctattcatggtggttttattggtgtagatgtttttttcgtcatatcaggatatctcattaccaacatcatatataaagagactaaaagaaatattttttcattccttaatttttacaaacgtcgaataaagcgattgctcccagcttttgcttttcttcttttatttttatttgtttactgcaaattatatttgatgccagatgaacttatatcattctctaaaagtgcggtatacgctcttcttggcataagcaatttctatttttttagtagcacaggttactttaactcaacctcttatgaaccgcttttacacacatggtcgctttccgttgaagagcagttctacattgtatggcctttcatcgttttcatgctcgttcggaactcagggacaaaaaaagcaataataatatcctcattactatttattgtattccttggtatttcacagtatggagcggttaattataaaacagcagcgtatctcctactgccttttaggttctttgagttgctctcaggtgccctacttgctatctataaagattcaataacaaaacatctgcgccacggttctgtaatttcactggtcggcgtaatgctgattgtgttgagttcattatttataaattctaacacgccatttcctgggttcactgttttgcctacatgtttaggcgctgtaatgcttattgctgcaggtgactcatccaaaaacttcatttctaaagtgctgtctttaactccagttgtttatgtaggaagaatttcctactctctttatttatggcactggcctgtactgattcttgctgaatacaggggtatcgatcttacggccttaaatgcgacggcgctcatacttatcgcattcatcatggcaagcataagctatcacttcgttgaaaagccatttaggaaggattcgctgcaatatttcaggactgcatttataaccatctacttgataccattaatagtatccgctgcctatgcagcgtacattttaaaaaatgatggttttcgcgccaaaagttcagagttagtatctgaattagaagagagaaacgcgacaaatattatgcgcccacagtgtattgataaattatttatcggtaatgtaaatgactgtcatcttggcgttaataaaggcgaagtagatggcgtgcttcttggtgactcctttggtaatgcatatgcttactttattgatgaacttgcgaaagatgctggaatatcaataacagatactacatatagctcaacacctgtaatatcaggaatttatgtgcaggatatcagaaataagatatctgacatagatgctaacctgataatgacatatacaaaaaacaggctggagtatgcagcaaaacaaaagttcgcgataatttccgttttttgggatcagtacgggccacaaaataattacttccgtatcttcgataaaaacggtgacgtatcggagaatgcttaccagttgcaatctgaagcaataaaatatctgctgtccaatggcgtgaaagtttacatcattgcaagaccttaccagtctattggccctgctgcgataaacaaactgcgccaaattaagctacggcatggggatgtaacaactgaaaaatatgaatacggcgtaaagaaagatgatcggatagaatacaagttaaagcaggagttccctcagataacgctaatcgatcctaacgatgtactttgccacaaaggggaatgtgatgccatcgtggatgggaagatcattttcagaactgatggttcacacctgaatgctgttggagcaaaaaaaatcggggaagagtatttgaaaaactacgcaaacccatttcgataa

SEQ ID NO: 4626 - DNA, 2232 bp, Escherichia coli
atgacggtctcaaccgaagttgaccacaacgaatacacaggcaatggcgttacgacttcattcccttatacctttagggttttcaaggaatctgatctggtagtgcaggtggttgaccttgacgaaaatatcgctgtgctggctctggatactgattacactgtcactggggctggtggatataacggcggtaatgtaattctgtcgaaggcgttagctaacggttaccagatttctatatcacgagagctcccggttacgcaggaaactgatttgcgtaatcaggggaagttctttgcagaagtgcatgaggatgcttttgataagctaacgatgctgatccagcaggttcgaagttggtttagcttggcgctgcgcaagccgtcattcgtggcaaattattataacgcgctgaacaactatattcgaaacctgaaagacccggtaaacccgcaggatgcatccacaaagaattatgtggacagtacggttttatcgaatatcgaccatacaatccgtgttcctgattcttatatcgatccgctgccacctctcgctcaacttgaaggaagcataatcggcatcgccaacggtaagcccgttccgttccctgtgccttcaggaacggcggctgacgtattcaaccagttggccagcggcgaggacgggaaaggcgatgctctgatctcggtgaagcaacctttcattagttcatttattcgtacacagcatgataaaaacagcgattttattagtgcaaaagattttggtgctacaggcgatggaaaacttcatcagttaagcgaagtgttttcaacattgacagcagcacaaatggtatatccatttgtgacatcgcttacccagtcttttgactacgcaggaatacaggcagctattaacactggacgaaatgtgtttattccaggtggaaatgcatattttgttaatgacactattaagatgaatacatctgcaactgtatacggtgagtgtaataacataataaatagatcagggacttttatttccgtaattggaaataaagcgtgcttacattatggagagtcttttgcttcaggaaatattgagaatttatatattttctatgatcagaatggaattgactatccaacagatgctgccacaaacgacggtaaaattggcattcttataaatggtggtgagacatcgccgggtttgataaggattaaaaacgtcgatatagatggggcatggtggggagtatatgacgactctggaaattatatgtctaggcttgagcatgtatgggtgcgtcgcagtcgcggtggtttctacaaaaacaccggcacgacgatccattatgagtcctgctatgtaatgggtggcgtatgcgcgtggtatttaacaaacctcctttcagggcagatgacgaactgcgcagcagataagatgacagtaaactccaacgcgtctatcggtcagtctgctatttacctttcgaattgtcacggatttcttatctccggttttgatggtgaggcgaacgttataaacaacaactcagcacttgaggtggcgtttatgacattcgataattcaaccgtttcgatagtcggggcagttggttctggcaacaagttgaaaacatctttcggtggttctaatggtatcgttgatttttaccgcgcgataaatggatctcgcgtgaagatgctgaactgcaaagatagcttcgatggtacgccgatcgcttttgaaggaatggccggctatccatcattcatccacacagatgtaacctcgcaggttgatgcagataactgccggttccaggctccggccggaggaactccaaccatctctactgtgagcaccggcaacgttaactacacgaactgcatcacgtcaggcgttattgctggtgggtatgtagaaaataaaaatgccaatgggcttcaggtgcccacggtctataccgacaatggtactaaatcggtcaacgctaacgtagcgtccgtgctctttactttgccaaactctgagggagtttatgatgttaacgtgtgggtttctggcggaggtgcaaactacgcgatttcattcctggtaatttatgatggtacgacagcaatgatccagccgctgaagactgcggtgttcctcacagcaagcgtatcagaaagggatatatctattaccagcagcggtacgaccactgttacatggtcgtaccttaagaagtcttaa

SEQ ID NO: 4627 - DNA, 258 bp, Escherichia coli
atgcagcagtatcactatccactggaagagggatttaccgaaaggattcacacgccgggaggcgtcaggtcactggtggaaggatcgcacttgatgaaattactccgggatctcgataaggatggatttaatgtcgatggcccacttgccgaactgactgcactgattaactacgtcaccagctcacagatgtctatgcaggatctgcaaacacatctcgactattgtgccgaacaactacgaaaacaaaccacataa

SEQ ID NO: 4628 - DNA, 729 bp, Escherichia coli
atggaagttttctggatagttgttggtgtggttgcggtgattatttatgtccttcaccagaacaagactaagatctctgatcgtacggtcgttaatcgtaacaaaacgataaagactgaagatggggagataacgattaatcgtacacaggtgatagaacacacctccactcagtttcaaaaaacgggagataatgcgcctaatatttccgtacctcctgcttatgatagcgcggtaatccagacatattataaacagcaggagttagcaaaagagaggcaactgattcagccaaagccatttacagcagagcttccacctggagtgtcaacgtgtccggcatatcatggaagattccctggtgatgacgtatcgtctcagtcacctaaaaaagcacctcaggcagtatcagagccagcaagaataccttctgtatcgccgtcaaaagaagaatcagctaacgaagtttcaagtgcccgcaagcagtgtttgcgatgcagaataaaccttccatatgaaaaattcaggaaatcgtcaaaaaatccagatggattgactaagtggtgtgcaaggtgtctagatggcccaaagaatacacgtcatatgaagtggtgcccaatttgtaatgtccgcagaaaacgaaccagcttttaccctaataatcaaaatgcggatggcttaatggcatggtgcaaaacgtgctgggacgagcacaaagcgaaacgatag

SEQ ID NO: 4629 - DNA, 711 bp, Escherichia coli
atggctaatgctcaaacttccatcttcaaatttgaatctgttaaccctatccgttccatcattatcgatggccaaccatggtttgtagcccaagacgtttgtagtgcgctgcgtatccaaaacgtcacccaagcacttgaaaaactggatgatgatgaaaggtctatgttcaacatagggcatgaacatcgtgcaatttttgacagccgagtaaaagagatcaacatcatctccgagtcaggcctctacacactgatcctcagatgccgcgacgcagtgacaccaggcactatcccctaccgctttcgtaaatgggttacaggtgaggttcttcctcagatccgccgcaccggaagttacattaaaaactcgctcccgcaggaagaacgcataaagatggttgccgaccaggtagccaacgccacggcgtcagcagtaatgcaggcgatgaagatagagaacaaaacctacagtgccccactgaagcccggctaccgcagtctgattcactcgccgtctggtgttctcggcctgacggagaactcactgctgatgaatctgctgaaccagttgcaggacgacgggcatgatgtatcgggcgcggcagcggagctgaccaccatgttctgctacatcgtcggtgtgagcaagtgcctgcgtgatatccagacccacgcggagtatatcaacgacaaagcagggttcttctga

SEQ ID NO: 4630 - DNA, 633 bp, Escherichia coli
atgagaacaaatacaacaagaaaagcgatgccatacattatcccagaagcagatttcgatagaaaactgaacatgtctgagaagaacactagtcacaccgaaagctacttagcgaaaggtgtggttgatttcgttcttccgggattcacaacaccttatggttatcgccttgtaaaatcttgtaatggcgatcattacagaatgattactaccagcgatactccagaaacggtgtatgcggttaagttaatctttcgggaagatatcgtcgaagccaaaagaacatgtacgcagatcatggtatggcgtacgcctaatgttattcatgaccgtgctgttcatggtttgcctcagattttttttcagttcttcctagagcaatatgcgatcgttgtatctgatgagcaacaaacaatcgatgggagaagattctgggaaagaatgatttcttgggctataaacaccccaggatataatgtatacgtttcagatggctctgaagaagatagacctcttagcttcatgacatcatgggatgatttctatagccagtgggctgatttctgttggggcagtgataaagatgtgcatacccacagactactggttataagcaaagataaactgcattaa

SEQ ID NO: 4631 - DNA, 162 bp, Escherichia coli
atgaaaaaagcatttgctgcactgttcgttttgttgtctctggtagcttcaactcaggcctttgccggtcgttgtcagcacgacagcgatactgccgctgacggctcccgctgcggtgggcgttctgcggattctcgcccgggcggcggtggcattcgttaa

SEQ ID NO: 4632 - DNA, 141 bp, Escherichia coli
atgattgcttttattcttgttgtgtttgcgcttgttgcacttggcgttatgaaccgtaaatgtatcattgacgatggcgaatttgctgttgcagttattttgatattatctggtgtagcaggatacataggcttgtcataa

SEQ ID NO: 4633 - DNA, 2475 bp, Escherichia coli
atgagacaggaatgtatacaagcggtccagcaggcggcgcagcgcacgttaacggcgcgagaaatacagaacattgaagaccgcatttatcgcaatatgcgctccattgctcgtgatgaccctatgtcgtggcgacaactttccgagtcagagcggctgtatcgtgcagcacaattggcatctgaagaattacagcgagaagcggcattaaagaaacgtcgtgtggctctcactatagctgcacgtcagagattggataaatttatcaatagctatcaaggggctgatgggaaacttggcgctcttaaccgtactatagcttttaatgcagacggtaagtctaatttcctctctgttgaatccagaacaaaagccacccgtgattatgcattgagtcaattgcaggaggcattcgaagcagttgatcctcgcttttttggtctgtttgaagatgaagcgggcgtacgtgacctggtatatgaaatgcgggggcaaaatactggcaatgctaaagcaagaaaaggtgctaaggcgtggagagaagttacagagctgctgcgccgccggtttaatgatgctggtggggacattggctatctcgaaaactgggggatccctcaacatcattctatggaaaaggttggggcggtatcaaaggataagtgggttagcgatgttataggtaagctggatcgcaaatattatatccgagccgatggacaactgatgaacgatgccgagttgtctgcatttcttggagaggcttataacacgatcgctactggtgggctgaataagcttactgataccggaatgcgaatttccggcgcacgtgctaaccgtggtaatgcatcacgacagatacatttcaaagatgcagattcctatctgcaatatcagcaactttatggcgatcgctctctatgggaaatcatggtcggtcacctggaaggtatcagtaaagatattgcactggtggaaacatatggcccaaaccccgatcatgttttccgctctcttcttgatcaggtgaaggcagaaacggcaacagctaacccgagtaaaaccggtaaagtcgagcggctggcgaacaacacagagaatctgtacaactttatttccggaaagacacagcctgtagcaaatccgcacatcgcgcgatggtctgacaatatccgcaactggctggttgccagcagactcggatccgcgttgctgtcatcgttctctgatcttggaaccatgtatctgtctgcgaaggtgaccaaccttccaatgaaccagttattccgcaaccagcttgaagctatggacccaacgaaccgtactgagcttgcgcgggcgcgccgcgctggtctggcgatggaatctctacttggcagcgttaaccgctgggcgatggataatatggggccgtcagtgtctcgttgggctgcaacggcggtaatgcgtgccagtgggcttacagcatggtcagatgcgcacaagcgcgcctatggcgtaaccatgatgggaagcctgggagaagtagtgtcacggacaccagaccttcgtagcctcgatgactctgattttcgtatcctgaaaagcaaagggattactgacacagactggagcgtatggaagctggcgcaacaggaggactgggggaacggtaataatacgatgctgacaccggaaagcattatgcgtatccctgattcagcagttaaacatcttggtgagcctgaacgcgtgaaatttgaggcaatgcgtaaactgctcggtgccgtaactgaagaagttgatatggctgttattacaccgggagcacgtgagcaactgataaccggttctggtattcagcgtggaacatggaaaggtgaattaacgagaagtgttttcctgtttaaatcgttccctatctcggtggttatgcgtcactggtcacgcgctatgggtatgccgtctgctggtgggcgtgcggcatatattgcgacgtttattgccagcacgaccattcttggcgctttgtctcagcaacttaacgaccttgcgtctggtcgtaatcatcgcgagatgacaggagaagatgctgctaaattttggcttggtgctctactgaaaggtggtggtcttggcctttacggtgactttttattgtcagatcacactaggtacggaagcggcgcgctggcgtcgatgcttggcccggtagctggtctggttgatgacgtagtgaagattgctcagggcataccgttaaatgctgtggaagggaagaatgagcagactggtggtgatctggttaagctggggaaggggctgatgccaggtgcgaatctctggtacttgaaggcggctctcgatcacatgatctttaaccagatgcaggagtatttttcaccaggctatttgcgtaaaatggagcaacgttcgaagaaagagtttaaccagacatactggtggcgaccacaggatgtcactccgcaataa

SEQ ID NO: 4634 - DNA, 1803 bp, Escherichia coli
atgagttactttggccttaatccagtaaaccagaatcagcagcttgacgaagcagcatcaaatccagctggctttaacagcgatgttggttttttcgacaatgctgtaggagcggcattgtctggtttgtactccgggctggtggcaaagccagatcagttgctctgggcagggatggataaaatcgtatccccgattgctcagtttgttaacgaaaacacctcgctcaatgacacttcagtttcatacattgccgagcagagaaaactagcagagcagcaggttaagcggctgacgcctgatgccgcgacaaccggaaccgccgggcaggttctttatgggttgttcgatatgggcgggcaggctgttatcggtacaacgctcggtggtccggccggaggtgctgcggcggtaacttcgctacagggtttttctgagtttgaacggctgacagcacagggtgttgatttcaggacggcgcaggaagcgggattagtgcagggtattactgctggtgccggaacaatgatccctatgagcctcgggttacgtgctggtggtgcgctggcggaaggtgtggcggctcagcttgcgcggacgggtgaaagttcagtgcgacgcgccgcagcaacagcagtaagtgcaacgccagatattgcctatgccgcaggtacaaatattgcgttcggtatggcacagcgtgggcttactgcaaaaacgcttcgtgatggtggctatagcgaaatggctaaccagtatgatgtgttggatcgacaggcaattgctattgatgctgttcttggggtggcgtttggtggtgtcggcagatttattaactctcgcggcgagtctacaagcgcaccaaatttttcaccagttgatattgatgctgcactggcggcgaatgccgctcatcatgctgaaattgatattgcgcccggcgtgccgatcaacgtgctttcgcgcaattctcacattcaggctctgcgaaaagctatgtctgatgttagccaggggagacctgtagacgttgccagcattgttgagtctgcatctttcagtgaaattcctgggcgcaagagtctgctgtctcaggcagttaatgaggctctgtcatctgtagatgatggagtaacggcgcgcgctatagaaaatcggttgcttgaagaacaggccgcgcagcttttgccgcgtggagatagacaggtttaccagtctgaaatcgctaatagccaacgaattattgaaaatctcactgaacagcgtgcacaaattcttgcagaagagccaaccggtagcggtaaagctttgtctcgtgctcgatcagataaacaggccagacttcgtgatattgatcaacgaatccggcaggcacaagaacgcctggaattttcccgtaacgcgttggcaccgcacgagcctggaggtcagttttttgaagctcgagcagaactggcacggcgacagcaggcagaaagtgaacttaatgctcaggctgtttcattctataaaacagcagaggtcaggacgccagacgaagtagctccttttgagcccggtaagatattgcaacagacagaacaaaaaatgatggcagatccggcaggagatattgatctgcgtatagctgaagactcgctgcttgaatcgcctgacatgataatcaccgtgctggatgatgatggtaatccacaatcgcgcagtgcgcgtgaagtactggatgaagctaacagggaaagtgagcaggcaatacaggattccagcctgtttgatgttgctgtggcgtgtttcttgagaggttaa

SEQ ID NO: 4635 - DNA, 2514 bp, Escherichia coli
atgccagtcgtaccaacagtatccggacgtcaggttgagagccgtggagttcagtcagcaggcttgcagacgttttctcagccaggtattggtgatgcttttgttcgggcaggggcagagacaattgatgtttttggtcaggcaaaacagcgtgccaatatcgctctggctcaggaggcatcccttaaactcagtcagacaggcagcgatctgctgaataaccctgaaacaggtttgcttaacctgaaatggaaaaatgctattggaaaaggtcaggagtatacgcagcagtttgatgctcagatcgaacaactggctatgtcgctgccggatgaacaggctcgtaatgctttcatgcagcaggcgcagcagcagcgtattcagttcactacgcaggccgggcggcacgagatagggcaaataaatgcctacgaagaaggtcagtttcaggcgacgctgctgaacaatggtaaaaatgccgcagcattgtatggcgacaatgccgcatacgtattggctaataagcaaactttccagcaaattgaggagtacggtgctgcacatggctggagcgacgagcaaatacaggccaagaaaatcgagtttaaagagaaggttgctgatgcagcattgtcccagtggtcggcaaacaatgcgatctcatttatccaaagtaatggcgagttaagcgatactgctgctggagctcgccgtgctgtagcagatagtgactcttccgagcgtgcccgtggcatacgcaacaataacccaggaaatctcgaatacagcaaaactaatccgtgggtaggccagaccggtgatgatggtcgatttgctaaattcgaaacacctgaacacgggattcgtgcattagggcggaacctgatgtcgtatcagaggcagggtattgataccgtcagcgagataattaatcgctgggcaccgcctactgataaaaatgacactatgtcgtatatcaaagcagtgtgcgaacaacttggcgtttctgctgatgagcctctcgatgcatctaatcctgataccctgaaggcgctttgtgcagccattatccatcatgagaacggtagccagccatacagtgatcagcagttaactgctggtgtcagtgcagcacttggtttatcaacaattccaaccaacaccaaacgctataccggtaatgcagcattcgatgcggcatctcctgaggcgcaggcaagttttatgcgacaggcggatcaactgcgtcggcagcagcaggctgaatataaaacgatgattgacagccaggttcgcgatgcgacagctgcgtatatgcgtggcgttgaatttcctaacccacctggtgaggctgattttattgcagcttatggagtcagagaaggaaaactgcgatataccgagttcagaaatacgcaaatcgccggacagtatataggctctttccgcaacatgccgacaagcagcattacagcatatgttgagcaattacgcccggatactggtgagacaggggagggttatgcggcacgagccgctctttatgacaacgttgtgtcggctgcaagtcaggtgataaagcagcgacaggctgatcctgtacagttctctcttgccgccggacaggcaaagcctatcgacatgagcaataaggataactttggacagagcgttgccttgcgtgctgctcaggtcagtgaccttgctaagtcatatggcactccactgacgttcttttccaaagacgaggccaatcagatcggtgttttctttcgtgatgcgcccgtttcccaacaggcagcatatctcgataccatcaggcagagcactggtggtgggcaggtgtatatgtcagcactacagcagatcagtgccaacgctccatctgctgccgttgccgggatactgatggataagccaggtggtattttggcagaaaaaaactggtttaatccggatgtttccgtgtctcctgaaaccgctgcgcagacaattcttgctggcgcggcggctcgtaaaggtactgatgacgcgaaaggtattccgatgcctaaagatgctgatctccgccttgagttttctgacatggtgaaggatgcatttgctggtgatgctcagggggcatcaatggcatacgagatcgcaaaggactattacgctggtgtgatggcgaaaaaaggcgtggtatcaggcgaaattgacaatgatatctggaaacaggctgttaacgtagctacaggtggcgtgcatgactataacggaatggggaatgttcttttgccgtggggaatgtctgcagagcaattcgataagcaggttaatcaggcttggaatgaacaagttgttggcacagggataaaaacaccgcctggtcagtatggtttgcaaagttacggcgatagtcagtacctggtgaaacttggtactggttatctgctaaaagatgatggttctcccgttgttcttgatctgacacagaagcgtcagagattctccggagatattccgcaatga

SEQ ID NO: 4636 - DNA, 546 bp, Escherichia coli
atgtgcgatccggttattgctggtggcgcaatgctcgccatgagtggcattcaggcatacacccagtaccaacagggaaagtatgcctcgaaggttgcagaagcgaacgcagatatagccacagctcaggcaaatgatgcaataaataggggtaacgctgaagctgagcaacggcgcagagagacccgacagcggcttggtacacaggcggcgacaatgggggcgaccggcgccgatttatctacaggtaacgcgctggatatatttggtgacactgctcagtttggcgcccttgattcgctgacgacggtgaataacgcgcaacgcgaggcttacggttatcaggttcaggctgctaactataaagcagaagccagttcagcccgtaaacaggggaatgtgggagcagcaacaacattgctcactgcgcctctgaaggcatacggtgcgtaccagatgtttggtgggacgtggagtccgtttactcaaagcactcctgcgccaatcggggcagcagcaggaaccagattacctggaggattataa

SEQ ID NO: 4637 - DNA, 465 bp, Escherichia coli
atgattggtgttcaaattattcccgcaaccgaagagcatcttcagatgattttgccggatgttcgtcaggctgatattgacgaactgtatgcggtatcgctgatgactaccgaagatgcgctgcgtgttggtctgcgcactgcgactatggcctggtcagggttcgcgaacggagaactggtaaccatgtttggtgtatctccggcgtcaatgatcggtggcaatggtacgccctggctggtcgggaccagccgtattgaaaaatatcagaagacatttcttcgccactgccaccctgtattgcggcagatgctggcagtttatccgcgcctggaaaactacgtcgacgagcgaaaccatgttgccaaagcatggctccactggcttggattcaggcttgaagaagccgcgccttatggtgctcttggtcttaatttccacagatttcacatggagagaaaataa

SEQ ID NO: 4638 - DNA, 1317 bp, Escherichia coli
gtggcgctgacttccggaggtgagtacgtcatcaccggcgaccagaacaaagtgttaaccccatcatcatttgcattcagctctcagggatcaaatggctcgagcaatgtcccaccaattgccgtggcgaatattgctctgttcgtccaggagaaaggcagtgttgtccgtgatctggcctactcattcgatgttgacggctatcaggggaacgacctgaccatccttgccaatcatctttttcagaagcacagcattgttgactggtgcttctctattgtcccttactccagcgccttctgcattcgtgatgacggtaaattactggtgatgacctatttgcgtgatcaacaggtttttgcatgggcaccacagtccagtaccggaaaatatgaaagcacatgcagtatcagcgaaggaaatgaagatgcggtgtatttcgtcgttaaccgaaccgttaacgggcaaacagtgagatacatcgagcggctgtccagccgtttatttaccagcgatgaagatgctttctttgttgattctggccttagctatgatggaagaaatacgtctgacagaacgatgaccatcactggtggttctggtgaatgggattaccgcgtggaatatacaatcagtatttctggtggtgcgtacttcaccagtagtgatgtcggtgcgcaactacaattcccttataccggaactgatcctgatactggcgatgaagtgtcaaaagaattacgttgcgacattatttctgtaaccagcaataccgctgtagtggttcgtgctaacaggaacgtcccgccatccctcaggaatgtggccaccacgaactggcagatggcgcgccggacatttggaggcctgtctcatcttgaaggccagaccgtaaacattctctctgatgcgaacgtggaaccacagaaagtggtttccggaggtgccgtcacgctggaatctccgggggctgtagtgcacatcggcctgccaataactgctgaattcgaaacactggatatcaacattaacggacaggaaacgctgctggacaaaaaacaggtgatcccatccgttactctggttgtgaatgccagccgcggcatctgggcgactacgcccggcggtaaatggtacgaatatccacagcgtgaattcgagttctacgatgatcctgttgatgatgctaccggaaaagtagaagtgaaactggacagtaactggggcaaaaacggacgtgtaaaaatccgtcagcttgatccgttgccgctgtctgttcttgccgttattcctcgccttactgttgggggattctga

SEQ ID NO: 4639 - DNA, 1026 bp, Escherichia coli
atggctatcagttggatccagcccagctttgccggtggtgagattggaccgtcgttgtacggtcgtatcgacatggcgaagtaccaggtggcattgcgcaagtgcgataactttatcgtgcggcagtatggcggcgttgagaatcgacctggtacgcgttttgtcggtgccgccaaatacccaaatcggaaatgccgcctgatcccgttccagttctcgacggttcagacctacgctctggagttcggacaccagtacatgcgcgttatcaaagatggtgcgttggtgctgaacagcagcaatgttatttatgaaattgccacgccatatactgaagccgatctgttccgaattaaattcacgcaaagcgccgacgtgcttacgcttgttcatccggcatacccgccgaaagagttgcgtcgctatgcgcatgacaactggcaactggttgatgtggtaacgaagaacggaccatttgaagatatcaatatcgacgagtcagtgacggtttatgccagcgccagcactgggacaattacgttaacggcaagcgcctctatttttggcgcggagcaggtaggcaaattgttctatctggaacagcctgcagtggattcagtgccggtatgggaaaccagtaagagtacgtcgattagcgatattcgccgtgcagacagtaactactatcgcgccgttacagcaggcaaaacaggcactttgcgcccttcgcatacagaaggcacatcatgggatggctggggcggctccggtgatgatgatactggcattgagtgggagtatctgcacagtggttttggcattgcccgtatcactgctgcaaatggaactactgcaactgccgaggtgatttcctatatcccttcgcaggtagttggcgaggataatgccagctataaatgggctaaatatgcctggaacagtgttaatggttatcctggcactgttgtttattatcaacaacgtctttacttcgccgcatcgactgcgttccctcagactatctga

SEQ ID NO: 4640 - DNA, 606 bp, Escherichia coli
atggcctctgtagtagagatctgcaatcgtgcgctgtccaatattggcaatagccgcagcattaacagcctgacggaagccagtaaggaagcgggggaatgttcgctgcactttgaggcctgccgtgatgctgtgctttctgattttgactggaactttgctaccaaacgcgtggcacttgcagatacgagcaatccaccgcctgactgggaatatgcgtatcagtacccgtcagattgtctgcgcattactgaaattatgcttcctggtgtacgcaatccaacagcagcaatgcgcgttcagtacgaagttggtgcagacaccgacggaacaggaaagttgatctacacagaccagccgcaggcatggctcaagtatgtctctcgcgtttcagatgtgaacatgtttgatgccatttttatggaggcgttggcctggcgtcttgcggcagccattaacatggcgctgactgggaatgcggatctcggtacatttgctctcaatatgtacaatcgcgtgattcttagtgctggctcgcatagccagaatgaatcacaggaaccacagccaccggttgacgagtttaccattgcgaggttgtcttga

SEQ ID NO: 4641 - DNA, 324 bp, Escherichia coli
atggaactcgtaaacctcaaaaccggcactgacagctaccaggatgagagcggagaaaccagaactcgcgatgaatacccgtgggggctgtgcatcactcttaataacgacacattgaataagctgaaggcgcaacctcagggcgtcggaacagaagtgatgataactgcaaaggctgttattcgaggcctgtctgccagagaaactgacgatggtgttaatcgcagcgccgatctgcagatcactgatatggcgatcgctcctgtttccggggatgtagaaaaatcagcggctgaaaccctgtacggcaatgggggtgagtaa

SEQ ID NO: 4642 - DNA, 336 bp, Escherichia coli
atgtcaggtgagaaaccaagataccgcgttctgcgcctctctcatatccataacactctgtggccggagggggcagaaatcgaatacgaaggtgagcctggtagcgcactggaacctgttaacgatgcagccagacaggcaaaagcaaaggtagcaggaaaggtgtctatggcagcaaccagcaccaaaatcatcaacgatgtgtcagatgatggtgaactggataagctccgtgaagagtacgaattgctctttaacgagaagccacaccataacgctaaagccgaaacgctccgcgagaagatcgcagataagcgtaaagaactgggcgtgtaa

SEQ ID NO: 4643 - DNA, 438 bp, Escherichia coli
atgatcaccgacaaactgttgatgttctccgaagctcaggcggttacgaataccgcggcttctactgacgtaatcgatctcggtccaattgacggaaaacgtcgtgatatcggcgtgggttacccgcttgagttttgggcgctggttaacacagccgccgcggcaagcggtgatgcaactgtaaacatccagttgcagacgagtgagaataacagctcatggaccactatttatgatagtggcgcactggcaaagaccgccctgacagcaggtaaacgagttgtttctgcaaaggtgcctgccggtgttcagcgatatctgcgtgttaactactccgtcgcaactggcccactaacggctggcgaattcactgctggtatcagtcttgatgttgatgccaatacgccgtatccgatccgctcaaaagtaactggttaa

SEQ ID NO: 4644 - DNA, 987 bp, Escherichia coli
atggctgttaaaggcttaactgcgctaacgctggctgactggggtaagcgcgtcgatccaaacgggaaagtcgataagattatcgagcttctcggtcaaactaacccgatccttcaggatatgccttttgtcgaagggaaccttcctaccggacaccgaaccaccattcgttctggtttaccttcagctacctggcgtttgctgaactatggcgtacagccaagcaaatcaaccacagtgcaggtaaccgattccgttggcatgctggaaacctatgctgaagtcgataagtcactggctgatctgaacggcaataccgccgaattccgcctgtctgaagaccgcgcatttattgaagcgatgaatcagcagatggcgcagacgctgttttatggtgattccagcgttaaccctcagcagtttatgggactgtcctcccgctattccagcctgtctgcaggtaatgctcagaacatcattgatgctggtggcacgggtacagataacacctcaatctggttagtggtgtggggcgaaaacacagtgcatggcatcttcccgaaagggcagaaggctggcattcagatggaagataaaggccaggtgacactggaagatgctaatggcggcaagtacgaaggctaccgtacccattacaaatgggacaacggacttgctctgcgtgactggcgttatgttgttcgcattgcaaacatcgatgtcagcaatctttcagaaccttcctctgccgcaaatattgcgaagttgatggttaaagcactgcatcgcattccaaatcgtggcatgggtcgcccggtgttctacatgaaccgcactgtaggccaggctcttgatctgcaatctctggagaaaacatctctggcgatcagcgtaaaagagacagaaggcgagtggtggacttcattccgtggtgtaccaatccgtgaaactgatgcgcttctggaaacagaagcccgcgtggtgtaa

SEQ ID NO: 4645 - DNA, 696 bp, Escherichia coli
atgaatttatttgagcgtttgctgtatcgccgtctttgcaatgagcaaccagtcgatggtggagcagctccggctgcgtcagaaccgtcagcgcctgcaggtgataaccctgctccagttggtgatccatcacaatcggaaggtgataagccacaacctgttgctgatggcgataaacctgctgatgacaaaaagcctgaaaacgataagcaggatgaaaaaaaggacggcgataaaccagagggtgcgcctgagaagtacgagtttcaggctgccgaaggcgtagagctggatacagaagcgttgaaggaattcgagccggtggcgcgagaacttaacctgaccaacgagcaagcgcaaaagctggttgatgcttatccgaagattctggcaggtgtgcagcagcgccaggcagaagcctggcagaaaacaaccgagcagtgggctgctgatgtaaaagctgacaaagaaatcggtggcgacaagttgatttctaaccttagcgccgcacagcgtgcgcttgaccagttcgggacacctgaactcaaagaatatctgaacaccaccgggctgggtaatcaccctgatctggtcaaaacgttcgtgaaaatcggaaaggcgatgtctgaagatggcatggtcaccggtggtaatgaaggccagcgtagtgcggccgaagtgctctatggcaaataa

SEQ ID NO: 4646 - DNA, 297 bp, Escherichia coli
atgacagattacgaagacgatcaactgaaagaagaaaacgcccgtaagcaacgtgacatggcacaacgtgaaattgatgacattcgctttgtcatgagcagtgaacaggggcgtcgcgttgtctggtctgtgctggagaaaggccgggtgttttccgctatctctccgatggatgctatggcaatggcatttaatgaggggcaacgcaatctggcgctggaactgtttcagcgcgttatggcgcattgccctgaacagtatttgaagatggccaaagaggccagtgaacaggagtga

SEQ ID NO: 4647 - DNA, 1680 bp, Escherichia coli
atggcggaaacaactaaagagcgattgaacaaacagttcgcacaacttgaaagcgagcgtcagtcgttcgagccgcactggcgcgagttgagtgattacatcaacccgcgtggttcccgctttctgacttctgaggtcaaccgtaacgatcgacgcaatacacgcattattgattcgaccgggactatggcggcgcgcactctcgccagcggcatgatgtcaggcatcacaagccccgcgcgtccgtggtttcgcctggctacgccagatcctgaaatgatggattatggccctgttaagttgtggcttgaggcggtgcagaaccgcatgaacgatatgttcaataagtcgaatctctatcagtcgctgccgcagttatacggaagcctcggcacatacagcactggtgcaatggcggtactggaggatgacgatgacatcattcgcacaatgccattcccgataggcagttactacctggctaactcacctcgtggcagtgtggacacctgttttcgcaagttctctatgactgttcgtcagcttgttcaggagttcgggctaaataacgtcagcgaatccgtaaaaagcatgtgggaaagcggcacctacgagaagtggattgaagtgatgcattcggtttacccgaacattgaccgcgatacatcgaagctggatagcaagaacaagccattcaaatcggtttattacgaggttggcggtgataacgacaagttgttgcgtgagtcaggattcgatgagtttccaattatggctccgcgctgggaagttaacggcgaagatgtttatggatcatcatgcccgggtatgctggcgcttggacctgttaaggcattgcagcttctccagaagcgcaagtcgcagttgattgataaagccaccaatccgccgatgattgctccgacttccctcaagaatcagcgcgcctcccttcttcctggcgacatcacgtatatcgatcagattactggtcaggatggtttcaggcctgcttatctggttaaccccagtacagcagatctggtggcagacattcaggacactcgtcaaatcattaacagtgcctactttgtcgatctgttcatgatgttgcagaacatcaatacccgttcgatgcctgttgaagcggtgatcgaaatgaaagaagaaaaacttctgatgttggggccggttctggagcgtctgaacgacgaatgtcttaatcctctcattgaccgcgctttctcgatgatggtgcgtaaaaacatgctgccgcccccgcctgacgcgatggaaggtatgcccctgaaggtcgaatacatttccgtcatggctcaggcgcagaagtctatcggcctgtccagtctggcgtctacggtcaacttcattggtcaacttgcgcaagcgaaaccagaagctctcgacaaactcaacgttgatcaggcaatcgatgcattcgctgatatgtccggagtgtctccaaccgtcattgttccgcaggaacaggttgagcaggctcgccagcaacgggcacagcaacaacagcagcaacaaatgatggagatggggatggcggcggcacagggtgccaagacgctaagcgaagctaaaacttcggatccgagtgttttgtcagctatggcgaatgcagttagtggtcagggtgggcaatcacaatga

SEQ ID NO: 4648 - DNA, 207 bp, Escherichia coli
atgtgcatgggtagctcaccatcagtgcctgcaacaccagaagttcaggcagcaccacaggagcaggatgccgccgttgttgatgcccgcgacgaagaaacacgtcgccgtcgcgctgctgctggtcgtagttctacgctgcttaccggttctcagggtgacacatcaaccgctaataccagcggtaaaacgctgcttggtcagtaa

SEQ ID NO: 4649 - DNA, 372 bp, Escherichia coli
atgagtgacaaagacattgaatctgaaattcaggctaaaggtttagccgcgccgcgcgttacgccagaccatatcgagagtattattgctcaggaggcatatttcacagcagaagatggtgtctttggcgtagccataaaagcgaaacatactggcggagaggtaaactaccagccgcacgaatcactttctctgctgacgttctgcgttctggtgctgcgcaatggcttcaccgtcaccggagagagcgcctgtgcaagcccggaaaactttgatgcggaaattggtcggaagattgcccggcagaatgctgtaaacaaaatctggatgcttgaaggttacttgctgaagcagaagttaagcgagcaataa

SEQ ID NO: 4650 - DNA, 1476 bp, Escherichia coli
gtgacagatacagcgttatctcctgaagagcagttgatcgaggatattgcagggttcactcacgatccgcttggctatgccctctatgcgttcccgtggggggaagaagggactgaactggcacatgctaccggcccacgtcagtggcaggctgatgcgttccgagagatacgtgatcacctgcagaatccagcgacgcgctatcagccgcttatgctggcacgcgcttctggtcacggtattggtaaatccgcattcatctcaatgctgatcaactggggcatgtccacttgcgaggattgtaaggtcgtggtgaccgccaacaccgacaaccagctacgaacgaagacctggccggaaattatcaagtggtcgaaccttgctatcacgaaagactggtttacctgtaccgctaccgcgatgtacagcaatgatcctgggcacgacaagcggtggcgagctgacgcaatcccctggtctgagcacaacactgaggcattcgccggactacacaacgagcgcaaacgcatcatcgtggtattcgatgaagcgtcgaacattgcggatctggtgtgggaagttgctgagggtgcgcttacggacgaagacactgagattatctgggtggcgttcggaaaccctacacgtaacaccgggcgtttccgcgaatgtttccgcaaatataaacaccgctggaaaactgcgcagattgacagccggacggtggaaggcactaacaaacagcagttgcagaaatgggttgatgactacggggaagacagcgacttcgttaaaatccgtgtgcgcggcatattcccggatgcatctgaattgcagtttatccctaccggacttactgacgaggcaatgaaacgggtggtaaccgctgcgcaggttgcacatgctccggtgataatcggcgttgacccggcatactccggcgttgatgacgctgtgatatacctgcggcaggggctgcatagtaaggtgctgtggaccggcaacaagaccactgacgatctgattatggcgaagcgtatcgctgactttgaagaccagtatcaggctgacgcggtgttcatcgacttcggttacggtaccgggctgaagtcaatcggtgacggttgggggcgcacatggcaacttgttccgttcggtggcgcgtctactgacccgcagatgctcaacaagcgtggggagatgttcaactcatgcaagacatggctgaggctgggcggcatgctggatgaccaggaaacagcggacgacctgtcggcggcagagtacaaagttcgagtggacggtaaaatcgttatcgaaccgaaggaagatatcaaggagcggcttgggcgttcgccgggtaaaggcgatgcgctactgctgacgtttgcgttccctgtgtctaagcgtctgcgaattcccgggcagcagaaccagcaaggcaaggccattacagattacgatccctatgcttaa

SEQ ID NO: 4651 - DNA, 594 bp, Escherichia coli
atgcctgctgaacctaaaacctataaacgcaaatcaacgcaatttaagccgctcacagcaatgcaggaggcttattgccagtcatacatcaaaacgcctgaaaaccagactcaggcagcgattaacgcaggattctccccaaacacagcggcagttaaagccagtgtcatgatgcgcgatgaacgcattcagaaacggattgccgagttgatggaggagcgcaacaaacgaatgcgcgtcagtgctgattacgttctcatgcgcctggtggagatcgaccagatggacgtgatcgacatcctcaacgacgatgggagccttaaaccaatccgtgagtggccgaaaatctggcgcactacgcttagtggctttgatctgtcgtcgaccatcatgaacatgaacgaggattcgatagagacaatcctcaaaaaaattaaatggcctgacaaggtgaagaaccttgagctgattggtaagcatgttgatgtcaacgcgttcaaagaacgtctggatgttaatgtgaatgtgacaattgctgatcgcatagcagcagccaggaagcgactcaaagaacgtcaggatggtaatcagtga

SEQ ID NO: 4652 - DNA, 339 bp, Escherichia coli
gtggctaaatcccccgcagaacgcaaagccgcgcagcgcgctcggcagtccgccgccggtgagcgcaaaattgaactggtgctggataagcaggagcaggaaatgctggagcgtaactgtgccgcccgtcgccctggtcgtgcgccgtatgaaatgagcgaatacatcgcgttactgatccgccaggatgatgcacgcgtgcgcgggcgtataaaatcgatcagcagaaaacgttgcggtaagtgcggcgagagagttccagttaattcatgcccgtgtaatggtgactcgcaatgctgggtgactaaaggctggcatgaaacgaaattaatagtgtga

SEQ ID NO: 4653 - DNA, 123 bp, Escherichia coli
atgaacaagtgcaacgctctgctttatgccatggtgattggtttcggcctggctgctggtatccgggtttatattgcctgggagtcattaatcaatctggcgtggagtgcgattcgtggctaa

SEQ ID NO: 4654 - DNA, 528 bp, Escherichia coli
gtgagcgaaattaattaccaggcactgcgtgaggcggcagaaaatgcaacaccaggcgaatggtgtactgatgactaccatggagtaattgccgatgccggactgaacgccaattactacatagcatcatgctcaggaccggataatcgcgccaataaacgattcatagccgcagccaatccggctaccgtcttggcgctgctgggcgagctggaaacagcaaaaaagcgcatagcggaactggaagccgaacccgtaagccaaacttacaagttgaacgagctatctggcaactatccggcaactccggatagttggataagctgtagtgagcgaatgccggaaaagaacaagaacgtgcttatttcggtgaatttcgacagctctctggttgaaccgctaatatgctccgcacgctataccggaagcacattccggcgaggagaagcaacgattaagccgggtaatggtattgagcaggcaactcactggatgccgctaccggaaccgccgcaggaggtgaagtaa

SEQ ID NO: 4655 - DNA, 702 bp, Escherichia coli
atggaaagtaatatcaaagggttagtttccgccgggcatgagatggcttcggaactgaaagcagaatgtggtgccgttgatatgcgcagtgtggcaaagctgatcagcgatttggcaacgcaactggaagtgcaactggtgcgtgctaatgcgcaggacgaagacaaccagagagccattgagtcaattaaacaggctgattcggctgttaagttggcacacgagaagttttcggcgctggcggcggagaatgcggggctgaaggccttcaaaaccgccgtttatcagcagatgggcgtcggatgtgatactcctgaattctccattacggtaggtttgagtaacttacgtcgttttgctgacacactccacgccattgagcgtgagttctttaccaaagagctacctgatgaagagcacgaaggcgaaacattcactgaatgtccacttagctggggaatgagcgtcgaacagtacgtttccgagtttcgcaaatgcctggctgaagtgcgggcgcagggggtggatgctgctatagaagctgcaaaaaatctggtggcccaagaatatgagtataaggatttcaaagcggcgcagagtgattgctgtatgcaccctggttcagacctggtagggaaggttgaaatgactgagtggttagttgactttgctgcccagcttcgcaaaggaggcaaccagtga

SEQ ID NO: 4656 - DNA, 348 bp, Escherichia coli
atgagaaaacagatacaggctcttggtcgactcaaaacaggccagatgaacaaaacagaatctgcgtattgccagcaccttgagcagcgtaaacgtgcaggggaaatcgcctggtatcgattcgagggtatcaagctgcggttagctgacaacacgttctatacgcccgatttcgctgtgatgctcgccaccggcgagatggagctgcacgaagtgaaagggggattctggaccgatgacgccagagtgaaaaccaaagtcgccgcagatcagtatccgttccgaatcatcggggtaacggttaagccaaagaaagcaggtggtggctggaacatcgaagagttctga

SEQ ID NO: 4657 - DNA, 786 bp, Escherichia coli
gtgaacaacgtttttaccgcgatacaaaaccgtgacggagaagccctttctcgcatgtcaggttatgagcatcaatacgtcaacaatgacaatgtggtgaacatgtcagcagagaggcttgttgatgcccttttcaaacagctgaaacaactgtttccggcggcagtagtaaccaacctgaagacgccagagcaggaagttgctgcaaaacagcagtggattgctgcgtttgccgaaggtgggatccgaacccgtgaacaggtttctgctggtatgcgccacgctcgcgccagtgagtctccgttctggccgtcgccagggcaattcatcaagtggtgtaaagacagcaagatggttcttggcgtcaccattgacgatgtgatggcggagtttcaccggtacagcaaggaaaaaagtttatatcctggtggtcccgaaagattcccgtggcgacatccggttatgtactgggtcgtatgtgatacccgccgtgcaatgtatcagcgccagcttagcgagattgaggttgagaaacacgcgcgcaggctgctcgatgattgggcgaaaaaggtggcttccggacagcagatacccgatccggtgatcagcatacaggcaaagccagagcccatgagtacgcctccggacacagggagagacgtttaccatccaccagggcgaagtttcgggtgtatgcctaacgccgccaccctggggggaataacaccggcgcagtggctaatggaggaatacaggcggggaaaggcggcaggatttatcaagtaa

SEQ ID NO: 4658 - DNA, 816 bp, Escherichia coli
atgagcagacatgcaacagattgggcctgggagacagatccaggcagctcatcattaaagctcatactgctctcgatggctgacagagccgatgaatataacctctgctaccccagcatagaacgcctcgttaaagacacttgcctgaataaaaaaaccgtgcaggccgggcttatatcgctcatgaaaatggggcttatttcagataccggagagagaaagggagcgacgaaaagagtgcgggttttctctcttaatataaccaaaaacgggaacattaaaggcaaccgggaagggagtaatgaacccgaaaacggaaatgttaccgaaaacgggaatatacccaaaaacgggatgttgaatgatcccaaaaacgggatgttgaatgatcccaaaaacgggatccagaaccagtcatataaccagtcatttaaccaagagagggggagcaggacaaaaaccggggattctgtgcctcatgaccccggcgcaaacaacgccgtgatgaataactttgttcctcctggtgggccagggcaattaggcaaatttgtcatgcatgaacaatggcaaccatcagatgactttcttcggaaaagctcattgcagggaatctacctggacagtctgccaacggcacaggaacttgcagagttcagaatttactggatggctgagggtaaggcataccatcaggcacagtgggagcagaagctggcaaggcggctgcagattagcagacagaagcaatcaacattacctgataacaacgttccgcactggaacagccctgaagcgtgggaggatttcttgtga

SEQ ID NO: 4659 - DNA, 201 bp, Escherichia coli
atggaaatcattacacgtattgatgccgcaaagcgcggacttaaacgctactacaccggaaaaccatgtaagcacggacatgacagtgaacgctgggtttacaacggacactgtgttgagtgcaccatggaatcaaaccgtcgcattagggcagagattaagcagatcatgattaattcctccccacaacattcaagctga

SEQ ID NO: 4660 - DNA, 231 bp, Escherichia coli
atgagcgataacggacatttcgatttcaaaaagcactggcttgcacttactccggatgagcgtgaagccttcgcacaggaagccggaacgacgagtcactatatccagactcacttaacaggtaagcgaaaaatgccaggtaaagtattgatgaatgggctttttaaagcctgtaaaacaagacaatggctgcgctcaaaagcagaactggcatacttcttctactcatga

SEQ ID NO: 4661 - DNA, 585 bp, Escherichia coli
atgaaaagtatccaggacgtccgcaggcaaaatctcaacgacttgatcgaccgtgaattcaatggtgttcagacgcggatggcagaaaaacttggaactcaggcaaatctggtaaaccgctgggctcttggcaagaaggttatcggcgaccaggttgcgcgaaaaattgaagctgccgccaataaaccccgtaactggcttgatatcgatcgctcgctttctcaggaaggttttcagcctgtcggcccaagcgacattggtcagctggcggctcacaacctggaacgctggatgagcgaaagccgcgacctttcaacacagggaaaacttcaccgcgcatccggcgtcgcccaggtgacaatcagccgcctgttaaacaatgaggtcagcgtttccatttccaccctggagaatgttgcatctgcattcgggcgtcacggatatgaactactgattcatccgcatgaccctgcaactatcaactatgaccgctcgcgctacgcattgttacctgaaacagagaaggcaaagatcgaaagttacattgaatttgtcatcaaccagaacgaaaaaaacaaacaataa

SEQ ID NO: 4662 - DNA, 162 bp, Escherichia coli
atgcagtggaaaatcatcaacggttggtactgcgttactgcatgcggattcatgagctggaagttccgcaccttacaggaaggcattaagtgggctttcgtcagcaaagaagctcgcgatgtggccaacgataacgagatatgggaggaggttagcaaatga

SEQ ID NO: 4663 - DNA, 1035 bp, Escherichia coli
atgagtgaattatcaatcatcgaaatcacaccagacatggcaccaagaatttacgttgaaaaagggctggaaaagtttctcgagcagatccgtgaaggtgttaatgaagtgcctgacattagcacagacaaaggcagaaagcgcattgcatctctggctgcgaaggtttcaagaagtaaaacagcggtagaaaaaccaggacgtgattatctgaaacgcctgaaagaacagccgaaagtagttgaagcagagttacgacgcttcgtaaccgaatgcgatcggcttcgtgatgaagtacgccgcccactcaccgagtgggaaaatgcggagaaattacgcactgaagcactgcaacaacgcctgacaaatttgcgagcactagctgacgtgatcgatctctccggaaactacttgccatcatctgatattcaggaacgaattcaagaggctaaatcagtagcacttgatgaaagttggcaggagtacgcagcagaagctggagtagccaaggattcaaccatccagaaactggaagaatcactcgcagtagctcaaaaacgcgagcatgaagccgctgagctggagcgacttcgcaaagaagcggaggaaaaagcgcgcattgagcgagaagagaatatccgccgggaagctgctgaacaggccaggctcgaagctgaacaaaaagcgaaagctgaaattgaggctgcggaacgcctggcggcggaagaaaaagcacgtgctgaagtagcagaacgtcagcgaattgaagcagagcagcgtgcacgacgcgaaaaagaagaagccgttgccgaggaacgccgacgccaagaggcggcagaaaaagcccgccttgacgaacagaagcgtatcgccgacgaagaatcgcgccgagctgcagataaagagcatcgccgtaccgttaacagcagagtaatcgcagatctgatagcccaaggcattcccgaagaattcgcgcagaaagcaatgttggctatcgctggcggcaaagtgcaggacgcgtatatcaaatattga

SEQ ID NO: 4664 - DNA, 300 bp, Escherichia coli
atgaacgttaatcagcagaaaaatcttcaaaaaatcatgctggcattcgacaaggactaccgcctgtcagaacagctatatgaccgacaagttgaactgattgatagcatccggcttcatcaactggcctcaacttttgacggtgtaacaggcaaaggcgttcgccaggaagtgctggaggcagctaaagacagccctgagttcgaagaacttatggatgcctaccgtcgcgaggcaatggcaattatcgcccgctgggatctggcggatcggattgatgggcagagggaagcggcatga

SEQ ID NO: 4665 - DNA, 822 bp, Escherichia coli
atgaaaccgggaatttatttcgacatcagcaacgaagactaccacgccggtgacggcgtgagtaagtcgcaactggacatggttgccaagaatccggcgcttcttaaatgggttcaggcagcaccagaagacgaagagaaaaagtctgcactggatatgggaaccgcattgcactctctgcttctggagcctggagaattcgacaaacgcttcattgtttcaccgaagttcgatcgtcggacgaaacaaggtaaagctgacgaagaagcatttcttcgtgatgtagcggatatggggattacggtacttgatgccgagcagtggcggaaactggagctgatgcgtgatagcgcaatggctcacccggcggcacgctggatgctggaagcacctggttactgcgaagcatcaatgtactggaatgatgaagagactggtgagttgtgccgcattcgtccagacaaatggctgaacgagcacaacgtgatcgtcgacgtgaaaaaggttgcagatatggatcgttttgcacgccacatcgaggaattccgctaccacgtgcaggacgcaatgtaccgcgaaggcgcaatgagggttactggtcagtcgcatggttttttctttcttgccgtgagcgaaagcattgattgtggtcggtatccggtacgcgtgttcgagctggatgcgccggatgtcgatgccgggcacgctctgttccgccgggatctgaatacctatcacgaatgccgcatcaatgatgaatggggcggcgtggaaattattaaacgccctgactgggcacgtaaacaggatatgtacgtatga

SEQ ID NO: 4666 - DNA, 882 bp, Escherichia coli
atgagcaatgatatcgcaatcacatcacaaccaggcgcaactgtaggtactgctgcggcaatcttcagcccggagggcatgaatcaactggtgcgtttcgcggagttgatgtcacaaagcaaagcgactgtaccgaaacatcttgaaggcaaaactgccgattgtctggcggtgaccatgcaggcggcacagtggggaatgaaccctttcgccgtggcgcagaaaacgcatgtggtaaacggaacgttaggctacgaagcacagttggtaaacgcggtcgtatcctcttccagcctgctagcgacacgcctgaattatcgctggagcggtgactggtcgaatgttaacggcaaaacagataaatcaccgaatctgacggtaactgtgtcagcagttcttaaaggagaagcagaaccccgtgagcttaccatcagtatggcgcaagccggagtgcgtaactctccattgtgggaacaggatccgcgccagcagcttgcctatctttgcacgaaacgatgggctcgcctgcacgctcctgatgtgcttctcggtgtttacacccctgacgaattacaggaaacggcaccgcgcgttgagcgagacattactccgcaaacaactactgctgcgggaatgaacagtctgatcaacgctaaaccagtgaaaaagcctgatgagcaaactcgtaaagcggatagccgtgatccagaagaaatgctgatggcctttaccagcgcagcgatgaattacagcactgtctccgaactggataaggcttacaaatacattgcacaaaaactttcagatgatgacgaactgctggcaaaagccaccgacgtttacagcgttcgtcgggaagaattaaacgaaacatctatgtaa

SEQ ID NO: 4667 - DNA, 249 bp, Escherichia coli
atgaaaggtgcattaggtaagaaggaactcctggcggtggtgccactgtcatggagcactatcgaccgtatggagcgcgcaggggaatttcctaaacgctggtatatcactgacaaacgctgcgcatggaaccgtgacgaagttgagcgttggcttgatgaacgtcaggcagcaagcccggcagagttccagggtaaaaaacctcctgttcagcaacgtgtatatcgtcccgtgagcaacgctgcatga

SEQ ID NO: 4668 - DNA, 252 bp, Escherichia coli
atgcgcagtccgtcaaagattgtcgccgttactcctgcggcgatagagatcgaaaaacgcgcgattgaaagagagaaaaaagggcagttccgcattgccgcccacctttggcttcagtgtatggatgttgcttctggtgatgttgaacgtgcaaggatcgcggttcgcagggaccaatgtatcacaaaaggtaacggccttcgccgtggcgactatagcggcataggatgttgtggggtggtttatgactaa

SEQ ID NO: 4669 - DNA, 663 bp, Escherichia coli
gtggggtggtttatgactaagaaatacacactaatctatgcagatccaccctgggtataccgggacaaagccgcagatggtaatcgcggtgccggttttaaatatccggttatgagtgtgctggatatctgccgccttcctgtgtgggatttggccgatgaaaactgtctgttggccatgtggtgggtgccaacacaaccactcgaagcactaaaagttgttgaagcctgtggattccgtctgatgacgatgaagggcttcacgtggataaaatgtggtagtcgacaaccagataaacttgttatgggtatgggacacatgactcgcgccaatagtgaagattgcctgtttgcggtaaagggaaaactacctccgcgcattaatgcagggatcgttcagtcatttaccgcaccgcggcttgagcactcaagaaaaccagatgtcgttcgtgaaaaacttgtgcaattgttaggagatgtttctcgcattgaactattcgcccgccagtcgtctcatggcttcgatgtttggggtaatcagtgcgaagacccggcagtgcaactacaccctggatacgcgttggatattggcggattaacaaatgcattcggcaattctccgctgtcaccaacagacaaccaggggcgggagcgtgctgcatga

SEQ ID NO: 4670 - DNA, 195 bp, Escherichia coli
atgaacagggcatcaccagcagatttaagaaaatgccttgaaactgcaaacatgcttgcacacagcgggatcaggtttgttccaattcccgccgtcactgatgctgaatttgcaacactgtcagcaatattcgaaaacaaaattgaatcactggcagcagaagcagagatggaagaaaatcagcagaactattaa

SEQ ID NO: 4671 - DNA, 1251 bp, Escherichia coli
gtgcttaccgatacaaaattaaaaaacctcaagccgcaggacaaactgtacaaggtctccgatcgtgacgggctgtatgtagctgtgcttacgtcaggcacggtctcgtttcgctatgactaccgtatcaacggtcgccgcgaaacactggtaatcgggcagtatgggcgtgacggtatcagcctggcagaagcgcgagaagaactgattgctgcaaagaagctgcttaaagcaggccagtcgccggctgcggctaaacgtgacggtatcaaaaagattcgtggtgccgagacgtttgcggtacataccgacagttatatgaaacacgtcatcctggctgacagtacccgcgcaatgaagcaggcggtgatcgaccgtgacatacttccggttcttggcaacaaaatgatggctgaaattaccacatcgatggttcgtgatttgtgtgaccggattgtcgaacgcggtggtcgggcaacagcagtacaggccagggagatcatcagcagcgtataccgtcacgccaatgaccgtggtcatggtttgtttaatcctgcggctgacattaaaccttcgtctatcgccatatttaaaccacgagagcgaacactgacaccagaagaaattggcctgttcttccgcacgctggatgccattggtgctatgggcactatgaaaatggctttaaagctggtgcttatcactatggttcgtaaaggcgaattcaccaatgcaacgtgggatgaaatagattttaaaaaatggacatggacaattccttcagaccgcatgaagggaagccgggcgcacgttatttacctgcctaaacaggcacaggatatattggttgggttgcagatgtgcgctggtggaagtgaatatctggttcctggtcgttacaatttccggaagccattatctaatgccgcgctgaactctctgatcgacagaacggtgaaaataataaatgaagatggtgagcatattcagggcttcaccgtacacgatatgcgccgtacagccagtacgttgttgcatgaggctggttatccttcagactggattgaaaaggctctggcacatgagcagaaaggtgtgcgcgccgtatataacaaagcggaatacgccagacagcgcgcctacatgttgcagcagtgggccgatatgattgattcctggattaacggggagcatacggatctgattccgttctccccgtcgaagtttgagaagtggatggcgggggaataa

SEQ ID NO: 4672 - DNA, 8052 bp, Escherichia coli
atgtccctgaccctgaataaaatccttgtgttatgcgcattgctgataagcgcaatgctgcctgggtggtcatgggcagaatctgcatggcaagactcttcagatacggtcggcgaatttaacggtaccgtgcccaccgccgacagcgccagcatacccgtctaccagggcagtgtctttctcgatcctacaaagacgcatgaggtagcgtttaccgctaaaccgagtgaattcaacgcggatgttagcgtctctaaattgctcgtcaccaacccgcaagacagagaaggcgatatcattgccaccccacgttgggaaaaccaaacgccaccggctgtatctttagtttgggcggatgccgccacgccggacaccttactggacccacagccagtcgcagatcgctcgttttgtgcacagggacttgccgggcgttcgctggtcgcctgggcgcagcctgatccccagcagaccatgccgctgttatatttactcacctcgacgggctatccctatgaaagtgttctgatgctcgccgatcagaaagtgacgctgaagattgcgcccgcgcagggtgaccttatttccgtcagcgctgcgggctatgacgaatcctcaggtgcggcgaaaatgacggttgggggcagtatcacgttaacggtcaccaccaaagattgcgtcggtaatgttgtggggaatattccttttgttatcaaacgcaaagatgctgaaaaccgccagggtgtggtgaacaatactgcgcctgtaaaactgggcacgaccgaattaaccaccaccgcgacggaatatcgtggtactaccgatgcgaatggtgttgccacggttacggtcacccaggccaacggccctggtgtaaaaacgccgttggtcgcgagcctcgcgggtattgctcaggccagtgaaacggcagtgatctttaccgtcctcaccagcccggatgttccgcaggctacaatgtggggtcatatgcccgatacgctgaaggcccgtgattacacttttagtcgaccaaaactggcggcggaagtcgataatgaaggcggtacggttaacgatcacaatgaaacctggtccacctttacctggagcggcgcggataaacattgcgacattttgcccggaatgcgtcagttcggtgcgctggcgacggtggtgccaacgtcagtgcaggatgtggctggttggccgatgcagggtaatttctactggtcatcactggcggggatgagcggccagcaccatgcggcggatgtttcgaaccgcagcgaagcgcaaaaaccggacgatacgacgtttattgtgagctgtgtcgataaagaagcgcccgatgttgaaccgaagctggtactgacgccgggcagctatgattcgacgataaaagcgatgaaagtaaaggtgggggaagaggcttctttacgtctgacgattaccgatagcaagaacaacgatcagccgctggcttactactacttttcgctgcatctggatgacggcattaaccgtaagaatcaaactgacgccgcgtgggagacgcatccggtacaaattgatggcggcagtaacgttcgcaaagttgacgcccatacctatgaagggatcactgatgctaacggagaggccactctgacgctgacccagccaggcggcgtgggggtgaaaactcacatcaccgcgagaatgcgcagtgattttactgcctcggatgagaaagacgttatttttacggtgatcaccagccccgataccgacaaagcgcggatgtggggccatatgttgggcattattgaagcgaacaatatctttaaacgcccacggctggcggatgaaaccgacaacgaacagggatcggtgcgggaaaataacgaagactgggcgctgtttgatcagaatagcagtatgcaggctgagtgtggtttaggtcatattccgagccaaagttcattgcacagtttgtttgccgctcatccagccaatgccatcggcaccgaatatggctggccaacgttgcaaaaagcgtatcttagtgcggtggaagagacgtcgcacgcgtcggtaaacctggccacgggcaacatcgacacctattccggctttaagcaaaactatctctcttgttcgggcaatgagatggtcgcccagattgccgcgaccaccgatcgtgatgtttccgcaggcagcagagcgcaggccaaagtgggtgacacgatcaccatgacggtacgcacctttaatgccttgaataatgcacccgtgccgtataccgcgttcaccattactaaagatatggggaaaaatcgtcaggggcagactacaggttttgatgatccaacccgcggcgcaatcgagatgaatggcacactctacggaacatcgcaaccgtctttagtctatgccggtactacggatgcgcagggttttgcgactgtggaaattaagcaatcgcaaggtgtgggcttatcgacgccgctaaatattgtgcctgtgaactcctatattcccaatactgttaattacaatgtgattttcactacgctcaccagtccggatgcggttggcgcgcagatgtgggggcatatggatgagacgattaccgtcgatgctttaacctttgcccgaccccgactggctgcggaagtgttcagtccggacggcacattaacggaaaataacgaagtctggtcgcgagtcagccaggccaacgcctccagcaccagtaaaggtggctgtggcgccaatatgctcccacgccgttctcagcttagcgcgctctatgatgccaataacggtgacggtgtacagacagtacacggctggccaacgcagcgtcagccctactggagcagttcgcccgcagatcaggtaccgcattattacaccatagccctcaacgatggggcgcggaccgttggcggtagcacggcggtttatgtcagttgcctgacgacggctaacaatcctgccagtagcattacgctggaagtggtggatccggcgcagtggaacgcggctgcaaatgcggcgaagctgaaaaaaggcgaaacgctacaggtaaaggtgacggtaaaagatgcgcagggcaatccattgggtgatataccctttaccctgaaacgtggcgatggttatacccgctcagaggaaaaacacgttgctggtagcagtgatgcgctggttgcgccggttgtggtcaatggtggcctggcggacgaaacttcgcttaataataccgctgcagcatacagcgccatgaccggcagcgacggaactaaaattctcactattacccgcccggatacccatggcacgaaaacgtcgctgaccgctaggctctattcagatacaacgaaaaaagcgaccctcgataccatttttaccgttgtaaccagtccggacagcgataaggcgaaaatgtgggggcatatgcctgaaacagtgacggctgcagatggagcggtctttaaacgcccattattgttgaaagagttatccagtacgtcgggtcgaacagcgattgcggaagataatgaagactgggcgcaatttacccaagctcaggctataagcacatcctctaatggttgtggtagtgaatatgttccctctcaggccgggctggagtcattgtatgaagccaaccgcggaaatgcgatgaaaacggttcagggctggcccgtcgcctcaagttacctttccagcacgacaggtagtagtagcctggaacagcgtgacttcaaggccgtcaatctcagttcaggcaccagttcgataattccatctgccacaaaagaactgcttacctgccagacgacgccgattgttaaggcaagccaaatcgttcttgaagctgcagacctcacaaaatttgaccgtatgaataatgttgtcaaagtgaaaaagggtgaagaagccgtattacgagtgaccactaaagatgcgcagggtaagcctgtgggaaataccgcatttaccctcaaacgaaacaccagcgtgaacagggccaatgtgtcaactacgacgtcgattgcttcactggcggtaacggatacctggggaaatactcaaaatgattttctttcaacgaccctggttatttatggcgtgacgggggctgatggcaccaccactttcacattgaagcaagaccagactaccgggctaaaaacagaactcacggcagcgttggattcctccagcagcactaaatcgacgcttcccgttgtctttacggtgcttaccagcccggattcgccaaaagccaaattctgggggcatatggctgaaacggcgacaggcgatgacggtcttatttatcgaaggcctttgctgagggacgagaatagtgctaccaccagtatcggtaccctggtggaagagggggaggcctggtctacgttcccgtcgggccaggctaacgatacctcgataaatggttgtggcgcggagtatgttccaactgacaatgaacttagggccatttatgcgcaccaggggagtagcgcattacatgacgctattggctggccagtgtcgaggttctatatctcgaataccgttgcagatacgttcactcaaacctttacgtatgatgtcgtttcgctgaagacaggagatgaaacgcagatgccctcatctggtggtgcattactgagctgccggaccacgcctgtcgccgttgccagtcagatcattgttgaggcgaatgatacggcgcaatttgtcaaagttgacgacaccttgagtgcgttgaaagtgaaaaaaggcgaagacgcggtgattcgcgtggtgactaaaaatgcgcagggaaatagcgtgcccaatgtcccctttattctcagacgtgaaggctcgaagaaccgtcaaaatgccgagatgataaataagtcgattacggtaattaacgcggcaggcgcttctgcgaggatgaatagttcttcaagcctgctttatggggtgactggcgcggacgggactacctcctttacggtaaaacaagatgattctatgggcctggtaaccaatatgtacgcccagttgtatcagctgacgatagaatccaacaaattaccggtcatgtttaccgtcataaccagcccggatacgccactggcaagttactgggggcatatgcctgaaacgtttactacccggtcgggaattgcctttaagcggccattgcttactgccgagcatccagcggggcagtcaaccatggctaataatgaatcatggctttctttgaatacggcagcaaaaaatgatgtcagcaaatcagactgcggcgaaccttatcaaccgttattaagcgaatttcaagagttatacagtgaacatcctaatggtgcgatagggaccgatttaggccttccgctgactaacacctggtgggcttacgataaaattgcctacgcgaacgtctggtacgatcagtctattaatttatcgaatggatcaagctccagggcattatcaaacaccgtggcatttgtgtcctgtctggtaaaccctcatgcagtggcagcttctatagagatgacctccacggcactggatgcggagaaaacggccagcaacgatggtcgccctagtgcaacggcggcgaaaggtacggcgatccggatgacggtgattgtgcgggatagcggaggaaatctgttgccaggcgcaaactttaatctcatacgcgggactgcgttggatcgtgcaaaaaacaggctagattctacgtatgatgatcttactatcgtgccggtcacccctgccggagtaaacatgtcactctataataatggggcacaggcacttctgacgacaggaagtgatggtaaagcgacttttgatgtgacgcaaaacgagacttatgggctggcaactccgctcactgcaacattgatgcgcgacaccacaaaaagtgccacgatggatgttattttcactgtgataaccagtccgaactcaccgaaagcaaaatactggggtcatatgcccgacacgtttaccagtagggcgggggtgacctttaaacgaccgctactggcagcagaagcgaccttggggtcctcggtaagtaataataatgagtcgtggtcataccttttttataccaataaagttacgccggattgcccggttgagtatcagccgcgtctcaatgagttacaggggctatataatgatcatccaggcgggacaatactgacagatttggggttgcctataactgccggaagtggaaattggtggacttatgaaatgagcaccactgacgcgttgacgtggtattacggcgtcattaatttgaaaacgggacaatcgacgacgactattaatggatacgctttaatgctctgtctgacgcagccacattcggcaccagcaagccttacgctgtcatcgactgcctatgatgagggccgaactgccagcaatggtggtacccccacgtcatctgtgaaaaaaggtgagatgcttcccatcgtggtgacgatcaaagatgccaatggtaatcctgttggcggcgaaggtgttacgctcaagcgcgtgcaggcgaaaagccgttcagggatctctgtatcctccaataccgtagatgatctcattttagatgaagtcaccccgacatcggcgcgtatctccttcaaccagaatacgtcggcatggagcggcttcaccggcagtgatggcacgataacgttcaacgttacccaaaataacaccgttggtctggtaacgccgtttacagcttcattggcgcgaaatccgcaggttacggctaatcaggacctgatattcacggtagtgaccagcccggattctgcgaaggctaactactgggggcatatgccagcaaccttgacggcagtgaatggtgcggtatttgaacgcccgaaattgtggagtgaactgacatcgacttctggcgtcggcaagatcaataacaataatgaagactggccgtactttaccccaacacagaaatcagatgcgagtgtgagcccttgtgaagtagcaaggcagccactattcaatgatttaagttcgttgtctgcgcgttatccgaataacacgtttgtcactgaaactggctggcctgcgtattacacctggtgggcagaggataaatccgccgatggtaaagaccagtcggttgatttgagaaatggcacgctgtatacgggttcaacaaaatcatttcagccttgcctggctaacgcgcgttcaacggtttccagcgtcacacttacctcaacagcgtttgatgcagccactcaggcggcgaaagtgaaaaaaggcgaagccatgtccgttaccgtgacggtgaaagacagcgccgggaatacggtgccgaatgttgaatttactttgaaacgtggtgaggcatcgccgcgtaacgctggggcaacgttgtatggcaatgtagtggcgatggacgatctcgtcgttcagccgttatcaggttcggctgttacgctgagtgaaagcggtaataccattagtggcatgacaggcgcggatgggacggcaagttttacgctccgccaggataatacccctggttataaaatgccactgacggttactctggctaattacgcttccgcgacagacacgctggatgctatttttacggtgccaaccagcccaaatgtttcatcggcgcacttttggggacatatggcagacacggtagtggtgaatagtaaatcgctacatcgaccgttgttaacgacggaattgccgtccggggctaatcccgtatcctcaccgattattaactacgaaaactgggcttctgcacatatcattgatgccagtaaatgggatatcgcaaggcagtgtggcagcatagaaaatgcaccgacatacaatgaattagagttgttgcatactgtttttaattcactgggatggccgtcttcacccagttttccttatttgtcctctcaacagtgtgggatggacgaaggtactggagcgcaggattgtagtatcacgctaataaataaaccgggtctggtgacctgcttccagtaa

SEQ ID NO: 4673 - DNA, 978 bp, Escherichia coli; identical to SEQ ID NO: 2645

SEQ ID NO: 4674 - DNA, 405 bp, Escherichia coli; identical to SEQ ID NO: 2569

SEQ ID NO: 4675 - DNA, 603 bp, Escherichia coli
atgcaacagctcggcctgaagtctcctgtgcgcctgaagaaataccggtcttaccggggaaatatgggactcgctgcagaaaatatccttcagcgacagttcaaagcggaagctccctgtgagaaatgggtgacagatatcaccgaattcagggctggcggacaaaaactgtacctgtccccgatacttgatttgtttaacggggaaatcgtggcgtgggaaacggcctgcaggcctacagaggagctggtgaagcggatgttaaataaggggctggaaagccttgctgaaggggagaaaccgctgctccacagtgatcaaggatggcattaccggataaaaagttatcagtccgccctggcggacagagggttagtgcagagcatgtcgcgcaagggcaactgccttgataatgcggtaatggagaacttctttggtcacctgaaagaagaaatgtactatcgccgggactacagaaatgtagaagagctggaaaatgccgttaacgaatacataacttactggaatcaaaaaagaataaaactcagtcttgggggactcagcccggtagaataccggactgagtatcaaaaagccggttaa

SEQ ID NO: 4676 - DNA, 402 bp, Escherichia coli
ttgaaccagttcaatattataattctgacacacggtgaggcagggaatgctttactcgccagtagcgaaatgattgtaggtaaaacaccgcatactacagctatttctctgatgccgggaatgtcacctgaagcacttatgcaacaagtaaaaaccatactcaatcctgatgtagaaacaatcatatttacggatatttatggcggcacaccttcaaatatcgcctaccttctttcacgagaatttcccattcgctgcatcagcggtgtcaatctggcaatgttaattgaagccaacatgttacaggattctgacgaagaacagtcctttgatgaatatattcagcatatacatgatgctggtaaagagatgattcaaacttattgttttaataaaggatga

SEQ ID NO: 4677 - DNA, 486 bp, Escherichia coli
atgagtatagtacatgcccgtattgattaccgtttaattcatggacaagtcataacaaaatggctaaaaaggagtgatgcaaataaaataattgttattgatgatcccttgtcacgcgatcctttcctggctgaagtctataagatggcagcgccaagtggtgttgaagtcataatgacctccattgaagatacgttacaacgctggaacagcaatagtttctatgaaggtaaattactaattcttttcaaatcgatcgattctgcattaaaaactatacaaggtggtttgatgttagaggaattacaagtcggtggtgttgaaaatactccgggaagaaaaattgtctttaaccaaatatcactcaaccacgaagatgccgacaaacttcaaatcatcgaagataagaatatcaaagtttatttccaaactattcctgaagaagatcctgccagcctacaaaaaatcaaaaataagttaccttaa

SEQ ID NO: 4678 - DNA, 747 bp, Escherichia coli
atgtctatttttacagcagcaatgattgccctggtatattggatatcccaagcaaaagtatggtacggcttttctattatgcgtatgccattatcgatagcacctattatgggactcatctttaatgatatgccaactgctttatctgttggggccaccttacagatgatctatatcgggagtattgccccgggaggaaatcctcctgcagatgaaggtctagcctcgtgtatagcaattccaattgcacttaccgcaggtattaaaccagaaattgctatctctttggctattccactgggattgctcggcgttgttctggaaaacgtacgtaaaacactgaataccacatttatccacatggctgatcgctacgcagaaaaaggtgatataaaaggcatccaacgcgcagccacaatatatcctctcctgttagcctttccgatgcgttttgtaccggtattcatcgcctgcctgtatggcccggatgccattgcctcttttgtaaacctgcttcccgcctggtcgacgaatggcctggcaattgccggtaatattctgcctgcactcggttttgcgataaccataattgttatcggtaagaaacaatacatccctctgttcattattggctttttcctcgtgacctattcaggcttgaataccattggcatctctatttttggactctgtgccgtcctcttatatatgcagtcacaaaatacaaaaggaactaaaaatggataa

SEQ ID NO: 4679 - DNA, 855 bp, Escherichia coli
atggataatataattgagtcaggatactcagaatcctcccctattacgaaaagagacgttcagattgtttggctaaaatggcacgcgttctctgaaacatcattgaactttgaacgtttacaagcactggcattttgcaatgcaatgacaggcgtattggcgaagctatacccagatgaaaaagatctcgccaaagccttacagcgccatttaaccatgttcaacacacaggctaactggggctcggttatcgctggtattagtattgcactggaggaaaaagccgcccaggaatcagaagaacaacgtgaatcaacaacacaacttgttacgggtttaaaaactggtcttatggggcctgtatcgggtattggtgacacgttagactttggtacattgcgtcccattgttattggtgtctgtatcccgtttgttattcagggatatgttattgctgcacttctccccctgatttaccaggttagttatatgttcttcgccagtcgatttgctcttaatatcggctataaaaaagggaaagagtcaattctggaaatcttgcattccgggagcatacatcgaattatcgaaggtgctggaatgttcgggctgttgatgatgggggcgctttcagcaacgtatgtaaaaattaagacgccattgcatattacaaccggcggtggcaataccattgtcttacaggatatgctagataaaattgtccctaacatgttgccacttattgccgtgttgggtatttatttttacatacaaaaatgtggccctcatttcttacgtattctggtcactattcttgttttgagtcttgcattttctttctttggccttttataa

SEQ ID NO: 4680 - DNA, 921 bp, Escherichia coli
atgaaaaagataattatcactccccggccttttgtgggtaaaggcaaggtctatattgataagttaaaatccgcaggttatcaagttgaatgtaataacagtggaggtcgatatagcaaggaagaactcatcgagaaaattaaagacgcgaatgccattatcaccggaaacgatcctctgagcagagaagttattgatcaggcaaaaaacctgaaggttatttcaaaatatggcgtagggttagataacatagatgtcgattacgcaaatagtaaagacatcgtggtacataaagctcttaatgctaactctatttctgttgcagaaatgaccattctgatgatgctctccagttcccgaaaatatgttgaaatcgagagtcaggcaagaaatggtaaggacatcaggcttgtcgggtatgagctatatcaaaaaaatctgggattaattggacttggtgcaattggtcaacatgttgctcatattgctcattctatgggaatgacgattactgctcatgatcctcatattgataaaagcaaggttccatcctatatagaacttaaatcacctgatgaaatatatcagtacagcgatgtaatttctctgcatttacctttactggacagtactcgcaatataattaacgactctgtatttgagaaaatgaaatcttcggctattttaatcaatacagccaggggtggattggtcgatgagaaaagtttatataccgcacttagcaatcagaaaattgcttttgccagtgaagatattgaactgagagaacgttcaaaagaactcaccgaacttaaaaattattctattacccctcatgccgcttcatttaccgatgaggccgaccataacacaatgcaaatttctattaaaaacgtattacaggaactggagaaagagtaa

SEQ ID NO: 4681 - DNA, 885 bp, Escherichia coli
atgaaagagctcaaagggattattaccgcaatggtaacgcctttcgatgaaacggaaaaaatggatatcactgcggcgaaaaaaatggcgcgctggttagtagataatggtgttcatggtttattcatttgcggaactaatggtgaattccatttgctttccgatgacgaaaaagttgagttaacaaaagccgtcgttgaagaggtcggtaatgaagttaccatttgtgcaggtgctgggtgctgcagcacaaaacaaaccatcgaattgactaaacggttagttgatgcgggtgccgattatatttctgttgtcacgccgtactatctggtaccaaatcaggaagatttataccgtcactattacgatattgcctttagcacaacagcccccatcattctctataacctgccgggccagacaggattaagcatcgaatacgaaacggcaaatcgtttagccgatatcaaaaatatcgtagcgataaaagacagtagcggtaaattcgaagtccagaaacagtatctggaaatcgctaaacataaaaactttaaggtattaaacggctctgactcgttaatgctggatgcatttaaagaaggttctgtggctgctgtcgctgcaacgtcgaatgttctgcctacgattgaagtcgatttatataattacttcatggccggtgaaatggagaaggcgcaggaagagcgtaataaaatggatgcactgcgcatgacgatcaagaaaatgaccgcgcctgcagtaatgaaggaagcattaaacctgatgggtgtgaaggcaggtattacacgtagaccaattcatatgccaaacgacgcgatcgttgaagacatcaaggaaatgttgaaaggctataatttcctgtaa

SEQ ID NO: 4682 - DNA, 747 bp, Escherichia coli
atgaaatcattgagtaagtcgtcacaaataccgctctatcaacaagcggtggagtggataagagaaagtatttataccggggatctggtggaagacgatcgcattccttcggaataccagattatggatatgctggaagtgagccggggaaccgttaaaaaagcggtcgcccaactggtaaaagaaggcgtgttgatacaggtccaggggaagggaacatttgtcaaaaaagagaacgtggcatatccgttaggtgaaggattattgtcattcgcggaatcgctggaaagccagaaaatacattttaccactgaagttattacgtcacggattgaaccggctaatcgttatgtggcagagaaattaagaataacgcccggtcaggatattctttaccttgagcgtttacgttcaattggtgatgaaaaagcgatgctgatagagaaccgtatcaatattgagctatgccccggcatcgtggaaatcgattttaatcaacacaatttatttccaacaatagaaagtttgtcgcaaagaaaaattcgttactcggaaagtcgctatgccgcgcgattaattggtaatgaacgcggtcattttttagatatcagtgaagatgcacccgttttgcatctggagcagttagtctttttctcccgaggattacccgttgagtttggcaacgtctggttaaaaggaaataaatactatcttggcaccgtgctgcaacggcgggaagtgagttaa

SEQ ID NO: 4683 - DNA, 474 bp, Escherichia coli
atgcaaggcatacagtttcaggaaaattttattcaacgacttccggcagggttaagcgttgaacagatcatccatcagttagcgcaaccgttggttaccgccgaactggtggtccctgattttgccgatcatgtactggaacgtgaggcgacgtacccaacgggactgcctaccgaaccaccgtgtgtcgccattccgcacacggaccataaacatgtcaggcacaatgcaattgccgtcggtatcctgccggaaccggtagtgtttgccgatatgggcggcgactctgatcccgtacctgtcagggtgatttttttgctcgccttaggcgaaagtaataaacaattaaatgccctgggctggattatggagatgattcaggatacgccctttatgcgcgccctgcttacgatggaaacaacagaaatacacacagcaatcttaaacaaaatgaaagaacgaggtgaaatatga

SEQ ID NO: 4684 - DNA, 282 bp, Escherichia coli
atgagtcaaaccattttatttgtctgcgccacgggtattgccacatccacggcagtaacagaaaaagtcatggaatattgtaaagagcacggtcttaacgtcaattattcccaaaccaacgttgcctctttacctggaaatactgacggcgtagcactggtagtctcaacgactaaagtgccttatgaactcgacgtcccggtggttaacggcttgccgattattaccggtattggcgaagagaaagtactggcgcaaattgtttcgatccttaaaaagtaa

SEQ ID NO: 4685 - DNA, 1359 bp, Escherichia coli
atgaacgatatcgcgcataccctctataatattgtgcaatatatattgggatttggtcccacggtaatgttgccgttggtgttatttattcttgctctcttttttaaagtaaaacccgctaaagccttacgttcgtcattaacggtcggcattggttttgtcggtatttatgccattttcgatattcttaccagcaatgtcgggccagcggcccaggcgatggttgaacgcaccggaattaatttaccggtggtggatttaggctggccgccgctttccgctattacatggggttcgccaattgccccgtttgttattcccctgactattctgattaacgtggcgatgctggcgttaaataaaacccgcaccgttgacgtagatatgtggaactactggcattttgcccttgccggtacgctggtttattacagcaccggcagcctgttctttggtttgctggcagcggcgattgctgcggtggtagtacttaaactcgccgactggtctgcgccactggtacaaaaatactttggcctggaagggatctctttgccgacgctctcttcggtggtgttctttccggtcggtctgttggtcgacaaaatcatcgaccatatccccggcctcaatcgtattcatatcgatccggaaaccgtacagaaaaagtttggcatattcggcgaaccgatgatggttggtactattctgggcattctgctcggcgtaattgccggatacgatttcaaaaaagtcttgctgcttggcatcagcattggcggtgtgatgttcatcctgccacgcatggttcgcattctgatggaaggtttattaccgctgtctgaagccattaaaaagtatctcaatgccaaataccctgaccgtgacgatctctatatcggcctggatatcgccgttgccgtaggtaacccggcgattatctccaccgccctgctgctgacgccaatctcggtctttatcgcgtttgtccttccgggtaatgaagtcctgccgcttggggaccttgccaacctggcggtaatggcgtcgatgattgctttagccagccgtggcaacattttccgcaccgttctggcggcgattccggtgattattgccgatctgtggattgcgactaaaatcgcgccgtttattaccggaatggcgaaagacgttaatttcaaatttgccgaaggctccagcggccaggtctccagtttccttgatggcggtaacccgttccgcttctggctgctggaaatcttcaacggcaatctcatcgccattggtctggtgccggttatcgccctggtactgtatggtattttccgaatgacgcggagcacggtttatgcctga

SEQ ID NO: 4686 - DNA, 1509 bp, Escherichia coli
atgcctgataacagcgcagctatcgttatcgatattggcaccaccaattgcaaagtcacctgcttttcctgcctggacgcaacgacgttgggcgcgcataaattcgtgacggcaaaacagatctccccacagggcaatgtcgatttcgatatcgacgccctctggcaggaggtccgccaggcgatagcgcaactgaacgccgcttcgccgctgccagtcaggcggatcagcattgccagttttggcgagtcaggggtgtttcttgacaaacatggcgagattctgacgccaatgctggcatggtatgaccgtcgcggtgaagagtatctggcaacgcttagcgaggcagacagtgcggcactttatgacatttgcgggttaccactgcacagcaattactctgccttcaaaatgcgttggttgctggagcattatccgctgcgcaatcgtcgcggcctgcgctggctacatgcaccggaagtgctgctctggcggctgactggcgaacagcgaacggatatcaccttagccagccgtacactgtgtctggacgtgcgcaaaggcgaatggtcagcgaaagcggcggcgttgttacacgttccctgttcagcatttgcgccattgttgcagccaggtgagcacgccggatgggtcagtgagtcgctctgcaaaacgcttgggttctcgcaatcggtcagcgtgacgctggccggacatgaccatatggtgggtgcgcgggcgttgcagatgatgccgggcgatatccttaactcgacgggcaccacggaaggcattctgcaactggatacacaaccgacgctggatgaacaggccaaacgtgacaagctggcaaacggctgttactcgcttgccaaccagttcaccctgtttgcttctctgcccgtgggcggtttcgcgctggagtggctgcgtaacacgttccggctaaccgatgaggagatcgccgtgtcgctcaatcgtgggtatgcggattacctggcggggaactggtcgctcgatgacattcccgtttttattccgcatcttcgcggttcgggttcgccctataaaaatcgccatacccgaggattattttatgggcttggcgatacgttaaatatcgatatgttaattgccagcgtctcactgggattaaccatggaatttgccaactgcttcgcctgttttaatgtgcccggcaccagcgcgttaaaagtgataggtccggcaacccataatcccctttggctgcaattaaaggcggatattttacagcgtccggttgaagcaattgcatttaacgaggcggtttctgtcggagcattattaaccgccgcaccggatattccaccgccgcaagtcaccatagcccaacgtttgttaccgaatcgggcgagataccatcaattacagcgttatcagcacaaatggaaaagctggtatcagttgaaattacagcaagaaggcgtgatgccattacatcatcgggaggagcactatgttgagtaa

SEQ ID NO: 4687 - DNA, 270 bp, Escherichia coli
atgttgagtaaaaccgtggaagtcagaaacagtactggcctgcatgcacgtccggcggcctgtctggcgaaagccgccaaaaaatatagctgtaaagtgacgctgcactatgaaggtaatgatattaatgccaccagcatgatgaatattatgcgcgccggaataaaaggcggaaaaacggtggaaatacgctgcgaaggtgatgatgaaaacgaggcaatacaaactctcactaccttatttcgcgaccgcttcggtgaagctgaataa

SEQ ID NO: 4688 - DNA, 852 bp, Escherichia coli
atgccattagttaatggacggatactgctcgaccgcattcaggaaaaacgggtattagcgggcgcatttaataccaccaatctggagacaacgatttcaattttaaacgccattgagcgttcaggattacccaacttcattcagattgcgcccaccaatgcacaactgtcgggatacgattacatttatgaaatcgtgaaacgtcacgctgataaaatggatgttccggtcagtcttcatcttgatcacgggaaaactcaggaggatgttaaacaggcggtgcgcgcgggctttacctcggtcatgattgacggtgccgcattctcttttgaagagaatatcgctttcacccaggaagctgtcgatttctgtaaatcctatggcgtaccggttgaagcggagctgggggcgattctcggcaaagaagacgatcacgtcagcgaagccgattgcaaaacggaaccggaaaaggtgaagacctttgtcgaacgcaccggttgcgacatgctggcagtttctattggtaacgttcatggcctggacgatataccgcggatcgatatccccctgctgaagcgcattgccgaagtcagcccggtgccgctggttattcacggcggctccggtatcgccccggagatattacgcagtttcgttaattatcgcgtcgctaaagtgaatatcgccagcgatctgcgcaaagcgtttatcaccgcagtcggcaaagcgtatgtgaataatcacaacgaggcgaatctggcacgggtgatggcatcagcaaaaaacgccgtcgaggaagatgtgtatagcaaaatcctgatgatgaatgaggggcatcggttgggtaagtaa

SEQ ID NO: 4689 - DNA, 2736 bp, Escherichia coli
atgacgcatctggaactggttcccgtcccgcctgtcgcgcaactggcgggcgtgagccagcattatggaaaaaccgttgcgctgaacaatatcacactcgatattccggcccgttgcatggtcgggctgattggaccggatggtgtcggtaaatcgagcttgttgtcgttgatttccggtgcccgcgtcattgagcagggcagcgtgatggtgctgggcggcgatatgcgcgacccgaagcatcgccgcgacgtctgcccgcgcatcgcctggatgccgcaggggctgggcaaaaatctctaccacaccttgtcggtgtatgaaaacgtcgattttttcgcccgcctgttcggtcacgacaaagcggagcgggaagtgcgaattaatgagctgctgaccagcaccggattagcaccgtttcgcgatcgtccggcagggaaactctccggtgggatgaagcaaaaacttgggctgtgctgtgcgttaatccacgacccggaattgttgattcttgatgagccaacaacgggggttgacccgctctcccgcgcccagttctgggatctgatcgacagtattcgccagcggcagagcaatatgagcgtgctggtcgccaccgcctacatggaagaggccgaacgcttcgactggctggtagcgatgaatgccggaaaagtgctggcaactggcagcgccgaagagctgcgacagcaaacgcaaagcgccacgctggaagaagcatttattaatctgttaccgcaagcgcaacgccaggcgcatcaggcggtagtgatcccaccgtatcaacctgaaaacgcagagattgccatcgaagcgcgcgatctgaccatgcgttttggttccttcgttgccgttgatcacgtcaatttccgcattccacgcggggagatttttggttttcttggttcgaatggctgcggtaaatccaccaccatgaaaatgcttaccggattgctgcccgccagcgaaggtgaggcgtggctgttcgggcagccggttgatccaaaagatatcgatactcgtcgccgggtgggctatatgtcgcaggcgttttcgctctataacgaactcaccgtgcggcaaaacctggagttacatgctcgtctgtttcatatcccggaagcggaaattcccgcgcgagtggctgaaatgagcgagcgttttaagctcaacgacgtcgaagatgtattgccggagtcattgccgctcggcattcgccagcggctatcgctggcggtggcggtgattcatcgcccggagatgctaatcctcgatgagccgacttctggcgtcgatccggtggcgagggatatgttctggcagttgatggtggatctctcgcgtcaggacaaagtgactatcttcatctccacccactttatgaacgaagcggaacgttgtgaccgtatctcactgatgcacgctggaaaagtgctcgccagcggtacaccgccggaactggttgagaaacgcggagccgccagtctggaagaggcatttatcgcttatttgcaggaagcggcagggcagagcaacgaagccgaagcgccgcctgtggtacatgacactacccacgcgccacgtcagggattcagcctgcgccgtctgtttagctacagccgccgcgaagcgctggaactgcgacgcgatccggtacgttcgacgctggcgctgatgggaacggtgatcctgatgctgataatgggttatggcatcagtatggatgtggaaaacctgcgctttgcggtgcttgaccgcgatcaaaccgtcagtagccaggcgtggacgctcaatctctccggttcccgttactttatcgaacagccgccgctcaccagttatgacgagcttgatcgtcggatgcgtgcgggcgatatcacggtggcaattgagatccctcctaatttcgggcgcgatatcgcgcgtggtacgcccgtggaactcggtgtctggatcgacggtgcgatgccgagccgcgccgaaacggtaaaaggttacgtgcaggccatgcaccagagctggctacaggatgtggcgagccgacagtccacacccgccagccaaagcgggctgatgaatattgagacgcgctatcgctataacccggacgtaaaaagcctgccggcgattgttccggcggtgatcccgcttctgctgatgatgatcccgtcaatgctaagcgcccttagcgtggtgcgggaaaaagagctagggtcgattatcaacctttacgtgacccccaccacccgtagcgaatttttacttggcaaacagctgccatacatcgcgctggggatgctgaactttttcctgctctgcgccctgtcggtgtttgtgtttggcgtaccgcataaaggcagtttcctgactctcaccctggcggcgctgctgtatatcatcatcgccaccggaatggggctgctgatctccacctttatgaaaagccagattgccgccattttcggtacggcaattatcacgttgatcccggcgacacagttttccgggatgatcgatccggtagcttcgctggaaggtccaggacgttggatcggcgaggtttatcccaccagtcattttctgactatcgcccgcggaacgttctcgaaagcgctggatctgactgatttgtggcaactttttatcccgttgctgatagccataccgctggtgatgggcttaagcatcctgctgctgaaaaaacaggagggatga

SEQ ID NO: 4690 - DNA, 1470 bp, Escherichia coli
atgaatacaacaacacccatggggatgctgcagcaacctcgcccatttttcatgatcttttttgtcgagttatgggagcgattcggctactacggcgtgcagggcgtactggcggttttcttcgttaaacagcttgggttctcgcaagaacaggcttttgtcacttttggtgcttttgctgcgctggtctatggcctcatttccattggtggctatgttggcgaccacctgctgggaaccaaacgcaccattgttctcggagcacttgtgctggcgattggctacttcatgaccggcatgtcgctacttaagcctgacctgattttcatcgccctggggactatcgctgtcggtaacggcctgtttaaagctaacccagccagcttgctttcgaagtgctacccgccgaaagatccgcggcttgatggcgcattcaccctgttctatatgtcgatcaatatcggctcgttgatagcgttatcgctggcccctgtgatcgctgataaattcggctattcagtcacctacaacctgtgcggtgcagggttaattatcgcattactggtttacatcgcctgtcgtggaatggtgaaagacattggttctgaacccgacttccggccgatgagcttcagtaaactgttgtacgtattacttggcagcgtggtgatgatcttcgtctgcgcctggctgatgcacaacgtagaagtcgccaatctggttctgattgttctctccatcgtcgtcaccatcatcttctttcgtcaggcattcaagctggataaaaccgggcgcaataaaatgtttgtcgcctttgtcctgatgctcgaagcggtggtgttttacattctctacgcccagatgccaacgtcgctgaacttctttgccatcaacaacgtgcatcatgaaattctcggcttttccatcaacccggtcagcttccaggcgcttaacccgttctgggtggtactcgccagcccaatactggcaggcatttacacgcatctgggtaacaaaggcaaagatctctcgatgccgatgaagtttactctcggcatgtttatgtgctcactgggctttttgacggctgcagctgctggaatgtggtttgcggatgcccaggggctgacatcgccatggtttatcgtgctggtgtacttattccagagcttaggtgaactgtttattagcgcccttggcctggcgatgattgctgccctggtgccgcagcatttgatgggctttattctcgggatgtggttcctgacgcaggctgccgcgttcttgctgggcggctatgtggcaacatttaccgcagtaccagacaacattaccgatccacttgagacgttgcccgtctataccaacgtgtttggtaagattggcctggttacgctgggcgttgcagtagtgatgctattgatggtgccgtggctgaaacgcatgattgcgacgccggaaagccattaa

SEQ ID NO: 4691 - DNA, 174 bp, Escherichia coli
atgcatccgcttactcatccattgcctgtcacggcgcatgtctcattgttagatgacgactatctcactccggccagagcatcagttaacggcaccacccgtacttcagaccaggactttgaaagcgtttatgcgcattgccagagtgaaaatgtctcagagctaactggataa

SEQ ID NO: 4692 - DNA, 1029 bp, Escherichia coli
atgaaccactacacacgctggcttgagttaaaagaacaaaatcccggaaagtacgcgcgtgacatcgcaggtttaatgaatatcagcgaagcagaactggcatttgcacgcgtcacgcacgacgcgtggcggatgcgcggcgatattcgtgaaattctggcggcgctggaaagcgttggtgaaaccaaatgtatttgtcgtaatgaatatgcagtccatgagcaagttggctcgttcacaaaccagcatttgaacggacatgccggattgatcctcaatccgcgcgcgctggatttacgtctgtttctcaatcaatgggccagtgttttccacatcaaagaaaacacggctcgtggcgaacgccagagtattcagttctttgatcatcagggcgatgcattactaaaagtttatgccaccgacaataccgatatggcggcatggagtgagcttctggcacggtttatcaccgatgagaatacgccgcttgagttaaaagccgttgatgcgccagttgttcaaacgcgagccgatgccagtgtggtcgagcaagagtggcgggggatgaccgacgttcatcagttttttacgttgctcaagcgccacaacctgacgcgccaacaggcgttcaatctggtggcagacgatttggcctgcaaagtatccaacagtgcgttggcgcaaattcttgaatctgcacagcaggatggcaatgaaatcatggtgtttgttggcaaccgtggctgcgtacagattttcaccggtgtggtagaaaaagtggtgccaatgaaaggttggctgaatattttcaacccgacgtttacccttcatctattagaagagagcattgctgaagcctgggttacccgtaaaccgaccagcgatggtcacgtaaccagtctggaattgtttgcccatgatggtacgcagatagcgcaactttatggtcaacgtacagaaggtgaacaggagcaagcgcaatggcgtaagcaaattgcttcgttgataccggaaggcgttactgcataa

SEQ ID NO: 4693 - DNA, 1182 bp, Escherichia coli
atgtctcatcgccgctcaaccgttaaaggctcactctcttttgccaaccctacggttcgcgcctggttattccagatccttgccgttgttgctgttgtcggcattattggttggttatttcacaacactgtaacgaatctcagtaatcgcggcataacatcaggatttgcttttcttgaccgcggggccggttttggcatcgttcagcatttgattgattatcagcaaggcgacacttacggacgcgtttttattgtcggcctgctcaatacgctactggtttctgcattgtgtattgtgttcgcttctgttttgggcttctttatcggtctggcgagactttcggataactggctgctacgaaagctttccacaatttatattgagatcttccgtaatattccgccattgctgcaaatcttcttctggtactttgccgtgttgcgcaatttgcccgggccacgccaggcagtgagcgcactggatttggtgtttctgagcaatcgtgggctttatattccgtcgccgcagctgggagatgggtttcttgcgtttatcctggctgttgttatagctatagtcctttctgttgggctattccgctttaataaaacacaccagataaagaccggacaactgcgccgcacctggccgattgccgcagtgttgatcattggtttgcctttactggcgcaatggctttttggcgcagcactacactgggatgtcccagcccttcgaggctttaatttccgcggcgggatggttttaattcctgaactggcagccttaacgctagcactttcgatttatacctctgcatttatcgccgagattatccgcgcagggatccaggcagtgccttatggtcaacatgaagcggctcgatcactgggattacccaacccggtaacgctacgccgggtcattattccccaggcattgcgggtgattattccaccgttaaccagccagtatctcaacatcgtcaagaactcctctcttgccgccgctattggctatcccgatatggtttcgctgtttgctggcaccgtgctgaaccaaacggggcaagccatcgagacgatagccatgaccatgtcggtctatctgattatcagcctgactatctcgctgctgatgaatatctataaccgccgcatcgcgatcgttgaacgctaa

SEQ ID NO: 4694 - DNA, 3105 bp, Escherichia coli
atggcaaacttttttattcgacggccgatatttgcatgggtgctggccattattctgatgatggcgggcgcactggcgatcctacaattgcccgtcgcccagtatccaaccattgcgccgcctgcggtttctgtttcggcaaactatccgggtgctgatgcgcagaccgtgcaggatacagtgacgcaggttatcgaacagaatatgaacggtatcgataacctgatgtatatgtcctccaccagcgattccgccggtagcgtgacaattacccttaccttccagtccgggaccgatcctgatatcgcgcaagtacaggtgcagaacaaactccagctcgccacgccgttgctgccgcaggaggttcagcagcaggggatcagtgttgaaaagtccagtagcagctatttgatggtggcgggctttgtctctgataaccctggcaccacacaggacgatatctcggactatgtggcctctaacgttaaagatacgcttagccgtctgaatggcgtcggtgacgtacagcttttcggcgcacagtatgcgatgcgtatctggctggacgccgatctgctaaacaaatataaactgacaccggttgatgtgattaaccagttgaaggtacagaacgatcagatcgctgccggacagttgggcggaacgccagcgttaccagggcaacagttgaacgcctcgattattgctcagacgcggttaaaaaatccggaagaattcggcaaagtgaccctgcgcgtaaacagtgacggctcggtggtgcgtctgaaagatgtcgcacgggttgaacttggcggtgaaaactataacgttatcgctcgcatcaacggaaaaccggcggcgggcctggggattaagctggcaaccggcgcgaatgctctcgataccgcgaaagccattaaggcaaaactggcggaattacagccattcttcccgcagggaatgaaggttctttacccttatgacaccacgcctttcgtccagctttctatccaggaagtggtgaaaacgctgttcgaagccattatgctggtgttcctggtgatgtatctgttcttgcagaacatgcgggcaacattgatacccaccattgctgtacctgtcgtgttgttagggacatttgccatactcgccgcttttggttactccatcaatacgctaacgatgtttgggatggtacttgccatcggacttcttgttgatgatgcgatagtcgttgtggagaacgtcgagcgcgtaatgatggaggataaactcccccccagagaagcgacggaaaaatcgatgtcgcaaatccagggcgcgctggtaggtatcgcgatggtactgtcggcggtatttattccgatggcattcttcggtggctcaacaggggcaatttatcgccagttctctatcactattgtttcagcaatggcgctttcagtactggttgcgctgattctcacccccgcgttatgtgcaacattgctgaaaccagtctctgccgagcatcacgaaaataagggaggattcttcggctggtttaacaccactttcgatcatagcgttaatcactacaccaatagcgttggcaaaatcctcggttccacagggcgatatttactgatctatgcgctgattgttgcaggaatggtggtgttgtttttacgtcttccgtcttccttcttacctgaagaggatcagggtgtctttctgaccatgattcagttacccgctggcgcgacgcaagagcggacgcaaaaagtgttggatcaagtgacggattactatctgaagaacgagaaagcgaacgttgaaagtgtctttacagttaacggctttagcttcagcggccaggcacaaaacgccggtatggccttcgtcagtctgaaaccgtgggaagagcgtagtggtgacgaaaacagtgcggaagcagtaatccatcgtgccaaaatggaattgggcaagatccgcgacggttttgtcattccatttaatatgccagccattgttgaactaggcacggcaacgggtttcgactttgagttaattgatcaggctgggctgggtcacgatgccctgacccaggcccgtaaccagttgcttggcatggcggcgcaacatcctgccagcttagtcagcgtgcgccctaatggcctggaagacaccgcgcagtttaaactggaagttgaccaggaaaaggcgcaggcattaggtgtttcactttctgacatcaatcagaccatttcaacggcgttgggtgggacttacgttaacgacttcatcgaccgtggtcgcgtgaaaaaggtgtatgttcaggcggatgccaaattccgtatgctgccagaagatgtcgataaactttatgtccgcagcgccaacggcgaaatggtgccattctctgcctttaccacttcacattgggtgtatggctctccgcgactggaacgctacaacggtctgccgtcaatggagattcagggggaagccgcgccaggaaccagttccggcgatgctatggcgttgatggaaaaccttgcgtcaaaattaccggcgggcattggttatgactggacgggtatgtcatatcaggaacgtttatcgggaaaccaggctcccgctctggtagcaatttcctttgtggttgttttcctgtgccttgctgcactctatgaaagctggtcaattcctgtctcggttatgttggtcgtgccgttagggattgtcggcgtgctactggcggcaacactctttaatcaaaaaaatgacgtctactttatggtgggcttgctaacgacaattggcttgtcggccaaaaacgctattttgattgttgagttcgctaaagatctcatggagaaagagggtaaaggtgttgttgaagcgacactaatggcagtacgtatgcgtctgcgtcctatcctgatgacctctctcgcctttattctcggcgtattaccgctggctatcagtaacggggccggcagtggcgcgcaaaacgcagtcggtatcggggtaatgggcggaatggtctctgcaacgttgctggcaatcttcttcgtgccagtgttctttgtggtgatccgtcgatgctttaaaggataa

SEQ ID NO: 4695 - DNA, 885 bp, Escherichia coli
atgagaacaggatgtgaaccgacccgatttggtaatgaagcaaagaccatcatccagggtgatgcattaaccgaacttaaaaagctccccgccgaaagtgtcgatctgatctttgccgacccaccgtataacatcggtaaaaattttgatggtctgatcgaagcctggaaagaagatctgtttatcgactggctgtttgaagtgattgcagagtgccatcgcgttctgaaaaagcagggcagcatgtacatcatgaatagcacggaaaacatgccctttatcgatctccagtgccgcaagctttttaccatcaaaagtcgcatcgtctggtcatatgacagttctggagtgcaggcgaaaaaacactacggctccatgtacgaacccatcctgatgatggtgaaagacgcaaagaactacacgttcaacggtgatgctattctggtagaagccaaaaccggatcgcagcgcgcgttgatcaattatcgcaaaaatcctccacagccttacaatcatcaaaaagtaccgggtaacgtctgggattttccgcgcgtgcgttatttgatggatgaatatgaaaaccacccgacgcaaaaaccggaagccttgctgaaacgcattattctcgcctcttccaacccaggcgatatcgttctcgacccgtttgccggtagctttactaccggtgccgtagccgtcgccagcgggcgaaaattcattggtattgagatcaacagcgagtacatcaaaatggggcttcgacggctggatgtcgcgtcgcattactctgcggaagaactggcgaaagtgaaaaaaagaaagaccggcaacctgtcaaaacgaagccggttaagcgaagttgaccccgatctcattgcaaagtaa

SEQ ID NO: 4696 - DNA, 519 bp, Escherichia coli
atgagtaagaaaatcgccgttttaatcactgatgaatttgaggattcagaatttacttcacccgcagacgagttccgtaaagccggacacgaagtgattaccattgaaaaacaagcgggtaaaacggtgaaaggcaaaaaaggagaagccagcgtggccatcgataaatccatcgatgaagtgacgcccgcagagttcgatgccctgctgctaccgggcggtcattcaccagattatctgcgtggtgacaaccgttttgtcaccttcacacgcgattttgtgaacagcggcaaacctgttttcgccatctgtcacggtccccagttgctgatcagcgccgatgtgatccttggtcgtaagctgaccgccgttaaaccgatcgtgattgatgttaaaaacgcgggcgcggaattttacgatcaggaagtggtggtcgataaagatcagctggttaccagccggacaccggacgatctgccagcgtttaaccgcgaggcgttacgcctgctcggtgcctga

SEQ ID NO: 4697 - DNA, 879 bp, Escherichia coli
atggcatctaatcaaaccaccctgccgaacgtcagtgaaaacgaagaaacactgctgactggcgtcaatgaaaacgtgtatgaagatcagagcattggcgcagagctgacgaaaaaagatatcaaccgcgtcgcctggcgttccatgctgttacaggcttctttcaactacgaacgtatgcaggcttccggctggctgtacggcctgctgccagcactgaaaaagatccacactaataaacgcgacctggcgcgcgccatgaaggggcatatgggtttcttcaatacccatccgtttctggtgacgtttgttatcggcattatccttgcgatggagcgttctaagcaggacgttaacagtattcagagcaccaaaattgccgtcggtgcgccgctcggcgggattggcgatgcgatgttctggctaacgctactgccgatttgtggcgggataggtgcaagcctcgcgctacaaggctctattcttggcgctgtcgtctttattgtgctgttcaacgtggtgcacctggggctgcgttttggtctggcgcattatgcttaccgcatgggcgtggcggcgattccactcattaaagcaaataccaaaaaagtcggccatgcggcatctatcgttgggatgacggtaatcggcgcgctggtggcaacctatgttcgtttaagcaccacgctggaaatcaccgcgggcgacgcagtggttaagttacaggctgatgttatcgacaaactgatgccagccttcttaccgctggtctacaccctgaccatgttctggctggtacgccgcggctggagtccgctgcgcctgattgcgattaccgtggttctcggcatcgtcggtaaattctgccatttcctttaa

SEQ ID NO: 4698 - DNA, 1572 bp, Escherichia coli
atggccaacatcgaaatcagacaagaaacgccaactgcgttttatataaaagttcacgacacagataatgtggcaattattgttaatgataatggcctgaaagcaggaacgcgttttccggatgggctggaattaattgaacatattccccaggggcataaagtcgcattgctggacattccggctaatggtgaaattattcgttatggcgaggtgattggttacgccgtgcgcgcaatcccacgcggaagctggatcgacgaatcaatggttgtactaccggaagcgccgccgttacatacactgccactggcaaccaaagtcccggaacccttaccgccgctggaaggatacacctttgagggctatcgcaatgccgatggcagcgtgggcaccaaaaacctgctcggcatcaccaccagcgtccactgtgtggcaggcgtggtggactacgtagtaaaaatcattgaacgcgatctgctaccgaaatacccgaacgtcgatggcgtggtggggctgaatcatttgtacggttgtggcgtggcgattaacgcacccgcggcagttgtacctattcgtaccattcacaatatttcgctgaaccctaactttggcggcgaagtaatggtgattggtctgggttgtgaaaagttgcagcctgaacgcctactgactggaacggatgatgtgcaagctattccagtagaaagcgccagcattgtcagtttgcaggatgaaaagcatgtcggttttcagtccatggtcgaggatattttgcaggtcgccgaatgccatctacaaaaactgaatcaacgtcagcgagaaacctgtccggcttcagaactggttgtcggcatgcagtgcggtggcagcgatgcgttttctggcgtaacggcaaacccggcggttgggtatgcgtctgatctattggtgcgctgcggcgcaacggtgatgttttcagaagtcacagaagtgcgtgacgcgatacatctgctgacaccacgcgcagtgaacgaagaggtcggcaaacggctgctggaggagatggagtggtacgataactatctcaatatgggaaaaaccgatcgcagcgccaacccttcgccggggaacaagaaaggcggtctggcaaatgtggtggagaaggcactcggctccattgctaaatcgggtaaaagtgcaattgttgaagtgctgtcgcccggccaacgcccgactaaacgcggattaatttacgccgcgacgccagccagcgattttgtctgtggcacgcaacaggtggcttcgggtatcaccgtgcaagtgtttacgaccggtcgtggtacgccgtacggcctgatggcggtacccgtcattaaaatggcgacccgcaccgagctggcgaaccgctggtttgatttaatggatattaacgcgggcactatcgctaccggcgaagaaaccattgaagaagtgggctggaagttgttccactttattctcgacgtcgccagcgggaagaagaaaactttctcggatcaatggggactgcataaccagctggcggtgtttaacccggcaccggtgacctga

SEQ ID NO: 4699 - DNA, 1335 bp, Escherichia coli
atgatgctggacaccgttgacgaaaaaaagaaaggcgtgcatacccgctatttaatattactgattatttttattgttaccgccgttaactacgccgatcgtgcaacactgtctattgctggtaccgaagtggcaaaagagttgcagttaagtgcggtttcgatgggttacatcttctctgcttttggctgggcctacttgctgatgcaaattcccggcggctggctgcttgataagtttggctcgaagaaagtttacacttacagcctctttttctggtcgctgttcaccttcctgcaaggctttgtcgatatgtttccgctggcctgggctgggatctccatgttctttatgcgatttatgctggggttctcggaagcgccatcattcccggcgaacgcccgtattgtcgccgcctggttcccgacgaaagaacgtggtactgcctccgccatctttaactcggcgcaatatttctcgttggcgctcttttcgccgctgcttggctggctgactttcgcctggggctgggagcacgtctttaccgttatgggggtgattggttttgtgctgacggcgctgtggatcaagttgattcataatccgacagatcacccacgtatgtctgcggaagagctgaagtttatctcggaaaatggcgcggtggtcgatatggaccacaaaaagccgggcagtgcggcagcaagcggacccaaactgcattacatcaagcaattgctctctaaccgcatgatgctgggcgtatttttcggacaatattttatcaacaccatcacctggttcttcctcacctggttcccaatttatctggtgcaggaaaaaggcatgtcgattctgaaagtgggtctggtcgcctcgattccggcactgtgtggctttgcgggcggcgtgctgggaggtgtcttctcggattatctgatcaaacgcggtttgtccctgaccctggctcgtaagctaccaattgtgctgggaatgttgctggcttccaccatcatcttatgtaactacaccaacaacaccacgctggtggtcatgctgatggcgctggctttctttggtaaaggatttggtgcgctgggctggccagtgatttctgacaccgcgccgaaagagattgttggcctctgcggcggcgtctttaacgtctttggcaatgttgcctccattgtcactccactggtgattggctacctggtaagtgaactgcactccttcaatgcagcactggtttttgtgggatgttcagcgctgatggcgatggtctgctacctcttcgtagtcggcgacattaaacgtatggaattgcagaaataa

SEQ ID NO: 4700 - DNA, 1146 bp, Escherichia coli
atgaaaatcgtaatcgccccagactcttataaagaaagtttatctgccagcgaggttgcgcaggcgatagaaaaaggatttcgggaaatttttcctgatgcacagtatgtttctgttccggttgccgacggtggtgaaggaacggtggaagcgatgattgcagccacccagggggctgaacgtcacgcctgggttacagggccgctgggcgagaaagtgaatgccagttgggggatctccggcgatggcaaaaccgcgtttatcgaaatggcggcggccagtgggctggaactggtagctgcggaaaaacgcgatccactcgtgaccacttcacgcggtactggtgagttaatcctgcaggcgctggagagcggtgcgacaaacattattatcggcattggcggcagcgccaccaacgacggcggcgcaggcatggtacaggcgctgggggcgaaattatgcgatgccaacggcaatgaaattggttttggcggcggtagtcttaatactctgaatgatattgatatttccggtctcgatccgcgcttaaaagattgtgtcatccgcgtcgcttgtgatgtcaccaacccgttagtcggcgacagtggtgcttcgcgcatctttggcccacaaaagggagccagtgaggcgatgattgtcgagctggataataacctctctcactatgccgatgtcattaaaaaagcgctgcatgttgatgtgaaagatgtccccggcgcaggagctgcgggcggtatgggcgcggcgctgatggcgtttcttggtgcagaactgaaaagtggtattgaaatcgtcactacggcgctgaatctggaggaacatattcacgattgtacgctggtgatcactggtgaagggcgtattgatagccagagtattcacggcaaggtaccgattggtgtcgcaaacgtggcgaagaagtaccataaaccggtgattggcattgcgggtagcctgaccaatgatgttggcgttgtacatcagcatggcattgatgcggtcttcagcgtactgaccagcattggtacgttagacgaagcattccgcggagcttatgacaatatctgccgtgcttcacgtaatatcgccgcgacactggcgattggaatgcgcaacgcggggtga

SEQ ID NO: 4701 - DNA, 777 bp, Escherichia coli
atggaaatcactgaaccacgccgtttgtatcaacaacttgccgctgatctgaaagagcgcatcgaacagggcgtctatctggtgggtgataaactgcctgccgaacgctttattgccgatgaaaaaaacgtcagccgcaccgtggttcgtgaagccatcatcatgctggaagttgaaggctatgtcgaagtgcgtaaaggttcaggtattcatgtggtttccaaccagcctcgccatcagcaggcggctgacaataatatggaattcgccaattacggtccgtttgagttgctccaggctcgccagctcatcgaaagtaatattgccgagttcgcggcaactcaggtaacgaaacaggacatcatgaaattgatggccatccaggagcaggcgcgcggcgaacaatgcttccgtgattccgagtgggatttgcagttccatattcaggtagccctggcgacgcagaactccgccctggcggctatcgttgaaaaaatgtggacccagcgtagtcataacccgtactggaaaaaactgcacgaacacattgatgcccgtaccgtcgataactggtgtgatgaccacgatcaaatcctcaaggcgctgattcgcaaagatcctcatgctgctaagctggcaatgtggcagcacctggaaaacaccaagatcatgttatttaacgaaaccagcgacgatttcgagttcaatgccgaccgctatctgttcgccgaaaacccggtggtgcatctcgatacagccaccagcggcagtaaatga

SEQ ID NO: 4702 - DNA, 2019 bp, Escherichia coli
atgagctatccgtcgctgtttgccccgctggatttaggttttaccacgttaaaaaaccgcgtgttgatgggctcaatgcacaccgggctggaggaatacccggacggcgctgaacggctggcagcgttttatgccgaacgcgcccgtcacggcgtggcgttgattgtcagcggcggtatcgcaccagatttaacaggcgttggcatggaaggcggtgcaatgctcaatgacgccaaccagatcccacaccatcgcaccattaccgaagccgtacatcaggaaggcggcaaaatcgccctgcaaattttgcataccgggcgctacagctaccaaccgcatctggtcgcaccctccgcattgcaggcccccatcaaccgtttcgttcctcacgaactcacccatgaagagatcctgcaactgatcgacgatttcgcccactgcgcgcaattggcacgggaggcaggatacgacggtgtagaggtgatggggtccgaagggtatttgatcaacgaatttctgacgctgcgcaccaatcagcgtagtgaccagtggggcggcgattaccgcaaccggatgcggtttgccgtagaagtagtgggtgcggtgcgcgaacgtgtcggcaacgacttcattattatctaccgtttgtcgatgctcgacctggtcgaaggcggcggtacttttgccgaaacggtagagctggcgcaggccattgaagcggcgggcgcaacgattatcaacaccggcattggctggcatgaagcacgtattccgaccattgccacgcccgtgccgcgcggcgcatttagctgggtcacgcgcaaactgaaaggccacgtttcgctgccgctggtgaccaccaaccggattaacgatccgcaggttgccgacgacattctctcgcgcggtgatgcggacatggtatcgatggcgcgaccgtttctcgctgatgcggagctgctgtcaaaagcgcaatcgggacgagccgatgagatcaacacttgtattggctgcaaccaggcctgtctcgatcagatcttcgttggcaaagtcacctcgtgcctggtgaatcctcgcgcctgccatgaaaccaaaatgccaatccttccggccgtgcagaaaaaaaatctggcggtggtcggtgcgggacctgctgggctggcgtttgccattaacgcggcggcgcgtgggcatcaggtaacattgtttgatgcgcacagcgagatcggcgggcagtttaatatcgccaaacagatccccggcaaagaggagttttacgaaacgctgcgctattaccgccggatgatcgaagtgacgggtgtgacactgaaacttaatcacaccgtgaccgcagatcagttaaaggcgttcgatgaaacgatcctcgccagtgggatcgtaccgcgcattccgcccatcgacgggatcgatcatccgaaggtgttgagttatctcgacgtactgcgcgacaaagcgcaggtaggcaacaaagttgccatcatcggttgtggcgggattggttttgatacggcgatgtatttaagtcagccgggcgaatccaccagccagaatatcgccgggttctgtaatgaatgggggatcgacagcagcctgcaacaggctggtggcttaagcccgcagggaatgcagatcccgcgtagcccacggcagattgtgatgctccagcgcaaagccagcaaaccgggacaggggttaggcaaaaccaccggctggatccatcgcaccaccctgctctcgcgcggtgtgaaaatgatcccaggcgtaagttatcagaagattgacgatgacgggctgcatgtggtgatcaacggcgaaacgcaggtattagcagtggacaatgtggtgatctgcgcagggcaagagccaaaccgcgcattggcgcaaccgctgattgatagcgggaaaactgtgcatttaattggcggctgcgatgtagctatggagctggacgcacgacgggcaattgcccagggaacacggctggcgctggagatttaa

SEQ ID NO: 4703 - DNA, 1434 bp, Escherichia coli
atgtctgataccaaacgtaatacaatcggcaaattcggcttgctctcgctgacttttgccgccgtttacagctttaacaacgttatcaataataatattgagcttggactggcctcggcaccgatgtttttcctcgcgacgattttttattttattcccttctgtctgatcattgcagaatttgtttcgttaaataaaaactcagaagccggtgtctacgcgtgggtaaaaagttcgctgggcggacgttgggcatttattactgcctatacctactggttcgtaaacctgttctttttcacctcgctgttaccgcgcgttattgcttatgcttcgtatgccttcctcggctacgaatatattatgacgccggttgccaccaccattatcagtatggtgctgttcgccttctccacctgggtttctaccaatggggcgaaaatgctggggccaattacctccgtcacttcaacgctgatgctgctgttaacgctctcctacattttactggcaggtacggcactggttggcggcgtacagcctgctgaccccatcactgttgacgcgatgatcccgaacttcaactgggcgttcctcggcgtgaccacctggatctttatggccgcaggtggcgcggagtccgtcgcggtgtacgttaacgacgtcaaaggcggttcgaaatcgttcgttaaagtgatcatcctcgccgggatttttatcggcgtactgtattccgtctcctcggtgctgattaacgtcttcgtcagcagcaaagagttgaaatttactggcggatcggtgcaggtattccacggcatggcggcgtattttggtctaccggaagcgttgatgaatcgctttgtcggtctggtgtcctttaccgcgatgttcggttccctgctgatgtggacggcaacgccggtgaaaattttcttctccgaaatcccggaaggcatctttggtaagaaaaccgtcgaactgaacgaaaacggcgttccggcgcgcgcagcgtggatccagttcctgatcgtcatcccgctgatgattatcccgatgctcggttccaataccgtgcaggatctgatgaatactattattaatatgactgccgcagcgtccatgcttccgccgttattcatcatgctggcttacctgaatttacgcgccaaattagatcacctgccacgcgatttccgtatgggctcccgccgcaccggtattatcgttgtttcaatgctgattgcgatatttgccgtagggtttgtcgcttcgacattcccgactggcgcgaatattctgaccatcattttttataacgtcggcggtattgttatcttcctcggctttgcgtggtggaaatacagtaaatatataaagggattaacggctgaagagcgccatattgaagcgacgccagccagaaatgttgattaa

SEQ ID NO: 4704 - DNA, 3093 bp, Escherichia coli
atgaatcgctgggaaaacattcagctcacccacgaaaaccgacttgcgccgcgtgcgtactttttttcatatgattctgttgcgcaggctcgtacttttgcccgtgaaaccagcagcctgtttctgctcttaagcggtcagtggaatttccacttttttgaccatccgctgcaagtgccagaagccttcacctctgagttaatggctgactgggggcatattaccgtccccgccatgtggcaaatggaaggtcacggcaaactgcaatataccgacgaaggttttccgttccccatcgatgtgccgtttgtccccagcgataacccaaccggtgcctatcaacgtattttcaccctcagcgacggctggcagggtaaacagacgctgattaaatttgacggcgtcgaaacctattttgaagtctacgttaacggtcagtatgtggggttcagcaagggcagtcgcctgaccgcagagtttgacatcagcgcgatggttaaaaccggcgacaacctgttgtgtgtgcgtgtgatgcaatgggcggactctacctacgtggaagaccaggatatgtggtggtcggcggggattttccgcgatgtttatctgatcggaaaacaactcacgcatattaacgatttcaccgttcgtaccgactttgacgaagcctattgcgatgccacactttcctgcgaagtggtgctggaaaatctcgccgcctcccctgtcgtcacgacgctggaatataccctgtttgatggcgaacacgtggtgcacagcagcgccattgatcatttggcaattgaaaaactgaccagcgccagttttgcttttactgtcgaacagccgcagcaatggtcagcagaatccccttatctttaccatctggtcatgacgctgaaagacgccgacggcaacgttctggaagtggtgccacaacgcgttggcttccgtgatatcaaagtgcgcgacggtctgttctggatcaataaccgttatgtgatgctgcatggcgtcaaccgccacgacaacgatcatcgcaaaggccgcgccgttgggatggatcgcgtcgagaaagatctccagttgatgaagcagcacaacatcaactccgtgcgtaccgctcactacccgaacgatccacgtttttacgaactgtgcgatatctacggcctgtttgtgatggcggaaaccgacgtcgaatcgcacggctttgctaatgtcggcgatatcagccgtattaccgacgatccgcagtgggaaaaagtctacgtcgagcgcattgttcgccatattcacgcgcagaaaaaccatccgtcgatcatcatctggtcgctgggcaatgaatccggctatggctgtaacatccgcgcgatgtaccatgcggcgaaggcgctggatgacacgcgactggtgcattacgaagaagatcgcgatgctgaagtggtcgatattatttccaccatgtacacccgcgtgcctctgatgaatgagtttggtgaatacccgcatccgaagccgcgcatcatctgtgaatatgctcatgcgatggggaacggaccgggcgggctgacggagtaccagaacgtcttctataagcacgattgcattcagggacattatgtctgggaatggtgcgaccacgggatccaggcgcaggatgacaacggcaacgtctggtacaaattcggcggcgactacggcgactatcccaacaactataacttctgtcttgatggtttgatctattccgatcagacgccgggaccaggcctgaaagagtacaaacaggttattgcgccggtaaaaatccacgcgctggatctgactcgcggcgagttgaaagtcgaaaataaactgtggtttaccacgcttgatgactacaccctgcacgcagaggtgcgcgccgaaggtgaaacgctcgcgacgcaacagattaaactgcgcgacgttgcgccgaacagcgaagcccccttacagatcacgctgccgcagctggacgcccgcgaagcgttcctcaacattacggtgaccaaagattcccgcacccgctacagcgaagccgggcattctatcgccacttatcagttcccgctgaaggaaaacaccgcgcagcctgtacctttcgcaccgaataacgcccgtccgctgacgctggaagacgatcgtttgagctgtactgttcgcggctacaactttgcgatcaccttctcaaaaacgagtggtaaaccgacatcctggcaagtgaatggcgagtcgctgctgacccgcgagccaaagatcaacttcttcaagccgatgatcgacaaccataagcaggagtacgaagggctgtggcagccaaatcatttgcagatcatgcaggagcatctgcgcgattttgtcgttgagcaaagtgatgatgaagtgttgctagtcagccgcacggttattgccccaccggtgtttgacttcgggatgcgctgcacctacatctggcgcatcgctgccgatggccaggttaatgtggcgctttccggtgaacgttatggcgactatccgcacatcattccgtgcatcggtttcaccatgggaattaacggcgaatacgaccaggtggcgtattacggacgtggaccgggcgaaaactacgccgacagccagcaggctaacatcattgatatctggcgcagtaccgtcgatgccatgttcgagaactatcccttcccgcagaacaacggcaaccgtcagcatgtccgctggacggcactgactaatcgccacggcaacggtctgctggtggttccgcagcgaccaattaacttcagcgcctggcactatacccaggaaaacatccacgctgcacagcactgtaacgagcttcagcgcagtgatgacatcaccctgaatctcgaccaccagttgcttggcctcggctctaactcctggggcagcgaggtgctggactcctggcgcgtctggttccgtgacttcagctacggctttacgttgctgccggtttctggcggagaagctaccgcgcaaagcctggcgtcgtatgagttcggcgcagggttcttttccacgaatttgcacagcgagaataagcaatga

SEQ ID NO: 4705 - DNA, 423 bp, Escherichia coli
atgggggatctgtacagtcatcgctgggaaatcgaactgggatacagggagataaaacagacgatgcaacggagcaggctgacgctgagaagtaaaaagccggagcttgtggagcaagagctgtggggtgtcttactggcttataatctggtgagatatcagatgattaaaatggcggaacatctgaaaggttactggccgaatcaactgagtttctcagaatcatgcggaatggtgatgagaatgctgatgacattgcagggcgcttcaccgggacgtataccggagctgatgcgcgatcttgcaagtatgggacaacttgtgaaattaccgacaagaagggaaagggccttcccgagagtggtaaaggagaggccctggaaataccccacagccccgaaaaagagccagtcagttgcttaa

SEQ ID NO: 4706 - DNA, 423 bp, Escherichia coli
atgaaactttccctgacgccggaagccgacagcgttaacgtacaggcactgaatatggggcgaattgtcgttgacattgatggtgttaatctcgctgaactgattaataaggccgctgaaaacggtgattcactccgcgtggtggatgaccgtgactctaccgaaacaccggcaacttatgccagccctcatcagttgccggaagacaatacagtgatacagagcgtgatgccattaaccactgaaacagcgctggatatcctcattgcgtggctgcaggacaatatcgactgcgggtccggaattattttcgacaacgatgaggataaaacggattcggcagcactgctgccctgtattgaacaggccagggaggatatccgtaccctgcaccaactgcaacttatgcaccagaaccggtga

SEQ ID NO: 4707 - DNA, 564 bp, Escherichia coli
atgtcagatatcacaatcccccacccgaacgcggtcaacgggcatacagccgttatctgttccacaagtatcagacacatcctggctgtacgaaagagtacactactgcaaatcgacacgcttatccggcaactgacagaaatctcagcactgacggaaaatattggcggtaaagccgccccggactgggcgatgaaacagaattttcgctgtggttgctggatgatggagaaaccagaaacagcaatgaaagccattacccggaatcttgagcgcgaaatctggcgtaacctgatgcagcgttccgggatgttttccttaatggatgcacaggcacgtgatacagggttcaggtcactggaatatgataattttccggaaatcagcgaagcgaacattctgagcacatttaaacaactgcaccagaataaggatgagctgtttgagcggggggagatcaatgccttcagaggactgagccgggattacaaaaccaggccgccctgcaaatttagtaataaaattatcatcaacaacctggtgagatgggaccggtggggataa

SEQ ID NO: 4708 - DNA, 1539 bp, Escherichia coli
atgcaacaacctgtagttcgcgttggcgaatggcttgttactccgtccataaaccaaattagccgcaatgggcgtcaacttacccttgagccgagattaatcgatcttctggttttctttgctcaacacagtggcgaagtacttagcagggatgaacttatcgataatgtctggaagagaagtattgtcaccaatcacgttgtgacgcagagtatctcagaactacgtaagtcattaaaagataatgatgaagatagtcctgtctatatcgctactgtaccaaagcgcggctataaattaatggtgccggttatctggtacagcgaagaagagggagaggaaataatgctatcttcgcctccccctataccagaggcggttcctgccacagattctccctcccacagtcttaacattcaaaacaccacaacgccacctgaacaatccccagttaaaagcaaacgattcactaccttttgggtatggttttttttcctgttgtcgttaggtatctgtgtcgcactggtagcgttttcaagtcttgaaacacgtcttcctatgagtaaatcgcgcattttgctcaatccacgcgatattgacattaatatggttaataagagttgtaacagctggagttctccgtatcagctctcttacgcgataggcgtgggtgatttggtggcgacatcacttaacaccttctccacctttatggtgcatgacaaaatcaactacaacattgatgaaccgagcagttccggtaaaacattatctattgcgtttgttaatcagcgccaataccgtgctcaacaatgctttatgtcggtaaaattggtagacaatgcagatggttcaaccatgctggataaacgttatgtcatcactaacggtaatcagctggcgattcaaaatgatttgctccagagtttatcaaaagcgttaaaccaaccgtggccacaacgaatgcaggagatgctccagcaaattttgccgcatcgtggtgcgttattaactaatttttatcaggcacatgattatttactgcatggtgatgataaatcattggatcgtgccagtgaattattaggtgagattgttcaatcatccccagaatttacctacgcgagagcagaaaaagcattagttgatatcgtgcgccattctcaacatcctttagacgaaaaacaattagcagcactgaacacagaaatagataacattgttacactgccggaattgaacaacctgtccattatatatcaaataaaagcggtcagtgccctggtaaaaggtaaaacagatgagtcttatcaggcgataaataccggcattgatcttgaaatgtcctggctaaattatgtgttgcttggcaaggtttatgaaatgaaggggatgaaccgggaagcagctgatgcatatctcaccgcctttaatttacgcccaggggcaaacaccctttactggattgaaaatggtatattccagacttctgttccttatgttgtaccttatctcgacaaatttctcgcttcagaataa

SEQ ID NO: 4709 - DNA, 1335 bp, Escherichia coli
atgagttctgccaagaagatcgggctatttgcctgtaccggtgttgttgccggtaatatgatggggagcggtattgcattattacctgcgaacctagcaagtatcggtggtattgctatctggggttggattatctctattattggtgcaatgtcgctggcatatgtatatgcccgactggcaacaaaaaacccgcaacaaggtggcccaattgcgtatgccggagaaatttcccctgcatttggttttcagacaggtgttctttattaccatgctaactggattggtaacctggcaattggtattaccgctgtatcttatctttccaccttcttcccagtattaaatgatcctgttccggcgggtatcgcctgtattgctatcgtctgggtatttacctttgtgaatatgctcggcggtacctgggtaagccgtttaaccacgattggtctggtgctggttcttattcctgtggtgatgactgctattgttggctggcattggtttgatgcagcaacttatgcagctaactggaatactgcggataccactgatggtcatgcgatcattaaaagtattctgctctgcctgtgggccttcgtgggtgttgaatccgcagcagtaagtactggtatggttaaaaacccgaaacgtaccgttccgctggcaaccatgctgggtactggtttagcaggtattgtttacatcgctgcgactcaggtgctttccggtatgtatccgtcttctgtaatggcggcttccggtgctccgtttgcaatcagtgcttcaactatcctcggtaactgggctgcgccactggtttctgcattcaccgcctttgcgtgcctgacttctctgggctcctggatgatgttggtaggccaggcaggtgtacgtgccgctaacgacggtaacttcccgaaagtttatggtgaagtcgacagcaacggtattccgaaaaaaggtctgctgctggctgcagtgaaaatgactgccctgatgatcctcatcactctgatgaactctgccggtggtaaagcctctgacctgttcggtgaactgaccggtatcgcagtactgctgactatgctgccgtacttctactcttgcgttgacctgattcgttttgaaggcgttaacatccgcaactttgtcagcctgatctgctctgtactgggttgcgtgttctgcttcatcgcgctgatgggcgcaagctccttcgagctggcaggtaccttcatcgtcagcctgattatcctgatgttctacgctcgcaaaatgcacgagcgccagagccactcaatggataaccacacagcgtctaacgcacattaa

SEQ ID NO: 4710 - DNA, 2148 bp, Escherichia coli
atgaacgttattgcaatattgaatcacatgggggtttattttaaagaagaacccatccgtgaacttcatcgcgcgcttgaacgtctgaacttccagattgtttacccgaacgaccgtgacgacttattaaaactgatcgaaaacaatgcgcgtctgtgcggcgttatttttgactgggataaatataatctcgagctgtgcgaagaaattagcaaaatgaacgagaacctgccgttgtacgcgttcgctaatacgtattccactctcgatgtaagcctgaatgacctgcgtttacagattagcttctttgaatatgcgctgggtgctgctgatgatattgctaacaagatcaagcagaccactgacgaatatatcaacactattctgcctccgctgaccaaagcactgtttaaatatgttcgtgaaggtaaatatactttctgtactcctggtcacatgggtggtactgcattccagaaaagcccggtaggtagcctgttctatgatttctttggtccgaacaccatgaaatctgatatttccatttcagtatctgaattgggttctctgctggatcacagtggtccacacaaagaagcagaacagtatatcgctcgcgtctttaacgcagaccgcagctacatggtgaccaacggtacttccactgcgaacaaaattgttggtatgtactctgctccggcaggcagcaccattctgattgaccgtaactgccacaaatcgctgacccacctgatgatgatgagcgatgttacgccaatctatttccgcccgacccgtaacgcttacggtattcttggtggtatcccacagagtgaattccagcacgctaccattgctaagcgcgtgaaagaaacaccaaacgcaacctggccggtacatgctgtaattaccaactctacctatgatggtctgctgtacaacaccgacttcatcaagaaaacactggatgtgaaatccatccactttgactccgcgtgggtgccttacaccaacttctcaccgatttacgaaggtaaatgcggtatgagcggtggccgtgtagaagggaaagtgatttacgaaacccagtctactcacaaactgctggcggcgttctctcaggcttccatgatccacgttaaaggtgacgtaaacgaagaaacctttaacgaagcctacatgatgcacaccaccacctctccgcactacggtatcgtggcgtccactgaaaccgctgcggcgatgatgaaaggcaatgcaggtaaacgtctgatcaatggttccattgaacgtgcgatcaaattccgtaaagagatcaaacgtctgagaacggaatctgatggctggttctttgatgtatggcagccggatcatatcgatacgactgaatgctggccgctgcgttctgacagcacctggcacggcttcaaaaacatcgataacgagcacatgtatcttgacccgatcaaagtcaccctgctgactccggggatggaaaaagacggcaccatgagcgactttggtattccggccagcatcgtggcgaaatacctcgacgaacatggcatcgttgttgagaaaaccggtccgtataacctgctgttcctgttcagcatcggtatcgataagaccaaagcactgagcctgctgcgtgctctgactgacttcaaacgtgcgttcgatctgaacctgcgtgtgaaaaacatgctgccgtctctgtatcgtgaagatcctgaattctatgaaaacatgcgtattcaggaactggctcagaatatccacaaactgattgttcaccacaatctgccggatctgatgtatcgcgcatttgaagttctgccgactatggtaatgactccgtatgctgcgttccagaaagagctgcacggtatgaccgaagaagtttacctcgacgaaatggtaggtcgtattaacgccaatatgatccttccgtatccgccgggagttcctctggtaatgccgggtgaaatgatcaccgaagaaagccgtccggttctggagttcctgcagatgctgtgtgaaatcggcgctcactatccgggctttgaaaccgatattcacggtgcataccgtcaggctgatggccgctataccgttaaggtattgaaagaagaaagcaaaaaataa

SEQ ID NO: 4711 - DNA, 1458 bp, Escherichia coli
atgaaaacaccctcacagccgcgcgcgatatactatatcgtggcgatccaaatctgggagtacttcagtttttacggcatgcgtgccttactcattctctatctcacccatcagcttggttttgatgataaccatgccatcagcctgttcagcgcatatgcttctctggtttacgttacccctattctcggcggctggcttgccgaccgcctgctcggcaaccgcactgcagtgattgccggcgcgctgttaatgacccttggccatgtggtgctgggcattgatacaaattcaacctttagcctgtatctggcgctggcaatcattatttgtggctacggtttattcaaatcaaacatcagctgtttgcttggcgagctctacgacgagaacgatcatcgacgtgatggcggtttttcgctgctgtatgctgcgggcaatatcggttctatcgccgcgcccatcgcctgcggcctggctgctcagtggtatggatggcatgttggctttgcccttgcgggaggcggcatgtttatcggtttgttgattttcttaagtggtcatcgtcatttccagtccacgcgtagtatggataaaaaagcgctcacaagcgtcaaatttgccttaccagtatggagctggttagtggtgatgctctgtttagccccagtattttttaccctgctgctggagaacgactggtccggatatttgctggcgatcgtttgcctcattgccgcacaaatcattgcccgcatgatgatcaaattccccgaacaccgccgtgctctttggcaaattgtattgttgatgtttgtcgggacgttgttctgggtactggcacaacagggcggcagtaccatcagcttgtttatcgatcgctttgtgaatcgtcaggcattcaatattgaagtacctacagcactattccagtcggtgaatgccattgcggtgatgctcgctggggttgttctggcctggctggcgtcgccagaaagccgcggcaattcagcattgcgcgtctggctgaagtttgcctttggcttactgctgatggcttgtggctttatgttgctggcatttgatgcccgacatgcagcggctggcggtcaagcgtcaatgggcgtgatgatatccgggctggcgctaatgggctttgctgaactctttattgacccggtggcgattgcgcaaatcacgcgtctgaaaatgtctggcgtattaaccggtatttatatgctggcaacaggcgcagtcgccaactggctggcaggcgtcgtggcacagcagacgacagagtcgcaaattagcggtatggcaattgccgcttaccagcgattcttttctcagatgggagagtggacgttggcttgtgtcgcgatcatcgtggtattggcctttgctacccgttttctgtttagcacgccgacgaatatgatacaggagagcaacgattaa

SEQ ID NO: 4712 - DNA, 1533 bp, Escherichia coli
atggccacgccatatatatcgatggcggggatcggcaagtcctttggtccggttcacgcattaaagtcggttaatttaacggtttatcctggtgaaatacatgcattactaggagaaaatggtgcgggtaaatctacgctaatgaaagtgttatccgggatacatgagccgaccaaaggcaccattaccattaataacattaactataacaaactggatcataaattagcggcacaactcggtatcgggattatttatcaggaactcagcgttattgatgaattaaccgtactggaaaatttatatattggtcgtcatctgacgaaaaaaatctgtggcgtcaatattatcgactggcgagaaatgcgtgtccgcgccgccatgatgttattacgcgtgggcttgaaagttgatttagatgagaaagtggcgaatttatctatcagccacaagcagatgctggaaattgccaaaacgctgatgctcgatgccaaagtcatcatcatggatgaacccacctcctcactcaccaataaagaggtggactatctgtttctgatcatgaatcagttgcgtaaggagggtacggccatcgtctatatctcgcataaattggcggaaattcgccgtatttgcgaccgctatacggtgatgaaagacggcagcagcgtttgcagcggcatggtgagcgatgtgtcaaatgacgatatcgtccgtctgatggtaggccgcgaattgcaaaaccgttttaacgcgatgaaggagaatgtcagcaaccttgcgcacgatacggtttttgaggtgcgcaacgtcaccagccgtgacagaaaaaaggtccgggatatctcatttagcgtctgccggggagaaatattaggctttgccggactggtcggttccggacgtactgaactgatgaactgcctgtttggcgttgataaacgcgctggcggagaaatccgtcttaatggcaaagatatctctccacgttctcccctggatgccgtgaaaaaagggatggcttacatcactgaaagccgccgggataacggctttttccccaacttttctatcgctcagaacatggctatcagctgcagtctgaaagacggcggctataaaggcgcgatggggttgtttcatgaagttgacgagcaacgtaccgctgaaaatcaacgcgaactgctggcgctgaaatgtcattcggtaaaccagaacatcactgaactctccggcggtaaccagcagaaagtcctgatctccaaatggctgtgctgtcgcccggaagtgatcattttcgatgaacctacccgtggcatcgatgttggcgcgaaagccgaaatttacaaagtgatgcgccaactggcggacgacggaaaagtcatcctgatggtgtcatctgaactacctgaaattatcaccgtctgcgaccgcatcgccgtgttctgcgaaggacgactgacgcaaatcctgaccaatcgcgatgacatgagcgaagaggagattatggcatgggctttaccacacgagtaa

SEQ ID NO: 4713 - DNA, 246 bp, Escherichia coli
atgggctttaccacacgagtaaaaagcgaagcgagcgagaagaaaccgttcaactttgcgctgttctgggataaatacggcaccttttttatcctggcgatcatcgtcgccatttttggttcgctgtcgtcagaatattttctgaccaccaataatattacccagatttttgtgcaaagctccgtgacggtactgatcggcatgggggaattcttcgctatcctggtcgccggtatcgacctttag

SEQ ID NO: 4714 - DNA, 696 bp, Escherichia coli
atgaaaatctccccctcgttaatgtgtatggatctgctgaaatttaaagaacagatcgaatttatcgacagccatgccgattactttcacatcgatatcatggacggccactttgtgccgaatctgacgctctcaccgttcttcgtaagccaggtaaaaaaactggcgagtaaaccgctcgactgccatctgatggtaacgcgtccgcaggattacattgctcaactggcacgtgcgggagctgatttcatcactttgcatccggaaactatcaacggtcaggcattccgcctgattgatgaaatccgccgtcatggcatgaaagtggggctgattcttaatccggaaacgccggttgaggccatgaaatactatatccataaggctgataaaattacggtcatgactgtcgatcccggttttgccggacaacccttcattcctgaaatgctggataaagttgccgaactgaaggcatggcgtgaacgagaaggtctggagtacgaaattgaggtggacggttcctgcaaccaggcaacttacgaaaaactaatggcggcaggggcggatgtctttatcgtcggcacttccggcctgtttaatcatgcggaaaatatcgacgaagcatggagaattatgactgcgcagattctggctgcaaaaagcgaggtacagcctcatgcaaaaacagcataa

SEQ ID NO: 4715 - DNA, 1986 bp, Escherichia coli
atgaataactctcggttattccgtttgagcaggattgttattgcgttcactgccgccagcggcatgatgataaataccgcttacgcaacagatgaggcgaaagccgccactcaatatacccaacaggttaatcagaattacgccaaatcattaccgtttggcgatcgccaggattttgacgatgctcagcgtggatttatcgctccgctgctggatgaaggtattctgcgtgatgcgaacggtaaaatttactaccgcgcgaatgattacaaatttgatattaatgccgctgcgccggaaaccgtaaaccccagcctgtggcgtcagtcgcagatcaacggcatttctggcctgttcaaagtcaccgataaaatgtatcaggtgcgcggccaggatatctctaacattacgttcgttgagggcgagaaaggcattattgttattgacccactggtgacgccacctgccgcaaaagccgcacttgacctttacttccagcatcgtccgcaaaaaccgattgttgccgttatctacactcacagccacgccgaccactacggcggcgtgaaaggtattatctctgaagccgatgttaaatccggcaaagttcaggtgattgctccagctggctttatggacgaagccatcagcgaaaacgtgctggcgggtaacatcatgagccgccgtgcgctctactcttacggtctgttactgccgcacaacgcgcaaggcaacgtgggcaacggcctcggcgtgacgctggcaaccggcgacccaagcattattgcaccgactaaaactatcgtgagaactggcgagaagatgattatcgacggcctggagtttgacttcctgatgaccccaggtagcgaagcgccagcggaaatgcacttctatattccggccctgaaagccctgtgtaccgccgagaatgccacgcataccctgcacaacttctacaccctgcgcggcgcgaaaacccgcgacaccagcaagtggaccgagtatctgaacgaaacgttggatatgtggggtaacgacgcggaagtgctgtttatgccgcacacctggccggtctggggcaataagcatatcaatgattatattggtaaatatcgcgatactatcaagtacattcacgaccagaccctgcacctggcgaaccagggctacaccatgaatgaaatcggcgacatgattaagctgccgcctgcgcttgccaataactgggccagccgcggctattacggttctgtcagccacaacgcccgcgcggtgtataacttctatcttggctattacgacggtaacccggctaacctgcatccgtatggtcaggtggagatgggtaaacgttacgtgcaggcgctgggcggttctgcccgcgtcatcaacctggcgcaagaagcgaacaagcaaggtgattatcgctggtcggcagaactgctgaaacaggtgattgccgccaacccgggtgaccaggtcgcgaagaatctgcaagcgaataattttgaacagctgggctatcaggccgagtccgccacctggcgcggtttctacctgaccggcgcgaaagagctgcgcgaaggggtgcataagttcagccacggcaccaccggttccccggacaccattcgcgggatgtcggtcgaaatgctgttcgactttatgtccgttcgcctcgatagcgtgaaagccgcgggtaaaaatatcagcctgaacttcaatatgagcaacggcgataacctcaacctgacgctgaacgatagcgtgcttaactaccgtaaaacactgcaaccgcaagctgacgcctctttctacatcagccgtgaagatctgcacgccgtgctgaccggacaggcaaaaatggccgatcaggtgaaagcgaagaaagccaaaattattggcaatggcgcgaaactggaagaaattatcgcctgtctggataatttcgatttgtgggtgaatatcgtaaccccaaattaa

SEQ ID NO: 4716 - DNA, 1419 bp, Escherichia coli
atgagtacaatttttgatgtggcagttatggggggtgggccaggtggttacgtagcggcactgcgggctgcgcagaatgggctttccgtagtatgtattgatgatggtgttaatgcacagggcgaaccttcgccgggcggtacgtgtctcaatgtcggctgtattccgtcaaaatcgttgctgcaatcttccgagctgtacgcgcaagtacagcatgaggcaagcattcatggcgttaacgttgaaggcgtatctttcaatgctgccgcgatgattcaacgtaaagatgccatagtaagccgcctgacaatgggcatcagcttgctgtttaagaaaaataaagtgaagcacttgtgcggcctcgcaacgttagaacgtgctcaggatgagatttggcaattacgcgtaaacgatcaacacattcacgcccgtaatgtagtgattgcaacaggttctcagccgcgtcagctgcctggcgttaccattgataatcaacagatcctcgacaatcgtggcgccctggcattgagcgaagtgccgccgcgtctcggtgtgatcggcgctggcgtgattggccttgaactggggtctgtgtggaatcgggtcggttcagatgtcacgctgctggagatggcgccaacgttcttgcctgcactggaagctcgcctgtcgaacgaagtccgtaaagcaatgattgccagtgggatgaaaatgcaactggcagtagagattgaggctattgaacaacgggatgacggtgtgcatgtgcgctggcggcagggtgagaagcgagaagaaagccgcttcgataaattaattcttgccattggacgtgtaccgcgactttctggtgtcgatctcgtgcaactcggtcttgaagccgataaccgtggcggtattgccgtcgataacttatgccgtaccgggaaagccgggctgtgggcaattggtgatgtcgtgcgagggccgatgctggcgcataaagcgatggctgaaggtgtggtggttgcggatcaaattgccggactggcggtagagccgattaattttgcgctgatcccttcggtgatttacacccaaccggaagttgcgtgggtaggggaaaacgaggcctcactgaaagccgctggcagagtctttaacaaaggaaattctctgtttgccggtaacggtcgcgccttagcattaggccaggaaggtgggcgttgcacgttatacagcgataaacacactgaccgcgtacttggcggagcgattgttggcccgcaggcatcggagctgatcaatgaaattgcgctggcgatgacttttagcgcctctggcgaggatattgcctgtgcgatccatgcgcatccgaccttaagcgaagtcatccacgaagcagcaatggccttgaataataaagcattacacggataa

SEQ ID NO: 4717 - DNA, 999 bp, Escherichia coli
atgaagccttttgcaacgggcctggtggttggtaaattcgcgcctttgcattgtggtcatgaaaagttgatcaataccgcactggcgcaatgtgaagaactgttcatcatcagttattccgtgccggaaatgcctgactgtgaacctgaaaagcgcctgacgtggctgcaagtgcgcttcccgcaagcgacgattttggtactgacgccagagcttgttgcgcgttataacttacctgccataccgcataacgatgccgacatccaccgtcattatgtggcgacgctgtgcctgcagatattacgctgtcgtccacatgctgtatttactgcagaagactatggcgatggctttgctaacgtgctggcgcggcgttttgcccaacccgttgaacacgttcgaatggcgcgcccagttggcgatgaagcgccttcgggaacgcttattcgttccgatgttcaccgctatcgctacatgttggcgaatgatgtttattacagtttcgttcgccgtatctgtctgcttggtggcgaatctaccggtaaaagcacgctttcaaaagcgctggcggatgggcttgatacggtgtatgtcgctgaatttggccgcgactattgggaagaaaaaaacggaatcttaaccgcggatgatttgttgcatatcgcctgcgaacaggtacgccgggaacaacaagcagaagctaatcactatcttatatgtgacacgtcgccactcacgaccttgttctatgcccttgatcaatatggtcatgctccgcaagaacttcatcaactggcggagcgggaatactctctggtggtgctttgcggcgcagaatttcccttcgtgcaggatggcacccggcaaggagaggtatttcgcgcacggcaacaggtgtggtatgaacaggaattatcgcgcaggaatattccttatctttctgtttcgggttcgctgcaagagcgactggggcaaattctacatcgccttcccgactga

SEQ ID NO: 4718 - DNA, 558 bp, Escherichia coli
atgtcttattcagaaatcgccgcgtgtctggcatacgcggtttccgtctggctggctgccagaaacaatgtgcatacatggtggatcggcataattggcagcatattgtacggctgggttttttggtctgtgcaactctatgccgacgttacgctccagttattcttcatcgcgaccagcatcactggctggatccactggctgaaaggtcagggtggcgacatcttgccggtgcgccgaacgcaagccagtcactttttccttttgttgctctgtgctgtcgtcgtggcaggcggttacggctttttactccacacctttaccaatgcctgggcaccctggctggattcgttgattttgacctttagcgttctggcacaattcatgttgatgggaagacgtatcgaaaactggttcgtctggttagcggtgaataccctggcagtgccactgtatatgacgcgcggtttaaacctgaccgctggcttatatttcctgttctggattaacgcctggcatggtttgtatcaatggcgcaaagagttgcaaacatcatga

SEQ ID NO: 4719 - DNA, 1035 bp, Escherichia coli
atggcgaagtcggatacaggaagaaagcgggtaacattaaccgatgttgcgcgtgcggctggcgtttcgaaatcgaccgtatcgctggttctcaacgacagttcacttatcaaaaaagagactcaacaaaaagtccagcaagccattgaacaattaggctatgtctataaccgttttgctgccaatctgcgttcgcaaaaatcgctaactatcggcgtagtcattgacgatttgataaatcctttcttcgctgaatttactatgggtcttgagatgacgctggcggagcacggttttatcaccgtgatgtccaatacctcccagcgtagtgaccggcaaaaacaggtgcttgataccttgctggaacaccacgtcgcgggcattgtcctctgtccagtgaacagtacctcagaagccgatttacagcgttatgccaacagttccacacccttattaatcacgatgcgccctctggattggcaacaattgcccgtcgattacgttggcgtggacagccacgcaggtgtacgggaagcgacggaatatctcattcaacaagggcacagagatatcgtgtttattggtggtcttacgcaccatatgcgttatcagggataccttgaggcgatgaatcaccatggtttacagccgtggagtactgatgctttttcgctgcgtgctgaaccgactcaggccaacggctaccagttgatgcaacagctgttggatatgccttcgccacccacagcggtgatttgttataacgatttaatggcttttggcgcggagtcggcactaggcgaaagaggattatttgccggggaagatatttcgttgattggtaatgatggcgtggcggcttgtgcttacagtaacccgccgttaaccacaattgcggtagaaccattggctctggggaaacaggcggcgcagcaaattttacggcgtattgcgcaaccagacgcaccgctcagccattacatctatcgcccgaccctgcaaattcgcgcttccaccggaaagcgggggcgttaa

SEQ ID NO: 4720 - DNA, 981 bp, Escherichia coli
atgtgctctgtacgcacgatcactgcaccggaagctgcagatttgattgttgatggcgcagttgtcaccgtctcctcctccagtggaatggggtgtccggatgcggtgctggcagcaataggtgaacgctttcaacgtgccggacatccgcaaaacatcacctccatccaccctatcgccgctggtgatatgtatggcgtaaaaggcatcgatcatctggcgcaaccgggcttactggcaaaagtgatcgctggctcctacccctccggtccatcatcaatggcgcctccgttaatctggcaaatgatcaatgacaacgcgatccccgcctggaatctgccttccgggatcttatttgatatgcaccgggaagcggcggctcatcgtcctggcgtgctgacacaaacaggcatggatacctatgtggatcccctgttgcagggcggtgcaatgaatgaaaaagcggcgcaacaatctctggttgaacgtgttcgatttgctaacgacgactggctgtttttccccagtatcgtgccgcaggtggcgatcattcgcgctaccactgccgatgaacgcggcaacctgacttatgaacatgaaggggcttatctggggccactggaacaggctactgccgttcgcaataatggtggcatcataattgcgcaagtaaaacgacaggttgccgccggaagtctgaaaccaaaagaggtgcgtattccgggtgtactggtggattacatcgtgattgcgccggaacaaacacaaacgacacaaacgcaatatgaacctgccatttccggcgaaatcagtcgtccgctatcagcctttcgttatatggaacatggcccggcgcgagttattgcccagcgagtcgcgcaagaactacaaagtggagatgcggtaaatattggctttggtatttctgccaacgtaccacgcattttactggaacaaggtcgccacggtgacgtcacctag

SEQ ID NO: 4721 - DNA, 513 bp, Escherichia coli
ttgccctctccccagcagttcacctatttccagggcggtggctttgatctcactctgatgtcgtttttacaaatcggcgcagatggctcagtgaacgtctcacatctccccgctcgtccacatgtcactgccggatgcggtggatttattgatatcacctcacatgcgaagcgcattattttctctggctttttcaatgccggtgcccaactgcaactggaagagggtcagctgcgtatcattaaagaaggcaaagccaaaaaactggtacaggacgtcgcccacgtgacgttctccggcaaacgcgcaataagactcgggcaacaagtgcagtacatcactgaacgctgcgtgctggaattaaccccagacggactactggtcacggaaattgccccaggtattgatcctgaacgcgacattctcgcccaaagcaatgccccactccgtctggcagacgatctcaaactaatgaatccccactattttcaacaaggacgtcaccatgaataa

SEQ ID NO: 4722 - DNA, 780 bp, Escherichia coli
atgaataacggcaccattgacctccagcgcaacggtttcattgccactttggtgattaatcgcccggcaaaactcaacgcattaaccccagagatgctcgaacaactgctggcgcattgccacacgttggaaactgattcggagatccgcgtagtactgctgaccagtgccagtgaaaaagcgttttgtgtcggcgcggatattcatcgctggacctctctttctgcactcgatatgtggcgcaactggatccgccgcggtcatcaggcatttgatgctctggcacaactgccacagcccgtaatcgccctgttgcacggcctggcttatggcggtggtctggaactggctgctaccaccgatatccgtatttgtagcgccgaagcacaaatggcactaccagaaaccgggctggcgacagtgcctggctggtcaggaacgcagcggctgacggcactgcttgggcgctcactggtgaaagaactggtatttaccggtgaaccactggatgcacagcgggcactgtcctgcgggctggtgaatcgcgttgtcgccagggaggcgttacacgacgccggactgcaactggcacaacgtatcgcccagcgtgctcccgttgcagtgcagatcgccaagcaggttattgatgccggagaaggtattgctgtggcctcgacgcttgaagcactggctggcgctttttccgccacgactgaagatgctcatgaaggcagtcaggcatttactgagaagcgtcaaccgcactttagtgctcgataa

SEQ ID NO: 4723 - DNA, 1401 bp, Escherichia coli
atgcaaccttcacaaccagcagagaaagcgaatgtttcatcggcagatctgcgtcgcgcggcgtggacctgctctctcggcagcgcactggaatactacgatttcgcactttacagcctggcatccgccattatttttggtccactcttttttcctaatcaggaaccgggaatggcgctgatcgccagttttggcacctactttctcggatttgccgtcagacctgtaggcggaattatcttcggctcattaggtgatcgtttgggccgtaagttcgtcctgttagcaacggtgttgttaatgggaatcgccagcacgttgatcggggtattacccacttacgaaacagcgggaatctgggcgccaattatgcttattgcattacgcctgctgcaagggcttggtgctggggctgaacaggcgggagccgccgtactgatgaccgaatatgctcctgacggcaaacggggttattacgccgcgctgccgttcctcggaatccagattggtacgtttatggcatctgccgtttacttcatcctgctgcataatgtgacaaatcttgccgaaacctggtggtggcgcttgcccttcctctccagcgtggtgattatcgcggtggctatttatattcgactgcatcttaaagaatcgccatcattcgcaaaactcgaagctcgtcaacaagttacagaatcacccttacgaaatttgctgaaaacatcacgccgtaatgtcttcgtcgggattggcttacgtctggcagaaaacggcggctcgtcgatttatcaggctttagcgatcagttatatcgttggtgtggttgggctggacaaatcagttggtacgctatgcctgatgtctgcggtagtagtcggtgcaattatggtgcctattgccggttggctgaccgatcgcttcggcagggttcttgtctatcgtagtctggcgatttttcagttgttgattacctttccggtgtggtggtctttcagccacggtaatgttcctgtcactattgtctctctttctctggccttagggattggagcctggggtatgtttggtgcacaaggtgcttttctgcctgaactctttggtgctcgccatcgttatattggcgtcgcactggcaagggaagtttctgccgttattgccggagggatcgcgccactggttggttctgcaatcatttcctgggtgatccacactaacgatcccagtggtattgctgcctggatgccaatcgctatttaccttagtctgctgaccgttggtacgattattgcgactttctttgctccagaaacacgcgatcgtgatcttgatgatcttgccgacgctgaaacgatcagcgtttcccaacataaccagactacgggcacctcccatgacgcataa

SEQ ID NO: 4724 - DNA, 2049 bp, Escherichia coli
atgacgcataatgtctctgaatctattatcgattccctgactgacgtgaaaatgccccattacgcaccgctggctcaagtcagcggtagtatcgaccttaacggtaccattttacctgagtaccgctgcaacacgctggttctgggcagtggcgcggcaggatggcgagctgccgtcgagctgaaacggcaaaatgtcgatgtaatggtcgcctccagcaaagccttctggggaacttccgcctgttctggttctgataaacaaacgcttcacaccgcgaatacccgtgcaaatggtgaccattttctgacattaagtaacaccctggcggcaggtggtgcgatggatcatgacaccgcatatgttgaggcggtcggatcggtgaacacctgtgaagtactgaaatatctgggtctggatctgcctgaagatctctttggcgcaacgttgcgttaccaaaccgatcacgatgaatttggccgtgccactagctgcggtcctcgaacatcgcgcctgatggtgaaggtgctggcccaggaggcaatgcgccttaatattcctctttgcgatcacacaacggcgattcgtatcctgaccagtggtgaaggagaaaatcgacgagtcgagggggtgatcgccatcgataaagcctgtcgggataatccctggagaatggtagtgattcgctgtcagcatctggttttagccacgggcgggcctggtgaactttatcgtgacagtgtttatccggtgaactgttttagtgcgttgggcatggcgctggaagcagggataactctggttaatcttacggaaagtcagtttggtatcggtacaccgcgcaaccagtttccgtggaatctttccggtacttacatgcaggcgataccgcgcatctattcgcaggaccactccgggcgtcagtataattttctggcaacttattaccccacgactcgtatgctggcctccgcgatatttcgcaaaggttaccagtggccgtttcacgcggaacgaatgctggaatatggctccagcttgctggatgtcgcagtttatgaagagactcaaaaagggcgcgatgtttttctcgattttctacgggaaccagaacccgcagcggacggaacactatttaacctgcgggagctggatgatgatgtcatcgactatctgcaacaaaatcacgccctgctggcacaaccgctggcgagattaacacagatgaatcctctggctattcgtttgtatcagatgcacggtcatgatctcacagcctcaccgctcaagtttacgctaaataatcaacatcttaatggcggaattgaagttgatatttgggcacgtacatcgctaactggttgttatgctgccggagaaaatgccggaacacatggtgtcacgcgcccaggtggagcagcgctcaatgccgggcaagttttcgcccgccgctgtgcattacatattgctcatcagaaaagccaggaccggcctctcgagaggcaacaaattctcagtacgattaatgaggcgcaacagcacctgaatcaggggctgctacgtgacgacgtgcgagaaacgatacaaaataccatgagccaccatgccgcaattttgtgtcatacacaggggatcaacactgccgcgcaaaccctggcaacactttgtgaagatattcgccgggaaggtattcaatgcgatgaaaacagcctggcacaatctttccagtggcgacaaagtgcgcaactggcgctggctgtactgcgttctttacaatgttatgtcgaaaacggtggtgggagtcgtggtgccagggctatctatgatggcgaagccggtattgcaccgcaaacaccaggtgggccactcctggcctggcgttttcggccagaaaatcaggatgccaggcaatatatgatttgtgtttgtcgggaagctaatgattaccaaacctggactcgcccgtgccgtgaacggggcgtattaacgctaaccaactttgagcgccagtggcaaaactggattgcggcgacgccgtttcaatactga

SEQ ID NO: 4725 - DNA, 159 bp, Escherichia coli
atgggtgatttttttgggctgtgtgttttgccagatgcgacgttgatgggagatgcccacttaattgagctgaacaaaacatacacaaaaaatatagatctccgtcacatttttgcgttatacaggaagctcgccactgtgaaggaggtactgctatga

SEQ ID NO: 4726 - DNA, 2097 bp, Escherichia coli
atgaaaaaaagacatctgcttagcttactggcgctgggcattagcacagcttgctacggcgaaatatatcctgcgcccattggtccgtcgcaatcggatttcggtggcgtaggattattacaaacgcccaccgcgcgcatggcgcgggaaggggagctgagcctgaactatcgcgataacgatcagtaccgttattactcagcttcagtgcaactcttcccgtggctggaaacaacgctgcgctacaccgacgtgcgcacccggcagtacagcagcgtcgaagcattctctggcgatcaaacgtataaagataaagccttcgatctcaaactgcgtttgtgggaagagagttactggctgccgcaagtggcggttggtgcgcgggatattggcggtacggggctgtttgatgcggaatatcttgttgccagcaaagcctgggggccgttcgattttacgctcggtctgggctggggatatctgggcaccagcggtaatgtgaaaaatccgctctgttcagccagtgataaatattgctatcgcgataacagctacaaacaggcgggatctatcgacggtagccagatgttccacggcccggcctcactgtttggcggcgtggaataccagacgccctggcaaccgctgcgcctgaaactggagtatgaaggcaataattatcagcaggattttgccgggaagctggagcaaaaaagtaagtttaacgtcggggcgatttatcgcgttaccgattgggccgacgttaaccttagctatgaacgtggcaacacctttatgtttggcgttacgctgcgcaccaactttaacgatctgcgcccgtcctacaacgataacgcccgcccgcaatatcaaccgcagccgcaggatgccattttgcagcactcggtggtggcgaatcagttaacgctgttgaaatacaacgccggactggccgatccgcagatccaggcgaaaggcgatacgctgtatgttaccggcgagcaggtgaaatatcgtgattcgcgcgaagggatcatccgtgctaatcggatcgtgatgaacgatctgccggatgggatcaaaacgatccgcattacggaaaatcgccttaacatgccgcaggtgacgacggaaaccgatgtcgccagcctgaaaaatcatctcggcggagagccgttgggccacgaaacgacgctggcgcaaaaacgcgtcgagccagtggttccgaagtccaccgagcagggctggtatatcgacaaatcacgctttgatttccatatcgatccggtgctgaaccagtcggtcggtggcccggaaaacttttacatgtatcagctgggcgtgatgggaacggcggatttgtggctgacggaccatctgctgaccaccggcagcctgtttgctaaccttgccaacaactacgacaagtttaactacaccaatccgccgcaggactcgcacttaccgcgcgttcgtacccatgtgcgcgagtatgtgcagaacgatgtctatgtgaataacctgcaagccaactacttccagcatctgggcaacggcttctacggtcaggtctacggaggttatctcgaaaccatgtttggcggtgcgggggcagaagtgttgtatcgcccgctggacagcaactgggcgtttggtctggatgccaactacgttaaacagcgcgactggcgtagcgcaaaagatatgatgaaattcaccgattacagcgtgaaaaccggacatctgaccgcgtactggacgccatctttcgcccaggacgtgttagtgaaagcgagcgtcgggcagtatctggctggggataaaggcggcacgctggagatcgccaaacgctttgatagcggcgtggtagtggggggctatgccacgatcacgaatgtttcgaaagaggagtacggcgaaggggacttcaccaaaggcgtgtatgtctctgtaccgctggatctcttctcgtctggcccgacacgcagccgtgcggcgattggctggacgccgctgacgcgtgacggtggtcagcaacttgggcgtaagttccagttgtatgatatgaccagcgaccgtagcgtcaatttccgctaa

SEQ ID NO: 4727 - DNA, 789 bp, Escherichia coli
atgctggttgccgcaggacagtttgctgttacatctgtgtgggaaaagaacgctgagatttgtggctcgttgatggcgcaggcggcggaaaacgacgtttcgctgtttgtcctgccggaagcattactggcgcgtgatgatcatgatgcagatctatcggttaaatcagcacagctgctggaaggcgaattcctcggacgtttacggcgagaaagtaaacgtaacatgatgacgacaattctgacgattcatgttccttcaacgccggggcgcgcatggaatatgctggtggcgctacaggcaggaaacatcgtcgcccgttatgccaaactgcatctctatgatgcatttgccattcaggaatcacgccatgttgatgccggtaatgaaatagctccgttactggaggtggaagggatgaaggtcggtctgatgacctgttatgacttacgctttccagagctggcgctggcacaggcattacagggagctgaaatcctggtacttcctgccgcctgggttcgtgggccgctcaaagagcatcactggtcaacgttgcttgccgctcgtgcgctggataccacctgttatatggtggcggcgggggagtgcgggaacaaaaatatcgggcaaagccggattatagatccctttggcgtcaccattgcggcagcgtcagaaatgccagcactcattatggcggaagtgacgcccgaacgtgtgcgtcaggtacgcgcgcaactgcccgtcttaaacaaccgtcgctttgcgccgccgcaattattatga

SEQ ID NO: 4728 - DNA, 471 bp, Escherichia coli
atgattatcggtaatctcaaccatttgtcgctggcggggcttcctgcctgggtgagaaatattctgctgcgcccggagtgttcattatcggcgttatccaccagagaggacggtcgctggcaacctgaaggatgtcggtggttctgcacgctgggaacttcagacacgcaacccgccgaactccgccatacggagtatcaccatttatgggccgatatacaggtggtgattactggttgtgagggcattaatgcgggaacgcggcccatcgctcgcgaaaacgatgaagaacgtaagcccgatctgtttatcgccccatcccctgaaaacagtgtcgccatcaccctacacgccggtgatttcgccgtctttatgcctgaggaacctcaccaggcgctgtgcgcaattggcacggctacttcaatacgcaaagcggtctttaaagtaccgcgcgacatgctggaagcctaa

SEQ ID NO: 4729 - DNA, 294 bp, Escherichia coli
atgtttttgtggtttatgcagccagatatctggctcactttaattaccctcacctttctggaaattattcttggggtggataatattatttttctttcactggtggtggcaaaacttccgttatcacaacaaaatatggcgcgtaaactgggtttaagctgcgcgatgattatgcggatattattgctgatatccattgcgtggctttcacatattacccagccgctttttaccgtgctgacgctggagatttcgttccgcacgttgattctgctcggggcgggctgttcctga

SEQ ID NO: 4730 - DNA, 1017 bp, Escherichia coli
atgaaaactgtaaacgtagctttactggcactcataatttcagcaacatccagccctgttgttttagctggtgataccattgaagcggcggcaacagagctttcagccattaactccggcatgtcgcaatcggagattgagcagaagattacccgctttttagaacgcacagacaacagtcccgctgcgtatacctatttgactgaacatcactacatcccttctgaaacacctgataccactcagactccccctgtccagacagatcctgacgcaggacaaaaaaccgttgccgctacaggtgttgtacagatacctgcccgttatcagagcatgatcaacgcccgacagtctgcggtaactgacgcccagcaaacgcaaattacagagcaacaggcgcagatcgtagccacacaaaaaacgctcgccgcgactggagatacgcaaaataccgcgcattatcaggagatgattaatgccagactggcggctcaaaatgaggctaatcagcgcactaccacggaacaagggcagaaaatgaatgcactgacaaccgatgtggcagcacaacagcaaaaagaaagggctcaatacgataaacaaatgcaaagtctggcgcagaagtctgtccaggcacatgagcaaattgaaagtctgagacaagattccgcacaaacgcagcaacagttaaccaacacgcaaaaacgggtcgcagataacagccaacaaattaacacgctcaataaccatttcgattctctgaaaaacgaagttgaggacaatcgtaaagaagccaatgcgggaactgcatctgccatcgctatcgcctcacaaccacaggtgaaaaccggtgacgtgatgatggtgtcagcgggagcgggaaccttcaacggtgaatctgcggtgtctgtaggaacatcttttaatgccggaacgcatacggtacttaaagccggtatttctgcggatacgcaatctgatttcggcgcaggtgtcggcgtaggatattcgttctaa

SEQ ID NO: 4731 - DNA, 408 bp, Escherichia coli
atgaacattagcgatgtagcaaaaattaccggcctgaccagcaaagccattcgcttctatgaagagaaggggctggtgacgccgccgatgcgcagcgaaaacggttatcgcacctacacgcagcagcatctcaacgaactgaccttactgcgccaggcacgccaggtgggctttaacctggaggagagcggcgaactggtgaatctgtttaacgatccgcagcgtcatagtgccgacgtcaaacgtcgtacgctggagaaggtggcggagatcgaacggcatatcgaagaactgcaatccatgcgcaaccagctactggcgctggcgaatgcctgccctggcgatgacagcgccgactgcccgattatcgaaaatctctccggctgctgtcatcatcgggcggggtga

SEQ ID NO: 4732 - DNA, 801 bp, Escherichia coli
gtggaaaggattacagagacattaagtatcgcttgtgcagatgagataccggatatcgccttacttcggcaaacatcgagagagaaggtattacatctgcattttgccagcgaagcagagaggtatcgtgaggaattcgggctggtgctgaaagcacagctcgatgaatttgttgttggcatgcattctgccgacccggttatcaggatcgccagattaatatcgcttgaagagattaaccgccatcaggattttttcgaacactgcgcgaaagaatatcgtaagctggcgacagagcttatatttgcattggctgaacaactgaacgttgagatggcggaaaataacccgctagttacctttgcccccttcaaatgcaaccgtaagcgaaaaggcaaaatgggaaagtggcagtattgttttcacggttttcattgtacatttgagaataaaaaaacagagcaaaatattgaagttcccctcgcctacggctttgctttcggcgatctggacccgtattttttttccggatttatcaaatcgacccccgcctggcagcctctgccagtggctatttacgatgattaccacgacggtagcaggatcattcaacaactgctggcgctgggaaagttacaaaaaatcccttcaccgatcccacaatacacgggggttgctgcggtagatcggtccaatgtcgacatcgcaaattttcgctcaacactggagagtcgcctgcaccgatgtaaattacgctggcttttgaagcatgtaaaaaattcacaaaggagcgaaagatga

SEQ ID NO: 4733 - DNA, 504 bp, Escherichia coli
atgaaatttgaccatcttgttgatgttagcttccacaattttgtctttaacggaaaattcgattttgtcgaactggggcaaacaatggcatggttggaacaaaactttgttgagccggactctaaaaatgatatgggaaatggtttttatatctggctatttggtaatgttgagtttcatttcgaaaacaacaagctatatatgatttggtgcgattatctgagccaaatccatttgggcaaagcgatccgatttgataaaggaatattgaataacgtcgctgagttgaacgttacgcgtgtatttaacatgcttgttaacgaaggcgctgatctgcaaatccgccgtcaatcgccccatacactcttaatccacgtcaatcgctcaggcgtgacactttggtttgaagcagatgaagaacagcctggtgatccgcagaattatatgctgatggcatttggtttgacacatcgcgattacgatgcaagatttcaatattcataa

SEQ ID NO: 4734 - DNA, 1653 bp, Escherichia coli
atgaaattattacagcggggcgtggcgttagcactgttaaccacatttacactggcgagtgaaactgctctggcgtacgagcaggataaaacctacaaaattacagttctgcacaccaatgatcatcatgggcatttttggcgcaatgaatatggtgaatatggtctggcggcgcaaaaaacgctggtggatggtatccgcaaagaggttgcggctgaaggcggtagcgtgctgctactttccggtggcgacattaacactggcgtgcccgagtccgacttacaggatgccgaacctgattttcgcggtatgaatctggtgggctatgacgcgatggcgatcggtaatcatgaatttgataacccgctcaccgtattacgccagcaggaaaagtgggctaagttcccgttgctttccgccaatatctaccagaaaagtaccggcgagcgcctgtttaaaccatgggcgctgtttaagcgtcaggatctgaaaattgccgttattggcctgacgacggatgacacagccaaaattggtaatccggaatatttcactgatatcgaatttcgtaagcccgctgatgaagcgaagctggtgattcaggagctgcaacagacagaaaagccagacattattatcgcggcgacctatatggggcattacgacaatggtgagcacggctctaacgcaccgggcgatgtggagatggtacgcgcgctgcctgccggaacgctggcgatgatcgtcggtggtcactcgcaagatccagtctgtatggcggcagaaaacaaaaaacaggtcgattacgtgccgggtacgccatgcaaaccggatcaacaaaacggcatctggattgtgcaggcgcatgagtggggcaaatacgtgggacggtctgattttgagtttcgtaatggcgaaatgaaaatggttaactaccagctgattccggtgaacctgaagaagaaagtgacctgggaagacgggaaaagcgagcgcgtgctgtacacccctgaaatcgctgaaaaccagcaaatgatctcgctgttatcaccgttccagaacaaaggcaaagcgcagctggaagtgaaaataggcgaaaccaatggtcgtctggaaggcgatcgtgacaaagtacgttttgtacagaccaatatggggcggttgattctggcagcacaaatggatcgcactggtgccgactttgcggtgatgagcggaggcggaattcgtgattctatcgaagcaggtgatatcagctataaaaacgtactgaaagtgcagccattcggcaatgtggtggtgtatgccgacatgaccggtaaagaggtgattgattacttgaccgccgtcgcgcagatgaagccagattcaggtgcctacccgcaatttgccaacgttagctttgtggcgaaagacggtaaactgaacgacctgaaaatcaaaggcgaaccggtcgatccggcgaaaacttaccgcatggcgacattaaacttcaatgccaccggcggggatggctatccgcgccttgataacaaaccgggctatgtgaataccggctttattgatgccgaagtgctgaaagcgtatatacagaaaagctcgccgctggatgtgagtgtttatgaaccgaaaggtgaggtgagctggcagtaa

SEQ ID NO: 4735 - DNA, 1305 bp, Escherichia coli
atgaaatttcccggtaaacgtaaatccaaacattacttccccgtaaacgcacgcgatccgctgcttcagcaattccagccagaaaacgaaaccagcgctgcctgggtagtgggtatcgatcaaacgctggtcgatattgaagcgaaagtggatgatgaattcattgagcgttatggattaagcgccgggcattcactggtgattgaggatgacgttgccgaagcgctttatcaggaactaaaacagaaaaacctgattacccatcagtttgcgggtggcaccattggtaacaccatgcacaactactcggtgctcgcggacgaccgttcggtgctgctgggcgtcatgtgcagcaatattgaaattggcagctacgcctatcgttacctgtgtaacacctccagccgtaccgatcttaactatctacaaggcgtggatggcccgattggtcgttgctttacgctgattggcgagtccggggaacgtacctttgctatcagcccgggccacatgaaccagctgcgggctgaaagtattccggaagatgtgattgccggagcctcggcactggttctcacctcttatctggtgcgttgcaagccgggtgaacccatgccggaagcaaccatgaaagccattgagtacgcgaagaaatataacgtaccggtggtgctgacgctgggcaccaagtttgtcattgccgagaatccgcagtggtggcagcaattcctcaaagaccacgtctctatccttgcgatgaacgaagatgaagccgaagcgttgaccggagaaagcgatccgttgttggcatctgacaaggcgctggactgggtagatctggtgctgtgcaccgccgggccaatcggcttgtatatggcgggctttaccgaagacgaagcgaaacgtaaaacccagcatccgctgctgccgggtgctatagcggaatttaaccagtatgagtttagccgcgccatgcgccacaaggattgccagaatccgctgcgtgtctattcgcacattgcgccgtacatgggcgggccggaaaaaatcatgaacactaatggagcaggggatggcgcactggcagcgttgctgcatgacattaccgccaacagctaccaccgtagcaacgtaccaaactccagcaaacataaattcacctggttaacttattcatcgttagcgcaggtgtgtaaatatgctaaccgtgtgagctatcaggtactgaaccagcattcacctcgtttaacgcgcggcttgccggagcgtgaagacagcctggaagagtcttactgggatcgttaa

SEQ ID NO: 4736 - DNA, 552 bp, Escherichia coli
atgagcacagaaaaagaaaagatgattgctggtgagttgtatcactcggcagatggggcgttatctcgcgatcgcctgcgagctcgtcggcttattcaccgatacaatcattccctggtggaagagcacacattacgccagcaaattcttgctgatttattcggtcaggtgacagaggcttatattgagccaacgtttcgctgtgactatggttataacatttttctcggcaataattttttcgccaacttcgattgcgtgatgcttgatgtctgccctattcgcattggtgataactgtatgttggcaccaggcgttcatatctacacggcaacacatcccatcgaccctgtagcacgtaatagcggtgctgaactggggaaacccgtcaccatcggtaataacgtctggattggcggacgtgcagtcattaaccctggtgtgaccattggtgataacgtcgtggtagcctcaggtgcagttgtcacaaaagatgtcccggacaacgttgtcgtgggcggtaatccagccagaatcattaaaaaattgtaa

SEQ ID NO: 4737 - DNA, 516 bp, Escherichia coli
atgggcgactggctgcgtcagcatcctcagcagcatatttcgatcaatcttgaatccaccgtgctcacctcggaaaaaatcccgcaattgctgcgtgaaatgatcaatcactatcaggttaatcccagacagatcgcgcttgaactcactgaacgcgagtttgccgatccgaaaaccagcgccccgataatttctcgctaccgggaggcgggccatgaaatttatctcgatgattttggtacagggtattcaagtttaagctatttacaggatctggatgtcgacattctgaagatcgataaatctttcgttgatgcgctggaatataaaaatgtcacgccgcatatcatcaaaatggcaaaaactctgaaactgaaaatggttgcggagggaatcgaaaccagtaaacaagaagagtggctacgccagcatggcgtgcactacggtcagggctggctctacagcaaggcattaccgaaagaggatttcttacgctgggccgagcaacatttgtga

SEQ ID NO: 4738 - DNA, 912 bp, Escherichia coli; identical to SEQ ID NO: 126

SEQ ID NO: 4739 - DNA, 963 bp, Escherichia coli
atggtaatttcatcgcgtaacacatttcttgccgcactggcattcatcgcttttcaggcgcaggcggtgaacgtcaccgtggcgtatcaaacctccgccgaaccggcgaaagtggctcaggccgacaacacctttgctaaagaaagcggagcaaccgtggactggcgtaagtttgacagtggagccagcatcgtgcgggcgctggcttcgggcgatgtgcaaatcggcaacctcggttccagcccgttagcggttgcaaccagccaacaggtgccgattgaagtcttcttgctggcgtcaaaactgggtaactccgaagcgctggtggtaaagaaaactatcagtaaaccggaagacttgattggtaaacgcatcgccgtaccgtttatctccaccacccactacagcctgctggcggcgctgaaacactggggtattaaacctgggcaagttgagattgtgaacctgcagccgcccgcaattatcgccgcatggcagcggggagatattgatggtgcttatgtctgggcaccggcggttaacgccctggaaaaagatggcaaggtgctgaccgattctgaacaggtcgggcagtggggcgcgccgacactggacgtctgggtcgtgcggaaagattttgccgagaaacatccagaggtcgtgaaagcgttcgctaaaagcgccatcgatgctcagcaaccgtacattgctaacccagacgcgtggctgaaacagccggaaaacatcagcaaactggcgcggttaagcggcgtgccggaaggtgacgttccggggctggtgaagggaaatacctatctgacgccgcagcaacaaacggcagaactgaccggaccggtgaacaaagcgatcatcgacaccgcgcagtttttgaaagagcagggcaaagtcccggctgtagcgaatgattacagccagtacgttacctcgcgcttcgtgcaataa

SEQ ID NO: 4740 - DNA, 672 bp, Escherichia coli
gtggataaggttttagattcagcgatcctttcttcggcaaataaaagaaagggtatccttgccattggcgcgcatcctgacgatatagaattaggctgtggcgcatcgctagctcgccttgcgcaaaaaggaatttatattgctaccgtagtgatgactaccggtaattctggcgtagatggaataatcgatcgccacgaagaatcacgcaacgctctaaagatattagggtgccaccaaactattcatcttaattttgctgacacccgcgctcatttacagctcaatgatatgatttctgccctggaaaacatcataaaaaatcaaattccctctgatgttgaaattatacgtgtatataccatgcatgatgctgaccgccatcaggatcatcttgcagtctatcaagcctcaatggttgcctgtcgcgctattccgcaaattctcggctatgaaacaccaagtacctggctttcatttatgcctcaggtttttgaatccgtgaaagaagaatatttttctcttaaactgactgcgttaaaaaaacataaaagtcagagccagcgagattatatgcgcccggagcgtctgcgtgcagttgctcaatttcgcgggcaacaggtcaatagcgatctgggtgaaggttttgttattcataaaatgattctttga

SEQ ID NO: 4741 - DNA, 1539 bp, Escherichia coli
atgcaacagcaaaaaccgctggaaggcgcacaactggtcattatgacgattgcgctgtcactggcgacattcatgcaggtgctggactccaccattgctaacgtggcgatccccactatcgccgggaatctgggctcatcactcagtcagggaacgtgggtgatcacttctttcggggtggcgaatgccatctcgatcccgcttaccggctggctggcaaagcgcgtcggggaagtgaaattgttcctctggtcaaccatcgcctttgctattgcgtcgtgggcgtgtggtgtctccagcagcctgaatatgctgatcttcttccgcgtgattcaggggattgtcgccgggccgctgatcccgctttcacaaagtctattgctgaataactacccgccagccaaacgctcgatcgcgctggcgttgtggtcgatgacggtgattgttgcaccaatttgcggcccgatcctcggcggttatatcagtgataattaccactggggctggatattcttcatcaacgtgccgattggcgtggcggtggtgttgatgacactgcaaactctgcgcggacgtgaaacccgcaccgaacggcggcggattgatgccgtggggctggcactgctggttattggtatcggcagcctgcagattatgctcgaccgcggtaaagagctggactggttctcatcacaggaaattatcatcctcaccgtggtggcggtggtggctatctgcttcctgattgtctgggagctgaccgacgataacccgatagtcgatctgtcgttgtttaagtcgcgcaacttcaccatcggctgcttgtgtatcagcctcgcgtatatgctctacttcggcgcgattgttctgctgccgcagttgttgcaggaggtctacggttacacggcgacgtgggcagggctggcctctgcgccggtagggattattccggtgatcctgtcgccgattatcggccgctttgcgcataaactggatatgcgccgactggtaaccttcagctttattatgtatgccgtctgcttctactggcgtgcctatacctttgaaccgggtatggattttggcgcgtcggcctggccacagtttatccagggttttgcggtggcctgcttctttatgccgctgaccaccattacgctgtccggtttgccaccggaacgactggcggcggcatcgagcctctccaactttacgcgaacgctggcggggtctatcggcacgtcgataaccacgaccatgtggaccaaccgcgagtcactgcaccatgcacagttgactgagtcggtaaacccgttcaacccgaatgctcaggcgatgtacagtcaactggaagggcttggtatgacgcaacagcaggcatcaggctggattgcccagcagatcaccaatcaggggctgattatttccgccaatgagatcttctggatgtcagccgggatattcctcgtcttgctggggctggtgtggtttgctaaaccgccctttggcgcaggtggcggcggaggcggtgcgcactaa

SEQ ID NO: 4742 - DNA, 168 bp, Escherichia coli
atggggttaaaagaaaaatgtgagtatcacccgcgaaagcgagggcgaaggaaaaagagaattaacaacctgagcgaatgctcagaaccggttaatggtgaatggaagagtttggggcggcgaaaagatacaccgaatgagtggattaaacaaccgtttacagtatga

SEQ ID NO: 4743 - DNA, 708 bp, Escherichia coli
atgaatacccaacggaaatacgggagaacctggcattatcctttctcccctggcaccaccagcgatgaccgcattaacgccgattactggcaggatttacaggccatcacgcaactggtgcacacagaaaaactcgacggcgaaaataactgccttaaccgctacggcgtgtttgcccgttcccatgctgcgcctacgcagtcggcatggacttataaaattcgccagcgttggcaactgctgaaaaacgatctcggcgatctggaactgtttggtgaaaatctctacgccgttcattccattgaataccgcgcgctggaacaggacttttacctgtttgccgttcgctgccaggatatgtggctgagctgggaagaggtgcagttttacgccgctctgtttgatttcccctgcgttcccgaaatctccggcccgcagccggggaatgatgaaaaaagctggcaacgtgattttctggcgctgaccaatgcgcgcggcacattcgatccctgggatacgcaaacctgtcaaccctgtacgctggaaggcattgtcagccgaaatcatgatgcgttttctgtcgctgacttttcgcataacgtcttcaagtatgtgcgcaaaaatcatgtcaaaaccactgtgcactggaaacgccactggcaacgggcgcggatggcccatgagttcgtttatggagaacagtcatga

SEQ ID NO: 4744 - DNA, 1113 bp, Escherichia coli
atgatttggcaacttaccgacgataaacgctggtcggcgctacgtcagcgttttagctgggttgaggagatgcatcacacgccacaagaccctgagcatcatggtgaaggcgacgtcggcgtacataccgaaatggtgcttaacgccctcattactctgccagaattccagcaactccccgctcaacagcaggaagttttatgggcggcggcgttattgcatgatgttgaaaagcgcagcactaccgtgcaggaaaacggacgtattcagtctcctggtcatgctcgtcggggcgaactgacggcccgacaaattttatggcgcgatatcccaacgccgttcgtgctgcgcgagcaaattgttgcactggtgcgtctgcatgggttaccgctatggttactggaacgcccggaaccggaacgtttgttgctcacggctgcaatgcgcatcgacacgcgtctgctcgctttgcttgctcgtgccgatctgcttggtcgccaaagcccggatcagcaatcaatgctggaacgcatcgatctgttcgagctgttttgccatgagcaacaatgctggggaaaaatgcgcccgttcgtttctgattccgcacgctggcattacctgacccatgagcaaagttctcctgattttgttccctgggaggctgaaccttttgaggtcattttgctgtgtggcttaccgggtatgggcaaagatcgctatatcaatgaacagtgccagggaatggacgttatcagccttgatgatatgcggcggcgaatcaatgccagtccggacgacaaaaccgctaccgggcgtattgtgcaacaggcaaaagaagaggcgcgcgtttttttacgccagaaaaagccgttcatctggaatgcaacgaacattacccgccagctacgcagccagctcatcagtctgtttacggcttacggcgcacgagtaaaaatcgtttatctggaagtgccatgggcgcaatggaagcagcaaaatgccagacgcgagtatgcagttcctgaagcggtcatgatgcggatggcctcaaggctggaagttcctcaacttgatgaagcacatagcgtggaatatcggatgactgacaggtaa

SEQ ID NO: 4745 - DNA, 2253 bp, Escherichia coli
atggcaaaaaacacatcttgcggtgtccaactgcgtattcgtggcaaagtgcagggcgtcggttttcgtccgtttgtctggcaactggcacagcaattaaatcttcacggcgatgtctgtaatgacggcgatggcgtagaagtccggctgctggaagatccggaaacgtttcttgttcaattgcatcagcactgcccgccactggcgcgtattgatagcgtcgagcgtgagccgtttatctggtcacaactgcccactgagttcaccatccgccagagcgcgggtggcgtcatgaatacgcaaattgttcccgatgccgcgacttgccctgcttgtcttgccgaaatgaataccccaggcgaacgacgctggcgttatccgtttatcaactgtactcactgtggtccgcgtttcaccattattcgcgccatgccttacgaccgcccgtttaccgtgatggcggcgtttccgctgtgtccggcttgtgacaaagagtactgtgacccgctcgatcgtcgcttccacgcccagccggtggcctgcccggagtgtggcccccatcttgaatgggtaagtcatggtgaacatgcagaacaagaggcggcattacaggcagctatcgcacagttaaaaatgggcaacattgtcgccatcaaagggattggcggatttcatcttgcctgcgatgcacgtaacagtaacgcggtggcgacacttcgggcgcgcaaacatcgcccggcgaaaccgctggcggtcatgttgccagtggctgacggtttaccagacgctgcgcgccagttgcttaccacgcccgccgcgccgattgtgctggtggataaaaaatatgtacctgagctttgtgatgatatcgcccctgaccttaacgaagtcggggtaatgttgcctgcgaacccgctccagcatttgctgttacaggaactgcaatgcccgctggtgatgacctccggcaacctgagcggtaaaccaccggctatcagcaacgaacaggcgctggcggatttgcagggcattgccgacggattcttgatacataaccgcgacatcgtgcagcggatggatgattcggtggtgcgcgaaagcggcgaaatgctgcgccgttcgcgggggtatgtgccggatgcgctggctttgcctccgggctttaaaaatgttccgcctgtgctgtgtctcggcgcggatctgaaaaataccttctgcctggtgcgcggcgaacaagcggtgttgagtcagcatctgggcgatttaagtgacgatggcatccagatgcagtggcgcgaagcgttacgcctgatgcaaaacatctacgattttactccgcaatacgttgtgcatgacgcgcatccgggctatgtctccagccagtgggcgcgtgagatgaatctgccgacgcaaacggtgctgcatcatcatgcccacgcagcggcgtgtctggcagaacacctctggcctctggatggcggagatgtcattgcgttgacgctcgacggtattggtatgggggagaacggcgctttgtggggcggcgagtgcttgcgggtgaactatcgcgaatgccagcacctgggcggcttgcccgcagtggcgcttccggggggcgatttggctgcgaagcagccgtggcgaaacctgctggcgcagtgcctgcgctttgtgccggagtggcagaattactctgaaacggcaagtgtgcaacagcaaaactggagcgtgctggcgcgggctattgagcgtggaattaacgcgccgctggcatcgtcgtgtggacgtttgttcgatgccgtagcggcggcgctgggctgtgcgccagccacgttaagttatgaaggtgaagcggcttgtgcgctggaggcgctggcggcttcgtgccacggcgtgacgcatccggtgacgatgccgctggtggacaatcaactggatctcgccactttctggcagcagtggctgagctggcaggctccggttaatcaacgcgcgtgggcgtttcatgatgcgctggcgcagggttttgccgcgttgatgcgtgagcaggccacgatgcggggtatcactacgctggtatttagcggcggagttattcataactgtttgctgcgtgcacgtctggcgcattatcttgctgattttacgttgctcttcccacaaagtttacctgcgggcgatggcgggttgtctctggggcagggggttattgttgcggcgcgttggttggcaggggaagtccagaacggataa

SEQ ID NO: 4746 - DNA, 1014 bp, Escherichia coli
atgatgacgacgatgctggaagtggcgaagcgcgccggggtttcaaaagcgaccgtttcccgcgtgctttcaggtaatggctacgtcagccaggagactaaagatcgcgtgtttcaggcggtagaagagagcggttaccgtccaaacttgctggcgcgcaatctgtcggcgaagagtactcagacgctggggctggtcgtgaccaacacgctttaccatggcatttattttagtgaattactgtttcatgccgcgcgaatggcggaagagaaagggcgacagttgctattggcagatggtaaacatagcgccgaagaagagcgccaggcgattcagtatctgctggatttgcgctgcgacgccatcatgatttacccgcgctttttaagcgtggatgagattgatgacatcattgacgcacacagtcagccgataatggtgcttaatcgccgcctgcgcaaaaacagcagccatagcgtctggtgcgatcataaacagaccagctttaacgccgtggcagagttgataaccgccggacatcaggagattgctttccttaccggctcgatggattcccccaccagcattgaacgtcttgccggatataaagacgcgctggcgcagcatggtattgcgttcaatgaaaaacttatcgctaacggtaaatggacgcccgccagcggtgccgaaggggtagaaacgttgctcgaacgtggggctaaatttagcgcgttagttgccagtaacgacgatatggcgataggtgcgatcaaagcgttacacgagcgcggcgtagcggtgccagagcaggtgtcagttatcggattcgatgatatcgctattgccccctacatcgttccggcgctctccagcgtaaaaattccggtgactgagatgattcaggaaattattggacggctgatttttatgctcgatggcggggatttctcaccgccgaaaaccttcagcggaaaactaatccgccgcggctcactcattgctctttcgcgataa

SEQ ID NO: 4747 - DNA, 1458 bp, Escherichia coli
atggccaaaaattatgcggcgctggcaagctcggtgataacggcactgggcggcgttgataacatctcggcggtcacgcactgtatgacgcgtttgcgctttgttatcaaagatgaccagcttatcgatagtccgacgttgaaaaccatctccggcgtgctcggcgtggtacgtagtgacaaccagtgtcaggtgattataggtaatacggtttcgcaggcctttcaggaagtcgtcagcctgctgccgggagacttgcaacccgcgcctcccgtgggtaaaccaaagctcacgctacgtcgcattggtgcgggggtcctcgatgcgctgatcggcaccatgtcaccgctgatcccggcgattatcggcggatcgatggtcaaactgctggcgatgatcctcgagatgagcggcgtgctgacaaaaggatcgccgaccttaatcattctgaatgtgattggtgacggtgctttcttcttcctgccgctgatggtcgcggcttctgccgccatcaaatttaaaaccaatatgtcgctggcgattgccattgcgggtgtgctggtacatccgagttttattgagctgatggcgaaagcggccctgggtgaacatgttgaatttgccctgattccggtcaccgcggtgaaatacacctacacagtgatcccggcgctggtgatgacctggtgcctgtcatatatcgaacgctgggtggacagcattacgccagcggtgacgaaaaacttcctcaagccgatgctgattgtgttgattgccgcaccgctggcaatcctgctgattggcccgattggtatctggatcggtagcgccatttcggcgctggtttacaccattcatggttatctgggctggctttcagtcgccattatgggcgcgctgtggcctctgctggtaatgacagggatgcaccgcgtctttacgccaaccatcattcagaccattgccgaaaccggcaaagaagggatggtcatgccgtcagagatcggcgctaacctgtcgctgggcggttcatcactggcggtggcatggaaaacgaaaaacccggaactgcgccagacggcgctggctgcggcagcatcagccattatggcggggatttccgaacccgcgttatacggcgtggcgatccgcctgaaacgtccgcttatcgccagtcttatcagcggttttatttgcggcgcggttgccggtatggcggggcttgccagccactcaatggcagcgccggggctatttaccagcgtgcagttcttcgatccggcgaatccaatgagcatcgtctgggtgttcgccgtcatggcgctggcggtcgtgctgtcgttcatcctcacactgttgctcggctttgaggatattcctgttgaggaagcgactgccgaggcgcgaaagcatcagagcgtacaaccgaccgtcgccaaagaagtaagtcttaattga

SEQ ID NO: 4748 - DNA, 1425 bp, Escherichia coli
atgtcagtatttccgcaaggttttttatggggcggcgcgcttgccgccaaccagtctgaaggcgcgtaccgtgaaggcggcaaagggctgaccaccgtcgatatgatcccgcacggcgaacatcgaatggcggtgaaactggggctggaaaaacgttttcagttgcgcgatgacgagttttatcccagccatgaggcgacggatttttatcatcgttataaagaagatatcgccctgatggcagagatgggattcaaggtttttcgcacctcgattgcctggagccgcctatttccgcagggcgatgaactgacgcccaatcagcagggcattgctttttaccgcgcggtatttgaagagtgtaaaaagtacggtatcgaaccgctggtcacgttgtgtcacttcgacgtgccgatgcatctggttactgaatatggctcctggcgtaaccgcaagctggtagagcttttcagccgctacgcccggacctgctttgaagcatttgatggtctggtgaaatactggcttaccttcaatgaaatcaacattatgttgcatagcccgttctccggcgcgggtctggtgtttgaagaaggggaaaatcaggatcaggtgaaatatcaggctgcgcatcaccagctggttgccagtgcgctagccaccaaaatcgcccatgaggttaacccgcaaaatcaggtgggttgtatgctggcgggcggtaacttctacccttacagctgcaagccggaagatgtctgggcggcgctggagaaagatcgggaaaacctgttttttatcgatgtgcaggcgcggggcgcgtatccggcttactctgcccgcgtattccgcgaaaaaggggtaaccatcgacaaagcaccgagcgatgatgagatcctgaaaaacaccgtcgattttgtctctttcagctattacgcctcgcgctgcgcctcggcggagatgaacgccaacaactgcagtgcggcgaacgtggtgaaatcgctgcgtaacccgtatctgcaagtgagcgactggggctggggtattgatccactcggtctgcgtatcaccatgaatatgatgtacgaccgttatcagaagccactgtttctggtggaaaacggcctgggcgcaaaagatgaatttgctgccaatggcgaaattaacgacgactatcgcatcagctatttacgcgaacatatccgcgcaatgggcgaagcgattgcagacggcattccgctgatgggctacaccacatggggctgtattgatttagtttccgcctctacgggtgaaatgagcaaacgctacggttttgtctacgtagaccgtgacgacgcaggcaacggcacgctgacgcgcacgcgtaagaaatcgttctggtggtataaaaaagtgattgccagtaacggtgaagatttagagtaa

SEQ ID NO: 4749 - DNA, 1410 bp, Escherichia coli
atgacggggcgttgccttttcggcttctcaggcgagaagccgttcttattaccggacaatgaaggggtaaagatgaacacttcaccggtgcgaatggatgatttaccgcttaaccgttttcactgtcgaattgctgcgctcactttcggcgcacacctgaccgacggttatgtcctcggcgttattggttacgccattattcagcttacgcccgccatgcaactgacgccgtttatggcggggatgatcggcggctcggcgttacttggtttgtttcttggcagcctggttttggggtggatctccgaccatatcggacggcaaaaaatcttcaccttcagttttatgctgattacgctcgcttcgttcttgcaattttttgccaccacgccagagcatcttattggattgcgcattttgatcggcattggtctgggaggcgattactcagtaggtcacactttgctggctgaattttctccgcgccgccatcgcggtgttttgctgggcgcgttcagcgtggtgtggaccgtaggctatgtgttggcaagtattgccggacatcactttattagcgaaagcccggaggcctggcgctggctgctggcatcggcagctctgcccgcgttgttgattacgttattacgctggggaacgccagaatcgccacgctggctactgcgccaggggcgttttgcagaagctcacgctatcgtgcatcgctactttggtccccatgttttactgggcgatgaagtggcaacggcgacccataaacacatcaaaaccttgttctcttcgcgctactggcggcgcacggcgtttaacagcgtcttctttgtctgcctcgtaatcccatggtttgtgatttatacctggctgccgaccatcgcccaaactattggtctggaagatgcgctgactgccagcctgatgcttaatgcgttgttaattgttggcgcgttattagggttagtgttgacccacttgttagcgcatcgcagatttttactgggaagttttttgctgctaacggcaacgctggtagtaatggcctgtttgccttccggcagttcattaacgctgctgctttttgttctcttcagcaccaccatttcggcagtcagtaatctggtgggcattttgcctgcggaaagttttcctactgacattcgctcgctgggcgtcggttttgccaccgccatgagtcggttgggggcggcggtaagtactggcctgctgccgtgggtgctggcacagtggggaatgcaagccaccttattgctcctggcggcagtgttgttggttggttttgttgtgacctggctatgggcaccagaaaccaaagcactcccgctggtggcggcgggaaatgcaggaggtgcgaatgaacatactgttagcgtttaa

SEQ ID NO: 4750 - DNA, 1455 bp, Escherichia coli
atgtctttatctcgcgcagcgattgtcgaccagctaaaggaaattgttggtgcagatcgcgtaattaccgatgaaacagtattaaagaaaaacagtattgaccgttttcgtaaatttccggatattcatggcatttatactttgccgattccggcagcggtcgtaaaactcggttccacagaacaagtatcccgtgtgctgaattttatgaatgcgcacaaaattaatggtgtgccgcgtaccggtgcttccgctaccgaaggtgggctggaaaccgttgtggaaaactcggtggtgctcgacggctccgccatgaatcaaatcattaatattgatattgagaatatgcaggccacggcgcaatgtggcgttccgctggaggtgctggaaaacgcgttgcgtgaaaaaggttacaccacggggcattctccgcagtcaaagccgctggcgcagatgggcggcctggtggcgacccgcagtatcgggcagttttccacactctacggcgcaatcgaggatatggtcgttggtctggaagcggtgctggcagatggcaccgtcacacgcattaaaaacgtgccacgtcgcgcggctggcccggacattcgtcatatcatcatcggcaacgaaggtgcactgtgctatatcactgaagtcacagtgaaaatcttcaaatttacgccggaaaacaatctcttctatggctatgtgctggaagacatgaaaaccggcttcaacatcctgcgtgaaatcatggtggaagggtatcgtccgtcgattgctcgtttgtatgatgctgaagatggcacccaacacttcacctattttgccgacggcaaatgcgtgctgatctttatggctgaaggtaaccctcgcattgcgaaggcgacgggtgaagggattgctgaaatcgtggcgcgctacccgcagtgccagcgcgtggacagcaagctgatcgaaacctggtttaacaacctgaactggggaccggataaagtggctgccgaacgtgtgcagatcctcaaaaccggcaacatgggctttaccaccgaagtgtccggctgctggagctgcattcacgaaatctacgaaagcgttattaaccgtattcgtaccgagttcccgcacgccgacgacatcaccatgctgggcggtcactcctctcatagctatcagaacggcaccaacatgtacttcgtctacgactacaacgtcgttgactgtaagccggaagaggaaatcgacaagtaccacaatccgctcaacaaaatcatctgcgaagaaaccattcgtctcggcggttcgatggtgcaccaccacggtatcggtaaacatcgcgttcactggagcaaactggaacacggcagcgcgtgggcgttgctggaagggctgaaaaagcagttcgatcctaatggcattatgaacacgggtactatctatccgattgaaaaataa

SEQ ID NO: 4751 - DNA, 1278 bp, Escherichia coli
atgcaacacaactcatatcgccgttggataaccctcgcgataattagttttagcggcggcgttagtttcgacctggcttatttacgttatatttatcaaattcccatggcaaaatttatgggattcagcaataccgagataggtttaataatgagtacctttggtattgcggccattattttctatgcccctagcggcgttattgccgataaattttcacaccgcaaaatgattacttccgcgatgatcattaccggattactgggcctgataatggcaacatatccaccactgtgggtaatgctctgtattcaggtcgcctttgcgataacgacgattttaatgctgtggtcggtgtcgattaaagccgcatcgttgctgggcgatcatagcgagcaagggaaaattatgggctggatggaagggctgcgcggcgtcggtgtaatgtcgctggcggtgtttaccatgtgggtcttttctcgctttgcaccggatgacagcgccagcctgaaaacggtcattattatctatagtgtggtttacattctgctgggcattttgtgttggttttttgttagcgataacaacaatctgcgcagtgccaataacgaagaaaaacagtcattccagcttagcgacatcctggccgttttgcgcatcagcaccacctggtattgcagcatggtgatttttggtgtcttcaccatctacgccattctgagttactccaccaactatctgaccgaaatgtacggcatgtcactggtggcagcgagctacatggggattgtgatcaacaaaatcttccgcgcgttatgcggcccacttggcggcattatcaccacctacagcaaagtgaaatcccctacccgcgtggtccaaatcctttccatcatcggtttgctggcattgacagccctgctcgttacgaactctaacccgcaatcggtcgcgatggggattggcttgattttattactgggattcacctgttacgcctcacgcgggctgtattgggcctgccctggcgaagcgagaacaccgtcttacattatgggcaccacggtaggtatttgttcggtgattggattcctgccggatgtcttcgtttacccgattatcggctactggcaagacaccctgcccgctgcagaagcctaccgcaacatgtggctaatgggcatggcggcgcttggcatggtgatcatctttacctttttgctgttccaaaaaattcgtactgctgatagcgcccccgcaatggctagcagcaagtaa

SEQ ID NO: 4752 - DNA, 1479 bp, Escherichia coli
atgtcgaaaaaatacatcatagggattgatggcggaagtcagagcacaaaagtggtgatgtacgatctggaaggtaatgtggtttgcgaaggcaaaggcttattgcagccgatgcacacgccagatgccgataccgcagaacatcctgacgacgatttatgggcatcattatgctttgccggccacgatttgatgagccagtttgccgggaataaagaagatattgtcggcattggcctgggatccatccgttgctgccgtgcgttattgaaagccgatggcacgcctgctgcgccgttgattagctggcaggatgcacgcgtaacgcgtccctacgaacacactaatcctgacgtggcatatgtcacctctttttcgggttatctgacgcaccgtttaacgggcgaatttaaagataatatcgccaactattttggtcagtggccggtggattataagacctgggcatggagcgaagatgccgcggtaatggaaaagtttaatatcccccgccagatgctttttgacgtgcaaatgccgggcaccattcttgggcatatcacaccacaagctgcgctggcgacacatttcccggctgggctgccggttgtttgtaccaccagtgataaaccggtagaagctctgggagccgggttactggatgatgaaacggcggtaatttctcttggcacctatatcgcgttaatgatgaacggcaaagcactgccgaaagatccggtcgcgtactggccgattatgtcttctattccgcaaacattgctgtatgaaggttacggtattcgcaaaggcatgtggacggtgagctggctgcgcgacatgttaggcgagtcgttaattcaggatgccaaagcacaggatctttcaccggaagatttgctcaacaaaaaagcgtcttgcgtgccacctggttgtaatgggctgatgacggtgctggactggctgaccaatccgtgggaaccgtacaaacgcggaattatgatcggctttgattccagtatggattacgcatggatatatcgttcgatactggaaagcgtggcgctgacgctgaagaataattacgacaatatgtgtcatgaaatgaatcactttgcaaagcatgtgatcattactggcggcggttcgaacagcgatctgtttatgcagatttttgccgacgtgttcaaccttccggcacgccgtaacgccattaacggttgtgcaagtctgggggcagcgattaatacggcggtaggtctggggctatacccggattacgcaacggctgtcgacaaaatggttcgcgtgaaagatatctttatgcctgttgagaacaatgccaaacgctacgacgcgatgaataaaggcattttcaaggagttaaccaaacatactgatgtaatcctgaaaaaatcgtatgaagtgatgcatggggaattggggaatgcggattcgatccagagctggtcgaatgcgtaa

SEQ ID NO: 4753 - DNA, 672 bp, Escherichia coli
atgcagtacccgattaacgagatgttccagaccctgcaaggtgagggttactttaccggcgtccccgccatttttattcgtttacagggatgtccggttggctgtgcctggtgcgacaccaaacacacctgggaaaagcttgaggatcgggaagtctcccttttcagcattctggcgaagaccaaagagagtgataagtggggggcggcgagcagtgaagatttgctggctgtcattggccgtcagggatacaccgcgcgtcacgtggtgattacgggtggtgagccttgcattcatgatttgctgccactgactgacctgctcgaaaagaacggttttagctgccagatcgaaaccagtggtactcatgaggtacgctgcacaccgaatacctgggttaccgtatcgccaaagctgaacatgcgcggcggctatgaagtattgtcgcaagccctggagcgagccaacgaaatcaagcatccagtgggacgcgtacgtgatattgaagcactggacgaattgctggcgacgctgaccgatgataaaccgcgagtcattgcacttcagccaattagccagaaggaagatgctacgcgtttatgtatcgatacctgcattgcgcgcaactggcgtttgtcgatgcagacacataaatatttgaatattgcctga

SEQ ID NO: 4754 - DNA, 1149 bp, Escherichia coli
atgcgtatttttctcttacttctgatgctatgcggttttcaggtattcgctgaacgattgccttcagtgactgacttaaccgggacattaacgacagaagaacaaagtgctttaaatcaacaattacagactctcgagcagcaaaaccacttccaggtggccgtgttggttacgccgacaacagggggcaaaaacattaaacttgcagcctcgcagagatacggggtatatcactggaaacccgttggagagaagcgatatggcgaaggtatcttaattctcgtcgtttggccggaagggctggcgtcaatgaagattggacatggactggaacagatgttgccgccggaacaagctgcgcaaattgttcgttaccatatgcagccagaattcgaaaaaaacaatctctttgctggattaacgggcggaattgaaagcatcgcacagtttacccatatcaaagcgaaccttagccctttggatcctttagccaatcatctgtttgctaatccgcaactttcgctgccatgccttgcctggacagtgctgatgatcgttgccatcattgtcctctggcgatttaccagccgtccaggacctggcatatggatgatatcaatgattacacctacggtctggtttttctgctttcaggacgatgtcatcattcggcgggtgtcggtcgtttgttttagtttatttttcgcagcaatctgctggcagcgtctcgcagtagtttttaatatgtgccgcgtatttcctatgatgctggccccaaaaaataaaaacgcgaaagtgaaaaaacaaaagaagactccgcaagttcgtgaatcaggacgaaattcattgtttgtcgtgatgctgataattattgtgggatggtgcctggtgttcgccagtaataaagatattgcattcatctcaacaattattgggttaattgatcattttatcggcccaataaccattgctggcatcgttctgctgatcattgtggccaaatttactggcaatcttaagctggggtcaggagaaaaaagcaacaggaaaacggggaatcgtaatgctcattctcgctcttcgtcgagaaattctttccgcggtggtggcggttcttcaggaggcggcggttcatccggccgttggtga

SEQ ID NO: 4755 - DNA, 903 bp, Escherichia coli
gtgatcgtaatgcgcttaatctttattctattcactttgtggtgccttcctgggcttgcccagcaaattgctgtgccggaactgcgccaacaggtgaccgatattactggtacgttaagcacttctgaacaacaatcactgacacagcaactgcaggatattacacataaaacacgggcgcaggtcgctgtattagtagtgccgtccaccggagacgattccattgaacaatatgctacaagggtttttgatagctggaaactgggagataagcagagaaacgatggtattttacttctggttgcctgggaggatcatgctgttcgtattgaggttggctacgggctggaaggggtggttaccgacctgcaagcggcgaagattatcagggatatattgatccctgccttcaaaagtgatgacctgatgggtggattaacactggcaagcgaaaatatcggcgcgcttctgttgaatggtgaattaccggaagacaggggggattattacagtatcaatccccctattccattatcgcttgctgtaattatattgctggcggtactttcatattttattgtttttaccgatccgtcgaatttaccctggatcactctcactggcgccatttacgggatggtattcctctatgttgccgagccaggaccatggaccaatttaatcgttgcctgcggtatgttaacgccttttgcgatcgtaccactggttgttttttggcttatcgtcaataaaaagctacgcgccaaatacaaaaaactcagtaaagaaagagcttcaagaaaaggttcttcttcatcctcttccggtggaggctcaagtggcggcggatttagcggcgggggcggttcttctggcggtggcggcgcgtccggtcgctggtaa

SEQ ID NO: 4756 - DNA, 897 bp, Escherichia coli
atggacatttttatttcgaaaaagatgcgcaatttcattttattagcgcaaaccaataatattgcccgggcggcagaaaaaatccatatgacggcttcgcgatttggcaaaagcattgccgcgctggaagaacaaattggctatacgctatttacccgcaaagataataatatcagcctcaataaagccggacaggaactgtatcaaaaactgttcccggtttatcaacgactttctgcgattgataatgaaatccataactcaggacgtcgttcacgagacattgtgataggcatagataatacttatccgaccattatttttgatcagttgattagtctcggagataagtacgaaggcgtgaccgcccagccagttgagttcagcgcaaatggcgttatcgataatctttttgaccgtcagttagattttataatctccccacagcatgtatctgcacgagttcaggaactggaaaacctgactatcagtgaactaccgccgctgcgattgggctttctcgtttctcgccgttatgaagagcgacaagagcaagagctgcttcaggagctgccctggctacaaatgcgctttcaaaactgggctaacttcgaagcaatgattgatgcgaatatgcgtccttgtgggatcaatccaaccattatttatcgtccctatagttttatggccaaaatcagcgacgtggagcggggacattttctgacggtgatcccgcattttgcctggcgactggtgaatccggcaacgctgaaatattttgatgcgccgcacaggccgatgtatatgcaggaatatctttattcaatcagaaatcatcgttataccgccacgatgcttcagcatattgctgaagatcgtgacgggacaaaccattaa

SEQ ID NO: 4757 - DNA, 1110 bp, Escherichia coli
atgctaagagaaactccagaaatacagcttgatttggcagttacaggaatgcattgtgataatgcgtatggaaatacaatacatattatagaacaagataattttaatattatcaaggttgtggatataaatatcaatacaacttcacatactcacattctccattcaatgagtgtttgcctcaattcgtttggtgattttttttcaaataacacatatgatgcggttatggttttaggcgatagatatgaaatattttcagtcgctatcgcagcatcaatgcataatattccattaattcatattcatggtggtgaaaagacattagctaattatgatgagtttattaggcattcaattactaaaatgagtaaactccatcttacttctacagaagagtataaaaaacgagtaattcaactaggtgaaaagcctggtagtgtgtttaatattggttctcttggtgcagaaaatgctctttcattgcatttaccaaataagcaggagttggaactaaaatatggttcactgttaaaacggtactttgttgtagtattccatcctgaaacactttccacgcagtcggttaatgatcaaatagatgagttattgtcagcgatttctttttttaaaaatactcacgactttatttttattggcagtaacgctgacactggttctgatataattcagagaaaagtaaaatatttttgcaaagagtataagttcagatatttgatttctattcgttcagaagattatttggcaatgattaaatactcttgtgggctaattgggaactcctcctctggtttaattgaggttccatctttaaaagttgcaacaattaacattggtgataggcagaaaggccgtgttcgtggagccagtgtaatagatgtacccgttgaaaaaaatgcaatcgtcagagggataaatatatctcaagatgaaaaatttattagtgttgtacagtcatctagtaatccttattttaaagaaaatgctttaattaatgctgttagaattattaaggattttattaaatcaaaaaataaagattacaaagatttttatgacatcccggaatgtaccaccagttatgactag

SEQ ID NO: 4758 - DNA, 1257 bp, Escherichia coli
atgagaacaaaaattattgcgataattccagcccgtagtggatctaaagggttgagaaataaaaatgctttgatgctgatagataaacctcttcttgcttatacaattgaagctgccttgcagtcagaaatgtttgagaaagtaattgtgacaactgactccgaacagtatggagcaatagcagagtcatatggtgctgattttttgctgagaccggaagaactagcaactgataaagcatcatcatttgaatttataaaacatgcgttaagtatatatactgattatgagagctttgctttattacaaccaacttcaccctttagagattcgacccatattattgaggctgtaaagttatatcaaactttagaaaaataccaatgtgttgtttctgttactagaagcaataagccatcacaaataattagaccattagatgattactcgacactgtctttttttgaccttgattatagtaaatataatcgaaactcaatagtagaatatcatccgaatggagctatatttatagctaataagcagcattatcttcatacaaagcatttttttggtcgctattcactagcttatattatggataaggaaagctctttagatatagatgatagaatggatttcgaacttgcaattaccattcagcaaaaaaaaaatagacaaaaaatactttatcaaaacatacataatagaatcaatgagaaacgaaatgaatttgatagtgtaagtgatataactttaattggacactcgctgtttgattattgggacgtaaaaaaaataaatgatatagaagttaataacttaggtatcgctggtataaactcgaaggagtactatgaatatattattgagaaagagctgattgttaatttcggagagtttgttttcatcttttttggaactaatgatatagttgttagtgattggaaaaaagaagacacattgtggtatttgaagaaaacatgccagtatataaagaagaaaaatgctgcatcaaaaatttatttattgtcggttcctcctgtttttgggcgtattgatcgagataatagaataattaatgatttaaattcttatcttcgagagaatgtagattttgcgaagtttattagcttggatcacgttttaaaagactcttatggcaatctaaataaaatgtatacttatgatggcttacattttaatagtaatgggtatacagtattagaaaacgaaatagcggagattgttaaatga

SEQ ID NO: 4759 - DNA, 1041 bp, Escherichia coli
atgagtaatatatatatcgttgctgaaattggttgcaaccataatggtagtgttgatattgcaagagaaatgatattaaaagccaaagaggccggtgttaatgcagtaaaattccaaacatttaaagctgataaattaatttcagctattgcacctaaggcagagtatcaaataaaaaacacaggagaattagaatctcagttagaaatgacaaaaaagcttgaaatgaagtatgacgattatctccatctaatggaatatgcagtcagtttaaatttagatgttttttctaccccttttgacgaagactctattgattttttagcatctttgaaacaaaaaatatggaaaatcccttcaggtgagttattgaatttaccgtatcttgaaaaaatagccaagcttccgatccctgataagaaaataatcatatcaacaggaatggctactattgatgagataaaacagtctgtttctatttttataaataataaagttccggttggtaatattacaatattacattgcaatactgaatatccaacgccctttgaggatgtaaaccttaatgctattaatgatttgaaaaaacacttccctaagaataacataggcttctctgatcattctagcgggttttatgcagctattgcggcggtgccttatggaataacttttattgaaaaacatttcactttagataaatctatgtctggcccagatcatttggcctcaatagaacctgatgaactgaaacatctttgtattggggtcaggtgtgttgaaaaatctttaggttcaaatagtaaagtggttacagcttcagaaaggaagaataaaatcgtagcaagaaagtctattatagctaaaacagagataaaaaaaggtgaggttttttcagaaaaaaatataacaacaaaaagacctggtaatggtatcagtccgatggagtggtataatttattgggtaaaattgcagagcaagactttattccagatgaattaataattcatagcgaattcaaaaatcagggggaataa

SEQ ID NO: 4760 - DNA, 624 bp, Escherichia coli
atgagtaaaaagttaataatatttggtgcgggtggtttttcaaaatctataattgacagcttaaatcataaacattacgagttaataggatttatcgataaatataaaagtggttatcatcaatcatatccaatattaggtaatgatattgcagacatcgagaataaggataattattattattttattgggataggcaaaccatcaactaggaagcactatttaaacatcataagaaaacataatctacgcttaattaacattatagataaaactgctattctatcaccaaatattatactgggtgatggaatttttattggtaaaatgtgtatacttaaccgtgatactagaatacatgatgccgttgtaataaatactaggagtttaattgaacatggtaatgaaataggctgctgtagcaatatctctactaatgttgtacttaatggtgatgtttctgttggagaagaaacttttgttggtagctgtactgttgtaaatggccagttgaagctaggctcaaagagtattattggttctgggtcggttgtaattagaaatataccaagtaatgttgtagttgctgggactccaacaagattaattagggggaatgaatga

SEQ ID NO: 4761 - DNA, 660 bp, Escherichia coli
atgattaagattgagaatttgacgaagtcttatcgcacgcccactgggcggcattatgtttttaaaaatttgaatattatttttcctaaaggctataacattgccctgattggtcaaaatggagccggtaaatcaactttacttcggataattggtggtatagatcgtcctgatagtgggaacattattacagaacataaaatttcatggcccgttggattggctggtggatttcaaggaagtttaaccggtcgtgaaaatgttaaatttgttgcccgactatatgcaaaacgcgatgagttaaatgagagggttgattttgttgaagagttttccgaactcggaaaatatttcgatatgcccattaaaacttattcttctggcatgaggtcaaggttagcttttggattaagtatggcttttaaattcgactattatcttattgatgaaatcactgctgttggagacgcaaagtttaaaaagaaatgttcagatatattcgataaaataagagaaaaatctcatttaataatggtgtcacatagtgaacgagctttaaaggagtattgtgatgttgctatttatcttaacaaagaggggcaaggtaaattttataaaaatgttacggaagccattgctgattacaaaaaagacctatag

SEQ ID NO: 4762 - DNA, 1797 bp, Escherichia coli
atgtttgataaatatagaaaaacactcgtagccggaactgtggcgataacccagggtttgtcagcatcgggggtgatggctgcgggttttaaaccagcgccacctgccgggcaactgggtgcggtcattgtcgatccctacggcaatgcaccactgaccgctttggttgacttagatagccatgttatttctgacgtcaaagttaccgtccatgggaagggcgaaaaaggcgtagaaatcagctatcccgtgggtcaggaatcactaaaaacttacgatggtgtaccgatttttggtctttatcagaaatttgctaacaaagtgaccgttgagtggaaagaaaacggcaaggtcatgaaagatgattatgtggtgcacacttcggccatcgtcaataattacatggataaccgctctatctccgatttacaacagaccaaagttattaaagtcgcaccgggttttgaagatcgcctctatctggttaatacccacacctttaccgcccaaggttccgatctccactggcatggtgagaaagataaaaatgccggtatccttgatgcgggtccggcaaccggcgcactcccttttgatatcgcgccctttactttcatcgtcgataccgaaggtgaataccgctggtggctggatcaagacactttctacgatggtcgtgaccgcgatatcaacaagcgtggttatctgatgggtatccgcgaaacgccacgcggcacctttaccgctgtacaaggtcagcactggtacgagttcgacatgatggggcaggtgctcgaagatcacaaactaccgcgcggatttgctgacgccactcatgagtccattgagacgccaaatggcacggtactgttgcgcgtaggtaagagtaactatcgtcgcgatgacggcgtacacgtcaccaccattcgtgaccatatcctcgaagtcgataaatctggtcgcgttgtcgatgtatgggatctgaccaagatcctcgatccgaaacgcgatgcactgctcggcgcgctggatgcaggtgcagtttgcgttaacgttgaccttgcccatgcaggacaacaggcaaaactggaaccagatacaccgttcggcgacgcgctgggtgtagggccaggccgcaactgggcgcacgtgaactctatcgcctatgacgcaaaagatgactctatcatcctctcctctcgccaccagggtgttgtgaagattggtcgtgataagcaagtgaaatggatccttgcgccctctaaaggttgggaaaaaccgctggccagcaagctgctgaaaccggttgatgctaacggtaagccaattacctgtaacgaaaatggcctgtgcgaaaactcagacttcgactttacctacacccagcataccgcctggatttccagcaaaggaacgctcaccatttttgataatggcgatgggcgtcatctggaacaacctgccttaccaaccatgaaatactctcgctttgtggaatataagattgatgagaagaaaggcaccgttcagcaagtgtgggaatacggtaaagaacgtggctacgatttctatagcccgattacctccatcattgaatatcaagccgaccgtaacaccatgtttggcttcggtggttctattcatttgttcgatgtcgggcagccaaccgtcggtaagttgaacgaaatcgattacaaaaccaaagaagtgaaagtggaaatcgacgtgctgtcagataaacccaatcagactcactaccgtgcgctgttagtccgtccacaacagatgttcaaataa

SEQ ID NO: 4763 - DNA, 171 bp, Escherichia coli
atgtttattgcctggtactggattgtattaattgttctactggctggtggctattttcttcatcttaaacgttactgtaaagcttttcgccatgacagagatgcgctgttagctgcccgaagtaaattagataaacgctccgataaagaagtgtttgaaaagcatcaataa

SEQ ID NO: 4764 - DNA, 564 bp, Escherichia coli
atgttaaaaaaaacattgttatctatgttcgcaaccgcattgttatcaggcgttgcttttaacgctcttgctgacgatgctaatcagggttcaggtaaaattacttttaaaggtgaagttatcgatgcaccttgttctattgctcctggtgatgaagatcagacaataaacctcggtgaagttgctgataccgtattaaaaagcggtcagaaatcactgcctgtagatgtcaccattcatttgcaggattgtattttatctgacggcactaacactgttgataaagtcaaaatcacctttagttctgccagtgttgacgctaccgactccaacctgcttaaaaacactctggaaggtaacatcggcggcgcaactgatgtaggcgtacgtctggtgaaatcagacaacaccaacgtgactcttggcactccaatcactatcaacttcccgacgactaactcttaccaggagttgaactttaaagcccgtatggagtctctgggacgcaccgcgaccccgggtaacgtgcaggcacaggctaattacgtactcgactacaagtaa

SEQ ID NO: 4765 - DNA, 2523 bp, Escherichia coli
atgaacaataaaaacacgttttcccgggataagttatcccatgcaattaaaaatgccctgtctggcgttgtgtgttccctactcttcgttttgccagtccacgccgtagaattcaacgtcgatatgattgacgcagaagaccgtgagaatatcgacatctctcgttttgagaaaaaaggctatatcccccctggtagatacctcgttcgtgtgcaaataaataaaaatatgttgccacaaacgttaatactggaatgggtaaaagccgataatgaaagtggttcgttactctgcttaaccaaagaaaatttgactaatttcggtcttaatacggaatttattgaatcattgcaaaacatagctggcagcgaatgtctcgatttaagccaacgtcaggagttaacgacacgacttgataaagctacgatgatattatcgctaagtgttccccaggcatggttaaaataccaggcaacaaactggacgccaccagagttttgggataccggtatcgccgggtttatccttgattacaacgtgtacgccagccagtatgccccacatcacggagacagcacccaaaacgtcagctcctatggtacgttaggctttaacctcggcgcatggcgcttacgtagcgattaccaatataatcagaattttgctgatggacgctcggtaaaccgcgacagcgaatttgcgcgaacttatctgtttcgccctatcccctcctggtcgtcaaaattcactatgggccagtacgacctgagctccaatctttacgataccttccactttactggcgcatcgctggaaagtgatgaaagcatgctgccgccagatttacagggttatgcgccacaaattaccggcatcgcgcagaccaacgcgaaagtaactgtggcacaaaatggtcgtgtactttatcaaaccactgtcgcgccaggcccttttactatttctgatttggggcaatcgtttcaggggctgctggatgtcacagtggaagaagaagatggccgcaccagcaccttccaggttggctccgcatccattccctatttaacccgtaaagggcaagtgcgctataaaacgtcactgggaaaaccgacatccgtcgggcataacgatatcaataatccctttttctggacggcggaagcctcctggggctggctgaacaatgtgtcgttgtatggtggtggcatgttcaccgctgatgattatcaggctatcactaccggtattggctttaaccttaaccaattcggttcgctttcttttgatgtcactggagcagacgcgtctttacagcaacaaaatagcggcaatctgcgtggttacagctatcgcttcaactatgcaaagcatttcgaatcgacaggcagtcagattaccttcgcgggttatcgcttctcagataaagattacgtgtcgatgagtgagtacctcagctcgcgtaatggcgatgagtcaatcgataatgaaaaagagagttatgtcatttccttgaaccagtactttgaaacgctggaattaaactcttatctcaacgttacacgcaatacttattgggacagcgccagcaataccaactactccgtatctgtaagcaaaaactttgatattggcgatttcaaaggtatatctgcatcgctggcagtaagtcgaatccgctgggatgacgacgaagagaatcaatattacttctctttctctctacctttacaacaaaaccgcaacatctcctacagtatgcagcgaacgggaagcagtaatacttcgcagatgatttcctggtacgattcatcagatcgcaacaatatctggaatatttcagcgtcggcaacggacgacaatatacgtgatggcgaaccaacactgcgcggcagctaccagcactattcgccgtggggacgtctgaacattaatggcagtgtacagccgaatcagtacaattctgttaccgcaggctggtacggttcacttaccgctacacgtcatggtatcgcccttcacgattatagctatggcgataacgcccgcatgatggtcgataccgatggcatctccggcattgaaatcaactctaaccgtaccgttaccaacgggctgggcatcgccgtgataccttcgttatcgaactacaccacctccatgttgcgggtgaacaataacgatctgccagaaggtgtcgatgtcgaaaactcggttattcgcaccacgctcacccagggtgccatcggctacgcaaaactgaatgccaccaccggttaccaaatcgtcggcgttattcgtcaggaaaatgggcgcttccctccactaggtgtgaatgtcacggataaagcgacaggtaaagatgtgggcctggtcgcggaagacggcttcgtttatctcagcggtattcaggaaaatagtactctgcatttaacctggggtgataatacctgtgaagtcacgccgccaaaccaaagtaacattagcgaaagcgcaataattttaccttgtaaaacagtcaaataa

SEQ ID NO: 4766 - DNA, 741 bp, Escherichia coli
atgaaatcaccattaatcacaacaggaatgatttgtttactggggatctgcaactttgcccaggcgactgtctctcccgacagaacacgcatcatttttaatgcttcgaataaaagcgcaacggttcgcctgaccaaccaaagtaaaatcgatccctatctggctcagtcgtggattgaagatgccagcggtaaaaaaacgcgtgattacatctcgacattgccgccgatggaacgtattgagcctgatgaacagatacaaattcgcctgatggcactggcctcgttaaacgacttaccacaggaccgagaaacgttgttctactataacgtgcgagaaattccgccgcgcgccaaagaacagaatgtaatgcaaatcgccatgcaaagccgcctgaagctattctggcggccaaaagcgattgagttaaaagagggggagatgattcctctgcaaaaagtaacgattacccgcaccgccgccggtctgaccctgaataacccgacgccttatcatattaccgtcggttatatcggcactaatggcaagacactgatgcccggtgcggacagtattatggtggtaccatttacttctgcaactcaacacctaagcagcctgccctctaccttccagttaggctttgtggcggactacggcgggctggagatgtttaaagtcgaatgtaattccatccaatccctctgccaaagctctcctgctaagaaggggaaaatatga

SEQ ID NO: 4767 - DNA, 1050 bp, Escherichia coli
atgattacgctttttcgtttactggcgattctttgcctgttttttaacgtttcagcttttgctgttgattgctatcaggatgggtacagaggaacaaccctcataaatggagatttaccagcgttcaaaattccagagaacgcgcaacctgggcaaaaaatttgggagagtggagatattaatatcacggtttattgtgacaatgcaccaggatggacaacagacaatccatcagaaaatatctatgcctggatcaaattaccccaaataaatagtgccgacatgttgaataatccatatttaacctttggcgtgacttataatggtgtagattatgaagggataaatgaaagaattgatactcatgcatgcctggataaatatgagcaatactataatgggtattattatgaccctgtatgcaatggcagtacccttcaaaaaaatgtaacatttaatgcccattttcgcgtctatgtaaaattcaaaagccgcccagcaggagatcagacggtgaactttggcatagtcaacgtgttacaattcgatggcgaaggaggggcaaacatgtcctctaacgcgaagaatttacgctatgtgattacgggattagataatatttcattccttgactgtagtgtcgacgtccggatttttccagaaagccagatagttaatttcgggcaaattgctgcaaactctattgctacttatcgaccaaaagctgcatttagcgtatctactataaaagatgttgctgccgattgtaccgagcaatttgatgttgccaccagcttttatacgacagatacgttacatgatgatacgcatctggaaatgggtaatggtttgttgatgcgtattactgatcaaaaaacacaagaagacattaagtttaatcagtacaaacgcttcaccacatatattccaggtcagactggagcgatagttacccgtgattaccaggctgaactttcacaaaaaccgggggagactctcgtttatgggcctttcaaaaaagatctcatcgtaaaaataaactataactga

SEQ ID NO: 4768 - DNA, 1662 bp, Escherichia coli
atggatgatatcgttaattctgtgccctcctggatgtttaccgcgattatcgccgtatgcattctgtttattattggaattattttcgccaggctctatcgtcgcgcttcggcagagcaagcatttgttcgtactggtttaagtgggcaaaaagtggtgatgagcggtggcgcaatcgtgatgccgatctttcatgaaataattcccatcaatatgaataccctgaagctggaagtcagccgctcaaccattgatagcctgattacgaaagatcgtatgcgtgttgatgttgtagtggctttctttgtacgggtaaaaccgtcagtagaaggcatcgccactgcggcccagacgctggggcaacgcaccctgtcgcctgaagacttacgtatgctggtggaagataaatttgtcgatgccctccgtgcaacagcggcacaaatgaccatgcatgagttacaggatacccgcgagaacttcgtgcagggagtacaaaataccgtagctgaagatctgtcgaaaaatggcctggaactggaaagcgtttcacttaccaactttaaccagacctcgaaagaacatttcaatccgaacaatgcctttgacgccgaaggtttaaccaaactgactcaggagacggagcgccgtcgtcgcgaacgtaacgaagttgaacaggatgtggaagtcgcagtgcgtgagaaaaaccgtgatgcactttcgcgcaagttggagattgaacaacaagaagcgtttatgacgcttgagcaggagcagcaggttaaaacccgtaccgctgagcagaatgcgaaaattgcggcttttgaagctgaacgtcgtcgtgaagcagagcagacgcgaattctggctgaacgacagattcaggaaacggaaatcgaccgcgaacaggccgtccgctcaagaaaggttgaggccgaacgtgaagttcgcattaaagagatcgaacagcagcaggtcaccgaaatcgctaaccagacgaaatcgatcgctattgccgccaaatcggaacaacagtcccaggcagaagcgcgtgctaaccttgcactcgcagaagcagtaagcgcccaacaaaacgtagaaaccactcgccagactgccgaagccgatcgtgctaaacaagtggcgttgatcgccgcagcgcaggatgcagaaaccaaagcggttgaactgaccgtgcgggcgaaagcagaaaaagaagccgcagagatgcaggcggcggctatcgttgagttagccgaagctacacgtaaaaagggtctggcggaagcagaagcacaacgtgcgctgaacgatgctatcaacgtactttctgatgaacaaaccagccttaaattcaaactggcattattgcaggcgctgcctgcggtaattgagaaatccgttgagcctatgaaggctatcgacggcatcaaaattattcaggtcgatgggctgaatcgtggtggcgctacgggtgatgcaaacacggggaatgtggggggcggaaacctggcagaacaagcgttatcagccgcactctcttaccgcacacaggcaccgctgattgactccttgctcaatgaaattggcgtttcaggcggctcactggcggcattgacttcatccttaagctcaacaactcccgtcgaagaaaaagcagagtaa

SEQ ID NO: 4769 - DNA, 861 bp, Escherichia coli
atgatcgctattactggtgccactggccaacttggtcactatgttattgaatccttgatgaaaacggttcctgccagccaaatagtggctatcgttcgtaatccggcaaaagcacaggtactgacagcacaaggcattaccgtgcgtcaggctgattacggcgatgaagccgcactgacatctgcgcttcagggagtggaaaaactactgctgatctcttccagcgaagtgggtcaacgtgccccgcagcatcgtaatgttattaatgccgcaaaggcggccgacgtgaaatttatcgcttataccagcctgctacatgccgattcctccccgctcggcctcgccgatgagcacatcgagacggagaaaatgctggctgattctggcatcgtttacactctgctgcgcaacggctggtacaccgaaaactacctcgccagcgccccggcagcactggaacacggcgtatttatcggtgccgcgggcgatggcaagattgcctcagcaacgcgggctgattatgcggtagctgcggcgcgcgtaattagcgaagccggtcatgaaggcaaggtttacgaactggcgggcgatagtgcctggacactgacacagttagcggcagaactcaccaaacagagcggcaaaccgattacctatcaaaacctgagcgaagccgatttcgctgcggcactgaaaagcgtcggactgcctgatggactggcggatatgctggcggattctgacgttggcgcatcgaaaggcggtctgtttgatgacagcaaaacgcttagcaaattgattggccgcccaacgacaacgttagccgaaagcgtaagccatctttttaatgttaataactag

SEQ ID NO: 4770 - DNA, 1944 bp, Escherichia coli
atgattaagtttagcgcaacgctcctggccacgctgattgccgccagtgtgaatgcagcgacggtcgatctgcgtatcatggaaaccactgatctgcatagcaacatgatggatttcgattattacaaagacaccgccacggaaaaattcggactggtacgtacggcaagcctgattaacgatgcccgcaatgaagtgaaaaacagcgtactggtcgataacggcgatttgattcaggggagtccgctggcagattacatgtcggcgaaaggattaaaagcaggtgatattcacccggtctataaggcattaaatacgctggactataccgtcggcacgcttggcaaccacgagtttaactacggtctggattatctgaaaaatgcgctggcgggagcgaaattcccttatgtaaatgccaacgtcattgacgccagaaccaaacagccaatgtttacaccgtatttaattaaagacaccgaagtggtcgataaagacggaaaaaaacagacgctgaagattggttatattggcgtcgtcccgccacaaatcatgggctgggataaagctaatttatccgggaaagtgacggtgaatgatattaccgaaaccgtgcgcaaatacgtgcctgaaatgcgcgagaaaggtgccgatgtcgttgtcgttctggcgcattccgggctgtctgccgatccgtataaagtgatggcggaaaactcagtttattacctcagtgaaattccgggcgttaacgccattatgtttggccatgctcacgccgttttcccaggtaaagattttgctgatatcgaaggggctgatatcgcgaaaggcacgctgaatggtgttccggcggtaatgccaggcatgtggggcgatcatcttggtgtggtcgacttacaactcagtaatgacagcggtaaatggcaggtgacgcaggcgaaagcggaagcacggccgatttacgacatcgcgaataaaaaatccctcgcggcggaagacagcaagctggtagaaacactcaaagccgatcacgatgccacacgccagttcgtcagcaagccaatcggtaaatctgccgacaatatgtatagctatctggcgcttgtgcaggacgatccgaccgtgcaggtggtgaacaacgcgcaaaaagcgtatgtcgagcattacattcagggcgatccggatctggcaaaactgccagtgctttcagctgccgcaccgtttaaagttggtggtcgcaaaaatgaccccgcaagctatgtggaggtggaaaaaggccagttgaccttccgtaatgccgccgatctttatctctaccccaatacgctgattgtggtgaaagccagcggtaaagaggtgaaagagtggctggagtgctccgccggacagtttaaccagattgatcctaacagcacgaaaccacagtcactcatcaactgggatggtttccgcacctataactttgatgttattgatggtgtgaattatcagattgatgttacccagcccgcccgttatgacggcgagtgccagatgattaatgccaatgcggaaaggattaagaacctgacctttaacggcaagccgattgatccgaacgccatgttcctcgttgccaccaataactatcgcgcttacggcggcaaatttgccggtacgggcgacagccatatcgcttttgcttcaccggatgagaaccgctcggtgctggcagcgtggattgctgatgagtcgaaacgtgcgggggaaattcacccggcggcagataacaactggcgtttagcaccgatagctggcgataagaaactggatatccgtttcgaaacctctccgtcagataaagccgcagcgtttattaaagagaaagggcagtatccgatgaataaagtcgcgaccgatgatatcgggtttgcgatttatcaggtggatctgagtaagtaa

SEQ ID NO: 4771 - DNA, 3780 bp, Escherichia coli
atgagtttatggaaaaaaatcagcctcggcgtggttatcgttatcttactgttgctgggatcggtggcgtttctggtgggcaccaccagcggcctgcatctggtatttaaagcggcggatcgctgggtgccaggactggatattggcaaggtcaccggcggctggcgcgatctcaccttgtctgacgttcgttatgagcagccaggcgtggcggtaaaagcgggcaatctgcatctggcggtcgggcttgagtgcctgtggaacagtagcgtttgtattaatgatctggcgctgaaagacattcaggtcaacatcgacagtaaaaaaatgcctccttctgaacaggttgaagaagaggaagatagcggtccgctggatctctccacgccgtatcccattaccctgacacgggtggcgctggacaacgtcaacatcaagattgatgacaccacggtatcggtgatggacttcacctccggcctcaactggcaggagaaaaccctgaccctgaaaccgacatcgctgaaaggcctgttgattgctttgccgaaagtggcggaagcggcgcaggaagaagtggtcgaaccgaaaattgaaaatccacagccggaggaaaagccgctcggcgaaacgctgaaagatctcttttctcgcccggtattgccggaaatgaccgacgtgcatttgccgcttaacctgaacattgaagagtttaagggcgagcagctgcgcgtgacgggcgacacggacatcaccgtgagcaccatgctgctgaaagtgagcagcattgacggcaatactaaactggacgccctggatatcgactccagtcaagggatcgtcaacgccagcggcacggcgcagctgtcagacaactggccggtggatatcaccctcaacagcacactgaacgtggagccgttgaaaggtgaaaaggtgaagctgaaagtgggcggtgcgctgcgcgaacagctggagataggcgttaacctttccggtccggtggatatggatttacgcgcccagacgcgactggcggaagccggattgccgctcaacgtggaagtgaacagcaaacagctttactggccgttcactggtgagaagcagtatcaggcggatgatctgaaactgaaacttaccggcaaaatgaccgattacacgctctctatgcgcacggctgttaagggccaggagatcccgccagccaccattacccttgatgccaaaggtaatgaacagcaggtcaatctcgacaaacttaccgtcgcggcgctggaagggaaaacggaacttaaggcgttgctcgactggcagcaggccattagttggcgcggtgagctaacgcttaacggcattaacaccgccaaagagatcccggagtggccgtcgaaactcaatggcttgattaaaacccgcggtagcctgtacggcggcacctggcagatggaggtgccagaactgaagctgaccggtaacgtcaaacagaacaaagtgaacgttgacggcacgctgaaaggcaacagttatatgcagtggatgatcccagggctgcatctggaactggggccaaacagtgccgaagtgaaaggcgagctgggggtaaaagatctcaatcttgatgccaccatcaacgcgccggggctggataacgcgctgccggggcttggcggtacagcgaaagggctggtgaaagtacgcggcacggtggaagcgccacaactactggcagatatcaccgcgcgcggcctgcgctggcaggaactttccgtggcgcaggttcgcgtggaaggcgacattaaatccaccgatcagatcgccgggaaactcgacgtacgcgttgagcaaatttcgcaaccggatgtaaatatcaacctcgtcaccctgaatgccaaaggcagtgaaaagcagcacgagctacagttgcggattcagggcgagcctgtctccgggcagcttaatctggcaggaagttttgatcgcaaagaagaacgctggaagggaactcttagcaatacccgcttccagacgccggtcggcccgtggtcgctgacccgcgatattgcgctggattaccgcaataaggagcaaaaaatcagcatcgggccacactgctggcttaacccgaatgcggaactgtgcgtgccgcaaactatcgatgcgggtgccgaagggcgtgtggtggtgaatctcaaccgcttcgacctggccatgctgaaaccatttatgccagaaaccactcaggccagcggtatcttcacgggtaaagcggacgttgcctgggacaccacgaaagaggggctgccgcagggcagtatcaccctttcggggcgtaatgtgcaggtgacgcaaaccgtcaacgatgcggcgctgcccgtggcgtttcagacgctgaatctgacggcggagttgcgtaacaaccgtgccgaattgggctggaccatccgcctgaccaataacggccagtttgatggtcaggtgcaggtgaccgatccgcaaggccgccgtaatcttggtggcaacgtcaatatccgtaacttcaaccttgcgatgataaaccccatctttacccgtggggaaaaagccgcggggatggtgagtgccaacttgcgtctgggtggtgatgtgcaaagcccgcagttgtttggtcagcttcaggttacgggggtggatatcgacggcaactttatgccgtttgatatgcaaccgagccagcttgcggtcaactttaacggtatgcgctcgacgcttgcaggtaccgtgcggacccagcagggtgaaatctacctgaacggtgatgccgactggagccagattgaaaactggcgggcgcgggtaacagcgaagggcagtaaagtgcgtatcaccgtgccgccgatggtacgaatggatgtatcgccagatgttgtattcgaggctacaccaaacctgtttaccctcgatggtcgcgtggatgttccgtgggcgcgcatcgtggtgcacgatctgccggaaagcgcagtaggcgtttccagcgatgtggtgatgcttaacgataacctgcaaccggaagagccgaaaacggcgtcgattccgattaacagtaacctgactgtccacgttggcaacaatgtgcgcattgacgcctttggcctgaaagcgcggctgacgggcgatctcaacgtcgttcaggacaaacaagggctgggcctgaacgggcagatcaacatccctgaagggcgcttccatgcctatggtcaggatctgattgtgcgtgagggtgagctactgttctctggtccgccagatcaaccgtatcttaatatcgaagctattcgtaacccggatgctacagaagacgacgtcatcgccggagttcgcgtcactggtctggcggacgaaccgaaagcggagatcttctctgacccggcgatgtcgcaacaagctgcattgtcttatttgctacgtggacaagggctggagagtgatcagagtgacagtgcggcgatgacctcgatgctgattggcctgggggttgcgcaaagtggccagattgtgggtaaaatcggcgagacgtttggcgtaagcaatttagcgctcgacaccgagggagttggcgactcctcccaggtggtggtcagcggctatgtattgccaggtctgcaagtgaaatacggcgtgggtatatttgactctatagcaacactcacgttacgttatcgcctgatgcctaagctatatctggaagcagtgtctggtgtagaccaggcactggatttgctctatcagttcgagttttag

SEQ ID NO: 4772 - DNA, 957 bp, Escherichia coli
atgtggaaacgcttacttgtagtctctgcagtctcggcagccatgtcgtctatggcgttggccgctccattaacagtaggattttcgcaggtcggatcggaatccggctggcgcgccgcagaaaccaatgtggcgaaaagtgaagccgaaaaacgcggtatcacactgaaaattgccgatggtcagcaaaagcaggaaaaccagattaaagcggtacgttccttcgtcgcacaaggggtggatgcgatctttatcgctccggtggtggcgacgggttgggaaccggtattaaaagaggcgaaagatgccgaaatcccggtcttcttgcttgaccgttccatcgatgtgaaagacaaatctctctatatgaccaccgttactgccgacaacatcctcgaaggcaagttgattggtgactggctggtaaaagaggtcaatggcaaaccgtgtaacgtggttgagttgcagggcaccgttggggccagcgtcgccattgaccgtaagaaagcctttgccgaagccattaagaatgcgccaaatatcaaaattatccgctcgcagtcaggtgacttcacccgcagcaaaggcaaagaagtgatggagagctttatcaaagcggaaaacaacggcaaaaacatctgcatggtttacgcccataacgatgacatggtgattggtgcaattcaggcaattaaagaagcgggcctgaaaccgggcaaagatatcctgacaggctctatcgacggcgtgccggacatctacaaagcgatgattgatggcgaagcgaacgccagcgttgaactgacgccgaacatggcaggtcctgctttcgatgcgctggagaaatacaaaaaagacggcaccatgcctgaaaagctgacgttaaccaaatccaccctttatctgcctgataccgcaaaagaagagttagagaagaagaaaaatatggggtattga

SEQ ID NO: 4773 - DNA, 999 bp, Escherichia coli
atgcgcaatcacagaatttctttacaggatatcgctacgctggctggcgtaacaaaaatgaccgtgagtcgttatatccgctcgccgaaaaaggtggcaaaggaaacaggcgagcgcatcgccaaaattatggaagagatcaattatatccctaatcgcgctcccggcatgttgttgaatgcacaaagttataccctcggtatcttgattccgtcatttcaaaatcaactcttcgctgacattctcgcgggaatagaatccgtcacctctgtgcataattatcagaccattattgctaattacaattacgatcgcgattccgaagaagagtcggtgattaacctgctctcttataacattgacgggattattctttcggaaaaatatcacaccatcaggacggtgaaatttctgcgttcagccaccattccggtcgtggaattgatggatgtacagggagaacggctggatatggaggtcggttttgataatcggcaggctgcttttgacatggtgtgtaccatgctggataagcgagtcaggcgcaaaattctgtatctcggttccaaagatgacacccgcgatgaacagcgttatcaggggtattgcgatgcgatgatgctgcataatctttccccattacgcatgaatccacgcgccatctcatccattcatttaggaatgcagttaatgcgtgatgcccttagcgcaaacccggatttagacggtgtattttgcaccaatgacgatattgcgatgggtgcgcttctgctgtgccgcgagcgaaacctcgccgtgccagaacaaatttccattgcgggttttcatgggctggagattggcaggcaaatgatcccaagcctcgccagcgtaattactccccgttttgatattggtcggatggccgcccaaatgttgctgagcaaaattaagaataacgatcacaaccacaacactgttgacctcgggtatcagatttatcacggtaacacgctttag

SEQ ID NO: 4774 - DNA, 1320 bp, Escherichia coli
atgccattaatcattattgcggcaggcgtcgcgctgcttcttatcctgatgatcggctttaaagttaacggctttattgccctcgttctggtcgctgccgtcgtcggatttgccgaagggatggatgcacaggccgtcctgcactctatacaaaatggtatcggcagcacactcggcgggctggcaatgatcctcggtttcggggccatgttaggcaagctgatttctgatacgggcgcggcacaacgtatcgccactacgctgattgctacttttggtaaaaaacgcgtgcaatgggcgctagtgatcaccggtctggttgtgggcctcgccatgttttttgaagtgggttttgtcctgctgttgccgttggtatttaccatcgtggcatcatctggattacccctgttgtatgttggcgtaccgatggtagcagcgctctctgtaacccactgttttctgccgccacatccagggcctactgccatcgcgactatctttgaggctaatctcggaacgactttactgtatggatttatcattaccattccgacagttattgtcgcaggaccgctgttttctaaactgctaactcgctttgagaaagcaccaccggaaggcttatttaatcctcatctgtttagcgaagaggagatgccctccttctggaacagtatttttgctgcagtgatcccggtcatcctgatggctatcgccgccgtttgtgaaattacgttaccgaaaactaacaccgtgcgcctcttctttgaatttgtcggtaaccctgccgttgcgctgtttattgccattgttattgcgattttcacactgggccgacgtaatggacgcaccatcgagcaaatcatggatatcattggggattctataggcgctatcgcgatgattgtgtttattatcgctggcggcggcgcgtttaagcaggtattagtagatagcggtgtcgggcagtatatttcacacttaatgaccggaactacgctttcgccgttattgatgtgctggactgttgcggcgctgttgcgtatcgctctgggctctgccaccgtcgcggccattaccaccgcgggtgtggtgttgccgattatcaacgttacccatgccgatcccgctttaatggtactggcaaccggtgcgggcagcgtgatcgcgtcacacgtaaacgaccctggcttctggctatttaaagggtattttaatctgacggttggtgaaacgttgcgtacctggacggtgatggaaacccttatttctattatgggtttgctgggcgtgttagccattaacgccgtattgcactga

SEQ ID NO: 4775 - DNA, 765 bp, Escherichia coli
atgaacgatctattttcactggcaggaaaaaatatcttgattaccggttcagcacagggcattggctttttactggcgaccggcctgggtaaatatggcgcacaaataattattaatgatattactgccgaacgcgcagaacttgctgtagaaaaactccaccaggagggtattcaggccgttgccgcaccttttaatgttactcataaacatgaaattgatgccgccgttgaacatatcgaaaaggacatcggccccattgatgtgctggtgaataacgccggtatccagcgccgtcatccttttactgagttccctgaacaagagtggaatgatgtgatcgcagtaaaccagaccgccgtgttcctggtgtcgcaagcggtaactcgtcacatggttgaacgcaaggcaggtaaagttattaatatttgctcgatgcaaagcgaactgggacgtgacaccatcaccccttatgccgcatcgaaaggggcggtaaaaatgctcacccgcggcatgtgcgtcgagctggcgcgccacaatattcaggtcaacggtattgcgccgggctatttcaaaacagaaatgactaaagcactggttgaggacgaagccttcaccgcctggttgtgcaaacggacccccgccgcacgctggggagatccgcaggaactgattggtgctgcggtgttcctttcttcaaaagcctctgatttcgtaaacggccacctgttgtttgttgatggcggcatgttagtggctgtttaa

SEQ ID NO: 4776 - DNA, 1032 bp, Escherichia coli
atgcaagtgaaaacacagtcctgcgttgttgcgggcaagaaaactgttgccgttaccgagcagacgatagattggaataataatggaacattagtacaaataacccgaggtggaatttgcggttccgatttacattattatcaggaaggaaaagtaggtaatttcatgataaaggcaccgatggtgttaggtcatgaagttatcggtaaagttattcatagcgactcatcaaaattacatgaagggcaaacggtagccattaatccgtctaaaccgtgcggtcactgcaaatactgcattgaacataacgagaatcagtgtacagagatgcgtttttttggcagtgccatgtatttccctcatgttgatggtggctttacccgttataaaatggtcgaaacgtcgcaatgtgtcccttatccggccaaagctgacgaaaaggttatggcttttgccgaacctttagccgtcgcgattcatgccgcacatcaggccggcgagttacagggcaagcgagtatttatttctggtgttgggcccattggctgcctgattgtcagtgctgtgaaaacactgggggccgcggaaattgtctgtgccgatgtgagtccccgttccctttcgctgggcaaagagatgggggcggatgtgctcgtaaacccacaaaacgacgacatggatcactggaaagcggaaaaaggctatttcgatgtcagctttgaagtgtccggtcatccttcatcagtgaatacctgtctggaggtcactcgtgcacgcggcgtaatggtgcaggtaggtatgggaggcgcgatggcagaattcccaatgatgacattgattggtaaggagatttcactcaaaggctctttccgttttaccagcgaatttaataccgcagtgtcatggctggcgaatggcgttatcaatccactgcctttactgagtgctgaatatcccttcacagacctggaagaggcgctacgtttcgccggtgataaaacccaggcagcaaaagtccagcttgttttctaa

SEQ ID NO: 4777 - DNA, 564 bp, Escherichia coli
atggcgggtgaaagctttattttgatgggcgtatcagggagtggtaaaacattaattggtagcaaggttgccgcgttattgtctgcgaaatttattgatggtgacgatcttcatccagccaaaaatatagataaaatgtcgcaaggcattccattatctgatgaagatcgacttccctggctggaacgcttaaatgatgcttcatacagtctttataaaaagaatgaaacaggatttattgtctgttcatcattaaaaaaacagtatcgtgatattttacgcaagggtagcccccatgttcatttcctctggttagatggcgattatgaaactattctcgcgcgaatgcagcgtcgggctgggcattttatgccggtagcgttactaaaaagtcagtttgaggcgctggagcgtccacaagcagatgaacaggatattgtgcgcattgatatcaaccatgatattgccaatgtcaccgaacaatgtcggcaggctgtgctggcgatacgacaaaacagaatatgtgcgaaagagggcagcgcctcagatcagcgctgcgaatga

SEQ ID NO: 4778 - DNA, 1020 bp, Escherichia coli
atgtcgatgataaaaagctatgccgcaaaagaagcgggcggcgaactggaagtttatgagtacgatcccggtgagctgaggccacaagatgttgaagtgcaggtggattactgcgggatctgccattccgatctgtcgatgatcgataacgaatggggattttcacaatatccgctggttgccgggcatgaggtgattgggcgcgtggtggcactcgggagcgccgcgcaggataaaggtttgcaggtcggtcagcgtgtcgggattggctggacggcgcgtagctgtggtcactgcgacgcctgtattagcggtaatcagatcaactgcgagcaaggtgcggtgccgacgattatgaatcgcggtggctttgccgagaagttgcgtgcggactggcaatgggtgattccactgccagaaaatattgatatcgagtccgccgggccgctgttgtgcggcggtatcacggtctttaaaccactgttgatgcaccatatcactgctaccagccgcgttggggtaattggtattggcgggctggggcatatcgctataaaacttctgcacgcaatgggatgcgaggtgacagcctttagttcaaatccggcgaaagagcaggaagtactggcgatgggtgccgataaagtggtgaatagccgcgatccgcaggcactgaaaactctggcggggcagtttgatctcattatcaatactgtgaacgtcagcctcgactggcagccttattttgaggcgctgacgtatggcggtaatttccacaccgtcggtgcggttctcacgccgttgccggttccggcctttacgctgattgcgggcgatcgcagtgtctctggctctgctaccggtacaccttatgagttgcgtaagctgatgcgctttgccgcccgcagcaaggttgcgccgactaccgaactgttcccgatgtcgaaaattaacgacgccatccagcatgtgcgcgacggtaaggcgcgttaccgcgtggtgttgaaagccgatttttga

SEQ ID NO: 4779 - DNA, 195 bp, Escherichia coli
atgcctgaaatccagtgtttatctatctttcccgctatattaactctctcaaggtcaaccgatatcaacgtacatctaccaacatatgttggtacagatgatggtatttccggttcgataatgcttgtaccaacagggagggaatacgatggcattaacagatatcaaagtcagagcagccaagccaacggataa

SEQ ID NO: 4780 - DNA, 1191 bp, Escherichia coli
atgcatctgcttgtccatccaaatggttctaagtactggcgtttgcagtaccgttatgagggaaagcaaaaaatgctggcacttggggtttatcctgaaatcacactagcggatgccagagtacgtcgtgacgagacgcgtaagctgcttgcgaatggcgtcgatccgggagacaaaaagaaaaatgataaggttgaacagagtaaagcacgaacctttaaagaagtcgcgattgagtggcatggcaccaataaaaagtggtctgaagatcacgcccatcgtgtgctaaaaagtcttgaagataatctttttgcagcgcttggtgaacgtaatatcgctgagttaaaaactcgagatttattagcacctattaaggccgtagaaatgtctggacgtcttgaagtggccgctcgtcttcagcagcgcactacagccatcatgcgctatgcagtgcaaagtgggttaattgattataacccggcacaagagatggctggggcggttgcttcctgtaatcgacaacatcgtcccgcgcttgaattaaagcgcatccctgagttgcttacaaaaatagatagctatactggtaggccgctaacccgatgggcgatagaactcactttgctgatctttattcggtccagtgagctgcgttttgctcgttggtcagagatcgatttcgaagcgtctatatggactatcccaccggagcgggagcctattcctggagtgaaacattcccatagaggctcaaaaatgcgtacaacgcatctagtgcctctttcaacgcaagctcttgcaattttaaagcagataaaacagttttatggggcccatgacttgatatttattggtgatcacgattcgcacaaacccatgagtgagaatacggtaaatagtgcgttacgggtcatggggtatgatacaaaagtagaggtttgtggtcatggctttcgaacaatggcctgtagttcattggtcgaatcaggtctgtggtctcgtgatgctgttgaacgtcagatgagccacatggcgcgaaattcagtgagggccgcgtatatccataaagcagagcatctggaagaacggcgattgatgctacagtggtgggccgattttctggatgtaaacagagaaaggtttatcagtccatttgaatatgcaaagattaataatccattaaaacagtaa

SEQ ID NO: 4781 - DNA, 615 bp, Escherichia coli
atggaaagctggttaattcctgcggcaccggtcacggtcgttgaagagatcaaaaagagccgcttcattacgctgttggcgcataccgatggcgttgaggcggcaaaagcgtttgttgaatcggtgcgggcagaacaccccgatgcccggcaccattgcgtggcgtgggtggcgggtgcgccggatgattctcaacagctgggtttctctgacgacggggagccggcgggaacggcaggtaaaccgatgctcgcccaactaatgggcagcggcgtcggggaaattaccgctgtggtggtgcgctactacggcggcatattgcttggcaccggtgggttagtgaaagcgtatggcggcggcgtgaatcaggcgctgcgccagctaacgacccaacgcaagacaccattaaccgaatatactttgcaatgtgaatatagtcagttaaccggcattgaagcgttgctggggcagtgtgacggcaaaattattaacagtgattatcaggcattcgttctgctgcgggtggcgcttccggcggcgaaagtggctgaattttccgcaaagctggcggattttagccgtggttcattgcaattgttagcgattgaagaataa

SEQ ID NO: 4782 - DNA, 1509 bp, Escherichia coli
atgagcaaaaaaataacatccttgtttaacttcaagaagttgcagaaattttcttctgctctgatgttaccaatcgccattcttccggcggcgggtttgattttagccatcgggatttcatttaacattgagctgctggcgaattgcggcggcctgattttcgccaaccttcctttgctgttttgtgtcggtattgtgattggcctgacaggtgatggttcttcatcactttcagcgattatcagctacatgatcatgaatgccacgatgggaacgcaacttggcattaccgcggagtccgttgcagccagtaacggtgactatgcgatgatcctcggggtaccgacgttacaaacgggagtgtttggcggtttgattgtcgccatctttgtttatctgctctatacccgcttccacaatattgaattgcctcagtttcttggtttcttcggtggaaaacgctttgtaccgattattacggcggtggcggcaattattgtcggctatttattgccgtggctgtggataccggtacaaaaaggtctggcgtcgctttcaacgctggtgaccagtgggcataacgcgaacttcgcggcctttatttacgccgttggcgaacgttcgctgattccttttggcctgcatcatatctggaacgtgccgttttattacaactttggcgactacatgaccaaatccgggcaactggtgacgggcgatattccggtgttctttgcccaattgcgcgacggtgttccgttgacggcggggttgtttatgacaggtcgtttcccaatcatgatgtttgcgttacctgccgccgcgttggcgatgtatcaggaagcaaaaccggaacgtaaggcgctgattaaaggccttttactctccggtgcgctgaccacatttgttaccgggattacggagccgctggaatatgcatttttgtttgcagctccggttctctacatcattcacatcttcttatatgccacttcatttgtgctgatgaacatcctgaatgtgcacattggtcatccttttgctggcggtcttattgatttcgtactgaatggcgttatgccaaaccgcacgccgtggtatctggtgttcctggcaggcgcgggctatgcagcgatttactacaccgtatttcgggtactgatccgcaagttgaatctgaaaacaccgggacgtgaggatgaagagattgccgttgcaaccacattaacgcgcgaagaacgtccataccaaatcatcgaggcagtaggtggtttcgacaatatcgaagatgtggatgcctgcgcaacacgcctgaggctggcgctggtagacgataagaaagtgaatgaaaaacggctgaaggagttgggggctgcgggtttagtgaaactgggtgatggcggtgtacaggtgatatttggcggcaaatcgcaaatcctgcgcgacgaaatcaaaaccgtaatgagcagaccgcgcccgacagaaatgacagtggcctgtgctaactaa

SEQ ID NO: 4783 - DNA, 294 bp, Escherichia coli
atgagtgatgaaatttacctgaccataaccggagaacaacaaggatgtatttcctctcgttgcggaacgagcgcatcaataggtaatcgctggcagattggccatgaagatgaaatcttcgcgttctcgctatctaatagtattacgaatacaggcaaagggtcacaattacatggccttagtttctgtaagttgattgacaaaagctccccgttacttattaacgctattaacaataacgagcagttgttcatggagtttgacttctatcggatcaatagatttggtcgatag

SEQ ID NO: 4784 - DNA, 816 bp, Escherichia coli
atgcactatcgcaatgtggtttgtttattgtcttgttcgttgtttttatcgtcggcatggggatgtcggcttgatgagccggaacataatatttaccagaaacagggaaaaggcgtggtgtatttgcgcccttatgaaaagaccaatctttcgctaccgcagattaactacaagcgtctgcgtctgttaccgaatttgctaattgacccaaccaaactggaggattgggaaacggtgcccccggctaccaatctcatgacagacgttgtctacagcggcgcaaacgcaactcttccccattactcttactatagcgatggtcgcgctattctctacgctggcgagattgtgcaaaaccctccaggcacaccgccagtcgatatctcgtcatttcaggcatggggtgattttgccgcagataagtacagcctctattacgaaggcaaacgcaccgatagcaaccagcaactaaaccgccgaacgttgcgtcaggtagaatttaacccgcaatggaaaccagactggctaggtttgattctccgtgacaagcactatctttacgcaaatggtcagcgccttgatgatcccgacacctttacggtactggctcaaaagtcatgggatcagcgcggtaaattctctacagcatttaatccctgccttcctgccccatttggcccctgggatacgctagcccgcacacagacgaaaatcatgatcaacggagaacaactggatgccgacccggacaccttttccgtcgtgcgctggatgcccggctcactcttcacctggcgtgataaaaacgggctgtag

SEQ ID NO: 4785 - DNA, 1485 bp, Escherichia coli
atgggttccacctcgtcgctgtatgcagccattgatctcggttcgaatagttttcatatgctggttgtgcgcgaggtggctggaagcatccagacgctgacgcgaataaaacgcaaagtgcgtctggctgccggcctgaatagcgaaaatgccctgtctaatgaagcaatggagcgcggttggcaatgtctgcgcctgtttgctgaacgtctgcaagatatccctccctcgcaaattcgcgttgtcgctacggcgacattacgacttgccgtcaatgcgggtgattttattgccaaagcgcaggaaatcctcggttgtccggtacaggtgatcagcggtgaagaggaagcgcgtctgatttatcagggcgttgctcacaccactggcggtgccgatcagcgcctggtggtggatatcggcggagccagtactgaactggtaaccggcacgggtgcacaaaccacctctttgttcagcctgtcgatgggctgcgttacctggctggaacgctattttgccgatcgtaatctggggcaggaaaattttgatgctgcagaaaaagcggcacgcgaagtgttacgtccggttgccgatgaattacggtatcacggctggaaagtgtgcgttggcgcttccggcaccgtgcaggcgttacaggaaatcatgatggcacaggggatggatgaacgcattaccctggaaaagttgcagcaactgaaacaacgcgccattcattgcggtcggctggaagagctagagattgacgggctgacgctggaacgtgcgttagtgttcccgagtggtctggcgatcctgatagccatttttaccgaactgaatattcagtgtatgaccctggcgggcggtgcgctgcgtgaaggcctggtctacggtatgttgcatcttaccgtcgagcaggatattcgcagccgtacgctgcgtaatattcagcgccgctttatgatcgatattgatcaggcacagcgcgtagccaaggttgcggctaacttcttcgatcaggtggaaaatgaatggcatcttgaagcaataagccgcgatttgctcatcagcgcctgtcagcttcatgaaatcggcctgagcgttgacttcaaacaagcgccgcaacacgctgcttatctggtgcgtaacctagatcttcccggttttacccccgcacagaaaaaactgctggcgacgctactgctcaaccagactaatccggtcgatctctcatcgctgcatcagcaaaatgccgtaccaccgcgcgtcgcagaacaactctgccgtttactccgcctggctatcatttttgccagccgtcgccgtgacgatctcgtgccagagatgacattacaggctaaccatgaactgttgaccttgacgcttccgcaaggttggctaacccaacatccgctgggtaaagagattattgatcaggaaagccagtggcagagctatgtccactggccgctggaagtgcattaa

SEQ ID NO: 4786 - DNA, 1548 bp, Escherichia coli
atgatggcagactcacaacccctgtccggtgcccctgaaggtgccgaatatttaagagcggtgctgcgcgcgccggtctacgaagcggcgcaggtcacgccgctacaaaaaatggaaaaactctcgtcgcgtctcgataacgtgattctggtgaaacgcgaagaccgtcagccagttcatagctttaagctgcgcggcgcatacgccatgatggcgggcctgacggaagaacagaaagcgcacggcgtgatcaccgcttctgcgggtaaccacgcgcagggcgtcgcgttttcttccgcacggttaggcgtgaaggcactgatcgtcatgccaaccgccaccgccgatatcaaagtcgacgcggtgcgcggcttcggcggcgaagtgcttcttcacggcgcgaactttgatgaagcaaaagcgaaagcgatcgaactgtcacagcagcagggcttcacctgggtgccgccgttcgaccatccgatggtgatcgccgggcaaggcacgctggcgctggaactgctccagcaggacgcccatctcgaccgcgtatttgtgccagtcggcggcggcggtctggcggcgggcgtggcggtactgatcaaacaactgatgccgcaaatcaaagtgattgccgtggaagcggaagactccgcctgcctgaaagcggcgctggatgcaggtcatccggttgatctgccacgcgtggggctgtttgccgaaggtgttgcggtgaaacgcatcggcgacgaaaccttccgtttatgccaggagtatctcgacgacatcatcaccgtcgatagcgatgccatatgtgcggcgatgaaagacctgttcgaagatgtgcgcgcggtagcggaaccctctggcgcgctggcactggcgggaatgaaaaaatatatcgcccagcacaacattcgcggtgagcggctggcgcatattctttctggtgctaacgtgaactttcacggcctgcgctacgtctcggaacgttgcgaactgggcgaacagcgtgaagcgttgctggcggtaaccatcccggaagagaagggcagcttcctgaagttctgccagctgcttggcgggcgctcggtcaccgagttcaactaccgttttgccgatgccaaaaacgcctgcatttttgttggtgtgcgcctgagccgtggtctcgaagagcgcaaagaaattttgcagatgctcaacgatggcggctacagcgtagtggatctctccgacgacgaaatggcgaagctgcatgtgcgctatatggtcggcgggcgtccgtcgcatccgttgcaggaacgcctctacagcttcgaattcccggaatcgccgggcgcgctgttgcgcttcctcaacacgctgggtacgcactggaacatttctttgttccactatcgcagccatggcaccgactacgggcgcgtactggcggcgttcgaacttggcgaccatgaaccggatttcgaaacccggttgaatgagttgggttacgattgccacgacgaaaccaataacccggcgttcaggttctttttggcgggttaa

SEQ ID NO: 4787 - DNA, 3009 bp, Escherichia coli
atgcaaaggaaaactctattgtcggcctgtattgcattagctctgagtggtcagggttgggcggcagatattacagaaatagaaaccaccacaggtgaaaagaaaaataccaatgtgacttgtccagcagatcctggaaaactcagtccagaagagcttaaacgcttaccctctgaatgctcctctgtagtcgaacagaacctgatgccatggcttgtcacaggtgctgctactgcgttaatcacaaccttagccatagtggaactaaacgacgatgatgatcatcatcgcaataattctccacttccaccaactccacctgatgatgattcagacgacactccagttcctccaactcctggcggagatgagataataccagacgatggtccggatgataccccgacgcctcccaaaccgattgcgtttaataatgacgttatcctcgataaaacagaaaaaacgttaactattcgcgattcagttttcagttataccgagaatgctgatgggactatttctctgcaagatagcaatgggcgtaaggcgactattaatctttggcagattgatgaaacgaataacacggttgcccttgaagggatgagcgcagatggtgcaacgaagtggcaatataatcacaacggtgagctcgttattacgggcgacaataccacagtaaacaacactggaaaaaccatcgtcgacggcaaaggcgccaccggaactgaaatcgcgggtaacaacgcggtggtgaatcaggacggcgagctggatgtgagcggcggcggtcacggcattgatatcactggtgatagcgccactgtaatcaataaaggcaatataactgtcacggataaagattcggttggtgtgctgattaacggtgatcgagcgacctttgccaatacgggtcatattgacgtcaataattcagctactggcatgagcatcacgaccagcgagggggccatctcccaggcaggtagcatgaatgttggtgacttttcaacaggcatggcgctcagtggtaataacaacagtgtgacgttggcggcgaaagatctgaacgttatcgggcagaaggcaacgggcgtcaacatctctggtgacaataatgccgttgatatcactggtaacattttggtagataaagatcaaaccgcgactaacgcggtagattatttttacgaaccgtctattggtgtgaacgttagcggcaacagtaacactgtatcgctagacggcaagttaactgtggtggctgacagtgaacttacctcacgtatttatgctgactttgatggaagccaggagaatatttccgggcttgtcgtatctggtgatgataataccgtgtatctgaatggtggtatccagctggttggtgaagaaaatcaattgactgatggttctaccgtcgcatcaaatcgcaatggctatggcaaaacaccagtaatcactgttgatgggaagtcgtctgtttacctgaacggggactccacgattaatggtgatttacctctagcctattcagggatgattcggttgaagaatagcgccatgattgagatcggggcggatgccacgattaacatgcaggtagatatttatgaccactatgcgagatctgaatcccaaatgatctttgtagagtctggtgctgagttagtcaataaaggtgatattgatactcgaaatatcggttttgccgctatttctggtgaaaattcaacgggaagtaacagtggcaatattacgctttctcagtacaactatggcttgttagcaaatgcaggagttggctatttcacgactaaaggcggtagtgcggttaataatggtacgattactgcgaaagtcatggaacaagaaagtgtcattaatttgggggcgtctctgggtctgaatgaggcgaacactttctactctgatgcgaacagtatgatggggcttgatgcctttgatcacggatacgtgtccaatgaaagcggtggcagcattgagatgtatggtcgcggcaacgttggtatgttggctattgatgagagtacagcagaaaacgctgggcaaattacactggatgccctgtgggttgatgcagatgataccaccactttgcgtagcaatattggtaatgatgccaggagctatggcgttggtatggccgtaggtacaaatacttacagtgggccaagaaaaaatgctacggccgttaataaacagggtggtgtaataacggtttataatgctggaataggtatggccgcctacggtgccagcaataccgtgattaacgagggtatcatcaatctggagaaaaacgctaactacgatagtagtctgggagcagattctctgatcggtatggccgcctataagagtggtactgccattaatgaacagtctggcgtaattaatatcaatgctgacaatgggcaggcgttttatagtgatggatccggtactattcttaactatggaacgatttgtgttaacactaattgcctgacgggcaatgactataatgagactgactcttatacctcgttactttacacgggtggcgatgtaatcactgcgcagaatgaaacacaaaatctgacccaaaaagcctcgattaacgacaaaaaagaaggcaatgttgttaacagtggttcgctttccggtgctgatattgcgattagtagcggtgaattagttaatacatcgacgggtactattaataatgccatcattatcaatgatggagagttaagtaacgaaggctctgtggcgaaggtgacgctaaacgcaggcacgttcgggaacaccggtacggttaactcgcgcatgttccagacaggaggaacatttaataaccagcaaggtggggtcgtgcaaaacggtgctaacctgagtaaaactgcaatcaccaataacgagggtacctggtatctcggtgccagcagtagtagtgatagcaataatgaaccgccccgggtttcctggagagtgttttatctgtga

SEQ ID NO: 4788 - DNA, 1122 bp, Escherichia coli
atgaagtatatagcaacatctgtagtggcaatgctgctcttatcgggttgtgataatacgcaaagtaacaattcatccccgtcagaaacagaagtcggcgttgttacgctcaaatctcaaccggtttcggtagtcagtgaattaaccggacgcaccagtgctgcgctcagtgctgaagtacgtccgcaggttgggggaattatccagaaacgcttatttaaggaaggtgatctggtcaaggctggacagcctctctaccagattgatgcggccagttatcaggctgcatggaatgaagcccgggcagcattacaacaagcacaggcactggtaaaagccgattgccagaaagcgcagcgttatacccgactggtgaaagagaacggtgtttcacaacaggatgctgatgatgctcagtctacctgtgcacaagataaagccagtgtagaggcgaaaaaagccgcactggaaactgcgcgcattaatcttgactggaccacggtaaccgcaccgatttcggggcgtattggcatttcgtcggtaacccctggcgcactggtgaccgcgtcgcaggatacagcgttaacgactattcgtggtctggatacaatgtatgtcgacctcactcgctccagtgtcgatttattacgtctgcgtaaacagtcactggcgaccaacagtgacaccatgagcgtctcacttattctggaagatggcacaacctacagcgaaaaagggcgtctggaactcaccgaagtcgcggtggatgagtctaccggttcggtgacattacgggcaattttccccaatccacaacagcagttattaccgggaatgtttgttcgcgctcgtgtcgatgaaggcgtgatggaagacgctattctcgcgcctcaacagggcgttacgcgcgatgctaaaggcaatgcaactgcgctggtggtgaataaagacaataaagtagagcagcgaacgctcgaaacgggagaaacgtatggtgataaatggctggtgctgaacggcctgcacaacggcgaccgactgattgttgaaggttctgccaaagtcacttcagggcagaccgtcaaggctgttgaagttcaggctaatggaggcaacgcctga

SEQ ID NO: 4789 - DNA, 1935 bp, Escherichia coli
atgtttcaggacaacccgctgctagcgcagcttaaacagcaactgcattcccagacgccacgcgctgaaggggtggtaaaagccacagaaaaaggctttggcttcctggaagtcgacgcgcaaaaaagttatttcattccgccgccgcagatgaaaaaagtcatgcatggcgaccgaattatcgcggtgatccacagtgaaaaagaacgtgaatccgcagagccagaagaactggttgaaccgttcctgactcgtttcgtgggtaaagttcagggcaaaaatgaccgtctggccatcgttcctgatcatccactcttaaaagacgccattccttgccgcgcagcccgtggcctgaaccacgagtttaaagaaggcgactgggcggttgccgaaatgcgccgtcatccgctgaaaggcgatcgttctttctatgctgaactgacacaatacatcacttttggtgacgatcactttgtaccgtggtgggttacccttgcgcgtcataatctggaaaaagaagcaccagacggcgtcgctaccgaaatgctcgatgaaggtctggttcgtgaagatctgactgcgctggattttgtcaccatcgacagtgccagcacagaagatatggatgacgcccttttcgccaaggcgttaccggatggcaaacttcagctgattgtggcgattgccgatccaaccgcgtggattgctgaaggcagcaagctggacaaagccgcgaaaattcgcgcattcaccaactatctgcctggcttcaacatccctatgctgcctcgcgagctttctgacgatctctgctcactgcgcgccaatgaagtccgcccggtactggcatgccgcatgacgttctccactgatggcaccattgaagataatatcgaattctttgccgccaccatcgaatccaaagcgaagctggtgtatgaccaggtttctgactggctggaaaataccggtgactggcagcctgaaagcgaagcaattgccgaacaagtccgtttgctagcgcaaatatgccaacgccgcggcgagtggcgtcataaccacgcactggtgtttaaagatcgcccggattaccgctttattctcggtgaaaaaggtgaagtgctggatatcgtcgccgagcctcgtcgcattgccaaccgtatcgtcgaagaagcgatgattgccgctaacatttgtgcggcccgcgtactgcgcgataagctcggttttggcatctataacgtgcatatgggctttgatccggcgaatgccgacgcgttggcagcgttgctgaaaacgcacggtctgcatgtcgatgctgaagaagtgctcacgctggacggtttctgcaaactgcgtcgtgaactggatgcgcaaccaactggtttcctcgacagccgcattcgtcgcttccagtcatttgctgaaattagcactgaacccggtcctcactttggcctcggtctggaagcatacgccacctggacttcgccgatccgtaaatatggcgacatgatcaaccaccgtctgctgaaagcggttatcaaaggcgaaactgcgacgcgtccacaggatgaaatcactgtccaaatggccgagcgtcgccgtctcaaccggatggcagaacgtgatgttggcgactggttatacgcacgcttcctgaaagacaaagccgggaccgacacccgtttcgcggcggaaattgtcgatatcagccgtggcggcatgcgtgttcgtttggttgataacggcgctatcgcctttattccagcacctttcttacacgctgtgcgcgatgaactggtttgcagccaggaaaacggcactgtacaaattaaaggtgaaacggcttacaaagtgactgacgttattgacgtcaccattgccgaagtccgcatggaaacccgcagcattattgcgcgcccggtcgcgtaa

SEQ ID NO: 4790 - DNA, 1986 bp, Escherichia coli
atgaaaaccgttagggagtccacaacgttgtacaactttctcggatcgcacaatccatactggcggttgacggaaagcagcgatgttttgcgcttttctaccaccgaaatcacagaacccgatcgtattttgcaactatctgccgaacaggctgctcgcatcagggaaatgacggtcatcacctccagcctgatgatgagtctgaccgtcgatgaaagcgatctttctgtgcatctggtaggacgaaaaatcaataaacgagaatggggaggcaacgcgtctgcatggcatgacacaccggcggttgctcgtgatttatcacatgggctttcctttgctgagcaggtagtttctgaagcacattccgcaatagtgattctcgacagccgggggaatatccagcgctttaatcggttatgtgaagattacacaggcttgaaagaacacgacgtcattgggcaaagcgtgtttaaactgtttatgagtcgtcgtgaagctgcggcatccaggcgcaataaccgtgtattttttcgaagcggcaatgcatatgaagtcgaactatggataccaacacgtaaaggccagcggctgtttctgtttcgcaataaatttgtccacagcggcagtggcaaaaacgagatttttttaatctgttccggcaccgacattaccgaagagcgccgcgctcaggagcgactgcgtattctggcaaataccgacagtatcaccggactgccgaatcgtaacgcgatgcaggagttaatcgatcacgctattaatcaggcagataacaataaagttggggttgtgtatcttgatttggataattttaaaaaggtcaacgacgcctatgggcatttgtttggtgaccagttattacgcgacgtgtcattggctattttaagctgtctcgaacatgaccaggtgttggcgcgtccaggtggcgatgagtttctggtactggcatccaatacctcacaaagcgcgctggaagcattggcatcacgaattttgacccgcttacgactcccctttcgcattggtttaattgaagtttataccagctgttcagtaggtatttcactctctcccgaacatggttcggacagcgcggctattattcgtcacgccgacacagcaatgtacacagcgaaggaaggcggacgaggacaattttgcgtttttaccccagaaatgaatcagcgggtatttgaatatctctggctggataccaacttgcgtaaagcactggaaaacgatcagttggttattcactatcaaccgaaaatcacctggcgtggcgaagtgcgcagtctggaagcactagtacgttggcagtcacctgaacgtgggttgattccaccgttggacttcatttcctacgccgaagaatcagggctaattgtgcctttaggccgttgggtgattctcgatgtcgtacgccaggtagcgaagtggcgggataaaggcattaacctgcgagtggcggtaaatatttctgcacgtcagctcgccgatcaaaccattttcaccgccctgaaacaggttctccaggaactcaattttgaatactgccctatagatgttgaactgacggagagctgcctgattgagaatgatgaactggcactgtctgttattcaacaatttagccgattaggtgcgcaagttcatctggacgattttggtaccggctactcttcactttcgcaactggcgcgctttccgatcgatgccatcaaacttgaccaggtttttgttcgggatattcacaaacagcctgtctcgcaatcactggtccgggcgatcgtcgctgtggcccaggcattgaatcttcaggtgatcgccgaaggtgtagaaagtgcaaaggaagatgcttttttaaccaagaacgggatcaatgagcgacaaggatttttgtttgccaaaccgatgcccgccgttgccttcgaacgctggtataaacgctacctgaagcgcacataa

SEQ ID NO: 4791 - DNA, 618 bp, Escherichia coli
atggcacagctatatttctactattccgcaatgaatgcgggtaagtctacagcattgttgcaatcttcatacaattaccaggaacgcggcatgcgcactgtcgtatatacggcagaaattgatgatcgctttggtgccgggaaagtcagttcgcgtataggtttgtcatcacctgcaaaattatttaaccaaaattcatcattatttgatgagattcgtgcggaacatgaacagcaggcaattcattgcgtactggttgatgaatgccagtttttaaccagacaacaagtatatgaattatcggaggttgtcgatcaactcgatatacccgtactttgttatggtttacgtaccgattttcgaggtgaattatttattggcagtcaatacttactggcatggtccgacaaactggttgaattaaaaaccatctgtttttgtggccgtaaagcaagcatggtgctgcgtcttgatcaagcaggcagaccttataacgaaggtgagcaggtggttattggtggtaatgaacgctacgtttctgtatgccgtaaacactataaagaagcgttagaagtcggctcattaacggctattcaggaaaggcatcgccacgattaa

SEQ ID NO: 4792 - DNA, 177 bp, Escherichia coli
atgaaaaaaacatttatcttcagcctgttagcaattgtcttcgcgagcctgttaagtgcttgtgttcctcaccatcatcaccgccacaacgatggcccgcgtggtcctgcggcttccggtaagccaatgccaccttcaaatggtgggccaaatcatggcagtcatggtcgctattaa

SEQ ID NO: 4793 - DNA, 1071 bp, Escherichia coli
atgaaaaaattgatcaatgatgtgcaagacgtactggacgaacaactggcaggactagcgaaggcgcatccatcgctgacactgcatcaggatccggtgtatgtcacccgagctgatgcccccgttgcagggaaagtcgccctgctgtcgggtggcggcagcggacacgagccgatgcactgtggctatatcggtcaggggatgctttctggggcctgtccgggcgaaattttcacctcaccgacgcccgataaaatctttgaatgcgccatgcaaattgatggcggcgaaggtgtactgttgattatcaaaaattacaccggcgatattcttaacttcgaaacagcaaccgagttactgcacgatagcggcgtaaaagtgaccactgtggtcattgatgacgacgttgcagtaaaagacagtctttataccgccgggcggcgcggcgttgccaacaccgtattaattgaaaaactcgtaggtgcagcggcggagcgtggcgactcactggacgcctgtgcggaactggggcgtaagttgaataatcaaggccattcaataggtatcgctctcggtgcctgtaccgttcctgccgcgggcaaaccttcttttaccctggcggataatgagatggagtttggcgtcggcattcatggtgagccaggtattgaccgccgccccttctcttcccttgatcaaaccgtcgatgaaatgttcgacaccctgctggaaaatggctcataccatcgcactttgcgtttctgggattatcaacaaggcagctggcaggaagaaccacaaaccaaacaaccgctccagtctggcgatcgggtgattgcgctggttaacaatcttggcgcaactccgctttctgagctgtacggcgtctataaccgcctgaccacacgttgccagcaagcgggattgactatcgaacgtaatttaattggcgcgtactgcacctcactggatatgaccggtttctcaatcaccttactgaaagttgatgacgaaacgctggcattctgggacgcccctgtccacaccccggcccttaactggggtaaataa

SEQ ID NO: 4794 - DNA, 1698 bp, Escherichia coli
atgaaatcccccgcaccttctcgcccgcaaaaaatggcgttaattccagcctgcatctttttgtgtttcgctgcgctatcggtgcaggcagaagaaacatcggtaacaccacaaccgcctgatattttattagggccgctgtttaatgatgtgcaaaacgccaaactttttccggaccaaaaaacctttgccgatgccgtgccgaacagcgatccgctgatgatccttgctgattatcggatgcagcaaaaccagagcggatttgatctacgccatttcgttaacgtcaatttcaccctgccgaaagagggcgagaaatatgttccgccagaggggcaatcactgcgcgaacatattgacggactttggccggtattaacgcgttctaccgaaaacaccgaaaaatgggattctctattaccgctgccaaaaccttatgtcgtgcccggcggacgttttcgcgaggtatattactgggacagttacttcaccatgttaggacttgccgaaagcggtcactgggataaagtcgcggatatggtggccaattttgctcatgaaatagacaattacggtcatattcccaacggcaaccgcagttactatttaagccgctcgcaaccgcccttctttgccctgatggtagagttactggcgcagcatgaaggcgacgccgcgttgaaacaatacctgccgcaaatgcaaaaagaatatgcttactggatggacggtgttgaaaacctgcaagccggacaacaggaaaaacgcgttgtaaaacttcaggatggtacccttctcaaccgctactgggacgatcgcgatacgccacgaccagagtcatgggtggaagatattgccactgccaaaagcaatccgaatcgacctgccactgaaatttaccgcgacctgcgctctgccgctgcgtctggctgggatttcagctcgcgctggatggacaatccgcagcagttaaacaccttacgcaccaccagcatcgtaccggtcgatctgaacagcttgatgttcaaaatggaaaaaatcctcgcccgcgccagcaaagctatcggagataacgcgatggcaaaccagtacgaaacgctggcaaatgcccgtcaaaaagggatcgaaaaatacctgtggaacgatcaacaaggctggtatgccgattacgacctgaaaagtcataaagtgcgcaatcagttaaccgcggccgccctgttcccgctgtacgtcaatgcggcagcgaaagatcgcgccagcaaaatggcgacggcgacgaaaacacatctgctgcaacccggcggcctgaacaccacgtcggtgaaaagtgggcaacaatgggatgcgccaaacggctgggcaccgttgcagtgggtcgcgactgaaggattacaaaactacgggcaaaaagaggtagcgatggacattagctggcacttcctgaccaatgttcagcacacctatgaccgggagaaaaagctggtggaaaaatatgatgtcagcaccaccggaacagggggcggcggtggcgaatatccattacaggatggctttggctggaccaatggcgtgacgctgaaaatgctggatttgatctgcccgaaagagcaaccgtgtgacaatgttccggcgacgcgtccactcagtgaatcaacaacacagccgctaaaacaaaaagaggcggaacctacgccttaa

SEQ ID NO: 4795 - DNA, 327 bp, Escherichia coli
atggaatcgaaatcagtcgatacccgcagtatatatcgtgaactgggcgcaacgctgagttacaacatgcgtctggggaacggtatggaaattgaaccctggctgaaggcggctgtgcgcaaagaatttgtcgatgataatcgagtgaaagtgaatagtgacggtaattttatcaatgatttgtcgggtagacgtggaatataccaggcaggtattaaagcctcattcagcagtacgttaagcgggcatctcggggtggggtatagccgtggtgccggtgtggagtccccgtggaatgcggtggtcggtgtgaactggtcgttctga

SEQ ID NO: 4796 - DNA, 330 bp, Escherichia coli
atgaaaaaatttgctttactggcgggtctgtttgttttcgcaccaatgacctgggcgcaggactacaatattaagaacggtttgccatcagaaacctatattacttgcgcagaagccaacgaaatggcaaaaactgacagcgcacaggttgcagaaattgttgcggtaatgggtaatgccagcgttgccagccgtgatttaaaaattgagcaatctccggaactgagcgccaaagtggtagaaaaactgaatcaggtttgcgctaaagatccgcaaatgctgttgatcacggcaattgatgacaccatgcgtgctatcggcaaaaaataa

SEQ ID NO: 4797 - DNA, 156 bp, Escherichia coli
atgctgctgagtggggaaagtgtgaaagaaaagaagacagctgctttgtttgtcgtcacgtttatcttcattggctatgcaagtcgtaatacaaggcgggacaaaactgagacacataaggcctcgcaatggcttgcaaggccacacatgtattga

SEQ ID NO: 4798 - DNA, 759 bp, Escherichia coli
atgaaaaccttaagtgggaaagagtttaggaaattatttaatcgttatgagacaggattctatctaagtgagtttgaatacttaaaggactttgatcctttgtttcctgaatgcgtagggaaagaattaaagttgggttataaacgaaaagttgatgtatggtgcgaagaggatgctgcgctatatgcagaatttatagctacaaaagaaaggctgaaaagaggccggttaatcctaaaaataaaccaagtgtggtcgcgtgtatatcctgcttatatttatgcaattgaagaaagaataaatgtcagggcaaaggggagagagtcatttaagtatgaaactgtgcaagaaaaacaatgtaaactttccataatgttagatggtctgaaagaccttgaatgtgaaatagctatgatttcaagtgagtttgaaattgaaaaacactctatgcactatttttatatgatttttgatattgaacgctatataaatgactgcagttactttgttttttctgctgctaaagttgttaaaggcgtgattcaatgcattggttacattgacaaaaataacaaagcaagttgcgatgaattttattcaggcagctatgaatgcttggatgatgatcaggaaacactgaactatttaaatgaatcatgcgcagagggtatagacgctgataaagatctcatcaggaagaatgagttattagccttatccctgaaggaattgtatcaacttctcgtttcaaaaaaataa

SEQ ID NO: 4799 - DNA, 870 bp, Escherichia coli; identical to SEQ ID NO: 26

SEQ ID NO: 4800 - DNA, 4251 bp, Escherichia coli
atgtcacgttataaaacagacaataaacagccacgatttcgttattcagttctggcccgctgcgtggcgtgggcaaatatctctgttcaggttctttttccactcgctgtcacctttacgccagtaatggcagcacgtgcgcagcatgcggttcagccacggttgagcatggaaaatactacggtaactgctgataataacgtggagaaaaatgtcgcgtcgcttgccgctaatgccgggacatttttaagcagtcagccagatagcgatgcgacacgtaactttattaccggaatggccaccgctaaagctaaccaggaaattcaggagtggctcgggaaatacggtactgcgcgcgtcaaactgaatgtcgataaaaatttctcgctgaaggactcttcgctggaaatgctttatccgatttatgatacaccgacaaatatgttgttcactcagggggcaatacatcgtaccgacgatcgtactcagtcaaatattggttttggctggcgtcatttttcagaaaatgactggatggcgggggtgaatacttttatcgatcatgatttatcccgtagtcatacccgcattggtgttggtgcggaatactggcgtgattatttgaaactgagcgccaatggttatatccgggcttctggctggaaaaaatcgccggatgttgaggattatcaggaacgcccggcgaatggctgggatattcgtgctgagggctatttacctgcctggccgcagcttggcgcaagcctgatgtatgaacagtattatggcgatgaagtcgggctgtttggtaaagataaacgccagaaagatccacatgcgattaccgctgaagtgaattacacgccagtgcctcttctgaccctgagtgccgggcataagcagggcaagagtggtgagaatgacactcgctttggcctggaagttaattatcggattggcgaacctctggaaaaacaactcgatacagacagcattcgcgagcgtcgaatgctggcaggcagccgctatgacctggttgagcgtaataacaatatcgttcttgagtatcgcaaatctgaagtgatccgtattgctctgcctgagcgtattgaaggcaagggtggccagacggtttccctggggcttgtggtcagcaaagcaactcacggtctgaaaaatgtgcaatgggaagcgccgtctttgctggccgcaggcggaaaaattacggggcagggcaatcagtggcaagtgacgctcccggcttatcaggcaggcaaagacaattattatgcgatttcagcgattgcctacgataacaaaggcaatgcctcgaaacgtgtgcagacagaagtagttattagcggagctggtatgagcgccgatcgtacggcgttaacgcttgacggtcagagccgtattcaaatgcttgctaacggtaatgagcaaaagccgctggtgctgtctctgcgcgacgccgagggccagccagtcacgggcatgaaagatcagatcaagactgaactaaccttcaaaccggctggaaatattgtgactcgtaccctgaaggccactaaatcacaggcaaagccaacactgggtgagttcaccgaaactgaagcaggggtgtatcagtctgtctttactaccggaacgcagtcaggtgaggcaacgattactgttagcgttgatgacatgagcaaaactgtcactgcagaactgcgggccacgatgatggatgtgtcaaactccaccctgagtgctaacgagccgtcaggtgatgtggttgctgatggtcagcaagcctacacgctgacactgacagcggtggactccgagggtaatccggtgacgggagaagccagccgcctgcgacttgttccgcaagacactaatggtgtaaccgttggtgccatttcggaaataaaaccaggggtttacagcgccacggtttcttcgacccgtgccggaaacgttgttgtgcgtgccttcagcgagcagtatcagctgggcacattacaacaaacgctgaagtttgttgccgggccgcttgatgcagcacattcgtccatcacactgaatcctgataaaccggtggttggcggtacagttacggcaatctggacggcaaaagatgctaatgacaaccctgtaactggcctcaatccggatgcaccgtcattatcgggcgcagctgctgctggttctacggcatcaggctggacggataatggcgacgggacctggactgcgcagatttctctcggcactacggcgggtgaattagacgttatgccgaagctcaatgggcaggacgcggcagcaaatgcggcaaaagtaaccgtggtggctgatgcattatcttcaaaccagtcgaaagtctctgtcgcagaagatcacgtaaaagccggtgaaagcacaaccgtaacgctggtggcgaaagatgcgcatggcaacgctatcagtggtctttcgttgtcggcaagtttgacggggaccgcctctgaaggggcgaccgtttccagttggaccgaaaaaggtgacggttcctatgttgctacgttaactacaggcggaaagacgggcgagcttcgtgtcatgccgctcttcaacggccagcctgcagccaccgaagccgcgcagctgactgttattgccggagagatgtcatcagcgaactctacgcttgttgcggacaataaaactccaacggttaaaacgacgacggaactcaccttcaccatgaaggatgcgtacgggaatccggtcaccgggctgaagccagatgcaccagtgtttagtggtgccgccagcacggggagtgagcgtccttcagcaggaaactggacagagaaaggtaatggggtctacgtgtcgaccttaacgctgggatctgccgcgggtcagttgtctgtgatgccgcgagtgaacggccaaaatgccgttgctcagccactggtgctgaatgttgcaggtgacgcatctaaggctgagattcgtgatatgacagtgaaggttaataaccaactggctaatggacagtctgctaaccagatcaccctgaccgtcgtggacagctatggtaacccgttgcaggggcaagaagttacgctgactttaccgcagggtgtgaccagcaagacggggaatacagtaacaaccaatgcggcagggaaagtggacattgagcttatgtcaacggttgcaggggaacttgagatcgaggcctcggtgaaaaactctcagaagacggtcaaggtgaaattcaaggcggatttcagtaccggtcaggcgagcctggaggtagacgccgctgctcaaaaagtggcaaacggcaaagatgcctttacgctgacggcaacggttaaggatcaatacggcaaccttcttcctggcgctgtggtcgtctttaatctgcctcggggcgtcaaaccgcttgcagacggtaatatcatggtgaacgccgacaaggagggtaaagcggaactgaaagtggtttccgtgactgccggaacctatgagatcacggcgtcagcaggaaatgaccagccttcgaatgcgcagtctgtaacgtttgtggctgataagactacggcgaccatctccagtattgaggtgattggcaaccgtgcagtggcggacggcaaaaccaaacagacgtataaagttacggtgactgatgccaataacaacctgctgaaagatagcgaagtgacgctgactgccagcccggaaaatttagttctgactcccaatgggacggcgacaacgaatgagcaagggcaggctattttcaccgccacgaccactgtcgcagcgacatatacactcacggcgaaagtggaacaggccgacggtcaggaatcgacgaaaactgccgaatctaaattcgtcgcggatgataaaaacgcggtgctcgctgcatctccagagcgtgtagattctctggtggcggacgggaagactactgcaacactgacggttactctgatgtcgggtgtcaaccccgtaggaggaaccatgtgggtcgacattgaggctccggaaggggtgacagaggcggattatcagttcctgccgtcgaaaaatgaccatttcgcgagcgggaaaatcacgcgtacatttagtaccaacaagccaggtacatacacattcacattcaactctttgacatatggagggtatgaaatgaaaccagtgactgtgacaattaacgccgttcctgcagatactgaaggcgctgaggagaaataa

SEQ ID NO: 4801 - DNA, 1278 bp, Escherichia coli
atgagatacaagcctaaccaatacttaatctgtgattcttacggtaactactatttaaggatcacgctgcctgtgtatatgcagcccttttttgaaggaaaaaggacgtttgtcagaagtctgcacacaagtaatcttcgtgttgcacgtagaaagcgtgatcagattgcagatgaataccattgcttacgggagagtgttgcccctgtaaacagcacaatagaaaacacgctggaactgttacgcagtaaggctaaatacgccaaaacagctaccagaatgcaagatacagcgtcttcgtgtccgtcattgcttaaaattcttgaaatctacctgacaattaacagcacgaagaagaagccagccactttagctaaggcaagaaaagcggtagagatgtttctctcctaccgtaaaaagcctgatattgcattgcaagatgtaagccgcaccactgttacaggctggattgaacacatgcaaaaaaccctttcacaacaatcaattgcaaattatatcagcccaatggcccagctatgggagttagcttcatcacgttaccacgatgcgccagaaagggcgctctccccctggcgagggcataggcttgatgtggcacaaagtagagagagctacgaggcattttctaacaaagagttattgcaggtgttgcaagtattttccggtaattcagcagaaaacaaagaaatgatggctttgtgtcttatcggtttatatacaggtatgcggatcaatgagatagcaagtctcacaatagacgatgtgaaagagatcgaaggtgtgctgtgttttgaaatcacacagggaaagacgaaagctgcggcacgtcttgtgcctgtgcatagccttatcactccattggtgttatctcttcgtgaaaagcctcacaatggctttttgttctatcacgccagcattacagagcgtgctgacggtaaacgctctacgtggcatacacaacgatttacaagagctaaacgaaaggctttaggggaaaagggaacagaaaggaaagtgtttcattctctgagacacggagtagcacagcttcttgatcgaaatcaaattccagaagacaggatcgcccttctcctgggccatacacgcggcaatacagagacattccgcacatatagcaagaatgcagcttctccagtagagcttaaaaactatattgagcttctacgctaccctgaaatagagaaaggcttatcaatcaataaaaaatcaaatttaaggcgcaaaacaacgccatag

SEQ ID NO: 4802 - DNA, 669 bp, Escherichia coli
atggcaatgggtccgttaaccattggtcgcccgactgaggcgaaaatcaacagcacaagcaacgatagaacaaccaaagggggtaacggctttgcgatcattacctctaacctcggcagtggtgcaaatgctgcttacaatgactaccaggcattatcatttgatagcgtggaatcgacgaaagttagccgaaatgcagacgttacaagctatgccgtcgaatcaggatcagaagttagtgatcatgttcaaatacggaataacaagttcacattacaggggcgtatctctgaaaccgtattgaagctcaatcccgatatgattaagaatgcgggaattaacggcaatcgacgtatgcttatgcttgaatacctaaatcagttgatggacagtcgccaacctttcctacttgtcactgagttaaaaaattatgacaacgttgtgttagttggcatgtcttatgaagaagaagcaagcgaaagtctattgtttactcttgattttgagcaaatccgtcttgtctctaaagcaactacaagcgcaattgcggtaaaaacagcaccaaataaatctgtagggggacaggttaaaatgcaggtaaatacaacagaacagaaaaatcaaaaaagcccagggcaagacgttgtaacgccagtatttaaacaatag

SEQ ID NO: 4803 - DNA, 1842 bp, Escherichia coli
atgttagaccttaccgtcagccgcttatcaaacgttgtcaccttccaggttgatcgaccatcattagagaaagcaaaagcagaagtagaaaaacttcgtaaacaaatggcggctgtgaaagatatagaattgcgtgttaagacacataaacaatcaaccgctaaagcaaaaaaagacgtagacgatattgctaaaaagcaagcacaggctgataaagctaatgctaaagcacaattagccgctcaacgtgtagttgcaagagaacaaaaagccctggcagcacgcaaagagaaggcagaattaaagcttttagacgttggatcaagcattagtgcaatgcaccgtctttctgtagcggaacaatataaagctattgcacaggctagagaaattgccctccaatatgaaagaggcgctattagtctggcacgtatgaatagccaaatgaaacgcctacaacagcaacaacgtaagattaatggcaatcgtaacgctcacgctaaagcctatgcacctgttaagggtagcgggagtattggcggcggtgctgcggctgttatgctgggtggcttaggcgctggcgctgcatatatggctatgagcaaagcctctgaatttgttactaacagctttgccagtgctgaaacgctgggagaattgtatagccgtgcgaagctgggcggtgtagacgttaaccagatgaacaatattgagcaatgggcctacaaaaacggcgttgattcaatgatgggggatcaaggtaaacgtaagtatctcgatcagatgaaagatgtacgggagaaggctactaaatcttatgatgaggctgaatatgtagttgataagaaaactggtaaaggagaatggaagggcggcgatagcggcatcaatactttaatgaatgaaggattcttaactaaaaaggatctaaaagactttgctgataatccggctggtctggttagtaaagcagttcagggaatggtgaagaaaggctattcagatgcacaaatcggtagtcgtctggaagatctggctgatgatttgatgctcacctctaaatactggacacgctccgctaaagaagtggaacaatcagcacgagaacaacgagaatcagggcgctgggtaacacaggcacaacaggaaagcgttattaaattccgtgaactgaataatgcacttagtgggctttctgactcacaagggatcgcctttgttgatggctttatgaaatctcttgatccgaaagtgattgaagagtttaaaaagagcatggttgcaatgctgccaatgtttaccaaattaggcgaggctatcggcggattggttaacgctgtaatgaaagcaatcaactggctgatgaaaaacgacgagaagacggcagctattcagaagaatttaggtgatgcaccgccactatctaacgaaggaatgaagcagaatctttctaatctcactcctgatcaatataaaggcgctggcaccggaacaattaagccagataacagcaattccctggttaacactattaaaagctggtttatgccagaagaaacggtaggtggggcgcaggctgtaaatcaatacagtctcgaaggacaaaacattgcaaatctgaaacagagtgcagcacaacaagctttcaaggctccttcttacacctttgcgcctgttatccacttcaatccagaattacaagtaaatgcagaagtgccgctaactatcgaatcagacaccggacgattgagcgaatttatcgacttcaaatcaaaggcatcctccgctgagtttagcaagctattaacgctgggtgttatgtcaggcgggtcaacctattaa

SEQ ID NO: 4804 - DNA, 213 bp, Escherichia coli
atgaatacagaaaacccacaatcctttattcttaaggctgtaaaagaactggcagctattagcgaggaatcagttataaacacatcggcgctttgccgccttttagaaattgatgcaaataatgtgcgccagcgtgtctttcagactgggtgcagcactttcgaagcaattcaatactattgctctaaaaacaataataaacaacaatcataa

SEQ ID NO: 4805 - DNA, 1032 bp, Escherichia coli
atgaatgatttatcaacatattttggcgttaatactgcggtagtaactccatttgcttatgagaatgcacttaataccctgattactaatctcgatctgttcgatgtgcaatatcatacagaaaacagcattcttcttaccgacctgattgatcagtttgtgcaggtagctggggaaacctcgccttacgctcaaagcgactggaacgcctctaaacgtcaggaatggtcaaacaaacttttccagatgaaacacgtcggcagtattaacgctgttacttctcgtgacctggaacaatacagccgccaatatccaaaccgttctgatgctatgctggtagcggttaatgatttctctgaggctcattaccgttcacacgcaaaccgtgttgaagtggatctgattaccgcgctgctgggcctgaaagttgaatctgaatatgccggacaaggtgatctcgacttcctcgacggtcaggctaaaaccacggtacccgctatcgactttgcatcgactactgttaacccgttccttgctattcgtaaagcggtgcgcttacagagtgaaaagctggggtctggtcttgctgcaaagcgaactggtgtaattatctttgctgctggcactgctgctgatggtttgtcatctaacccgctgatcagtgacatggtgaaatatgcaggcgatgcgagtgctacggccctgtttacccgtatggttgattctaacccagcctatgactctttccagattggtgggatcactgttattgatgtgtcaatgtttcctgagattgttgctcacatcggagagaacggtttcgcaattgttccggtaatggataaagcggcacagtgttaccagcttcatagcggcgttggtgtgcgtcatgctgagttaggtcaagatgccgtgttgcatcaccaatatctaatcaaggatgaattccaattcccatctgtggttactgagacatcttatctgccagtaaacaacattccgcaagctatcatcttcggatctgctgcgtaa

SEQ ID NO: 4806 - DNA, 384 bp, Escherichia coli
atggctaacccatatggaaaattaaaagcagtgaatgcggataactcccgttcacgctgtaaggtagtagcttacgctgctgatccagtgctgcaagatcgcctcgtcaaactggcttcacctctcactgacgatcttattgtcggggctttgctgaaagccgatggcaccaaagcaacaaccgcatctgatattgctcacgtagtagttgaaccggcttatgaaggacaggaaagcgtagtggttgcacatcctactttcgttattctggctgaagatgggattgaatttaacagcatggaaaaggcaagtgttattgcaaaactgcaatctctcggctttgtaattgctggttatgaagaacttgcgatccctacgacttaa

SEQ ID NO: 4807 - DNA, 198 bp, Escherichia coli
atgaaacaagaaatgattatcagcaaagacggggaaacgatgattgttagtgatgaaaacctcattaaggttgccgcactgttgggagttactcccgaaagtcttcgttctaccactgctcaattatttaaatcggctgatgcggttagtcttgctgatgcccttaaatctaaaattaaacaactgaaaggaaaataa

SEQ ID NO: 4808 - DNA, 309 bp, Escherichia coli
atggaagaagatattagcaatgcaatggaacaacttttagatctgactatctcactacaaacaagaataaatcaagcctattcagatttatgcgattacacgctctctcaatgcgttattagcttaatgaaggtgaatgtaagccttgacgattttatctctctggggagcggtttagagctatcagaggacaatgccaggctgtgcactcaaatcatcacagacaccgcaagcacgttaaaggctgcaagtgaagagattcagcaattagtaaatgatttagcaaaaagtgctatttcttctaagtga

SEQ ID NO: 4809 - DNA, 204 bp, Escherichia coli
atgatcgaccatatacaggaaacacaattatttcagatgatcctgtctgatgcaaaaaactatgctgagttaattcggctggcaaaagaaacagaagactacgaagcattagagcgttatcgtgatgaagtgctgacgctcaagacaccttttaacatcgtattgaatatgattaatgatgcattacaaggagaagccgcataa

SEQ ID NO: 4810 - DNA, 387 bp, Escherichia coli
atgggaaaaaagaaacgtaataacttaaaacgtattgaaaaaaacagtaacttcaattcaacaagacaacgtccaccgacacataccaataacgaaattccaggggaagagataatcttcattttagaatctaacagcccaccacttacaaacgaagaattagaaattattcaatcaatgggtgatggtgtgtatttcaaacccagaacaagaaagacaacgattatagaacctggcacattaaagaaatggcagctgttaaattttaccagctacaggcactatatcggttttaatagtttcaacaatcaggtaggcggcgttacagaaacagatctgatgcagcacctgatcgacactctcgcatctaacaaacgttcaaactaa

SEQ ID NO: 4811 - DNA, 270 bp, Escherichia coli
atggcttataacatcactataggaaacaaaactattgaaataactgagagcggataccacattttaaaagctattttggaaatagagttctcaccgccgacagtggttagcttttgtagtttaggcggctacagcgcacaacacgtgaatcattggttaaaccattttacatcgttcggtgtgctggattatgaagggattaaccacactacatttcgtcttttgaaattaaacaaagattttgaattgtttatcacaaacaatcaataa

SEQ ID NO: 4812 - DNA, 681 bp, Escherichia coli
atgtctaaaattaaattgattcgtgaaaaataccagtatgttgatcaacaaacaggagaaattaaagaccgaactttgaatataccacactacttttgtgagattgaattcatctactcctcaaatattgaggatggaaaagcgaagtttagtgcagaaatgcaaaaattatattgctatgtttcagattgggagaaatcaggggggatatgttttgaaacacaaacgaagttaagtaaagtttgtggctgtagccgtaagacagttaatgaattgattggtcttatgattaaaatcggtcttttagaagaggtcggagaacgaatcccaaaacgtccattaaaattacgtgcgctacctctcacagatgcacatattaccccccctagagagtcatcactacctgatccttctgagaaagaaaacgaatctaatgaaatattgaatgtttcagaaatcatcgttgaagaagaaatacaggaatcagagttccctgagcggcccgaaatttttacttggcttctttcccttgataagaagaaaccaccgcacgaagaaacagaagattttgtaaaacgagcattagattcaaagaatatctatctttgtgaaaatgattttgactctttgataattgatctcaaaagtgagagcacaatatatgattcactacccttttaa

SEQ ID NO: 4813 - DNA, 168 bp, Escherichia coli
atgagcgaaaccaagaaaccaattccacgcacttacctacacgttgaccctgaaattttcaagattttatttgctgaagccaagaaaaggcaaattatggtcagtgatttgatgttagaaatcattactgaagcagcagagaacatcaaacaaaaaaagggtaagtga

SEQ ID NO: 4814 - DNA, 183 bp, Escherichia coli
gtgaagtatttcacttctcaagatgtagttgaagcctggaaacgtggtgagatcaaccgctttagggtaagaatgaataggaacacagcgcgacgctgtggttatccagagcgtgaaaaatgttttgacgatgcactgaaaattattgatgaactgcgtaaggcaggagcagagaaagaataa

SEQ ID NO: 4815 - DNA, 159 bp, Escherichia coli
atgaaaaacattgcagctatcaaacgtaataaccgcaagattcacgctcgtaagttcctgtctacgccagaaggaaaagcctggctagagcgtaaacagagagagaacgaagaaagaaaactccttagtgagttgaaatggcttagagaggatttctga

SEQ ID NO: 4816 - DNA, 399 bp, Escherichia coli
atgcgggtattcaaaacaaaacttattcgcctgcaacttacagcagaggaacttgaagcgttaacggcggattttatttcctataagcgtgacggtgttttgccagatatatttggtcgtgatgcactctacgacgactcgtttacctggccattaatcaaatttgagcgagttgctcatattcatctggcaaatgtgaataatccatttccgccacagttgcgccaattcagcagaacgaatgacgcagcgcatttggtatattgtcagggcgcgtttgatgagcaagcatggttgctcattgccattctgaaacctgaacctcataaactggctcgagataacaaccaaatgcataaaattgggaaaatggcagaagcgtttcgcatgcgtttttga

SEQ ID NO: 4817 - DNA, 294 bp, Escherichia coli
atgcatcgaattctcgctgaaaaatcggtcaatatcactgagttacgtaaaaacccagctaaatactttattgatcaacctgttgcggttctttctaataatcgccccgcaggatatctcttaagtgccagcgcatttgaagcattaatggacatgcttgcagaacaagaggagaaaaagcccataaaggcgcgcttccgtccgagtgctgcaagattagaggaaattacacgccgcgctgaacaatatcttaatgatatgacggatgatgatttcaatgactttaaggaataa

SEQ ID NO: 4818 - DNA, 1740 bp, Escherichia coli
atgctttcacgctcggatttactgacgctgttgacaatcaactttatcgtcgtcaccaagggggccgagcgtatttccgaggtttctgcccgctttaccctggacgcgatgcccggcaaacagatggcgattgacgccgatcttaacgccgggttgatcaaccagacgcaggcgcaaacccggcgtaaagatgttgccagcgaggccgatttctacggcgcaatggacggggcatcaaaatttgtgcgcggggatgccatcgccgggatgatgattctggcgatcaacctgatcggcggcgtctgtatcgggatcttcaaatacaacctgagcgccgacgccgccttccagcaatatgtgctgatgactatcggcgatgggctggtggcgcaaatcccttccctgctgctctccaccgcggcggcgattatcgtcacccgcgtcagcgataacggtgatatcgcccatgacgtgcgtaatcagttgctggcaagcccgtcggttctctacaccgccactggaattatgttcgtgctggcggtggtgccgggaatgccgcatttcccgttcctgatgttcagcgccctgcttggttttaccggctggcggatgagcaagcgcccgcaagcggcggaggcggaagagaaaagcctcgaaacgctaacccgtacgatgacagaaaccagcgagcaacaggtcagttgggaaactattccgctgatcgaacctatcagtttaagcctcggctacaaactggtggcgctggtggataaagcgcagggcaacccgctcacccagcgtattcgcggcgtacgtcaggtgatttccgacggcaacggcgtgctgctgccggagatccgtattcgggaaaacttccgcctcaagcccagccagtacgctattttcatcaacggcattaaggctgatgaagcggatattccggcggataaactgatggccctgccctccagcgaaacctacggcgagatagacggcgtgctggggaacgacccggcgtacgggatgccggtcacctggattcagcccgcgcagaaagcgaaggcgctgaatatggggtatcaggtgatcgacagcgccagcgtaattgccacccatgtgaataagattgtgcgcagctatattcctgatttgtttaactatgacgatattactcagctgcataaccgtttgtcgtcgatggcaccgcgactggcggaagatttgagcgcggcgctcaattacagccagttgctgaaagtgtaccgcacactactgactgaaggcgtttccctgcgcgatatcgtcaccatcgccaccgtgttggtcgccagtagtgcggtgactaaagatcatattctgctggcggccgatgtgcgcctggtgctgcggcgcagcattacccatccgttcgttcgcaagcaggagctgacggtgtatacgctgaataatgagctggaaaatctgctgaccaacgtggtgaatcaggcgcaacaggccggcaaagtgatgctcgatagcgtgccggtggacccgaatatgctcaaccagtttcagatcacgatgccgcaggtgaaggagcagatgaaagcggcggggaaagatccggtgctgctggtgccgccgcagctgcgccctttgctggcgcgctacacaaggttgtttgcaccagggctgcatgtgctgtcgtataacgaagtgctggatgagctggagttgaagataatgggggcgttgatgtag

SEQ ID NO: 4819 - DNA, 498 bp, Escherichia coli
atgtctgaatatcgtcgttattacatcaaggggggaacctggtttttcacggtaaatttacagaatcgtcgaaaccaacttgtgaccacccagtttcagacgctccgtaacgttattattaaagttaagcgagacagaccttttgaaattaacgcttgggtagttttgccggagcatatgcattgcatatggacattacctgaaggcgatgatgatttttcctcgcgctggcgggaaattaaaaagcaatttacccatgcttgtggattgaaaaatatctggcaaccacgtttttgggaacatgctatccgcaataccaaagactatcgccatcatgttgattatatttatataaatccagtaaaacatggttgggtaaaacaagtgagtgattggccattctcaacgtttcaccgcgatgttgcgaaagggttatatcccatcgattgggcgggagacgtaacggattttagtgctggggagcgtatcattttatag

SEQ ID NO: 4820 - DNA, 186 bp, Escherichia coli
atgagtttttcaccgcttttcgtgaaaatcttttgtagatcttctggatcgctcgcaaatcgtcatgtggataactttgtgcataaattatttacatcgcttttaatttattatcatgctttttacagcatggtgtttgtctttgtttttcatgcagttaaaaataaagccatccctaataattga

SEQ ID NO: 4821 - DNA, 789 bp, Escherichia coli
atgagtatcatcgaagtgacaggtaatccacgccatgaccaactcgttcatctaatcgcagaacgcggttatatgaatattgaagaactggcacaactgctggatgtttcaacgcaaaccgtgcgccgggatatccgaaaactcagtgagcagggcttgatcacccgtcatcatggaggggccgggcgcgtctccagcgtcatgaataccgcttttgagcaacgggaactttcgctcaccgccgagaaacgggcgatcgctgaggcagtcgccgattaccttcccgaacgctgtaccgtctttatcaccatcggtacaaccgtagaagccgttgccagggcattactcaaccggcgtgatttacgcattatcactaatagcctgcgtgtggcacagattctttataagaatcaggatattgaagtgatggtgccgggaggcactttacgcgctcataacggtgggattatcggcccaggagccgtggattttattgaaggcttccgcgcagattatttaatcaccagtataggtgccattgagcatgacggcaccctgctggaatttgatgtcaatgaagcgttagtcgcgagaacgatgattaaacatgcgcggaatacattgttagtggccgatcatacgaagtttgccgcgtctgctgccgtttcaattggcaatgcacggaatgtcagggctttttttactgatgccccgcctcccaattctttctgccagttgttaagtgaagagaatgttgaactggtggttgccgagcaagaagtatcctga

SEQ ID NO: 4822 - DNA, 897 bp, Escherichia coli
atgaccagaattgcatgcgtgggtatcacagttcaggacagaatttattctttgcccactctgccggagggtggcgggaaatatcaggcaaatcattatcttgagattggtggcggcccggcagcaacagccgctgttgcaatcgcaaagcttggcgtggaggttgatttcatcggtcgcgtcggcgatgacagttgtggaaataccttacttgcagaacttgagggttggggcgtcaataccgcattttgccgccgatatcctcacgcccgttcgtcgcaatcagcgatcctcgttgatcagcatggcgaacggattatcgttaattatccaagtcctgatctcggtactgatgccgaatggttagaagcgatcgatttctctcgttatgatctgattctggccgatgttcgctggcatagcggtactgaaaaagcattctcgctagcgcgccttgcgggtgtgacaacgcttttagacgccgatatgacaccgcaggatatttctccacttgtcgcgcttgccgatcacgccgtgttctcaacaccagggctgaaacgcatgactggcctgcagtcacctgaagaaggtttgttccaggcaacgacacaaacagcaggtaaagtgtatgttacgctgggttctgaaggatcgttgtggattgaagatggtcatttgtgtcaacaggaggcattttctgtcaatgtggttgataccactggagcaggcgatgtttttcacggcgcactcgcggtagcgttggcagaaaaaatgccaacaaaagaggctattcgttttgccagtgcggttgccgcgatgaaatgtacccagcctggcggtcgggccggcattcctaatcgtgagcaaaccgaatcatttttgtcactttatgcgtaa

SEQ ID NO: 4823 - DNA, 879 bp, Escherichia coli
atggcaaccattgcatttctcgggctggggcagatgggtagcccaatggctaacaatctattgcaaaaagggcattcattacaggtatttgatgtcaatacacaggccgtcgatgcgctagttacgcagggggccactgcggcacaaaccccagcggaagcggcagcaagcgctgaatttatcatcactatgcttcccaatggggacattgttcgacaggtgctgttgggggaaaaaggcgtctgtgaaactgtttcatctgacgcgttagtgattgatatgtcgactattcatcccttacagaccgatgcattaatacgggaattacaagaaaaaggcatcaatatgatggacgcccccgtgggcagaacgtcagtgaatgcgattgatggcacattgctgattttagcgggcggcactgatgagcagattgcgcgtgcacgcccgattctcatgtgcatgggtaatgagctggtcgaggctggtggcccaggaatggggatccgcgtgaagctaattaacaactatatgagcattgcgcttaatgcgctgtcctccgaagccgctgtgttatgtgagtcactgggattaaatcttgatgtcgcaattaaggtgatgagtggtacggcagcagggaaaggacattttacgaccacctggcctggcaaagtgctgaaaggcgatctttctcccgccttcatggtggacctggcattgaaagatctgcgtattgcagttgacgtcgctcggaaaacgggggcgccgctcaatatggggattgcagcagaaagttattacgccgcagcaagtcaagacggcaaagggcggcaggactggagcgccctgctaaatcaggttcgccagcaggctggtctttaa

SEQ ID NO: 4824 - DNA, 888 bp, Escherichia coli
atgtcatcccacttcaccccatttacgctgaaagatatctcccgcccaggtggtggattcgccatgttagctgtcgatcagcgtgaggccatgcgcctgatgtttgcggcagcagggcagccaaaacccatcgccgacagtgtactcaccgattttaaagttgccgcgacccgaatcctttctccttatgcttctgccgttctggcggataaacaattttgtcttgaacaaatagtcgagcagggcgctgtggctaattcttgcggcctgattgtcgctgccgatctttttatcccaggtaatggcatcccggttgatagcgttgaaatagatatgtccgtcgacccgcataaagcccgtgaaatgggggctaaggcaatgaaattacttgtactctggcgtgaagatgaacccgcagaggaacgtctggcaatggttgataaatttgttcgtcgctgccgtagtgccgggctggttagcattattgaacctgtggtgcgtccacctcgtcgcggttgggactttgatcgtgaaagcgccattgttgccgccgccgcagagcttggtggaacagaggctgatctttacaaagccgagatgccattagggggcaaaggcgatgaaaaaaccttacttgctgcctgtcagcaacttaacgatcagatgaagatgccgtgggtaattctttcttctggcgttgatgccgatatttttggccgtgcagtaagtattgccatgaaaggtggtgcgtcgggcttcctggctggacgagcggtttgggcgtcggttgttggtgcacaagatccacaaaccatgctgcgcgatgtctccgttccacgcttgcaacggctggctgaaattgtcgatgaaggtatcgcgcaacgctaa

SEQ ID NO: 4825 - DNA, 1011 bp, Escherichia coli
atggataaaattacccaggttttattttcagatattgggaaagtcaccactcaatatgttgaagtaccacaccagcaacttaaaccgcacgaagtacggattgcgcccgtgttctacgggatatgcggttcggatctgcatgttctgaaaggcggtcatccgtttgccaaaccgcctgtcgtccccggtcatgaaattgcagcgcgcgttacggaagtgggcagcgacgttaaaaatgtacagccgggtgatcatgttgtggtcgatcccatcatggcttgcatggaatgccgagcctgcaaagcaggacgttttaatctttgtgaaccaccgcaggttgctggttttcgcgcaccgggctttgctcgctcacaacacattgttcctgcgcgtaattgccatgtcgcaccagcctctttaccgctaaaagtgttggcctttgccgaaccggcggcttgtgctcgtcactgcgttaaccgaatgccgaaagcttctctggaaagcgtactggtgattggtgccggaacgataggcttatccatcgtgcaggcactgcgcattatgggggcaggtaagattaccgtgattgaacctgacgctgccaaacgcgcgctggcgttaaaactgggcgcagcagaagtttgggcaccaggtgagctggccgcagatgtgcgatttacgggggcgattgatgtcgttgcagcgcaggccacgcttaacgatgcatgtacccgtgtatatgccggaggcaccgtcgtgtgcatgggcgtaccaagtgggccgcgtgaaataccattaccgatgatgcaacgtttcgagcgtgacttgctcaactctggcatgtacatccctgaagatttcgatgctgttatcgaatggctggcggatgggcggtttgataccagtgaactggttaccgatttatttgccattgaggatgcagcggcggcattcgaacgcgcgcagcaaaatgactccataaaggtcatgctgcaatttgcgccggaatga

SEQ ID NO: 4826 - DNA, 1434 bp, Escherichia coli
atgagtcaaatcaccagtcctgcaacttattcaattagtcggccacaggacgtaattgatattgttaataagaactctgcaatcaacaccagtatcggcgttatttttattgctttgggcggcatattgattgatgcctaccaggcggcgatggtggggtttggtaataaatacattgccgctcaattcggaatttcgccgggtcttgctgcaaccgtcaatgcatcagtattaatcgccgcgttaattggcggtttattagcgaaccgagtaataaaccgctttgggcaaaagcgggcatttattattggcatggggctgtgcaccatcggtgctgcagcggtagctattgctcccagtatctggtgggtgctggtgtgccgcgtcatcatgggctttggtttaggcatcgacttccctttggcaaccaatgccgtggcagagcttcgtggttcaacgtcgaagaaaaccggcacgtcggtcaacctctggcaaatggcctggtatgtttcgacaaccgttgtttatttggtgcttttgccgctgcttctgtctggtatcgctgaagaacaattgtggcgttacggaatattcatcggagctatttttgcagtcatcttcatgattttgcgttacttctttattggtgaatccgcaatgtgggccgcacgcgtcgggcgttaccaggaagcgtgcgacattctgggaaaacgttatggtgttcaggctcacgttgcggcatcgggtacaacagaagcgaaattctcggaaaaagcagagaataaatacagtggtggatatggcatcttatttaatgatcgttaccgcaaacgcaccattcttggctgtgtcgtggcaaccatgcaggcgtggcaatataacgccgtaggtgtttatcttcctcttacgttggcgggaataataagtggcgggcttactggcgcgttaaccggttctgccgtcgtgaatgccctttgtggggtgacaggcgggatgatcggctcgtttattctccaacgactgggtactcgccgacagtcgatgtatggatttgctgttgtgaccttagcattgctgtcgttaggcgcactggcaacgactaatccctggctgtctttagggttattgggatcaattattttcttccattcagcgggtcctggtgggctgggcatgaccattgccacactctcttatcctcccgctattcgccctactggggtcggatttgcccgcgctattatgcgcacaggggcaattgcaggactcattttctggccgatgctgtggggtgcgttgaaaactgaagcgttttactggttggcaatcgtgccattcctgggattcctgacctgtgtattgattaattgggaaccactgggtgcaaatgttgatgctgaggacgcagaggttctggctgaattgaagaaataa

SEQ ID NO: 4827 - DNA, 1350 bp, Escherichia coli
atgtctgaaaagttacccgcaccgcgtgaagggctttccggtaaagccatgagacgtgtcgttatgggcagtttcgcaggcgcgttaatggaatggtatgacttctttatttttggcacggcagcaggactggtatttgcaccgctgttttatccagacagcgatccttttataggtcttatagcttcctttgcgacctttggtgttggttttctgactcgtcctttaggtggcatcgtctttggtcattttggcgataaaatcgggcgaaaaataacacttatctggacgctggctattgtcggttgctccacatttttgattggttttattccgacgtatcaggaaattggcatttgggcaccgcttgtattaatggtgctgcgtttgattcagggctttggtcttggtggcgagtacggcggagcggcattgatgaccatagaatcagtgcccgaatcccgacgcggatttttaggttcactcccgcaaacggctgcgtctgtgggtattatgctggcaaccggtatttttgctctctgtaaccattttcttacttcggagcagtttctctcctggggatggcgcattccgttttggctttctgcggtgatgttgatcgttgggctgtttatccgcctgcataccgaagaaacgctggattttcaaaagcaaaaaacgacgaataataaagaaaagtccgttcctccgttgattgaattattcaaaaaacatccacgaaatattttattggcactgggtgcgaggctggcggaaagtgtctcctctaatattattaacgcctttggtattgtctatatttccagccaattagcattgtcgcgagatattcccctgacgggtatgttgattgcctcggcgatcggtattttcagttgtccattggttggatggttatcagatcgtataggtcaaaaaagtctgtatttgtcgggagcaggattttgtgtcctgttcgcgtttcctttcttcttattactggatagcaaaagtacgctcatcatctggtgcagtatgatccttggctacaacttaggtccgacgatgatgtttgccgtgcagccaacacttttcacccgcatgttcggtaccaaagtacgatataccggcctttcttttgcttatcaattttccgcgattcttggcggactaagcccccttatcgcctcaagtttgctggcgctagggggaggaaaaccgtggtatgtcgctctgtttttatttgctgtctcagttctttcctttgtttgcgtctggctgattgagccaaccgatgaacaagaaaccgcttcttaccgctacatcagggaacaatctcatgaaaactga

SEQ ID NO: 4828 - DNA, 888 bp, Escherichia coli
atgaaaactgaacgaaaaaacgagcattacctggcgctacaacaggcgtttgacgcgccatggcctgggcctgtaggagagttagtgacgctggaaaaaggcaatattcacctgcagatttatccgcatgatggtgccaggataacctcgttaaaggcatttggttctgaagtattacgccaatggcagccgcagcgcagagcttttcagtatggctgtttcccaatggtgccgtgggcagggcgactggggaatgcgacgctgaatgctggtgggcaatgttattctttacccgccaataaaccaccacatgcgttgcatggtatggcttgttactcaacgtgggaaatcatcgacaaaacagcagattccctgactttacgtatgcccctggcttcaccgtggccctggcaaggggaagtgattcagacttttttgctggagaacgatgcgctggttttgcaactggaagtccattcatatgccgatacattcccggcctccgcaggctggcatccgtggtttgcgaaaaagctgactccgcaaaatacagaatcgttgcaggtgctttttgatgcggactggcaagaagaagcgggtagtgatgaactgccaactggaaatcgtatctctcctcaagttggtccctgggatgactgttttggtttttatgacggggtgaaggttaagttactgtggcctggtaaactcgcgatgaccatgacctcttctgcaaacagtctggtggtatttgataaacagcccgatgccacctgtattaacccgctgactcaggcacctaacgcaataaatctaacgccggaatttgtgacaccagataagccgctggtcatcgaaactcgttggcaatttacacctgaatcttaa

SEQ ID NO: 4829 - DNA, 1419 bp, Escherichia coli
atgagccagtcactgtttagccaaccgttgaacgttattaacgtcggtatcgccatgtttagcgatgatctgaaaaagcagcatgtagaagtgacccaactcgactggacgccgccggggcagggcaatatgcaggtggtgcaggcactggacaacattgccgattcgccactggcggacaaaatcgcctccgcgaatcagcaggcgctggagcgcattatccagtcgcatccggtgctgattggttttgatcaggcgattaacgtggtgccgggcatgacggcgaaaaccattcttcacgccgggccgccggtcacctgggaaaaaatgtgcggcgcgatgaaaggcgcggtcaccggagcgctggtgtttgaaggactggcgaaagatctcgacgaggcggctgagctggcggcttccggggagatcaccttctcgccgtgccacgaacacgactgtgtgggatcgatggcgggcgtcacctcggcctcgatgtttatgcacatcgtgaaaaacaaaacctatggcaacatcgcttataccaacatgagcgagcagatggcgaagattttgcgtatgggcgctaacgaccagagcgtgatcgaccgcctcaactggatgcgcgatgtgcagggacccatgctgcgcgacgcgatgaaaattatcggcgaaatcgatctgcgcttaatgctggcgcaggcgctgcatatgggcgatgaatgccataaccgcaataacgccgggacgacgttgctgattcaggcgctgacgccagggattattcaggcgggctattccgtcgaacaacagcgggaagtgtttgagtttgtcgccagctgcgactacttctccggcccgacgtggatggcgatgtgtaaagcggcgatggatgcggcgcacggcattgaatacagcactgtggtcaccaccatggcgcgtaacggcgtcgagttcggcctgcgggtcagcggattaccggggcaatggtttaccggtccggcgcagcaggtgatcgggccgatgtttgccggttataagccggaagattcggggctggatatcggcgacagcgccatcactgaaacctacggcattggcggatttgccatggcgaccgcgcctgcaatcgtcgcgctggtgggcggtacggtggaagaggctatcgatttctcccgccagatgcgtgaaatcactctcggtgaaaaccccaacgtcaccattccgctgctcggttttatgggcgtgccgtcggcaatcgacatcacccgcgtgggcagcagcggcattctgccggtgatcaacaccgccattgcccataaagatgcgggcatcggcatgattggcgcgggcattgtgcatccacccttcgcctgcttcgagaaagccatttttggctggtgcgaacgttacggcgtctga

SEQ ID NO: 4830 - DNA, 1383 bp, Escherichia coli
atgaaagaaaacaatagccgccgtgaatttctgagccagagcggtaagatggtcaccgccgccgcgctgtttggtccctcagtgccgctcgcccatgcgggggtagctggcaccctaaactgcgaagcgaacaacaccatgaaaatcactgacccgtattactatctcgataacgtgctgctggaaaccggttttgactacgaaaatggcgtggcggtgcagacccgcacggcgcgccagactgtggaaattcagaacggtaaaattgttgccctgcgcgagaacaagcagcatccggacgccacgctgccgcactatgacgctggcggtaagcttatgttgcccactactcgcgacatgcatattcatctcgacaaaaccttttacggcggaccgtggcgctcactcaatcgccctgcaggcaccaccatccaggacatgattaagctcgagcaaaaaatgctgccggaactgcaaccctacactcaggagcgggcagaaaaactgatcgatttattgcagtcgaaaggcaccaccattgcccgcagccactgcaatatcgaaccggtttccggcctgaaaaatctgcaaaatttgcaggcggtgctggcgcgacgtcaggcgggcttcgagtgtgaaatcgtcgccttcccgcagcacggtttgctgctgtcgaaatcggaacccttaatgcgcgaagcgatgcaggcgggggcgcattacgtcggcgggctggacccgaccagtgttgatggcgcgatggaaaaatccctcgacaccatgttccagattgcactggactacgacaaaggcgtcgatattcacctgcacgaaaccactccggcaggcgtagcggccatcaattatatggttgaaacagtggagaaaacgccgcaactgaagggcaagctgaccatcagccacgcctttgcgctggcaacgctcaatgagcaacaggtagatgaactggcgcaccggatggcggcgcagcaaatttctatcgcctcgacggtgccgattggcacgttgcatatgccgctcaaacaactgcacgacaaaggcgtaaaagtgatgaccggcaccgacagcgttatcgaccactggtcgccttacggcctgggcgacatgctggaaaaagccaatctctacgcgcagctctatattcgtcctaacgaacagaatttgtcccgttcgctgtttttagccactggcgatgtattgccgctcaacgaaaaaggcgagcgtgtgtggcctaaagcgcaggatgacgccagctttgtgctggtggacgcctcctgttccgccgaggcggtggcgcgtatctcgccgagaacggcgacgttccataaagggcaactggtgtgggggagtgtggcaggttga

SEQ ID NO: 4831 - DNA, 411 bp, Escherichia coli
atgaccataaaagaaaaaatctcacaaaaatatccccatgcttccttttgtacttttggcgattcagcagcgttggccgatcacctcgcaacgttgattgcgactggtgttaaaacagcttcctgtggttcgctggcgggatgtattgaagacaacgcatttccgatgattggggagtataagattgtagaaaatagccgtggtgagcctgtctgtgttatcagagtaattggcctgcatttactgcgcttttctgatgtcaccgcggagcttgcccgtaaggaaggtgaaggtgacctcagtcttgaatattggcgtaatgaacaccgtcgttttttccaggcagaaggatgctattcacccgaaatggacgttatctttgaagaatatgcccttattgacgttgtgtag

SEQ ID NO: 4832 - DNA, 987 bp, Escherichia coli
atgatgaataaacgttttgttatcaatatggtgtcttcgctgttattaggcgctgcgctaatttctgcgccgctccaggccgcggaaaaagtcgtggtgaatatctctaaagtcgatggtatgccgtggtttaatcgcatgggcgaaggtgtggttgaggcgggtaaagcctttggtgttaatgcgtcacaggtggggccttcaagtactgatgctccacaacaagttaaaattattgaggatttaatcgcccgtaaggttaatgcaattacaattgtgccaaacgatgccaacgtgctggaaccggtattcaaaaaagcgcgagatgccggaattgtggttctgaccaacgaatcccccggtcagccaagtgctaactgggatatcgaaatcattgataacgaaaaatttgccgctgaatatgttgagcatatggcgaaacgcatgggtggcaagggcggctatgtgatttacgtgggtagtttgaccgtgccgcagcataacttatgggctgacttgctggtgaaataccagaaagagcattacccggatatgcatgaagttacccgccgcatgccggttgccgagagtgtggatgactcacgtcgtactacactggacctgatgaaaacctatcctgacttgaaagcggttgtctcctttggttcaaacggtccgattggcgcgggacgtgcagtgaaagagaaacgggcgaaaaataaagtcgcagtctatggcatgatgatcccttcacaggcggcatcactgattaaaagtggtgatatcaccgaagggattacttacgatccggcctctgcaggttacgcactcgcggccgtcgccagcacgttgctgaagggtgaagagatcaaacctggattagaaatgcagaatctgggtaaggccgacgtagatatggataagcgaattatccgtttccataaggtattactggtcaacaaagacaatatcgactcactttattaa

SEQ ID NO: 4833 - DNA, 1485 bp, Escherichia coli
atggaaaccttcctttcccttcgtcatatcaacaaaacgtttcatgccacgcgagcgctgcgcgatgtttctctcgactttatgtcgggtgaagtgcactgtcttgccgggcaaaacggctgtggtaaatcgacgttgattaaaattatgtccggtgtttatcgcccggatgagggagcggaaattacgcttggtgggaaaaactggtcaaagctgacacccgccgcttcggtggcgcaggggattcaggtgatttatcaggacctctctttatttcctaacctgagtgtctgggagaatatcgccgtgaatcactatcaccacggtctgtttgttaaccgacgtcgtctgcgtgaggtggcgcaggcggcaatgaccagtattaacgtcacattgccactggatacgctcgtttctgagctttcaattgcccgctgtcagctggtggcaatttgccgtgcactggcgcaggacgcacggttgatcgtgatggatgaaccaaccgcttcgctgacccatcaggaagtgcaagggttattacaggtggtgcatcaattgcgggaacgcgggatctgcgtggtcttcgtcagtcatcgtctggaagaagtgatggaagtttccgaccgtatttcagtgctgaaagatggtgagctggtcgggacctttccggccgcagagatgaccacaaaacaactcggttttctgatgaccggccaggagtttgaatatcaggtgcgagagttgtggcagggaaaatccagcaccccggtgctggaggtgcgtaatttaagtcgtcatggggaatatctaaatattaacttgcgggtggaagcgggcgaagtggtatcgattgttggcctgcttggtgcggggcgcacggaattatgtctgagtctgtttggtatgacccgaccggatgctggcgagatcctcatcaacggccagctggttacactgcatagtaaccaggacgccatccgccacggtattggttatgtttcggaagatcgcatgtcgcgcggtttggtgatggcgcaatctattgaagacaacatcattagcactgtttttcacaaggtaaaagatcgcttcggctttctgagtgaagctaaagtgtgtgacctggtggacaggctaatcaaggcattgaccatcaaagtctctgatcctcatctcccggtgaatacgctttctggtggtaacgcgcagcgagtatcgatcgccaaatggctggcgattgggccacgactgttgattctcgatagcccgacagtcggtgttgatatcgccaacaaagcaggaatatacggcattatcagcgatctggcggctcatggcattgcggtattgatgatctgcgatgaaattgaagaagcgtggtatcaaagccaccggattttggtaatgcaaaaaggtcagatcacccatagcttcctgcctgacagcagttctcaggccaggattgcggaggtggtaaatggctga

SEQ ID NO: 4834 - DNA, 972 bp, Escherichia coli
atggctgaactgaaaaaacgccatgaattctggctggcattactgattgtggtgctgtttgttggccttgcctggcgcagcgacgagtttctgacattcggtaatttgtacgatctcgccaataactatgccatgttgactattctcgcctgtggtttgtttgtggtgttaatttccggtgggattgatatttcgtttccggcaatgaccatcattgcgcaatacggcatggtgctgctgctgcaaaaaattggtggcaactttgctgtcgcgtttgccctggcgggcggcatcggcattttacttggcttaattaacgccttactggttaatcgcctacgggtgccttctatcatcatcactatctcgacgctgaatattttttatggcctgctgttatggttgagtaaaggtgtgtggctgtacgactttccgccgtggtttgagcagggggtaatgttgttcaagtacaccgatgctgatggctatgactatggccttggtctgccgctgatcgccatgattacggtggtgctgctgacagcgtttatcatgaatttcaccagtgtagggcgcaaaatttatgcccttggcgggaaccgcgaatcagccagtcgcatcggctttagtgtgctgaaactgcaacttttcgtctatggctatatgggattgatgtctggtgctgcgggtgtagtgcagtcgtggacggtgatgactgtcgcccccgattctcttctgggttatgagctgacagtactggctgcggtggtgcttggcggcactagtttgctcggcgggcgcggcacgttaaccggtactttgctcggcgtggtgttgttggcagtgatgcaaaacgggctaaatttattgggagtctcgtcttactggcaaacattgatcaccggcatcatcatcgttgccagcattagcgccacggcgtggagtcagcatcagaaccggagtctgctatga

SEQ ID NO: 4835 - DNA, 957 bp, Escherichia coli
atgaaaaaatcgtggcgtaataacgttgagttttacttgatcggcctgctggtgctaactgttgccgccttcagcattactatgccggagattttctggtcgataagtaatttccagtccgtcgcttcgcaaatgcccgtgctgggcattctggcgttggctatggcggtgaccatgctttgcggtggcattaacttgtcaattatagccactgctaacgcctgttcactggtgatggcgtgggtggcgactcagtatccaccaggtattgctacggttgtcgctacgctgctggcgggcgctggcgcggcggtgataatcggtttatgtaacggcgtattgattgctggtattcgagtgtcgccaattcttgcaacacttgggatgatgacgttgctcaaaggggttaatattctggtgacaggcggtagcgccattgccaattatccctcatgggtgctgtggttgaatcatgcacagtggttcggtattccgctaccgatgtggttgtttaccgcagtggcgctggggctgtggatattgctggagaaaacgccgctcggtaaatccatttatctgattggttctaacgaacgagcaacactttactccggtattaacactcgtcgggtgctgatatgggtgtatgtcatttccgccttgctttgtgcggtagcggcatttttgatgatgtcgaaactcaactcggctaaggcctcttatggcgaatcttacttgctggtgtcaatcctcgcggcagtactcggcggggttaatccggacggcggcagcgggcggataattggtatggtgctggcgctgtttcttctgcaaattattgaaagcggcttcaatattctcggtataagcccctacctgacgatggccttatggggaacgttgctgctctgtttcattcaggctcgcggcatgttagggctggatcgggtggtttaa

SEQ ID NO: 4836 - DNA, 633 bp, Escherichia coli
atggatcctttgcacgccgtttatctgaccgtaggactgttcgtgattactttttttaatccgggagccaatctctttgtggtagtacaaaccagcctggcttccggtcgacgcgcaggggtgctgaccggactgggcgtggcgctgggcgatgcgttttattccgggttgggtttgtttggtcttgcaacgctaattacgcagtgtgaggagattttttcgcttatcagaatcgtcggcggcgcttatctcttatggtttgcgtggtgtagcatgcgccgccagtcaacaccgcagatgagcacactacaacaaccgattagtgccccctggtatgtctttttccgccgtggattaattaccgatctctctaacccgcaaaccgttttattttttatcagtattttctcagtaacattaaatgccgaaacaccaacatgggcacgtttaatggcctgggcggggattgtgctcgcatcaattatctggcgagtctttcttagtcaggcgttttctttgcccgcagtgcgtcgtgcttatgggcgtatgcaacgcgttgccagtcgggttattggtgcaattattggtgtattcgcgctacgcctgatttacgaaggggtgacgcagcggtga

SEQ ID NO: 4837 - DNA, 1230 bp, Escherichia coli
gtggcgtttcaaaaaacctttaatttgcgcctcgatcaacgtagctacattaccgaggaagacgcacgcgggcagattaacgagctaaaagctaacggcaccgaagcggtggtcggtgcggggctgattaccgatctggcagaagaagccggaatgaccggaatttttatctattccgccgccaccgtgcgccaggcattcagcgatgcgctggatatgacgcgcatgtcgttacgccataacactcacgatgccacccgtaacgccctgcgtactcgttacgtgctgggcgatatgctcggtcaatcaccacagatggaacaggtgcggcagactattttgctgtatgcccgctccagtgcagcggtgttgattgagggggaaacggggacgggcaaagagctggcggcccaggcgattcatcgggaatattttgcccgccacgatgcgcgacagggcaaaaagtcgcatccgtttgttgccgtcaactgcggggcgattgccgaatcgttgctggaagcagagctgtttggctatgaggaaggggcgttcaccggctcgcgacgcggaggtcgcgccgggctgttcgaaatcgcccacggtggcacgctgtttcttgacgagataggcgaaatgccgctgccgttgcagactcggctgctgcgggtgctggaagaaaaagaggtcacccgcgtcggcgggcatcagcctgttccggtggatgtgcgagtcattagcgccactcactgcaatctggaagaagatatgcggcaagggcagtttcgccgtgatctgttttatcggctgagtattttgcgtctgcaattgccaccactgcgcgagcgggtgacggatattctgccgctggcggaaagctttttgaaagtgtctctggcggcgctctccgccccgttttctgccgcattacgccagggattacaggcaagcgaaaccgtgctggtgcactacgactggccgggcaatattcgtgaactgcgcaatatgatggagcgactggcgctgtttttaagtgtggaaccgacgccggatttaacgccgcaatttttgcagctgctactgccggagctggcgcgcgagtcagcgaaaactcccgctccacgcttgctgacaccacaacaggcactggagaaatttaaaggcgataaaacagcagcggcgaattatttaggcataagccggacgaccttctggcggcggctgaaaaactga

SEQ ID NO: 4838 - DNA, 1887 bp, Escherichia coli
atgtcttttagcgaattttatcagcgttcgattaacgaaccggagcagttctgggccgagcaggcccggcgtattgactggcagatgccctttacgcaaacgctcgaccacagcaacccgccgtttgcccgttggttttgtgaaggccgaaccaacttgtgtcacaacgctatcgatcgctggctggagaaacagccagaggcgctggcattgattgccgtctcttcggaaacagaggaagagcgtacctttacctttcgtcagctgcatgacgaagtgaacgcggtggcctcaatgttgcgttcattgggggtgcagcgtggcgatcgggtgctggtgtatatgccgatgattgccgaagcgcatattactctgctggcctgcgcgcgtattggcgctattcactcggtggtgtttggtggatttgcctcgcacagcgtggcggcgcgaattgatgatgctaaaccggtgctgattgtctcggctgatgccggagcgcgcggtggcaaaatcattccctataaaaaattactcgacgatgcgataagtcaggcgcagcatcagccgcgccacgttttactggtggatcgcggactggcgaaaatggcgcgcgtcagcgggcgggatgtcgatttcgcgtcgttgcgccatcaacacatcggtgcgcgggtgccggtggcgtggctggaatccaacgaaacctcctgcattctctacacctccggcacgaccggcaaacctaaaggtgtgcagcgtgatgtcggcggatatgcggtggcgctggcgacctcgatggacaccatttttggcggcaaagcgggcggcgtgttcttttgtgcttcggatatcggctgggtggtagggcattcgtatatcgtttacgcgccgctgctggcggggatggcgactatcgtttacgaaggattgccgacctggccggactgcggcgtgtggtggaaaattgtcgagaaatatcaggttagccgcatgttctcagcgccgaccgccattcgcgtgctgaaaaaattccctaccgctgaaattcgcaaacacgatctttcgtcgctggaagtgctctatctggctggagaaccgctggatgagccgaccgccagttgggtgagcaatacgctggatgtgccggtcatcgacaactactggcagaccgaatccggctggccgattatggcgattgctcgcggtctggatgacaggccgacgcgtctgggaagccccggcgtgccgatgtatggctataacgtgcagttgctcaatgaagtcaccggcgaaccgtgtggcgtcaatgagaaagggatgctggtagtggaggggccattgccgccaggctgtattcagaccatctggggcgacgacgaccgctttgtgaagacgtactggtcgctgttttcccgtccggtgtacgccacttttgactggggcatccgcgatgctgacggttatcactttattctcgggcgcactgacgatgtgattaacgttgccggacatcggctgggtacgcgtgagattgaagagagtatctccagtcatccgggcgttgccgaagtggcggtggttggggtgaaagatgcgctgaaagggcaggtggcggtggcgtttgtcattccgaaagagagcgacagtctggaagaccgtgaggtggcgcacttgcaagagaaggcaattatggcgctggtagacagccagattggcaactttggccgcccggcgcacgtctggtttgtctcgcaattgccaaaaacgcgatccggaaaaatgctgcgccgcacgatccaggcgatttgcgaaggacgcgatcctggggatctgacgaccattgatgatccggcgtcgttggatcagatccgccaggcgatggaagagtag

SEQ ID NO: 4839 - DNA, 1092 bp, Escherichia coli
gtggtgaatgtgaaaccagtaacgctatacgatgtcgcagagtatgccggtgtctcttatcagaccgtttcccgcgtggtgaaccaggcctgccacgtttctgcgaaaacgcgggaaaaagtggaagcggcgatggcggagctgaattacattcccaaccgcgtggcacaacaactggcgggcaaacagtcgttgctgattggcgttgccacctccagtctggccctgcacgcgccgtcgcaaattgttgcggcgataaaatctcgcgccgatcaactgggtgccagcgtggtggtgtcgatggtagaacgaagcggcgtcgaagcctgtaaagcggcggtgcacaatcttctcgcgcaacgcgtcagtgggctgatcattaactatccgctggatgaccaggatgccattgctgtggaagctgcctgcgctaatgttccggcgttatttcttgatgtctctgaccagactcccatcaacagtattattttctcccatgaagacggtacgcgactgggcgtggagcacctggtcgcattgggtcaccagcaaatcgcgctgttagcaggcccattaagttctgtctcggcgcgtctgcgtctggcaggctggcataaatatctcacacgcaatcaaattcagccgatagcggaacgggaaggcgactggagtgccatgtccggttttcaacaaaccatgcaaatgctaaatgagggcatcgttcccactgcgatgctggttgccaacgatcagatggcgctgggcgcaatgcgcgccattaccgagtccgggctgcgcgttggtgcggatatctcggtagtgggatacgacgataccgaagacagctcgtgttatatcccgccgttaaccaccatcaaacaggattttcgcctgctggggcaaaccagcgtggaccgcttgctgcaactctctcagggccaggcggtgaagggcaatcagctgttgcccgtctcactggtgaaaagaaaaaccacccttccgcccaatacgcaaaccgcctctccccgcgcgttggccgattcattaatgcagctggcacgacaagtttcccgactggaaagcgggcagtga

SEQ ID NO: 4840 - DNA, 258 bp, Escherichia coli
atgatttccgtgcgtctgaatgacccgcgcggcactggttacacgcaactatggctaagccgcggaacaggtgcttacacctacgactggacgccagaaacacgctacggcagcatgaagagcatcagtttgcaacgtattcaaccgctgactgagcaacttaatctcgggttgacggcaggtaaagtgtggtacgacaccccaaccgatgattataacggtctgcaacttgcagcccatctgacctggaaattctga

SEQ ID NO: 4841 - DNA, 369 bp, Escherichia coli
gtgtcagacacactttccgggacaacgcatcccgatgacaatgacgaccatccctggtggggactaccctgcacagtgacgccctgtttcggcgcccgtctggtgcaggagggtaaccggttgcattaccttgccgaccgtgccggtatcagaggccggttcagagatgcggatgcgtaccctctggaccaggcctttccgctgctgatgaaacaactgaaattaatgctcaccagtggtgaactgaatccccgccatcagcataccgtgacactgtatgcgaaggggctgacctgtgaagccgacaccctcggctcctgtggttacgtttatctggctgtttatccgacacctgaaacgaaaaagtaa

SEQ ID NO: 4842 - DNA, 1260 bp, Escherichia coli
atgacggattcaattccatcaggttacaagccgctgacatgtgacacgctgccgggttatctctcgtccagactgaccccttcatgcgaaccgggagggttacctgaagagtggaaagtttcagaagtgggggacggaaacctgaacatggtgtttatcgttgaggggacacataaaaccatcattgtaaaacaagctctgccctggcttcgtgccgggggcgaaggatggcctttatctctgagccgtgcgggctttgagtacaacgtcttatgtcaggaagccaagtacgcgggtcacacactgattccgcaggtctatttttacgacccggaaatggcgctgtttgccatggagtatctgactcctcacgtgattctgcgtaaggaactgattaacggtaaaaaattccctaaactagctgaagatatcggcagatttttagcacagactctcttcaatacgtctgacattggcatgtcagcagaacagaaaaaagcgcttactgccgagttcgcgttgaatcatgagctgtgcaaaattacggaagatctgatcttcacagagccctattacaacgctgaacggaataactggacttctcctgagctggacgatgccgtccataaggcctgggctgatgtagagatgatccaggttgccatgcgttataagtacaaatttatgacagaagcgcaggcattgttacatggcgaccttcattcaggctcaatcatggtgaccgacacggataccaaagtgattgatccggagttcggtttcatggggccaatggcgtttgatatcggcaactatattggcaacctcctgctggcgtacttctcacgccctgggtgggatgcgaatgagcaacgtcgcgctgactatcaggaatggctgcttcagcagattgtccaaacctggtccgttttcacccgggagttccgccagctctgggacaacaaaacacagggcgacgcgtggtcgacagaaatgtatcaacagaacagggccgctcttgaggacgcacaggatcagttttttgccacgctgcttgaagattccctggtgaatgccggcatggaaatgaatcgccggatcattggttttgctggcgttgccgagctgaaacagattgaaaatacagagcttcgcgcaggatgtgaacgacgtgcattgaccatggcgcgcgatcttatcgtcaatgcccgccagtttaaaaatatggattccgtcatccagtctgcgaaggttaagtaa

SEQ ID NO: 4843 - DNA, 1116 bp, Escherichia coli
atgaatattaaaggtaaacactatcgtacggtctgggtttccggggatggaaaagcggtagaaatcatcgatcagactaagttgccttttaagttcgaggtggtggcgcttacctctgcggaaatggccgctacggctattcaggatatgtgggttcgtggcgctccgcttattggtgtcgttgcagcctatggcatcgcgctgggaatgaatcacgatgccagtgacatgggtctgcagcgttactatgaccttcttatcaaaacccgaccaacggcaattaatctcaaatgggccctcgacaggatgatagacacactgaaggatctctgtgtatcagagcgcaaggatgtggcttgggcgctggcggcagaaattgccgaggaagatgtcgcgttgtgtgaacaaattggattacatggtgcagaagtcatccgcgaaatagcccagaaaaaaccggccgggagtgtggtcaatatcctgacacattgtaacgcaggctggctggcgactgtagactggggaaccgcgctttctcccatctacaaagcgcatgaaaacggaatccctgttcacgtctgggtggatgaaacgcggccacgtaatcagggcggactcacggcatttgaactgggctcacacggtattcctcacaccctgatcgccgacaacgcgggtggccacctgatgcaacacggtgacgttgatctctgcattgttgggaccgatcgaaccacggccagaggggatgtctgtaataaaattggtacctatcttaaggcgctggcggcccatgataaccatgttcccttctacgtcgcgttaccttctcccactattgactggactatcgaggacggaaaaagcattccgattgagcaacgtgacggaaaagagcagtcccatgtctatgggataaaccctcagggagaattgagctgggtcaataccgcccctgaaggaacccgttgtgggaactacgctttcgacgtcacgcctgcccgatacattaccggcttcattactgagcggggagtctgtgctgccagtaagtcagcgctggcggatatgtttgctgacctgaagagtaaagcactccagggggaacagcattaa

SEQ ID NO: 4844 - DNA, 642 bp, Escherichia coli
atggaacggattaagttagcagaaaaaatcatttccacttgtcgggaaatgaatgcgtcaggtcttaatcaaggaacatcaggtaatgtgagtgccaggtataccggtggcatgttgattacgccgagtgggatcgcttattcaaagatgacgccggacatgattgtctttgtagacgataagggaaaacctgaagcgggtaaaataccatcaagtgaatggttaattcatctggcgtgttataaagccagaccagaattgaatgctgtcatacatacgcatgcggtgaattccacggcggtggcaatacataatcattcaattccggccattcattatatggtggcggtatcggggacggatcatattccctgtattccctattatacctttggcagtcctgaactggccgacggtgtatctaaaggaatcagagaaagtaagtccttgctgatgcagcaccacggtatgctggccatggacgtcacgctggaaaagacgttgtggctggcgggtgaaaccgagacgctggctgatttatacatcaaatgtggcggattacatcacgatgttcccgtgctgtctgaagccgaaatgaccatcgtccttgaaaaattcaaaacgtatggtttgaaagcgtaa

SEQ ID NO: 4845 - DNA, 1005 bp, Escherichia coli
atgtttatcgtggaatcgtatgctgtcgccataataatgtgttttattaccatgatttgctggggttcatgggcgaatacaactaaacttgtcagcaataaaaaatgggagttccctctattctattgggattattcaattggattattgctgtgttctttgttatttgccttcacgctgggttctatgggcgaagccggtcgcagttttatacctgatattcagcaggcgagcagcagtagtctgatgtcggcaatactggcagggattatcttcaatatttccaatattcttctggtcgcttctattaatcttgccggtatggcggtagcttttcctgtgggtgtggggctggcactggctctgggtgtgatcaccacctatatcggcaatccgcagggcgatccgctcattctgttcctcggtgtcgtctgcgttgtgatcgccattatttttaccgcgatagcctatggtcgtgtcacgcaggaggcggataaatctcgccgtaataaaggtctcattactgccattctggcgggtatcatcatgggatggtttttccgcttcctggcggactccatgtctgacaatttcagccagcctgccagcggtctgatgacgccttactcagcacttgttctgtttgccgtggggctgtttttgtcgaactttgtccttaacaggctggtcatgaaaaaacctatttcaggagaaccggtcaacgggaaaatgtatttttccgggagtttacgggatcatgtttgcggctggctgggcggtatgatttggtgtgtcggtctggcattcagtctgattgcgtctggtcaggcggggtatgccatttcctacggtctgggacagggggccacaatgattgccgtgatctggggagtcttcatctggagagaatttgccagtgcgccagccggaaccaataaactgctgctgaccatgtttatttcatacattgtgggtattgttcttattatcgccgctaatcaataa

SEQ ID NO: 4846 - DNA, 987 bp, Escherichia coli
gtggatagagatcaaacaaacagcagcctgttcaatgatgatcccgtacttcatgcaacatggctgtactatcaggaaggtaaaagccagactgaagttgcagctatcatgggggtgtcccgcgtcacggttgtcaaatacctgcaaacagcccgggaaaatggactggttcatatcaacctggatgtgaatgtctttggctctatcgacgctgctttgcaaattcgcgataaattcaatctccagagagtgatcatcgtgccggatggcgaacatgccggaaaacgtgatgatacaaagctgatgcggactcgcctttcacgtgccggtggcatgtatctgaatcaggtgattgagaatggtgatgtgctgggggttgcctggggaagaacaatccatcagatgagcaaaaccatgacgccgaagtcatgtaaaaatgtcaccgttatacagatgctcggttccatgccatctcagccagacctgacgatcattgaatcctcatcgcaaatcgcctacaagctttcaggccgtgtcgcctcgctgcacgtgcccgccgtggtatcaagcgccagactggccatggagttacaggcagagcctattattcgatcgaattttgacgttctgactcgctgtacgaaagccttttttgtcgtgggtaacgcgcttgatgaaaatcccctgattcgggtgggcgtgctgaataagaaggaaatgcagacgtatcgggatttaggcgcagtaggtgtcatttgtggtcgcttctatgacaaggaagggatgcccgtcgtggctgatgttgaccagcgtattctgggaatcagtctggctcagctaaggcagattgaacggaagatcttccttgctggtggggaaagaggctatgacgcaacgttgggtgccctgctgggaggatatgtcacggacctgattgttgatgaaggaacggcagagtttttgctggcgtgtgaattaccacactaa

SEQ ID NO: 4847 - DNA, 1350 bp, Escherichia coli
atgccactaattatcgttgtggcagggattgctttactcctgcttttaaccataaaaattaagcttaatacgtttgtttcgttaattattgtctcgattgctgtcgccatcgccagtggtatggatttgagtaaagtcgtcacctcagtcgaatccggacttggcggtacgctgggccatattggtttgatatttggcttcggtgttatgctcggtcgcttgctggccgatgcgggtggtgcgcagcgaatagcgctgaccatgctgaattatttcgggaaaaataaacttgactgggcagtggtctgttcggcgtttattgtcggtatcgcactttttttcgaagtcggtttaattcttctggtacctattttattcgctattgcccgtgaagcaaaaatatcaccgatgtttatgtgtgtgccgatgctttctggtttgctggtcgcacacggtgttttgccgccgcaccccggcccgactgttatcgccagggaatatggcgctgatgtaggattggtactgatatacggtatcattgtcggcattccaacctttattctttgcggcccggtattgaataaattctgccagcgcattattccggacgcctttaaaaaagaggggaatatagcctctctcggcgcgacccgccgattcagcgaaagcgaaatgccaggctttgggatcagttttctcacggcaatgctgccggtgatcctgatggcggttgtcaccatcatccagatgactcatgccaaaagtgccgcggattcaggcttattttacaacgtgatactgttcttaggtaattcaacgatcgccatgctgatttcactgctattcgcgatctataccatgggcctggggcgcgggaaaacaatccctgacctgatggattcttgcggaaaagctatcgcgggtattgccggtctgctgctgattatcggtggtggtggtgcattcaagcaagttctcatcgactctggcgttggtcagtatatttccaccctggtttcgggtatggatattaacccgatcctgatggcctggggcgtggccgcattcctgcgtatttgtctgggttcagccaccgtcgcggcgatctctaccgccggtctggtcatcccattgttggcagtacatcccaataccaacctggccttgattacgctggctaccggtgccggatcctgtatttgttctcacgttaacgatgccagtttctggatgattaaagacttttttggcctgaccaccaaagaaacgctgttatcctggacgctgatgtccacactcttatccatcagtgggctgatttttattctgctcgccagcttagttttataa

SEQ ID NO: 4848 - DNA, 1968 bp, Escherichia coli
atgtctgttcgcaatatttttgctgacgagagccacgatatttacaccgtcagaacgcacgccgatggcccggacggcgaactcccattaaccgcagagatgcttatcaaccgcccgagcggggatctgttcggtatgaccatgaatgccggaatgggttggtctccggacgagctggatcgggacggtattttactgctcagtacactcggtggcttacgcggcgcagacggtaaacccgtggcgctggcgttgcaccaggggcattacgaactggacatccagatgaaagcggcggccgaggttattaaagccaaccatgccctgccctatgccgtgtacgtctccgatccttgtgacgggcgtactcagggtacaacggggatgtttgattcgctaccataccgaaatgacgcatcgatggtaatgcgccgccttattcgctctctgcccgacgcgaaagcagttattggtgtggcgagttgcgataaggggcttccggccaccatgatggcactcgccgcgcagcacaacatcgcaaccgtgctggtccccggcggcgcgacgctgcccgcaaaggatggagaagacaacggcaaggtgcaaaccattggcgcacgcttcgccaatggcgaattatctctacaggacgcacgccgtgcgggctgtaaagcctgtgcctcttccggcggcggctgtcaatttttgggcactgccgggacatctcaggtggtggccgaaggattgggactggcaatcccacattcagccctggccccttccggtgagcctgtgtggcgggagatcgccagagcttccgcgcgagctgcgctgaacctgagtcaaaaaggcatcaccacccgggaaattctcaccgataaagcgatagagaatgcgatgacggtccatgccgcgttcggtggttcaacaaacctgctgttacacatcccggcaattgctcaccaggcaggttgccatatcccgaccgttgatgactggatccgcatcaacaagcgcgtgccccgactggtgagcgtactgcctaatggcccggtttatcatccaacggtcaatgcctttatggcaggtggtgtgccggaagtcatgttgcatctgcgcagcctcggattgttgcatgaagacgttatgacggttaccggcagcacgctgaaagaaaacctcgactggtgggagcactccgaacggcgtcagcggttcaagcaactcctgctcgatcaggaacaaatcaacgctgacgaagtgatcatgtctccgcagcaagcaaaagcgcgcggattaacctcaactatcaccttcccggtgggcaatattgcgccagaaggttcggtgatcaaatccaccgccattgacccctcgatgattgatgagcaaggtatctattaccataaaggtgtggcgaaggtttatctgtccgagaaaagtgcgatttacgatatcaaacatgacaagatcaaggcgggcgatattctggtcattattggcgttggaccttcaggtacagggatggaagaaacctaccaggttaccagtgccctgaagcatctgtcatacggtaagcatgtttcgttaatcaccgatgcacgtttctcgggcgtttctactggcgcgtgcatcggccatgtggggccagaagcgctggccggaggccccatcggtaaattacgcaccggggatttaattgaaattaaaattgattgtcgcgagcttcacggcgaagtcaatttcctcggaacccgtagcgatgaacaattaccttcacaggaggaggcaactgcaatattaaatgccagacccagccatcaggatttacttcccgatcctgaattgccagatgatacccggctatgggcaatgcttcaggccgtgagtggtgggacatggaccggttgtatttatgatgtaaacaaaattggcgcggctttgcgcgattttatgaataaaaactga

SEQ ID NO: 4849 - DNA, 960 bp, Escherichia coli
atgggctgggatacagaaacgaaaatgagcacttacgaaaaggaaactgaggtaatgaaaaaattcagcggcattattccaccggtatccagcacgtttcatcgtgacggaacccttgataaaaaggcaatgcgcgaagttgccgacttcctgattaataaaggggtcgacgggctgttttatctgggtaccggtggtgaatttagccaaatgaatacagcccagcgcatggcactcgccgaagaagctgtaaccattgtcgacgggcgagtgccggtattgattggcgtcggttccccttccactgacgaagcggtcaaactggcgcagcatgcgcaagcctacggcgctgatggtatcgtcgccatcaacccctactactggaaagtcgcaccacgaaatcttgacgactattaccagcagatcgcccgtagcgtcaccctaccggtgatcctgtacaactttccggatctgacgggtcaggacttaaccccggaaaccgtgacgcgtctggctctgcaaaacgagaatatcgttggcatcaaagacaccatcgacagcgttggtcacttgcgtacgatgatcaacacagttaagtcggtacgcccgtcgttttcggtattctgcggttacgatgatcatttgctgaatacgatgctgctgggcggcgacggtgcgataaccgccagcgctaactttgctccggaactctccgtcggcatctaccgcgcctggcgtgaaggcgatctggcgaccgctgcgacgctgaataaaaaactactacaactgcccgctatttacgccctcgaaacaccgtttgtctcactgatcaaatacagcatgcagtgtgtcgggctgcctgtagagacatattgcttaccaccgattcttgaagcatctgaagaagcaaaagataaagtccacgtgctgcttaccgcgcagggcattttaccagtctga

SEQ ID NO: 4850 - DNA, 789 bp, Escherichia coli
atggttcgcaaagggtgtaattcattagtccgtgctgaaaaaatattaacccacattgcatgggttggtatggcaagttatatggagttattaaataaattccagtaccccaaaagcagcctgcttaatttattgaatgtaatggtggattgtggtttcttaattaaaaacaaaaacggctactattcactgggaataaaaaactacgaattgggttgtcaggcgttacaccgtcaaaatatatttgaggtgactaagcggccaatgcaggagttgtcgctgaaaagtggactggtttgtcatcttggggcgatggagagcatttcggctatctatctcgacaagatcgaaagtccggactctgtaccgacgagcaaaagctggattggcaaaaaacttgagttgcatattaccgcgttgggtaaggcattattagcctggaagacacgagaagaactggattattttttagaagcactcacgttaactccacatacgcgcaatacatttaccgataaaaaattgtttctggaagaattacaaaaaacacgccttcggggatgggccatagacaacgaagaatcaacctatggggcggtatgtttaagtatgccggtattcaatatgtataacagagttaactatgcaatctcactttctggcgatccggtagtttattcaggaaataagatagacagctatctggaattgctccggaaatgcgctgagcaaatatcatatgggctgggatacagaaacgaaaatgagcacttacgaaaaggaaactga

SEQ ID NO: 4851 - DNA, 783 bp, Escherichia coli
atgagccaacagagacctgaccgtatcaaacagatgctgcactacctgtggcaacatcgtcacctctccacacagcaggccatggagctttttggctatgcggaagcgactgtccgtcgtgatttccagtatattgtcaaccagtatccaggcatgatccgcggtcacggttgcctggacttcgacgacagtacagacgacaaagagtacgtcttcgacgtgaaacgtacattgcaatctgtggcgaaaagagaaatagctgcccttgcccgaacaatgatcaaagatggcgactgcttttttctcgactccggctcaacctgcctcgaactggcgaaatgcctggccgatgcgcgggtaaaggtcatctgcaacgacattaaaatcgccaatgaactgggctgttttccccatgtggaaagttacattatcggaggactgattcgcccaggttatttttcggtaggagagagtctggcgctggagatgatcaatgccttttccgtagaacgtgcgtttatctcctgcgatgcgctgtcgctggagacggggatcaccaatgccaccatgtttgaggtcggggtgaaaacacggattattcaacgctcgcgtgaagttattctcatggccgatcactcaaaatttgatgccgttgagccgcatgctgtagcaacactatcatgtattaaaacgatcatcagtgacagcgggttacctgagactattgcacagcgttatcagcgagccggatgtcagttgtttttacctcattcaataaagtga

SEQ ID NO: 4852 - DNA, 633 bp, Escherichia coli
atgatcctgcacccttctctcgccagcgcaaatcctctgcactatggtcgtgagctgacggcattggacaatctggattttgggagcctgcatctggatattgaggacagcagcttcattaacaacattacgtttgggatgaaaacggtgcaggccgtcgccagacagacgcctcatcccttgtcctttcatttcatgcttgcccggccacagcgctggtttaacgcgctggctgaaatcagacccgcgtggatcttcgttcatgcagaaacgctggactatccttcggaaacgttaactgagatccgccataccggcgcacgagccggactggtatttaatccggcaaccccgatcgacgcttggcgatatctggcgtctgagctggacggagtgatggtgatgaccagtgagcccgatgggcagggacagcggtttattccctccatgtgcgagaaaatccaaaaagtacgcacggcttttcctcagaccgagtgctgggccgacggtggaattacgctggcagctgcacagcaactggcagcagctggggcgcaacatatggtgattgggcgcgccctgttctcttcatctgactatcgcgcgaccttagctcaattcgccaccctgtaa

SEQ ID NO: 4853 - DNA, 432 bp, Escherichia coli
atgattaacgatattaaatgggtacaggcacaacgtaaagccaccgactggcgtcaggccgtggaaatcgccacccgcccgctggtagcctatggtgccgcgcagccatgctacgttaatgggatcatcgaaaatacccttaactgggggccttattatctgatagccccaggaatcgccttgcctcacgcccgaccagagcaaggcgcaaactataatcaggtcagtatcaccacgctacgcaccccggtcgcctttggtaacgaggagtgcgaccccgtctggctgcttctctgcgtcagcgccacggatgccaacgcacatattttgaccattcagcgcatcagccagtttattgattcgccacaacgcttaacggcagtgggaaatgccagcacagacgatgcactgtttgcgctggtatcaggttaa

SEQ ID NO: 4854 - DNA, 807 bp, Escherichia coli
atgagttggctgaaagaggttattgggacggaaaaagcggtcatcgccatgtgccatctacgtgcattgcccggcgacccgagttttgatgcgcagttggggatgaactgggttatcgacaaagcctgggacgatctgatggcgctccaaaatggtggggtggatgcagtcatgttctccaacgaatttagtcttccctatctcacgaaggtgcgtccggaaaccactgcggcaatggcacgaatcatcgggcaattaatgagcgatatccgcatcccgtttggcgtgaatgttctgtgggatccggtcgcctcattcgacctggcgatggctaccggcgctaagtttatccgcgagatatttaccggtgcctatgccagcgactttggcgtctgggacactaacgtcggtgagaccatccgtcatcaacaccggattggtgcaggcgaagtgaaaaccttgttcaatatcgtcccagaggccgccgtgtatctgggcaatcgcgatatctgttctattgctaaatcgacagtatttaacaaccatcctgatgcgctctgtgtttctggcctgaccgccgggacgcgtaccgacagcgcgctgttaaaacgggtcaaagaaacggtgcctgacaccgtcgtgttggccaacacgggcgtctgcctggaaaacgtggaggaacaactcagtatcgccgatggctgtgtgaccgcaaccacctttaaaaaggacggcgtttttgccaatttcgttgaccaggcgcgagtcagtcagtttatggagaaagtgcatcatatacgccgataa

SEQ ID NO: 4855 - DNA, 1314 bp, Escherichia coli
atgtttgattacatcctgtctctcggcggtaccgttttcgtccctatcatcatgatcgtgattggccttatcttccgcatcccctggctgcaggcgattaaggcaggggtaacggttgggattggttttgtcggtatgggactggtgatcgtcatggcgatcgacagcctcagtccccctatcaaagtgatgattgagcgtttcggcctagccctgcatgtctttgacgttggcgcaggccctgcctccggcgttggttatgcgacagccattggcgccatgattatcccagttatttttcttctcaatgtcgccatgctggtcacccgtctgaccaaaacgatgaacgtcgatatttacaattactggcactacgccattacgggtacggtggtccagcttatgaccggtagcctgatttatggtgtgctgggggcaatctgccatgcggcgctatcgttaaaaatggccgactggacggcaaaacgggtacagaacatcgtcgggctggaaggtatttcgataccgcaaggctacggttccagttcagtaccgcttttcgttctacttgatgctatctatgaaaaaatccctttcatgaagggacgcaatatcgatgctcaggagatccagaaacgctacggcatggtcggcgatccggtgattatcggcgtagtgctcggtctgatttttggcctggcggctggtgaaggctttaaaggttgcgccagtctgatgattaccgttgcggcaatcatggtgttgttcccgcgcatgatccgcctgattgttgagggcctgctgcccatctccgacggtgcaagaaagttcttccagaaatatttcaaaggacgtgaagtgtatatcggtctggatactgctgtgacgctggggcatccaaccaccattgctgtcggtctgctactgatacccattatgttaattctggccagcattttaccgggcaacaaagtgttacccctcgcagacctgccggtagcaccgttctttatctgtatggctacggttatccaccgcggagacctggtcaggacgttgataagcggggtcatcgtgatgattaccgtcctgctgatcgccacccagttcgcgccttacttcactgaaatggcgctcaaaggcggtttcagttttgccggtgaaagtgcgcaaatctcagcgttgtccgtgggcaatatgttcggttggtcgatttctgaattgatgtcgcttgggattattggcgttgtcgtggcggtcggtattgtcgccagcgtcgtgctgttcttacgtaaacgtgaattatcggaataa

SEQ ID NO: 4856 - DNA, 279 bp, Escherichia coli
atgaaaaagatccttgtggcatgcggtaccggcatgtcgacttcaaccatgattgcacacaagctgcaagagttcctgactgaacagggcatttcagccactaccgcccaatgctgtctgaatgagatccctcttaactgtaacggtatggaccttattgtaacctccatgcgaaccaacagtgattacggcatccctacgcttaatggcgccgccctgctcacagggatcaacgacgacgcgttaaaacaacaaatcaaggctctgttaactcaataa

SEQ ID NO: 4857 - DNA, 1122 bp, Escherichia coli
atgtcattttctgtgcaggaaaccctgttctcgcttttgcagcacaatgcgatttcaggacacgaaaacgctgtcgctgacgtcatgctgtgcgaattcaggcgtcaggcaaaagaggtctggcgagacaggcttgggaatgtcgtcgcgcgctacggtagtgataaacccgatgcgctgcgactgatgatttttgcgcatatggatgaagtcggttttatggtgcgcaaaatagagccgtctggatttttacgctttgaacgcgtaggcggtcctgcgcaggtcactatggctggttccatcgtcaccctcaccggggacaaagggccagtcatggggtgtatcggcattaagtcctaccactttgccaaaggcgacgagcgcacgcagtcaccttctgtcgacaaactgtggattgatattggtgccaaagacaaagacgacgctatacggatgggcattcaagtcggtacgcctgtcactctgtataacccgccgcaactcctggcaaacgatctggtgtgcagtaaagcactagacgatcgtctaggctgtactgccctgctcggtgtagcggatgctatcagtactatggagcttgatatcgccgtttatctggtggcttcggtacaggaagaatttaatatccgcggcattgttcccgtattacgccgtgtaaaacctgacctggcgattggtattgatatcactccatcgtgtgacacccctgatttacacgattattccgaggtcaggattaatcagggcgttgggatcacctgcctgaactaccatggtcggggaacgctggccggattaatcacgcctcctcgcctgatacggatgttggaacagacggctcttgaacacaacattccggtgcagcgagaagtggctcccggcgtgataacagaaaccggttatatccaggttgagcaggatggtattccctgcgccagtctctctattccttgtcgctatacccattctccggcggaggttgccagcctgcgtgatttgactgattgcatccgcctattgaccgctctggcaggtatgtcagcagcacatttccccgttgagcctgattcaggcactacacaagaggcacatccattatga

SEQ ID NO: 4858 - DNA, 747 bp, Escherichia coli
atggatatcccacgtatttttaccatcagcgaaagtgaacaccgcatccataacccgttcaccgaagagaagtacgccacgctgggtcgcgtgctgcgcatgaagccgggcacccgcattcttgacctcggcagcggctcgggcgagatgctctgcacctgggccagggatcatggcattacggggactggcatcgacatgagttcgctcttcaccgcgcaggcaaagcgtcgcgcggaagaactcggcgtcagcgaacgcgtacattttattcataacgatgcggccggttacgtcgcaaatgaaaaatgtgacgtggcggcctgcgtcggcgcgacatggattgccggtgggtttgccggggcggaggagctgctagcgcaaagcctgaaaccgggcgggatcatgcttatcggcgaaccctactggcgtcagctaccagcaacagaagaaatagcccaggcctgcggcgtcagctcgacaagcgatttcctgacgctgccaggacttgtcggagcgttcgacgatctcggctatgacgtggtggaaatggtactggcagaccaggaaggctgggaccggtatgaagccgcaaaatggctgaccatgcgccgctggctggaagcgaatcctgacgatgacttcgccgccgaagtcagggccgaactaaacatcgcgccgaaacgctacgtgacctacgcgcgggaatgctttggctggggcgtgttcgcactcatcgcccggtaa

SEQ ID NO: 4859 - DNA, 546 bp, Escherichia coli
atgacagtacaccacttcacttttcatatcacagataaaagtgatgccagtgatatccgggaagtcgaaacccgcgcatttggcttcggcaaagaagccgatttagtggcctctttacttgaggatgaaagcgcgcgccccgcgttatcgctgctagcccggtatgaaggcaaagccgtcgggcatattttatttacccgggcaaccttcaaaggagaaatggattcaccgttgatgcacatcctcgctcccctggctttcataccggaataccaagggatgggcgtgggaggacggttgatacgcactggcatcgagcacctgaggttgatgggctgccagacggtttttgttctcggccacgccacctattacccccgacatgggttcgaaccctgtgccggagacaaaggctatccggcaccttatcccatcccggaggagcacaaagcctgctggatgatgcaatcactcaccgctcagcccatgaccctgaccggccacatccggtgcgcagaccctgatgaaaccggagcactgacgtga

SEQ ID NO: 4860 - DNA, 258 bp, Escherichia coli
atgaatttatcccgtcaggaacaacataccttacacgttctcgctaaaggtagacgtattgcgcacgtccgcgattcttcaggccgcgtcacttccgttgaatgctacagccgcgaagggctgttgctgaccgactgcacgctcgccgtcttcaaaaaactcaaaaccaaaaaacttatcaagtccgtcaatggccagccctatcgaatcaacaccaccgagctgaataaagttcgcgctcagctcgataatcgctaa

SEQ ID NO: 4861 - DNA, 1017 bp, Escherichia coli
atgggatatttacatattgatggtagaggcatgaagccaaatggagggagccgtcataaccctcttgaagctgaaacaatagcagcatggctggtggcacataaggatgatatagagcgccattacggggaaccactgtacaaagttgttggtgttgtgacgccattttcggcgcaggttaatgctatcaaaatgtcattgcgtaagctggaaattaatggcaaagacgagcagggtttactgacagtggggactgtgcactccttgcagggggcggaaagggcgattgttctcttttctcctgtctactcaaaacatgaagatggcaggtttcttgatagcaacagcactatcctcaatgttgctgtctcacgcgctaaagatagttttctggtatttggcgatatggaccttatcgagatgcagcccgcattttcgccgcgagggttattggcaaaatatctcttttcttcagataataatgcgttgcaatttgagtttcagaaacgacaggatttaatttccgcacatacacaaatttcaacgctgcatggtgtggagcagcatgatgaatttttgaacaagactcttgccggagctcaaaagaaaataacgattatttccccttggttatcctggcaaaaagtggagcaaacgggatttctggcatcaatggctttggcccgttcccggggcattgatattaccgtggtgacggataaaaactgcaatatagcgcatgtcgatgatgataagcgtcaggagaaacaacatctgctgaatgatgctgttgaaaagctcaataagatgggtatcgctacgaaattggttaatcgtgttcacagcaaaattgtgattgaggatgaagaactgctgtgtgtcggatcttttaactggttcagtgctacacgggaagataagtatcaacgatacgatacgtctttggtgtaccgtggtgaaggcgtaaaaaatgaaataaaggcaatatatggtagtctggatcaacgtcagctttaa

SEQ ID NO: 4862 - DNA, 2637 bp, Escherichia coli
atgtcatatctgaatttaagactttaccagcgaaacacacaatgcttgcatattcgtaagcatcgtttggctggtttttttgtccgactcgttgtcgcctgtgcttttgccgcacaggcacctttgtcatctgccgacctctattttaatccgcgctttttagcggatgatccccaggctgtggccgatttatcgcgttttgaaaatgggcaagaattaccgccagggacgtatcgcgtcgatatctatttgaataatggttatatggcaacgcgtgatgtcacatttaatacgggcgacagtgaacaagggattgttccctgcctgacacgcgcgcaactcgccagtatggggctgaatacggcttctgtcgccggtatgaatctgctggcggatgatgcctgtgtgccattaaccacaatggtccaggacgctactgcgcatctggatgttggtcagcagcgactgaacctgacgatccctcaggcatttatgagtaatcgcgcgcgtggttatattcctcctgagttatgggatcccggtattaatgccggattgctcaattataatttcagcggaaatagtgtacagaatcggattgggggtaacagccattatgcatatttaaacctacagagtgggttaaatattggtgcgtggcgtttacgcgacaataccacctggagttataacagtagcgacagatcatcaggtagcaaaaataaatggcagcatatcaatacctggcttgagcgagacataataccgttacgttcccggctgacgctgggtgatggttatactcagggcgatattttcgatggtattaactttcgcggcgcacaattggcctcagatgacaatatgttacccgatagtcaaagaggatttgccccggtgatccacggtattgctcgtggtactgcacaggtcactattaaacaaaatgggtatgacatttataatagtacggtgccaccggggccttttaccatcaacgatatctatgccgcaggtaatagtggtgacttgcaggtaacgatcaaagaggctgacggcagcacgcagatttttaccgtaccctattcgtcagtcccgcttttgcaacgtgaagggcatactcgttattccattacggcaggagaataccgtagtggaaatgcgcagcaggaaaaaccccgctttttccagagtacattactccacggccttccggctggctggacaatatatggtggaacgcaactggcggatcgttatcgtgcttttaatttcggtatcgggaaaaacatgggggcactgggcgctctgtctgtggatatgacgcaggctaattccacacttcccgatgacagtcagcatgacggacaatcggtgcgttttctctataacaaatcgctcaatgaatcaggcacgaatattcagttagtgggttaccgttattcgaccagcggatattttaatttcgctgatacaacatacagtcgaatgaatggctacaacatcgaaacacaggacggagttattcaggttaagccgaaattcaccgactattacaacctcgcttataacaaacgcgggaaattacaactcaccgttactcagcaactcgggcgcacatcaacactgtatttgagtggtagccatcaaacttattggggaacgagtaatgtcgatgagcaattccaggctggattaaatactgcgttcgaagatatcaactggacgctcagctatagcctgacgaaaaacgcctggcaaaaaggacgggatcagatgttagcgcttaacgtcaatattcctttcagccactggctgcgttctgacagtaaatctcagtggcgacatgccagtgccagctacagcatgtcacacgatctcaacggtcggatgaccaatctggctggtgtatacggtacgttgctggaagacaacaacctcagctatagcgtgcaaaccggctatgccgggggaggcgatggaaatagcggaagtacaggctacgccacgctgaattatcgcggtggttacggcaatgccaatatcggttacagccatagcgatgatattaagcagctctattacggagtcagcggtggggtactggctcatgccaatggcgtaacgctggggcagccgttaaacgatacggtggtgcttgttaaagcgcctggcgcaaaagatgcaaaagtcgaaaaccagacgggggtgcgtaccgactggcgtggttatgccgtgctgccttatgccactgaatatcgggaaaatagagtggcgctggataccaataccctggctgataacgtcgatttagataacgcggttgctaacgttgttcccactcgtggggcgatcgtgcgagcagagtttaaagcgcgcgttgggataaaactgctcatgacgctgacccacaataataagccgctgccgtttggggcgatggtgacatcagagagtagccagagtagcggcattgttgcggataatggtcaggtttacctcagcggaatgcctttagcgggaaaagttcaggtgaaatggggagaagaggaaaatgctcactgtgtcgccaattatcaactgccaccagagagtcagcagcagttattaacccagctatcagctgaatgtcgttaa

SEQ ID NO: 4863 - DNA, 1344 bp, Escherichia coli
atgcatgtgcttaacattctctgggtggtattcggcattggtctgatgctggtactgaatttgaagttcaaaatcaattcaatggtggctttgttggtggcggcgctgtccgtcgggatgctggcgggcatggatttgatgtcgctgctgcacactatgaaagcgggcttcggcaacacgctgggggaactggctatcatcgtggtgttcggtgcggtcatcggtaaattgatggtcgactccggcgcggctcaccagatagcgcatacgctgctggcgcgtctcggtctgcgctatgtacagctgtcggtgattatcatcggcctgatttttggtctggcgatgttctatgaagtggcctttatcatgttagcgccgctggttattgttattgccgccgaagctaaaattccgttcctgaaactggcgatcccggcagtagcagctgccactaccgcacattcactgttcccaccgcagccgggtccggtggcgctggtgaatgcttatggcgcggatatggggatggtttatatctatggcgtactggtgacgatcccaagtgtaatctgcgcaggtctgatcctgccgaagttcctcggcaatcttgagcgcccaacgccatcattcctgaaagcagatcaaccggtagatatgaataatctgccctctttcggcgtttcgattctggtgccgctgatcccggcgatcattatgatctctaccaccatcgccaatatctggctggtaaaagatacccctgcctgggaagtggttaactttatcggttcctcgccgattgcaatgtttattgcgatggtggttgcattcgtactctttggcaccgcacgtggtcatgacatgcagtgggtgatgaacgcttttgaaagcgcggtgaagagtattgcaatggtgattctgatcatcggtgcgggtggcgtgctgaagcagaccatcatcgacaccggcattggcgacaccatcggcatgttgatgtcccacggcaatatctcgccctacatcatggcatggctgatcactgtgctaattcgtctggcgacgggtcagggtgtcgtttcggcgatgaccgccgccgggattatcagtgctgcaatcctagatccagcaactggtcagctggttggcgtgaatccggcgctgctggtactggcgacggctgcgggttccaacaccctcacccacattaacgatgcatctttctggttgttcaaaggttactttgacctgtcagtaaaagacacgttgaaaacctggggtctgctggagctggtcaactccgtggttgggctgattattgtgctgattattagcatggtagcgtaa

SEQ ID NO: 4864 - DNA, 831 bp, Escherichia coli
atgtctatgccattaagcaatgcccttcagagtcaaattattacagatgctcacttccttcatcacccaatagtcgacagtgagtttacacgtaaattaaaatatgcacgcatggattcggaaaacatctatcttccgcctcttactcgtggcaataaccataattacgatggaaaaagcgttgtcgaaattagaaaacttgatattagtaaagagccttggccatttaattatgtgacaggagcatgcagagaatccgatggtattacaacaacaggacgtatgctctatcggaacttgaaaatcacctcagctttagacgaaatatatggtggcatatgtaaaaaggcgcatgctaccacagagttagcagaaggtttacggctaaatttatttatgaagagccctttcgatcctgttgaggactatacagttcatgaaataacattaggccctggttgcaatgttcctggttatgccggaaccacgataggatatatttcaacccttccagcttctcaggcaaaaagatggaccaatgagcagccaaggattgatatctatattgatcagataatgacggtaacaggggtagcaaattcttccggattcgcccttgccgcattacttaatgctaatattgagttgggtaatgacccaataattggtatagaagcctatcccggtaccgcggagatccatgcaaaaatgggatataaagttatcccgggtgatgaaaatgcaccactcaaacgtatgactctgcaaccgtcatctcttccagaactgtttgaattaaaaaatggtgaatggaattatattggtaaataa

SEQ ID NO: 4865 - DNA, 393 bp, Escherichia coli
atgatgcgacaatcacttcaggctgttttacctgaaatttcaggcaataaaacgtcatcgctgcgtaaatcggtatgcagcgatctcctcactctttttaattctcctcattcggcattaccgtcattacttgtttcaggcatgcccgagtggcaagtgcataacccgagcgacaaacatctccagagctggtattgccgtcagctgcgttctgcactgttatttcatgagccacggattgcggcgttgcaggttaatttgaaagaagcgtactgccacactctggcgatcagccttgagataatgctgtaccacgacgatgaaccgctaacgtttgatctggtctgggataatggcggttggcgcagtgcgacgctggagaatgtcagctaa

SEQ ID NO: 4866 - DNA, 768 bp, Escherichia coli
gtggcatattcgattggcattgattccggctcaaccgccaccaaagggatcttactggcagacggcgtgattacgcgccgtttcctcgttccaaccccctttcgcccggcaacagcaattactgaagcctgggaaactctgcgcgaagggttagagacaacgccgtttctgacgctcaccggctacgggcggcaactggtggattttgccgataaacaggtaacggaaatctcctgtcacgggctgggcgcacggtttcttgcgccagcaacgcgcgcggtaatcgacatcggtggtcaggacagcaaagtgattcagcttgatgatgacggtaacctgtgcgatttcctgatgaatgacaaatgcgcggcgggcaccgggcgtttcctggaggtgatctcgcgcacgcttggcaccagcgtcgagcaactcgacagcattaccgaaaatgtcacgccgcacgccatcacgagtatgtgcacagtgtttgctgaatcagaagcgatcagcctgcgctcagcgggcgtcgcgccagaagcgattctcgccggagtgattaacgcgatggcgcggaggagtgccaatttcattgctcgtctctcctgtgaagcgccgattctgtttactggtggcgttagtcattgccagaagtttgcccggatgctggaatctcacctgcgaatgccggtaaatacccatcctgatgcgcaatttgctggcgcaattggcgcggcggtaattggtcaacgagtgaggacacgccgatga

SEQ ID NO: 4867 - DNA, 342 bp, Escherichia coli
atgactgacacgcattctattgcacaaccgttcgaagcagaagtctccccggcaaataaccgtcaattaaccgtgagttatgcgagtcactacccggattacagccgtattcccgccatcaccctgaaaggtcagtggctggaagccgccggttttgccaccggcactgcggtagatgtcaaagtaatggaaggctgtattgtcctcaccgcccaaccacccgccgccgccgagagcgaactgatgcagtcgctgcgccaggtgtgcaagctgtcggcgcgtaaacaaaggcaggtgcaggagtttattggggtgattgcgggtaaacagaaagtcgcctga

SEQ ID NO: 4868 - DNA, 735 bp, Escherichia coli
atgaggattgatatattaattggacatactagtttttttcatcaaaccagtagagataacttccttcactatctcaatgaggaagaaataaaacgctatgatcagtttcattttgtgagtgataaagaactctatattttaagccgtatcctgctcaaaacagcactaaaaagatatcaacctgatgtctcattacaatcatggcaatttagtacgtgcaaatatggcaaaccatttatagtttttcctcagttggcaaaaaagattttttttaacctttcccatactatagatacagtagccgttgctattagttctcactgcgagcttggtgtcgatattgaacaaataagagatttagacaactcttatctgaatatcagtcagcatttttttactccacaggaagctactaacatagtttcacttcctcgttatgaaggtcaattacttttttggaaaatgtggacgctcaaagaagcttacatcaaatatcgaggtaaaggcctatctttaggactggattgtattgaatttcatttaacaaataaaaaactaacttcaaaatatagaggttcacctgtttatttctctcaatggaaaatatgtaactcatttctcgcattagcctctccactcatcacccctaaaataactattgagctatttcctatgcagtcccaactttatcaccacgactatcagctaattcattcgtcaaatgggcagaattga

SEQ ID NO: 4869 - DNA, 213 bp, Escherichia coli
atggataagttcaaagaaaaaaacccgttatctctgcgtgaaagacaagtattgcgcatgctggcacaaggtgatgagtactctcaaatatcacataatcttaacatatcaataaacacagtaaagtttcatgtgaaaaacatcaaacataaaatacaagctcggaatacgaatcacgctatacacattgctaacaggaatgagattatctaa

SEQ ID NO: 4870 - DNA, 9621 bp, Escherichia coli
atggataatacctctggagattttccatgtaataagatggacacgcgtaagcagttaccgctaacaccaagtcaacaggggtttttattccattccttaaaggataagaaaaggagtaactaccatgagcattttacatgcattttttctcagcatgtagatagcgcccacttcaagtgggcgctggaaacgttatttcgaaagcatgagtgttttcgcactgattataactgggagattgatgagcgcccttgtcaggtggtgaagaccgatgtgttgccggatatatatgtgttagactgtgagcaagaggaaatacgttttctactagctaatgatgacattatcattcctgtcccgcaggatgacggtattgatgctataattcctcaactgctacaggctgatttaaaatacccattttccttgaaaacgatcccagtccgggcctaccttattcagtcaacgaaagaaagtgcttttatactatcataccatcatattgtgatggatggctggagcttatcccttttcattaaacagttgctccaactctatggagcggctgtggtcagtggtgtgagggatgatagcgccattatcccctcatctctgaaaccccttgtagacacactgtcggcccgacgtcacacctttcagcacgactattgggctgcatatcttcgggagggaacaccaacttgtatcgtgccgctgtcacaatatcacacagatactgaagccgagaacaattcttacgttaatcaaacaaatcatgtggagatcaatttgtctccggatgtgtgtcagaaaatacagacgctatgcagcgattatcgtatcacccccgcagtaatcttctatgtggcctggggtatcctgctacaacgttggtgctatgctgacgatgtgttattcggcgcgacaatatcagggcgaaatataccaattgatggtatagaagaaacactagggctatttattaacacgttgccgctgcgtctgcgtgatgatggggcgacactgttgcaacacttacaacgtatgcaccaaacactaatagctcactacagcaatgaacatgatgccttagccagcatacaacggttggtacataaagaaggtcatgctggggatctttttaataccttagtggtgttggagaattatcccgttgatatgacattattgtcatgcgcgtcgcccgtggcaattcgccatctcagtgtacatgaacaaacgcactatccgctgaccttgaccatcactcaacagaagggattccgtttcagtattgcatatgcccttaactacctgaccaacaacatggcgcaagcgttgctgatgcacctgagttatctgcttgaacaactggtggacaatccgcagcgccccattgctgcgttggtaaacttgtccccatgccagcaggcgcaggtacttcaaccctatctggaacgcatggcatgccgggattgggatagtcaatccaacgtcatcgaacaatttcatcaagttgctgcgacttcgccagcacaggtcgcagtggttgatgaattgtgcgcgttgacctattcggagttggcagcacaagctgagcagctcgcggcttatttggtacagcagggtgttatggttggcgatactgtaggcataattagcgaacgccgggtaaacaccgtggttgccatcatcgccatcatgttgatcggggctgcttatgtgcccatcagccccgactacccagtgggtaggatgcaggaaattattgatgacagcggcttggcgctgttgctggtacatggcaaaccgctagatgcattaaacgttgcgcagagtgacctctgtgcatttcccgtcgcgccctcggtggtatttccggttatcacaccagattctcgcgcttatgtgatttattcatcggggtcgacgggtaagccaaaaggtatcgcggtggcgcaccgcggtttattgcgcctgatacaaggcgacagcccgctgaaggtggagagcggtgagacaacgctgctgacctgcccatttgagtttgatgtttcggtgtttgagatgtggtctaccttgctcaaccacggcaaactagtattactcagcaaacaggcattacttgatatcaatcacattcgccgcacgatcgctgatgaacaggtggcgcgcgcctggtttacctcatccttgtttaactcctatgtggcagaaggtgccgatttcttcggtatgttacaacacattacggtgggcggcgaagcagtatctgcgtggcatgtcaacgacgtgatgcaaaaatacccgcatctggtggtgacaaacggttatgggccgacggaaaacactatttttaccaccgcatatcgtttcaacgggttgcaacccgcccgagtcccgataggatacgcggtaccgggcacctcgctctacattaccgatctccatgggcatttgttgcctatcggtgccaccggtgaactagtggcgggtggagtgggggtcgccatcggctatcagaacaacccggcgctaagtgcgacggtttttgtccctgatccttttattcccggcggtatgatgtacaaaactggcgattatgcccggttgctggatgatggctgtgttgactgttttgggcgtaaagacggtcaaattaagatcaatggacaacgaattgaaaccggagagatcgagcagcgcctgctggagtgctccggcattatcgaggcggtagtggttccttaccgcgtacgtgaaacgctgcatattgcggcagtggtctgcgtcaatgatagctatgatgaggtggaagttcgagggcaattggctgacagattgccgccattcgctattccggaatccttggtggtggtgacggagattgcaaaaagccatagtggcaaggccgacttggcgcagttgcggtatctcctgcccgcaactcagtgcaacgccgtgtccaccacgatatcagaggtgcatagtgacatggaacatgcgctgcatgctatctggcaacgcgtacttgatagacaagacattgatagcaatgcctcctttttcgccctcggtggcacctcattggataccatcagggttaaaggggatattaagcggcaacttggcttggagattgatattaccgatctctttaagtacccaacgctcacggcgttagcacattttctcgatactgccgtatcgccggaggatgcaattccaacgcgtgctgttgtctacagcgacatgccggtggcgattgtcggtatggcgggacgtttccccggtgcggcgaatattgcagcgttgtggacgctggttgtaggaggggaatcgggattaacactgttcagtgatgaagagttgcgcgcgcatggtgtgacacctgacacgcttaaacaagcgaattatataaaaaccaaagggattgttgatgatcacgaatggtttgatgcggatttctttggttatactcccaacgaggcggaatgtatggatccgcaaattcgcttattgcatcagtgctgctggcaaactctggaacacgctgggtgcgatcctgccacctttactggtgcgattggcatttatgccggactgctgacatccccccactggcttaatgcggtaatgcaagacactaccgactctaccgccctgtacaaggccagtatcctgaatatccattccgtcacagcattgattgcccatgcgcttaacctcaccggccctgccgtgacgcttgacaccgcctgctccacttcggcagtggctatccaccaggcctgcatcgcactacgtaaccgggattgcgatgcggcattggcgggcggcgtttctatcgagatgcctgcgtaccggggctatgaatatcatgaaggcatgatcaatgcgcgagatggtgtctgtcgtcctttcgatagccaagcctctggcacagtcaccggtgatggcttaggaatgctgctgctaaaacgtctggacgacgcgctggcggatcgggactgcatctatggtgtgatcaaaggttcggcggtcaataatgatggcaataacaaaatcggctataccgcgccgagtgtgatcgggcaatcaacggtaatccgcaccagtttgcgccgtgccggttttgatagcgacagtatcggattggtggaagcgcacggcaccggtacggtgctgggtgatcctattgagttacgtgcgcttaatgaggtgtttggcccaacacctgttccgttttgtgtggtttcagcgctgaaaagtaatattggccacctcaactccgctgcgggagtggcgggcgtcatcaaaacaacgctcgccctgcatcatcaagtgttgccaccaacagcgcactttcgccaactcaatcctgctatagatctatcgcgttctgcattgtacgttaaccagcaagtccaaccgtggccgtcgacgcgtcctcgtcgtgcactggtgagctccttcggcatcggcggcaccaatgccagcatcgcactagaagcacatcaacatgaggacgacccttcagcgacgggggtacgcgacagctatctgttgttgttctccgctaaaacacccgctgcgttagagttgcgcgtggcctccacactggaatatgtcaagcatggagtaggggtgcgcctgccggatgtggcttatacattgcaaactggacgcacagcctttgaccatcggcgggcttatttggtgagtcgtgggtcgaaaatcgatctctcctgtgccacgatattgcaagcggaaatcttcaatggtcagcgcacgacagcggagatctgcttcatgtttcctggtcaaggtagccaatatcacggcatggccagcgcgctctatgctcatcaacccatgtttcgccagcacatggatcgctgctttgctgcattccaacgctattcgacggtcgatctcaaggcgttgttgtttgacgatgaggatacgcgggatattgatcaaacgcagttcacacaaccggcgttgttctgtgtcgaatacagcctagcgcgcaccttgattgatctggggattacgccggacagtatgatcgggcacagtctgggcgagtatgttgcggcctgtattgctggcgtatttactcttgaggatgcgctgcacgtcattgaggcgcgcggacgtttgatgcagtccatgcgtcccggtagcatgatggcggtctaccttagtcgcgaacagttgaccccatggctagctgcagaacggggtattgaactggcagctaataatagcgcgcatttttgcgtagtcgcgggcgagcaggcggccatttcccgtttgagcacacgcttagtcgagggcgggatacagcacaggcgcctgaaaacctctcacgcattccactcggccatgatgacgccgatgctgcacgattttgcacagttgctggggcaaatcccgatgcacgcgccgcacaagcgctttatatctaatgtaagcggtacatggattactgaggagcaagctacctcgccggattactgggtgcagcaagtgcgcaacgcggtgctgtttagcgaaggtgcggcgcaactgttggtacaacccacgctgtttatcgaatgtgggccgggtaatacgctctctacctttattcaaggacataaccaatacagcgatcagccgaccctgttgacgctacgcaaagccaacgcggcgatcgatgatgagcacatgttgcatcgtacgctggcggcgctgtgggtcaggggggagaatattgattggagacgctttaaccagacggcactcggcaagcacattccattgccggattaccccttcgaacagacttattactatcgctatggtgctgcactttccggttatcgccagtatccaaatcctctgcgccgtccgcaagatgagtggctccagcgtgtgctgtggcggatgcacgacacatccttgcgggaggcgttctatgcgccgggcgaattgatcatcattattagtgctgacggcgacaagttacagcagacgctgatgagtagtggtgtcgacagcatcacaatgccgctgccgatatcgtcagaggacgacgtgtgggataatgaccgtattctgacgcatttccacgacatctgcgcacttttagcacacaaaacctaccgacagttacattgcttgtatgctcccggtgcggaggcaggatcatcgttgacacagtcgctctcgggactttatcgtgttgctcgctggtgtatgcacagcaccacgccgctggcgtccttaacagtattgacccatggtgcgtttcgcgtacaggaagaggataatcccgaaccgacgctggcagcgttgtcgggcgcagtaaacgtgtttgcccaagagctgcacccgaccgaagtacgattgatcgatatcgatgcgcagagcagtgatgagaatctgaacttgctaacccagcgtctggccccgaaacaagaaacggtaatggcgctcaggcaggggatgctttacctgcgacgctttatcccgacacggctgttggcgcacttaccccctcaaacagggtgtataccgggcaacgtactgtggattatcggcggtgaaaaggggattggccgcatgatcggcgaagcgcttgctcagcgtgagggagtccgtgtggtactgagcagccgcacaggttatcaccatgaagcggtgcagcaggacgcattagacgttatccactgcgacgtgacgcaggcggaggcggttagagcttgtctggcaactctgctcgaacgctatggacggttggatggcgtgatttttgctgccgacgctaccaccacattgacactgcatcaattgagcgaatctgcgctacgcgacacgctaacggtgaaagaacggggtactgctaatgtgctgcatgcgttagcgcaacggaatctgctggatgagcgtctgctactgctgttctgtaactcgttggctgccgtgaatgcggagatcggccagacaggctatgctaccgccagcgcctatttggatgcactggcacagcaactgcgtacccgctacaaggtgaatgcgctcagtatcgggttggatgcattgcgtgagcagggcatgttgttggatgctataaacggcagtgaatacgatgtcttgcgtggactgcgcccattgatgacgggaacgttgctacaggcttataaacaacaaggggctgacaccagctactacgcgcgattatcccccgagtccgattggctgctggatgagcaccggatatccggtatcgccacgctgccgggaaccggctatctggcgctggcgtatgaagctctgcgccattactttgtgcaagaccaaatctgcattgatgaattggtctttttggcaccgttgactgtgatggacaactgcagtgttgacgtttttgttgacatttcacctaacgggcaaggagttagtgtcgaggtgaaatcaatgacggagcgctttagtggcacgttaacaacccatgccagaggcagggcgacgcgtctgatggtagacgataatgttgtgtgcgatctcacggggctgatgcgcgagatgcacactatcactcctccaacaaaggaattatcgagcacgcacttccactatgggccgcgctggcacagcgtacaacaactgtatggcaataccgcccagactcaggttttcgcaacgctggccctgcccaccgttgccgctaatgatacgatcgcactgcaccctgcgctgttggacatcgccagcagtgttgtcgaacaactgcctggttttcatactgattcggtacctttcctttatcaggatttacgcctgtaccgcccgttgccgaacaccttacatgtggcgctgactgtcaatcggcacgatgaggagggtgacagctacgctttcacgctctacgacatggcaggcgagatggttgcccgctgtgcggcaatggtgaagcgcaaggtacagctccacatacaagatgtcgatgacgacacgcgactgcgcgtgcccagtgccgataactaccaactgcggctggccgctgagggggagggggcaggaaagctagcgttgtgccctacgccgcgcttagcgctgggggattcacaagtagagattgaggtactggccaccggactgaactttaaggatgtgctgttcaccacgggattgctccggcagcagccgggtgaggctccgctgcaattgggactggagtgcgccggacgcattactcgcgtgggtaaaaatgtcactgaatttgccccgggagaggatgttatggcggtgctaaacggtggttttgtccagtacgcacgggtagaaagcgattgcgtagtgagaaaaccagcccattgtcgcatcgaacaggcggctgcgctgcctatcgcatacctcaccgcctattacgcactggtggtgcgcgctaatttgcaacccggagaacgagtattgatccacagtgcggcggggggcgttggcttggctgcgctacatattgccaaacgctgcggagcacagattttcgccacagcaggtagcgagcagaaacgcgattacttgctttcgctaggcgtacatgccgtagctgattcacacgacgaacagttcgctgccactctgctgaccgcatcggacggacaggggatggatgtgatccttaactccctcacaggccgtctgcttgacgctagcctcgcgctgctggcaccgctgggccgttttcttgagctgggcagcaaggacattgtggaagacaaagcgctaccgatgcgtttcttcgcccaaggcggcacctttattccgattaattttcacgcggcgcatggtgcgtttagtcgctacctgcaacagattgtcgcttggatagatgataacacgctaccgctccttccatgcaaatccgtaccattgcccgaggttgcacgcgccttcgccaccctgaccacgccgcagcatattggcaaggtggtggtaacgcatcgcactgcggcaggcatggaccggctgaacgccatgatagcagaaaggcgcctcggcggctatgcgctcagcatgagcaatgccgaggtgatgcgccaattgtggccgatactgaacactcgcagtccgtgggcgcaactgctgctctcacctcgggcgatcgatagattagcgcggggcaaccgggtggatcgcggtgtaccgtctgccgctaacgatacgattactcagcagacagtgaaaaagcggccccgtccggaaattggcgtgccttacagccccgcgacacgtgaagtggaacgcgtgctctgccaaatcctggaagagtatctgggtctggatagagtaggcattgacgacaactatgccgaattaggggcaacctcactcgatatggtgcaactgagtgggcaaatggcgcgtcactatccgcaagtgagcgtggtgtcgctgtacaaccacgccaccgtgcgccagctggcgacgttttgccagcccccggagggcgagtcaaatgcgccatcaccacagcctgcagtacagacgaatacgcgcgcgaatcagatagcaaaacgtgctttgcaaattgcgaaaaatactgcgcgcagtcacacgtctttgcattaa

SEQ ID NO: 4871 - DNA, 2601 bp, Escherichia coli
atggaatacgcaagcgaaatgaacggcatggaaatcgccattattggtatggcggtccgtttcccgcagtcccggacgttacacgaattctggcataacatcgttcagggtaaagagtgcgtcaccttctttagcgaggaggagttgctggccgaaggcgtcgaacagagtactctggacaacccggcctatgtacgggccaagccctatatcgagggcatatgcgactttgatgctgcatttttcggttacagtcacaaagaggcgcagactctggatccgaaatcccgcgtattacatgaagttgcctaccatgcgctggaagatgcaggctatgcccaacgtaccagcgatctgatcaccggggtattcgtgggggcgtcagaagatgtggattggctacggcgttcgctgtcacagattggcggcgatgcgctgaatcgttttgagtctggcatctatggtcataaggatctgctcgcacatctcattgcctacagtctcaatctcaacggtccggtgtatagtctctacaccagttgttcgacttctctgagtgcaacgcatatcgcttgccgcagcttgttgtttggcgaatgtgatctggcgttggcgggtggaattactatcgatttaccgcagaagtcaggctacttctgtcaacagggcatgatccactccaccgatggccactgccgtccttttgacagtcaggcttctggcaccctgtttggcgatggcgcgggtgtggttgtgcttcggcgtttggaagatgctctggcagcgggcgatcgcatctatgcggtgatccggggtagcgcggtcaacaatgacggtaaacaaaaaatcggttttgtcgcgcctggtcatgagggacagaaggcggtcatttgtgcggcctgtcatctggcagaagtaagcccagaaagcatcggctacgttgaaacccacggtaccggcacccgtattggcgatcctatcgagttcgctgcgttgacggaggcgttcgatacttcacaccgccaatactgtgcactaggggctgtaaaggcgaatattggccacacccacgcggcggcgggcgtggctgggttaatcaagacggcgctggtacttcatcaccggaccattccgccgctcgccaactatcaaatgcctaactcgaagctggatctggcgcattcaccgttttatatcccgatacagccgcaggagtggcccgcatcgcggatgccgccccgcgctggcgtcagttcttttggcattggcggtactaatgtgcatatgattttggaagggctgaatcctgcggtgcgcgatgaccatgaccaagtgcgagcaccggtgtttatccctctctccgcgccgtctttcgagcagttggatgagctgacgcaacagcttaccccgttgctggctacccttgatgcgtcaacgctagcctacacacaacaagtggcgcgccccgtgtttgattgccgccgagtgatacaagtggaaaacgatggtacgcaagcgatgctggcatcgctggataacctaatgcccgacgctccttggggcctacactgtccagatctacgtactacgaacgattgtacttacgcacagtggctggcgcattcggcacattatcaacgcgaagcgactgctctgacggcattactcgacggcatgaatattccacccgcttattgccacgctgaaacgtgggcggcacaagcgaacagcagcctgctaatcagaggctgccagactatcgccgcgctaaaaacctggatgaacctgctaccgacattaacactgctgtcgggtgctggaacaggccttttgcctgccgctgcagccagtggcatgattgcgacgcaagacgtgttgcatttgctgtgggaaatggagcaaaaggcgcttcatctctggcttcctgagcgccatgaacctatccccggctacgtgctggcttggcaaggaaatcccatcaccgatgcacagcgtaacgacagagggttttggagtgaagcgctgttggcagatacccgagaactgggggagggcgttcacagtatcaactgggttaggctgccgccggaaataagagaagacgttgatgtattgcgctacgtggcgcaactgtggtgtgcaggtatcaatgtggattgggccgtgtggtacggcactccgctgccgcaacgcgggagcgcatcagcatatcccttcgcacacaaccactacccattgcctggacgggtaatgggtagtgtggagacccaacccgaagcaggacccgaaacgcaccacccttatcaggcacgtcccgtgttaagcgtacctttcgtagccgcacactcgcggggtatgcagtatatcacaggtctgatggaactgttgctggaaatatcgccggtcggggtggacgacgacttttttgaattaggcgggcattcgctgctggtgacgcaattgacctcccgtttagaacgcgatttcaacgtacatatcgatcttttgaccctgatggaaaaccccaatccgcgcaatatctacgcgcatatcgcggcgcaactggggggcgaagacaacctcgaaatagcctgtcagtaa

SEQ ID NO: 4872 - DNA, 867 bp, Escherichia coli
atgaacgtggcggtaataggtgcaggagtaatgggaactggcgtcgctcataacatggcgcaatacggcatatcaactaacgttgtggatatttctcaatctcagttggataaatgccgacagatgatcgaagcgaacttacgcttatataattttcacccgcagcataaaaaaaagacgcatagcacagcggagataatggaaaatatccgtttcacaactgagttggacgacattgtagaatgtgatttggtgattgagaatattactgaggatatagagaaaaaaaatgcactatacacacggatgaatacgatctgcggcgcgtcgacagtgtttggtgttaatacgtccgccatatctatcactgcgttgtcaaaattaatgcgacatccggagaatgtagtcggcgtccattttatgaacccggtaccgctgatgcacaccgtcgaattaatccgtggtgtacatactgcagagcgtacactgaacatatttcaccacttattttctcagttgaataaaaccggcatcgtggtcaatgattctccgggctttgtcactaatcgtgccatgatgatttttgttaacgaagccatatttatggtgcaggagcagatcgcccgtgctgaggatatcgatacgttgtttaaaacctgcttcgggcacaagatggggccactacaaactgccgatttgattggcttggatacgattttgcaatcgttgcaggtgctatatgaaagttttaatgatgataagtatcgccccagctttttattaaagaaaatggtcgatgcagggtatttgggcgtgaaatcagggcaggggttttatcgctatcaacagacgtacgccgagcagtga

SEQ ID NO: 4873 - DNA, 249 bp, Escherichia coli
atgaaaaagcaagatatgaaagccgccattcgggaatttctttcacgctcattacgtgggcatacgttgaacgatgatgacgatattttttctctcgggcttgtccattcgttatttactgtgcaaatcatactgtttatagaaaaaaattttcaggttgagctggaagtgagtgagttgaaaacagaacagattgctaccgtcaataaaatagtggagctcattcagcgacaaacaggcctggagtaa

SEQ ID NO: 4874 - DNA, 1131 bp, Escherichia coli
atgtgcactgaaaattatgagctggctcagcaagaggcagtcctgtttgccaaacaacatctcgccctggctgcacagaatattgaacgtcagcagtttattgtgccagacattatttcttgcgtggcgcaggccgggtacttaggtgcgtcaatcccccaaaaatatggcggacgaggttacgattcttatcaactgtgcgctttgcatgaagtgatggctggggttcacggttcgttagaaaatctcataacagtgactggcatggtcagcacgctgctgcaacgcgtgggcagcgcagcgcaaaaagcccattatttgccaaagctggcaacgggggaattgatcggcgcgattgccctcacagagccgaatatcggcagtgacttagtgaacgtggaaacagaattacagcaggatggcgacggttggcggctgaacgggaaaaagaaatggatcacgctagggcagattgctgatttttttattgttttaatccactgtggtaatcaattagcgacagtgcttatcgatcgcaataccgacggctttactatcactccactcaacgacatgttggggttacgcggcaatatgttggcagagctgcattttaatgactgccgcctgaaggaggatgcattgctcggtccgctcacccctggggtaccgctggcggtgaattttgcgctcaatgaagggcggttcaccaccgcttgtggcagcctaggattatgtcgggccgctgtggatgtggcagcgcgctacatccgccagcgtaaacagttcaagcggcggttattttctcatggcattgttcagcacttgtttgccacaatgctgacccaaacgcgcagtgcgcaactaatgtgcttcagcgcggcggaataccgcgaaacgctgcacccggccatgataaaccaaatcctgatggcgaagtatgtcgcttccaaagctgcggtggacgtggccgggaaggcggtgcaactgctcggtgcgaatggttgccatgccgattatgccgtcgaacgttactaccgcgacgccaaaatcatggaaatcatcgaagggacatcgcaaattcatgaaatccaaattgcgatgaattacatgatggggagtgaagcatga

SEQ ID NO: 4875 - DNA, 1269 bp, Escherichia coli
atgacgaaggatgtcgcactgatgttccctggctccggttcgcaatatgtaggcatggcacggtggctgtatgagcgttatccgcaggtgcgtactctgtttgatgaagctagccagatcacggaacgggacatggcagcgctgtgcctgtcgggtactttggtacaacttgctgagccgacggcaatggcgctggctatctataccaccagcgtggcccactttgtcgcgtggcagcagtttttggcgcaaaccggtgtccatgtcaacctacgttatatgttgggtcatagtttgggcgaatatgctgcgctgacctgtagtggtgcgctgagcttttcccaagcactggcgctggtggcgatgcgtagccgtttagccagtgagatcgcccgcgaaatggacgcgagtaccactatcatcaagcaagggaatcaggcactggtggcagcggcgtgcgaggtggcggagcgtgaaacccgacagcaggtcggtattgcctgcttcaattcgccgcaacagtttatgttatccggacaaaactcggccattatcgccgccgagcaatacctgctggatcatgatcgccaagtcgaagtagtgccgctgattggtggtgttccttaccacagcccactattgaaaccttgcggacagcaattgcgcaaggcgctggatcgctgcgaatggcgacgtccgtgctgcccagtgatctccaatgtcaacgctcaaccctatcccgatacggtcacgccagtccagtggctagaacaacagctctctcagccagtgcagtggcagcgctctctcacctacctgacaggacacttgtcaccgatcgcgatagagatcggtccgcaaagtgtgctgaaaaacctgctgctggagaatcgctatccagcaccagtttacgcatttgacaatcgtcatgatcgtgcgcaactagcattggtgctgggggataacatggcggtgaagaccgatccggaagccgtgcgccgccaacgcatcacgctgctcactaacgccctgacagccacacgccatcaccgcgccgccgatgtggctgccagtgcgcaattgaaagaattgctcagtcgtttttttgagcgcatccagcagattgagcagcgcggcacatccagcgaagaggacattgcttttttgcatgagcttcttgaacagggatttcaactcaaaggcagtagtcaggcagaaatcgacgcctgccacgcgcggttggcttccgacaacggcggacaggcgtaa

SEQ ID NO: 4876 - DNA, 4797 bp, Escherichia coli
atggaacagcaagggattatgagacagttgcctaccgacgaccaaacgatagtcgactatttgtatcgtatcgccggagaatatggggaaaaagccgctgtattgatgggggacgcggcgctgagctatcacgatcttaatgcacgctctaaccaactggcgcattatctgcgtgggctggggatcggcgaggatcgtgtggtagctatccgcctgccgcgcggcatggcaatgctgattgccattttcgctattgtaaaagctggtggtgcctatttaccgctggcgtacaatgcaccgcgtagccgcattgaaaatatactgagcaacagcggcgctgtttgtctgatcggtactgacgatggtgatcgctggccgattcctcgcgtcgaaatcgacagcgcggcggtcagtgccatgccaacgacggatctgcgttaccgaccacatgcgcggcaactggcgtatattatttacacctccggttccaccggtgtccctaaaggggtggcgacggaacatgcagcgctgctaaaccgaattgtctggatgcagaacgcttatcctatcagttctcaggacgtgctgtttcagaagacggtgtacacctttgacgtctctgtctgggagatgttctggtgggcgatgtacggcgcatctgtagtgctgttaccgtccggactggagagcgatccgcgaaccttggctcgactgattcagcgtcaccgcgtgtcggttgtgcactttgtcccttcgatgctgaacctgtttgtcgagtatctggagatgaaacaggatcctcgtttgaccgcctcattgcgattagtgttttccagcggtgagaaactcacggtccacagtgtggctcgcttttatcaatcggtggcgcagggtgatcttataaatctctatggcccgaccgaagcagcaatcgatgtcagtcatcaccgctgcctgcgcgggtacgactacgacgatatccctatcggtcaagcgattgacggttgccgactctatgtgctggatgaccatggtaatccggtagcagacggcgaagagggcgaactgtatctcgctggtatcgggctggcacgtggctatctcaacaacgtggcgttaactgatcgctgttttactatacatccaactttgcgccatttagggaaaccggagcggctgtataaaactggagatctggtgtggcgcgacggggaaagccaacaaattcattacattggccgtaatgattttcagattaaaattagagggttgcgcgttgaattgggagaaatcgaagcccatgcgatgcgtttcccgggggtacagcaggcagtcgtggtggcggatcaggatgatcccgacaatcagttgatttacgcttttgtcgtcagtagcgtgccgctcaatttggcggccttaatggacgcactgtccaaaaacttgcctgcctacatgctgccgaaccgtttgttggcaatgtcagagttaccactctccgacaatggcaagtgctgtcgtaaaacgttgctcgacttggcgcgggcgtactcagccagtcgcgtcgatttacgtgaaactcccgccgtgcgctacctaccgttgtcatcggctcaatcgtcgatgtggtttatgcaacaattggcgccgcatactgcactatacaataaccccaccgccttgctgcttgaaggagaactggatcgcacgcggatggacggcgcgattcgtcaattgatgagtcggcatactctgttacgtgctatggcggaaacccacaatggacaaccagtattggcggtgcctcagtgcgtatcgtcgcaggcgttgctgaccatagtgccactcccctcggtgagtgatgataacgcgctacaggcgatgatcaaccagcgtgcggcacaccccatgcccttaacgtcaggcacaccgctgtgccggtttgaactgttgacgctcgatgacgatcgtagcgtattgttgattcatctgcaccacatcatcagtgatggctggtcgaaaggcgttttgttacgcgaattgcaggccgcatataacggtgaatcgctgacgccagaaccgttgttggagtatgccgactacatggagtaccaagaagagtggcgtcagagtgacgcctatcaggacgcgatgcgttactggcaaaataccctggcggggacgttgccgattcttgatatccccaccgatcaaccgcgtcagaaggtggcacgttaccaaggcgcgtttgttgccttcgcattgtctgccaacacatgcgagcgagtgttggcggcggcgcgtgcgcagcgcgtgtcgttgtataactatctgctgaccgccttcgtcctcctgctgcatcgtaatgcgcgtcaacaggaatacatcgtcggtatgccgattgctgcgcggctgacgaaagaacaggagcatatgatcgcgccgctggtcaacgtactaccgctgcgcttacctcttgacgaagcggcatcgttttccgagttagtacagacgatcagaggtattctgtttgccgctttcaggcaccagcgtctcgaatttaccgacatagtgcgcgcagtgaatgtggatcgcagcgccggacatttcccaatatatcagtgcatgttccaactcgacaatatgcctctggcgagcccgacactaaacggtgtcaacgttacaccattattgttggataccagtgcatctcaggtggatatttcgctaagtatgcagcatatcgatgggcgcatcaccggcactttcgaatacgacgctgggttatacagtgcggatcgtattcagcacctggtggcgcagtggagagaactgctagatgaggccagcagccaacccacgcagttagtccgcgatttgattcgtttcacccctcgagagcacgcttggctggcgcggcacaacgccactgaagttgctctgccgcccgtagataacctgctggcgctagtgttaccgcactgccagcagcgccctacactggtggctttgcgccacgctgacgacgccatgacctatggcgaattgcaacaggccacgatgcagatgtgtacttggctgcgtgcgcaaggcgtaaaacgcggagaatctgtcgcactgcaactgcctttttgtttcgaattgattatcgcacaattggcgatcctctctttgggggcgagctatgtgccgctggatggtaacgcgccagcggcccgcaatgccctgatcttggcgcaggcaacgccgtgcatgctgctggtggcgcaaccgctggaatcccctcatgggctgacgataccttgggtgctagtgcctgactggcgtagcctgctgacagaaataccgaacctgccagttagtgttgcgccagatgctttagattgcgatgcggtggtgatctttacctccggtactaccgggcagcccaaaggcgtccgactcagccaacgtaatctggtcaacttaaccgcatcctttatatccagctatcaagtgacgcatcaggatgttctgctacccattacctcagtcgcgtctgctagctttgtcggggaggtactgccgctgctcgccgctggcggtaccttagtattggcgcaaaaagcgcagagtttggatagtgatgcgctcattgcgctgctggcatctcagcgggtgactatcctgagcaccaccccatcgctttctgccagcctctctgtgctggctcagtcgatgggatcgctgcgcttgtttctgtgcggtggtgaagcgttagagtatgagcagatagcgccgcttctgccgcacatggcagtggttaacggttatggcctgaccgaaagcggtatctgctcgacctactttcctgtcgcaaagcgtagggagcaagaaacgggagcattgcccattggccgcccgattcagaacacccaagcttatgtggtggatgcatataatcgtttggtaccgccaggtgcctgtggagaactctgtttctctggtctgggcatttcgcccggctaccttgatgcacgacaggatcccgagcgctttgtcgagttgccggaataccctggcgttcgggtgctgaaaactggcgatcgtgctcgttgggcaaccgacgggatgttgttctatctcggcagacaagatcgccaagtgcagatccgtggataccgagttgaactgggcgacatcgaaagcctactgaaacagcatccggatattgctgatgcgtgggtcgatgtgcgacgcaatgcggcggcaacgccgctactagtggccttctattgcagcgtcaacggcgttgcgctggatgctcagcaattgcgcgtatggctcagcctgcggcttccgttgcatatgctgccgttgctctacgtgccgctgagcgccatgccgctaggtgtaaacggcaaaatcgatccccagtgcctgccgctggtcgatctgcggcagttggaagggccgggcgagtatgtccctccggcaaccgaactggaacagcgtctggcggagatctggcagcagttgcttggcctggagcgtgtcggcaccaccacaaatttcttcgatctcggtggacactcacttctgctagtacagatgcagcaatacatcgggcagcagtgcggtcagcacgtggcgttggttgacctgctgcgcttcactaccatcaaacgcttggcggaatttctgctggccccggacgcagcgcaagggaccacaggagatcagacacaactgcgtgcggcgaagcagcgtttggcctttggtcacacgcgctgggcagccacaaccgacagtcatcactga

SEQ ID NO: 4877 - DNA, 3033 bp, Escherichia coli
atggcagagaatgattttggtatagctatcattgggatggcggggcgtttccctcaagccgatacggtacaggcgttttgggaaaatcttctggcaagccgagagtgcatttccttttacagcgatgaggaactgctggcgatgggaatcagtcctgaatttgttcagcacccagattacgtcaaggccaaaggggaggtagctgacatcgataaatttgatgctgctttcttcggtatcgcaccccgagaggcggagctgatggatcctcagcaccgtgtcctgttggaaaccgcgtgggcagccttcgaagatgcgggctatgtggctgccgattatccgggggatgtgggtatttttgctggcaaaagcatggattcctatttgatgctgaacttgatgccgcactttaaacgcgttttctcttctggcagtttgcaggcggccattggtaacgacaaagacagtatcactactaccatcgcctatcacctcaacctgcgcggcccggcgatcacggtgcagacttcctcatcgacatccttggtggcggtgtgcgtggcatgccaaagtctgttgacttggcagtgtgacatggcgattgctggcggagtaacgctggggccaccagcaaaaaccggctacttgtcgcaggaaggtgggatcaccgccgccgatggccactgtcgggcgttttccgataacagcagcggatttgtgcccggcaccggcgcggggctggtggtgttaaagcgtgttgatgaagcgctgcgtgatggcgataacatctatgcggtcatcaaaggatttgccgtcaacaacgacggttcggagaagatcagttataccgcgccgagcgtggatgcccaagcgcgcgccattgctcaggcacagcggttggcaggtttgacaccgcaggatatcacttatgtggaagcccacggtaccggtacgcgtttgggcgatccggttgagttttctgcgctaagccaagcctttgcgggcgcgtcacaaaagcagtactgtgcgctggggtcggtaaaaaccaatatcggccatttggatacggcagcgggcgtcgcagggttgataaaaaccgcgctggcagtgcagcagggaataattcccgcaacattgcactttgaacggcccaatgcacagatcgatctgaccaatagtccgttttacatcaacactacctgtcaaccgtggcaaccggaaagcggcatccgtcgcgcgggcgtcacctcgcttggcatgggcggcaccaatgcccatgttgtgctggaacaagcgccagccgttgacttgcaagcgcgagcgcctgtacctgcctacagtattttgccgttttctgccaagaccgacagtgccttatcctcggggctggcgcgttttgccgattttctgcaacatgaatcgctgccggataggcgggatctggcgtggacactctcacagggacgtaaagccttcgcacatcgcgccgcgctcgtaaccagagatctacatgctgccgggacgctgttgcagcaggccgcgacagcgccgtttgctcgtggtgtagcgcagacacagctcgggctggggctgttgttttccgggcagggtagccaatatcagcgcatgggccatcagctctatcaggtttggccggcctacgccgatgccttcgaccgttgcgcgacgttactcgagcgtgaataccaactggatatccgccatgagttgttcagagcagaagtctcgttagcccaaggcgaacgccttgcgcaaacctgcctcacacaaccgctgctgttcagcgtcgagtatgccttagcccaattgtggctcagttggggaatcacgccaacggtaatgattggtcattcgctgggcgaatgggtggcagcgacgttggcaggcgtgttctctttagaggatgcgttgcgcttggtggcgcgtcgagcagagctgatgcatcaggcaccaagcggtgccatgttgatggtggcgctgcccgaagcacagattcgcgcactgattaccgccccgctggcgattgccgctgttaacgcccctgactattcggttatcgccgggcctacgtcggagatcctcgccgtcagccagcgtctgacggagcagaacatcatcaacaaacgattgcatacctctcatgccttccactctagcatgatgcaagatgcggcgcaggcgctacgtcaggcatttgagaatgtacgactgaacccgccgacgctcaccatcatctctaccgtaaccggcgcgcacgtcagtgccgacactctcaccacaccggactactggattgaacagatgctgatgcctgtgcagttctccgctgcactgcaagaggcgcaagctacatttgatgtcgattttctggaaatcgggccaggtgccaccctgacccagctgaccaacggtcatgcattaggtgatcgtctcgcgttcagctcgctgccagcaggtgcccgcagcagcgatgagcacaaacatatcttagataccgtggcagcgctttgggtgcgagggcataacatcgatttgtctgcgtttgcaggtgagcaaccgcgccgtgtctctctaccgacctacgcctttgacaaaatccgttactgggtcgacagtccagaagaacagaggagcgccgtaacgccggtggcggacgcgggaagtgtcatccctagcgaaccgtcggtgcgccgtcagccgcgtccggcgttttcggtgccttacgcggctccagagagcaaaacgcagcgcggcttagtggcgatttgtgaagcattgctgggaattgacggcttgggcattgacgacaacttcttcgaagctggcggacattcattgatgctgggcatgttgctggcgcaggtacaggaacggttcgccgtcactctttcctttttcgacgtgatggaggatgccagcgtgcgcgcgttagcgcagttggtcgagcaggagcagcaggatgatggagggtccgcacttgccgtgctagttaacgacatgattaatgagtga

SEQ ID NO: 4878 - DNA, 6501 bp, Escherichia coli
atgacgatacatcatgccgcattggcgcgaatgttaccggcggaaaaaaaggaaaagctattacgacagttggcgcaatcaggcgtgtcgcccagccgcattcccatcatcaaagcggatccggcgcaggcaatcccgctgtcgtttaatcaggagcggttgtggtttttgcaaaaatacgacagtaccgccactaactacaacctttatgtggtgtatcgtttgcatggcgtggtggatatgccgatgctcacggaggcattgcgccatgtgcaagcacgccacgccatcttgcgtacccgtatcatagtacgtaacgatcggccttgccaggtgatagatgatgcgtcttcgttagttctcgatacggtcacgctggcagcgcaggccccaacttcagcgctagatgcggtaattcagcaggtgataaacacccggttcgatctggcacgcggtcctctgtggggggtaactcagattattcaacccgatcaaggttgtcatttggtgttttgcgcgcaccatatcatcatcgacggtatctcgttacggctattgttcgatgagttacagcagcagtatgctcgattgcatgctggtaatgaaacgtcgctgcctccgccgccgctgcaatatgccgattatgccttctggcagcgcgaatggttccaggataccttgctggcgaacgaacttgcctactggcgtgcgcgtttgcaagacgcgcctctgctgtcgacatttccatcgctgcacccgcgcccggcacaaccctctacacatggttcccggttcagcatcaccctggatgaaacattaagcctcgcgttgaaacacgtagcccgcacgcaggaaacaacgccgttcgtgctgatgctgactgccttccaactggtgctgatgcgttacgctcagcaacagcgattggtgataggcatgccagtatcggggcgcattcgcccggaattgcagagtagcattggttattatgccagcactgcggttatctacaccgattttaatggggttgaggtagggcgcgaggcgctccagcgtgtgaaggccagcgtgaaagagacgcaggggcgccagcaactgccgtttgaaaacttggtgaatatgctggatctccctcgcagcctttcccattcaccgttgttccagatcctctatatctaccataaccacgtgaccccacgcgcttttaccttggctggtgcgtattgggagcaggtgacgtatcacaatcagaccgtcaaatacgacatgacagtcgaggtgttccaaaacgacgccacgttcgacgtctcctttgagtacgatttggggttatacgatgctgatgtggtgaagcagattgccgaggcgctgcgtcagcactgcttatcgttgacatcatcactggagaccccgataggggcgatccctctgcatgcaccggagaccgcaacgccgcggcgtgatccgctcaacgccactaacgtcccgtggctcgggccgcaggatgtgctgcgtatcattgaacagcgctgtgtgcagcacccaaagcaactggcaatacagcagcatgacggcacactgacctacgctgagctctgggcgcgtgtgcagttcatcgcgatgcgttttcgagcgcatggcatacaaccgggcgatcgtattggcgtgctgttgccacgtcacagggatgtgattgcaaccatgttggcgacgtggtttgtgggggcgtgctacgtgccgttcgatattcatcagcctgccgcgcgtttgcaacgccttatgcaacgcgcgcgtttggtctgtctggtggtccgtcagccgggagagtggggtgaaattgtacaactgtcgttgccggaattgatgcaggacatgtcgaatgcgatccggtattctacaccttgcgcgctgttgccggatatgcaggcctacctgttgtttacctccggcagtaccggtgaacctaaaggcgtgtgcgttgttcaccgcgggttgctgaacttgttgttggatatgcagcgtacctttgcggttggctcgcaagaccggctgctctcggtgacgacgccaacatttgatatctcattcttggagtatctgttgccgctgatctccggtgcgagtctctatctgacagaggcggaacgcgccgcagacagcttccgtatgattccgctgattgccgactatcgaccaacgctgatgcaggcgacgccctcgttctggcacgggctgttgatggcgggttggcgtggcgacccggaactatgtgtgctggcaggcggtgaagcgctgccaacgaaagtggcggaagaactgttgcgctgttgtggttcattgtggaacctctacggtcccaccgaaacaaccatttggtcgctgaaatcgcagataacccaagcggaaaacatcaccctcggcgctcccattgccaatacccgtatatacattctggacaatgagggccatccagtgccgcaaggcgttgacggcgagctttacatcgccggggatggtgtggcgcaagggtatgatgggcagcctgagttgaacgcacagttcttcttgtcagaaccaggggtccccggtggcaggatgttccgcactggcgatctggtcaggagtgatgcgcaggggcagttgttttttgttgggcgcaaagatagccagatcaaactgcgcggttatcgtattgagttaggcgaaattgaacggacgttggcacggcatccgcatgtggacgccgcggtggtggcctgtattgaaagagcaccgttacacaaagcactggcagcattcatcatcaccagtgagcctccctcgctattcgagcaactgaaaaacgagcttcggcagcaactgccagactatatggtgccaacgctgtggcagagggtggccgacttcccgaacactgacaacggtaaaatcgatcgtaagcggttagcggaaaatttcgttgccgatagctcccttgtgtcgccgcagacgcaagcgctgagcgacacggaacagatgttgctggcgctgtggatgcgctatttgccgataaaaaacgtcgatcctgagtgcgatttctttcgcttggggggacattcgctgttggcggtaacgttggtagcagagatcaaccgcacttttcactgcgccttgaccctgaaggacattttccactactccacactacgggcactgagtgcgcgtattgcacagcaatctatcacggacgctgccgcgtctcaggatgactgggtgatagtgcacgaccctgagcatcgtcatcaaccgttcccattgacggatgttcagcgcgcctactggcttggacgacagacgggtgctacctcgatcgcgacccacatctaccatgaatttgacgtagaacactttaatgttacgcgttttacccatgcggtgaatgcgctgatcgctcgccatgaaatgctacgtgcgcgggtactccccgacggtactcagcagattctggcgcaagtgccggcgtatcagttagagcagcgcgatctgagtgctttgtcccctaacgcacgaaacgatgccttgatggcgatccgcgatcggctgtcgcatcatgtgcatcccgcagatcgttggccgctgtttgatttcagttattcggcttgcacggcgcaacatggccgcttgcatttcagtctcgatctgctgattgccgatgctctgagtatgcgcacgctacagcaggagttgatgatgctgtaccgtgagccccatgtgtcactgccgttgctaccgttctcttttcgtgactacgtgcaggcgctgttggtagagcaggcgagtgaagcctatgcacgcgatcaggcctattggcaacgggcgctgccgcagctgtatggcccaccaacgctgcccgtacagggcgatttggcgcaactgtctgcgatcaggttcgtacgtcgccgtcatcggctgtcagcccacaactggggagtgctgagcgcgctggcccaacgcacacgtatcaccaagacggcattgttgttgacagtctttagccaagtgctggcacgttggagccttagcccgacgtttacgctcaatctgacgttgttcaaccgcccgcagggttaccccaacgcagaggcagttattggtgattttaccgctgtcagcttgctgaatgtttgttacgacagccagcactcttatgcccacaacgctcagcgtattcaggtgcaactgtgggaagatctcgaacatcgtcgtttcagtgggatccgcgccagcgaggcgctgatccatagcggtcgtttccatgcgccgatgccggtggtattcactagtatgttggatatcgacggggagacgactgcgcaagaccctcgggacacaacccgttttactctgtgtccggacgccaatattacccaaacaccgcaggtgtggctcgatcaccaggtgatcgagttggctggggagttgcatttcaactgggacgcggtcgagcaactgtttgatgccacgctgctggatcagatgttccagtgttattgccaactcctgcacgccctagcccagcgaccacagctctggcatgagactcaagatgtgctggcgctgcccaccgttagtgcaccggtcacgcaggctcctgcacctacggccttgttgcaccatggattactgcgtcaggcagcactgacgccacaggaaactgcgctgatcagtcctatccgtgaattgacctatcgccaactgtcgacggcggcggatcatgtggcccgcgccctgttagcgctgggcgtgcagcatggcgaccgcgtggcggtggtgatggaaaaaggctggcagcagattgccgccgtacacggcattttacgactgggtgcggtctatctgccagtggatccggtgctaccgccacagcgtcgccagcttttgctgacggtgggcgaggtgcgggtacaagtaacgcagccgggtctcacgcaattggagccgtcgctgcccgtgctgatcatcgacgacggaatgctggacacgcctgctgcgccgttgcctgaagtggctggggatgtcacggatctggcctatatcattttcacttccggctccaccggtaccccgaaaggagtgatgatcgaccaccgtgcggccatgaacacgctggaagacatcaacgaacgctttggcctcaatgcgcaggatagggtgttcgggctgtcatcattgagctttgacctgtcggtttacgatgcctttgcgccttttatggtgggtgcagcgctggtactgccggaagcaggacgggaaaaagatccgcgtcattggcagacagttatggcacacggtcatgtaagcgtctggaatgcagtgcccgcactgatgcagatgctgtgcgaataccacagcggcgatcggatgagttatccgacgttgcgtctggcactgttgagcggcgactggatcccgctaacgttaccggagcagatgcgcgagcggctcaatgaaacgatggacatcatcagtctgggtggagcgaccgagtgcgccatctggtcggtctactacccgataggtgaggtggaatcgacgtggaccagtattccctacggtcggggcctgcgcaaccagccagtatacgtgctaaatgcgcaactggaggaatgtccggtcggggtggaaggagagatttgcattggcgggatggggctggcacaaggctacctgaacgacgcagagaaaacggcggcgagctttgtctggcgcgaagcgagtggtgagcgaatttaccgcactggggatcgcgggcgctactttgctgacgggcaagtcgcctttttggggcgcaacgatacccaagtgaaggtgaatggttaccgtatcgaactgggggaagtcaaaagccaccttgaacagctcgacagcgtagggagtgccgccgtggtgtgccaccagggacagctgtatgcctttatcactgccgcagaaaacctgcatcctgacgatactgacgccctgttagcgcgtgttcgtgctcagttagccgtgcagttgccgtattacctgctgccccaacatttctttcttctcaaggtgctgccgatgacaggcaacggcaaaattgatcaggcggcaatggttcaagaggttatccaacgtatgtcgcaatctacatcacagaagtcgagggccctcgcgcacgcctcgccctatgaacagcaggtggccgctctctggtgcgaggtactacaacgagaacagatcggactgaatgacaacttttttgaagcggggggcggctcaatccagatcgtgctgttgcatcgccgtattgaggagatttttaaggttacggtacctattgctgagctatttcgcttaaccaccgtgaaaagaattgccggttatttgcaggctatgcaggacaatgcacgggcggtgaatcaaacacagcagcgtgatgcttcccgatcccgcgcccagcaacgacttgtacgtcgtcaccagcgtcagcgttaa

SEQ ID NO: 4879 - DNA, 6465 bp, Escherichia coli
atgacttacagtgaaagcgatattgccattgttggcatgaactgccggtaccccggcgtgcacagcgttgcggcattcgaaacggtgcttcgcaccggatgcaacattttggaccccaaagtgaccccgagcaacggccacaatcacattacgctgaacaacgtctatgagcacatggcggagttcgatgccaacttttttggctacagccgtgcagaagcagaaatcatggatccacagcagcgcgtatttctgacctgtgcttgggagatgtttgaacaaagcggttacaacccgaagcagcacgatgcgcgcgtcggcctatatgcgggcgtgagtaccagcttctatttgcttactcacctgatgaacaacccagacaagcttgcacaactcggtggtctccaaatcatggtcggcaatgacaaagatcatttgacgtcccaactggcttaccgcctgaatattaccggcccttgcgtgacggttcaggccagttgtgccacctcgctggtggcagtgcatctggcctgcgaagggctgctgagcggtcagtgcgatatggcgctagcgggtggcgtcacgtttcgcatggaggagcagcgcagctatgaatcgcacggtgatgggctgcaagcagaggatggcctgattcatacttttgatgcgcaggcgagcggtacggtctacagcagtggtttgggcatggtgctgctcaaacgggctacagacgcgcaggtgcaaggggataacatccttgccgtcatcaagggaagcgccatcaacaatgatggcggtgcgcgcagtggttataccgtgccgggtgttgatggtcaggaagctgtgatgattgaggcgcatagcttggcggaggtgacgccgcagcaaattcagtatctagaactgcatggcagcggcacgccgttgggtgacgctatcgaattcgcggccatcaaacgtgtgtttgggacgccagcgccgaatgcgacaccgtggcgtctgggggctgtgaaacctaacgtgggtcacgtagaaatggcatctggcatcaccagtctcataaaaacggtgctgagtcttactaaccgggtgttttaccctacgctgaattttcaacgggctaatccgcaactggggttggaggacagcccgtttgaagtggtgtcccgtttaacgccttggccggagggcaccacgccacgcaccgctggtgtgagtgcgttcggattgggcggcaccaacgcacatctggtggtacaagcgccgttatcgacgccgcaggcgagggcgcagcagatggggccttgtgtcgttgtactctcggcaaaaaaccacaatgccctggaacagatgcaaaacgccctgctggcgaaactggccgcacatccagagatacgcttacaggacgtggcttacaccctgcgtcacgggcgtttctccgccccggtacgtaagtgtgtcatcgcagagaattgcacccagctagcccgacaactccgcgacgcaccgatggtggaggcaaccacgggttgcacgatctactggagattggggcaccgtttcgttgttgcactcgagacgcttagtgactggctggcgtgctctgaggtgttgtcacaggcggtgggacaactgctcgagcattttccgctcgaaccagcctgtctgcaagatctctcccctgcgcaacggacgtttatcagccagtatgcgctgatcgcgttgattgacgaacgggaaacgttgaatgtggtgctatgcggcgacggtgatggtggctatgctgccgccgtactacgaggagactgcacactagagcaagcatggcacaggttgaatgcgggccaaccgtttgatgatgtgccgacgaatcccctcttgcagcccgatgtctgctctttgatgctggacgacgcggcgagtgatgccaatcgcaccgcgctagaggcgttagggcagttatggttggctggcgtcagcctagattggcgctgggtggatgcggcggagcgtatgttgggcagtcaacgcatcgccctgccggggaccgtttttacaccgcagcgctattgggtcgaggccgtacggcctgccacgttctcccacgaatcgtcgaataatctcttatcccgcgcaacaaaatccgatattattgcagtggtgacggagatatgggaacgcacgcttggtgtcagcattgatgatcaccacgccagcttcttcgaactgggtgggcattcgctgttagcgtcaaccattttatatgatattcagcaacgttacggcatcacctgtacgctaagcgcattctttgccgatcccaccatcgagggattaagttgctatctgctcgaacaaggcggcagtgagacagcggtttcagcattgcctgatacggtctttgcccctgaccagcagcacctaccttttccgctgactgacgtgcaacaggcctattgggttgggcggcgaaaatccttgggattgggcaatatttccacccatatctatgtggaatatgaactacaggggctagatgaaacagcgttcaaccgcgcgctcaatgcggtgattgcgcggcacagcatgttgcgtgcaattgtcaacgatgacggtatgcagcagatattgccaaacgtgccggaataccacgttgccttctataccacccagtgcgaggatgcgtttcaacagcgttgccgtgagctgcgtgacaccctctcacatcagatgattgattgtagtcgctggcctctgtttcagatggaggtcgtggttgatccgcagcaaaaagcccggctacatgtatctatcgacctgctgatagccgatgcatggagtctggagttgttcattcgggaactagcttatcactaccgccatccgcaggcggcattgcctacattgacgtacagtttccgcgactatgtgctgaccttaaaatcctacgagaaaacgccgcagtttgaacgggcacgtgactactggcgcgcccgcatcgaaactctgccgccggggccacgattgccgctgcgtaccgaccccacgaagctggaaaaccccacattcgtgcgccgtagctattgtctatctcgtgctatctggcagcgcttgaaaacgcaggcgggtcagatgagtatcacgcctactacactgctgctcacggggtttgctcaggtgttggcgcgctttagttcctcgccgcactttagccttaacctgacgctgtttaatcgtctgccgttgcacgcagatatcaatcacttaattggcgattttactgcactgacgttgctggagattgatatgtcgcagggagaaaccttgcaggcgcgggcaaacgtgatccactctcaactgtggcgcgatttggataaccgcttgtttggcggtatccaggtctctcgactgctggtacaaactcaccgcgatccggcgaaatcggtgattcctatcgtgttcaccagcttgctcaatcaatatgaggcgagctgggaaacggatgatacgctgttcaaccaaccgcaggatgatctgtacagtatttcacagacaccgcaggtgtggctcgatcatcaggtaatggagcgtaacggggaattgcactttaattgggacgtggtggaacaattgtttgaaccggcgctaatggatcagatgttccagtgttattgccaactcctgcacgccctagcccagcgaccacagctctggcatgagactcaagatgtgctggcgctgcccaccgttagtgcaccggtcacgcaggctcctgcacctacggccttgttgcaccatgggttactgcgtcaggcagcactgacgccacaggaaactgcgctgatcagtcctatccgtgaattgacctatcgccaactgtcgacggcggcggatcatgtggcccgcgccctgttagcgctgggcgtgcagcatggcgaccgcgtggcggtggtgatggaaaaaggctggcagcagattgccgccgtacacggcattttacgactgggtgcggtctatctgccagtggatccggtgctaccgccacagcgtcgccagcttttgctgacggtgggcgaggtgcgggtacaagtaacgcagccgggtctcacgcaattggagccgtcgctgcccgtgctgatcatcgacgacggaatgctggacacgcctgctgcgccgttgcctgaagtggctggggatgtcacggatctggcctatatcattttcacttccggctccaccggtaccccgaaaggagtgatgatcgaccaccgtgcggccatgaacacgctggaagacatcaacgaacgctttggcctcaatgcgcaggatagggtgttcgggctgtcatcattgagctttgacctgtcggtttacgatgcctttgcgccttttatggtgggtgcagcgctggtactgccggaagcaggacgggaaaaagatccgcgtcattggcagacagttatggcacacggtcatgtaagcgtctggaatgcagtgcccgcactgatgcagatgctgtgcgaataccacagcggcgatcggatgagttatccgacgttgcgtctggcactgttgagcggcgactggatcccgctaacgttaccggagcagatgcgcgagcggctcaatgaaacgatggacatcatcagtctgggtggagcgaccgagtgcgccatctggtcggtctactacccgataggtgaggtggaatcgacgtggaccagtattccctacggtcggggcctgcgcaaccagccagtatacgtgctaaatgcgcaactggaggaatgtccggtcggggtggaaggagagatttgcattggcgggatggggctggcacaaggctacctgaacgacgcagagaaaacggcggcgagctttgtctggcgcgaagcgagtggtgagcgaatttaccgcactggggatcgcgggcgctactttgctgacgggcaagtcgcctttttggggcgcaacgatacccaagtgaaggtgaatggttaccgtatcgaactgggggaaatcgagcgctgcattgcgcgacatcccgatgtggagcagtcagtggtggtggcagtgggtaattctcaacatcgtcggctggtcgcttttgccaaactgcacgatcgccaccaggcgcaggcattgcaagctaaggaagcggaggcggcggcactggcgcagggtattattgtgaatccggcacagcgtctagcgttcaaactcaaggagccacatattcgcgcgctggatggtctgggcattgcactgacggcaccggcggatagcacacgttacatcaaacgccgcagctatcgtcatttcagcgcgcaaaaaaccacgctggcacagttggggcaattgctgtcgggcttggggcagatgcgtctacccggtctaccttttgccaagtatgcctatgcgtccgccggggggctatacccggtgcaaacctacgtgtacctgcatccagacaagatcgaagagggagtatccggtatttactacttcgacccgcgacagagctgtcttatgccggtagcaccagaagtcgagctgaacagtggttttcatgccggacctaatcagtctattgccgatcgggcggcattcacgctgtttatggtggctgatatggcggtgatctcgccattctatgggcaagaggcagcttggcacttctcggtgatggaagcaggtactctctgccatttactggaagaagatgcgccgcgctacggattggggctgtgccaacttgggatggcagacttttccgctgtggcatcgcattttcaattgtcgccacatcatcgctatgtccattgcaccgtggggggcgcgatagggcaagaggcggcaagtgctgcagcattgctgcgcgatttctccacctatgagaaaccgaaggaaaccgctgcgccgctggacatgcagagctacaaagatgccatgctgcgcggcctgcgtcagcaactgcctgactatatggtgccgagtgatctgatgttagcgaccgattttccgttaaccgctaacggcaagctagatcggcaaaaattacagctgcagggcgaacaaattgcccaccagcgtgacggcgtgggtccaatccaggtggacagtgcgttacaacagcggctggtggcgctctggcaggaggtactcggcgtgagccacgtgtcggccgaagacgatttcttctcgctggggggcagttctatagaattggtgcgtattcagcaggcacttgaggcgattatcgggcaggagattcccattgtcgatctgttccgtctgccaaccatcgcggatgtggcgcgttaccttgatgagcaactgcacaatctacccgccgcccacgatatcgtattagcgcaggctgaggtttcgcaggtcagcgctgcgcgcgagaatctggcgttgcggcgtaaacgtgcccaacagggagaaaagggcgatgagtga

SEQ ID NO: 4880 - DNA, 1464 bp, Escherichia coli
atgagtgagcagagctatcgtagcgcagggacactgttggcacagttggcgtccggagaaaccacctcagtggcgttggtgaatcactatttttcacgtatggcgcagtttaacaagccgttgaatgcggtggtgcagcagcactatgcgttggcgttggaggccgccgcgcgcgccgatcgtgagcgactggaggggcgcgcaaggggcgtgttgcacggattaccttgtactgttaaggagtcgtttgacgtgcaagggtggttaaccacgtccggtgcccattatctgaaagataaccgggcgacgcaggatgctccttccatcgcacgcttacgcgctgccggggcgatcctgatgggaaaaaccaatgtgccgatgatgactgccgattggcaaacctataacgatctgtatggcaccacccataacctgtgggataggcaacgttcacccggcggatcgtccggaggagcggcggtggcggtggcggcggatttcacccccgtggaatttggcagcgatttgtttggctcactgcgcattcccgcacactacacaggtgtctatgcccatcgttgtagcttggggttgatgtcggtcagaggacatgtgcccggtggtggtccgcaagcgactgatgagccggatctctcgacggcgggccccatggcgcgcagcgcggcggatctgcgtctgatgatgcgcgcattgagcacattctgggtggaaccgccgcgtattcccgattttagccgttatcaggccaaagcaaactaccgcgtgtgcacgtggtttagtgcgccccaccatgagatagatcaacagatcgcacagcgttttcaatcgtttatcgacaagttacgcgcacagcctggcgtggaggttgatgatgctatgcccgccgatatcgatcccgacgcactgtttgatatagcagtcaaactcagtggtcggctggtaagtacggcgctcaatggacgccagcgtcttacagccgggctggctgcgctgggcttcaggcttgtgggcaagctggcggatgtgcctgaggggataacgagctattaccagggcatgctgaaagacagtggcgaacagcggaatacagacaaactccgccacgaatacagccgggtgatagaaacccttttcgcgcgttatgacgtgttgttgacacctgtcagcccggtgctggcgtttgcgcacatgcagcagccggtgcgtaagcgcaagcttatcgtcaatggcgaaccgcaagattacaacgaacatttgttctggaacatgttagcaacggtttttggtttgcctgccaccgtttacccattggcgaaaacgatggatgagcttccgtgcggcatacagatcatttccgggcattttcacgatgatgtgacgattaactttgctgagttctgcgaaagcatcagtggcggattcacggtaccggaagggtactag

SEQ ID NO: 4881 - DNA, 1440 bp, Escherichia coli
atgacggtgaataagcttgagccagacaacggcacgccgaacgatgagctgttcacggtggcgggtatgtttgacggctcgctgtataaattactcctgcgcatggcgttgccgatgtttgtcggtatgttaacgcaggtgacctatgccatcgccgatattttttggctgagccacattgatgtcaccaacagcggcatcattgccggtgtggggctggttttccccgttggaatggggttatttgccatcgccaacggcattcaaatcggtatgggatctttgctgtcccgcgccatcggcatgcagcggttggatcgtgcacagcggattttgtcggtcggtatcatcatcgcgctattctttgcgatcgtgatcaccgtacttggctatgtttatgcccagccgctattgcgctcactgggggccacgaagagcatcatcggctacgcaacggagttctattattattcgctgctgaccgtgttcagcatcatgttgattggcgtcatgatggggctgtttcaaggcgcgggtaagatcatggtcatcatgaaggcctcattgttgggggcgttggtaaatattatgctcgatccaatcatgatctttgtattcgattttggtgtgaaaggggtggcattggcgtcgtttctggcgcaactgagtatggtcgcctatttcatctacacattgatgggattacatatcgggttgagtatacgcatcgcgttacgcccattctcctggaaaatctaccgagagtttctctccgtcggcatggcgcagatgctgatgcaactgatcattgcggtcggcatagtgatttataatttttttatcgtcaggctggacgtaaacgcgatggcagcgtttacgctcactggtcgcatcgactatttcatcatcacgccgatgctggctatcgcgaccgcgttgctgactgtggtggggcaaaactggggacacggaaatgtcacccgcacgctgaatgcctattgggccgccgtcgcgctggccttctctattgtgctggtgttagccgttatgcatattgtactggcaccctggatgtatcccctgtttactcgtgttgttgccgtgagtgactatgcggtactgcaaacccgtatcatggcactggcactaccctttgtcgctatcagcctgttagcaagtgaatattatcaggccattggtaagccttggtattcggtgttgttgacgctgatgcgtcacgtgtttatatctgtccctgtcgtatacctgctggcgattgtgttagagatgcgtattaccggcgtctattttggggcgatgagcggcacttttgtggctgcgttgttggcgtggcgtctgctgcgtctttcacctcgtctgctgcgatggaatcaggaggcggtgcgctcccaacacttggatatggaggtggcaccatga

SEQ ID NO: 4882 - DNA, 4368 bp, Escherichia coli
atgatgtcgggcaatccgttgtcgtggccacaggaacagtgccacatcattgatcaactgtatccttacagtgccgtaaacatcattggtggtgtggtcaccattgagggaattgtcgatctgccccgactacacgcggccatccagtccgccattcggcaatttgatgcgttgcgtatgtggtttgtgatgggagaggagagtgaagtggtcagccaagtgcagccttatcactggcgcgatatccgccatttgactttttccccagattatgacaaggagaacctacgcccagcggcgatcgaaacatttgttgatgagtggttccggcagccctttaccctgctggcgcacgatttgttcgagtttgtcacctttacgtgcggtgaacaatacagcggttatttatttaaagcccatcacggcattgctgatggttggtcaatggcgttgttgtcaaaccatgtcaagcgagcatacgaacagcaggacgtaccagatgatgcgtcaccagcctatagcgcatttctggcgcagcagcaatcttatcaggcgtcaacgcgctttgccgttgatcgtggctggtggcgtgactatatcgacgaataccgcgactgctttccagacagttcccccatcgttactactgagggcatcagttgttccacttggcttgagccagccatgattaaccgtctctacaggttgtgtaatcgttatggctgtacgcttaatacgctgtttattgcactcttcgctctctatcgcgccagagtatggggggaggaaaaaggcgtaataggcgtgccgttagccaatcggcatactcgcgaggcgcggcgttgctttggcatgtttactaatcaattgccgctggcctatcgactggtgcgcacggaacgattctgtgaacgggtggcctttttccagcgcgaactgaaacgcggttttaaacacagcaaatatcccattaccttattcaaccaggatttggcggaacaggggggagggaagttgcgggcgttcgattattgcgttaattattataactttacctatgaacgccacattgcaggtgccgcgcaacgcgtggagagttactacagcggcgagcagtcctataagctacagattgttttgcaaactgttaataatcataaagaaagccttaggttgagtctggaggcgctgcgtagcgctttcactccgcaccaactgacagcgatgaaaaatgggctgttggatttagtcactgcattggatcggcaacctgacgctcgtctaggcgatctcgaagtctatcctgcgccgcacgtcgcattggcatgtggctcactcaaaccctcatttacttcccgatttgcagcgcaagttgtggagcatggtgatcgcacagcactaattgataatgaacagtctttgacttatcggcagttggatgacgctgttgagcgggttgcgcgttatctgcgccaacaggggatcggacgcggtcaagtggttgggattatcgctgagcatagcgctcaaacggtgatggttatttatggtattttgcgctgcggcgcggcatttctgccgctaaatcccgcgttgccaacgacccgcctttacgccatgtgtcgtaaagcgcaggtagcgcatatcctttacgatccggcgatgcatgaattgacgcaggcgctggcgtttcccgcgtccagcttgctccaggccttagccacttcggcgcttgctagagaaccttggccagctattgaaccgcaggatctggcatatgtgctgtttacctccggatcgaccggcgagcctaagggcgtgcaagtctctcatggcaatctggctaactatctccatttcgccgccgaacgttactttacagcgcaggaccgggctgcgctctactcttcgctgtccttcgatttgaccatcactacgctgttcgcccccttatgtgtgggcgctagcatcagcgtttgtcggcacgccgagagcgaaacattgctgcgcatggccgtggttgatcagcccaacacagtgatcaaactgacgcctgcacacctgcggttgttgtgtgcggctggcataagcagtgagcagattcgtaccttggtggttggcggggaggatttcaagcgggatctggcgcgtaaggcggctgctctctttcctcaggccgtgatctataacgaatatgggccgacagaggccaccgttggttgcatgatctatcgctacaccgggcaagaaacgctgccttcattgcccatcggtatggcgatcgacggttgccaggtagcaatttgctccccttggggctgtccggtaccggaaggcgaaactggtgaattggtgatttatggcgcgtcagtgacgcagggctatatcgatgcgccgcaacaaacggccgccgcctaccttaaagataccaatggggtgatgattggctatcgcagcggtgatattggctacgccatcgctcctaatacgctggtttatcagggacgtaaagacgatcaggtcaaaattaatggctatcgtattgagctgtgcgaaatcgaacaagcgttgttgagcgcacctcaggtagaaagtgcggcggtggcggtgattgatgatgtgcaggggcagcacagcgggttgctagcctgcgtgacaccgtcatctgttgatgtagctaccgtaatgcaacatctgcgtcagcaattacccacctacatgcaacccaagcagtgctgtgctatcgcccaactgccgctgtcgcacaatggcaaggtggacgtgcgtcagatggtcgcaacggtccgaaacaccgcgcctgcatcgggtagcgagcggctgggagatgcggcgataaggcattcagttcgggtatgtgtggaaggggcgctggagcaaactgagtttgatgataacgaaaatctttatgtcttggggttggactccatcaagagtatccagattgcagcgcagctcaggcaccacggctggacgatgtcagcggtgcaggtgatggagtgtggaacagtgaacgccatctgtgagtttctcgctagtcatacaacggtgtcacagctcgcgcagtatgctcataacacccgtatcgatctacccgcattgcgttggtttacgcagttggcgttgccagtgcccaatgtttataaccatgtcattgtgctgaaagtgttgccgggctgcccgctcgagcagttacacaacaggctgcatacattaatccagcagcagccagctttgcacagtgcgctggacgctgaggggcggttgctagtatgcgaccctaatgtgtgttatcccaacgaggtgctcacggaatattcgacggcgcagtggacgttggcagaggtgatcgctcagtgcaatagcatgcttgacgtgacaaatggtcgagtctttacggcagctctgttacacgccccgcagcctgcgtctagcacgctggtactctgtgcccatcacttgtgcgtcgatatgcactcttggtatttaatcctcagcacgctggacgccgtcagcactgtcaatggcaccagcaacagcggactgcatcgctggaatgactatctggcgagcaaaacggtagattccgccacacacgaaagctggcgcacagtatgtcaaacgctaccgctgcatttcccacccgtgtcattgccagatgactcattacctcgtacgcgcgcttggcgtgaagactttcgccatccttgcgtcaggaggttgtttgaatccagtggtaataccgcgtacagcgccgaaacctatgtgctaacggcattggcgctggtgctgcgttactacagcgaagagccttggtgtcgcatcgagatggaaggcatgggacgcggctgctggcccgatgagcctgacgttgcggatacggtcgggtggtttactctattttatccttgggcgatccctctgcatggcgatatggcgacactgttatctgcgatcgcttccgatttggcaaaacgcacgcatggtgggggagattacggtctgctgcaaatgcggcatgcaccggaagactctcttgcgcaagggatccgaatgaattacatcggtgtgcaggcgcaaccttcactccgctattttcatattgatcactttaatagtgatatctataccgcgcctgaaaacgcgctcggctgcgtgctggagtttaatattgcgcgctcggcagctgatggtctctccttccactgccgtttcgatcccacgcgcattgcgctgaatgatgtgcaactcctgctggcgcgctacaagaacagcctcactgatctggatgcctggctgtgccaacacagcgccacgctgacgggcgcgccgactttgtggacactataa

SEQ ID NO: 4883 - DNA, 2460 bp, Escherichia coli
atggcaaaggatgattttacctgtggctcactggatattgccattattggcatgagcgggcgtttttccggtgcggaatcggtgcccgagtggtgggataagttgctggcgggtgaggagttcactcaaccgacatgcacagaagacgataatgggaacccttggattaggctgcgcaatataatcaccgctccctatgacttcgatgctgcatttttcaatattccgcctggcgaagccctgttgatggatccgcaacaacgaatatttcttgaatgctgctacaacgctcttgagcatgcgggctatattcccacgcaacttaagcgagtcggcgtctatggggcgacctacgccaataactattttatcgatcgcgtctatccatacctgaagatgagcggcgatcaccattatcttcaggcgcagattggtaacgaaaaggattacttgtgtgctcaggttgcctacaagttggggtttaccggacccgctgtgagtgtacagaccgcctgttccagttcgttggtggcagcatatttagcatgcgaggggttattgacttttcaagccgatgttgcgttggcaggtggggtcaccttgggttttttacaggcgcacggctacagtccgcaaggtgataagctggtatcgcaagacggacactgcgccccgtttagcgctgaggcgaccggcacggtatacagcagcggtgcgggagttgtggtgctaaaacgtcttgaggatgcactacgcgaccaagacagagtgtatgcggtgattaaaggaggtgcggtaaataacgacggcgggcgtcggctggggtttgtcgcccccagcgtagaaggacaggtagaagcgatcaatacggcgcttgccgccgcagaagtcgtaccgactgatatcgcactgatcgaaacgcacggtaccggtaccccgttgggtgatgagattgagcttgaagctctgcaccgggttttcgcaccggcatgtgcgccgcacagcattcaattgggtgcggtaaaagccaacttgggtcacctgggagtcgcttccggtatcgtcagcttaatgaaaaccgcactgacgctatatactggtttagttcccccgcagatcaacctagtaaataaacataaaaaactgttgcagccagcctcgccattttatctcagtgatgtagtgacttctgtcccacaaacgaaaaggatccatgccaccgttagttcgtttgggctgggagggaccaatgctcatttggttctgcaaaactggtgcgagacgcctgcgcaagcggtgcaagaaaatgagcgccgcctgtttttcttcagcgccaaaacgccattagcccttagacaacagttggatgctcattatcacgctctggcgacctatgcggaagcagataaagatcgtatcgcctatactctcgtgcaacgccgggcacatttcccgtatcgctgtgcgctggcggcagacagtgtggtagcgttgcgtgcaagtttggcgaaactgcgggatgctgacatgtcttttacccctatcaatatggaaactaccttggtgttcctatatccggaccgggacgataagctggagagtgccctgacgcatttgctggcttgtcaacctaacttgcgccagcggcaccagcgcctgtctcaggatgttgcacaaatctgcgaaccagccgattggacgccagcattgcgtcagtttatccagcaggtgagtcttagtgaatggctgatcgaacaaagtatctcgcctgtgcagcacatcggttacctgacgggggctgcagcagcgcagtatgttgcgcgcatcatctcactggaaaacgctgttcagcaggtgattgtggctgaaacgacaccggagcagacgctggccggcaacagtgaactgagcgaaatattggctaatctggcggtgacggagggaacgctgatgctggaaatcggtcgcgcggggacgttttccatattgtatcaccagcatgcgcagtgggttgggcaaacagtattttcccccatgctgaatacggatacgcctgaggacatcctgccgctgttgggcactctttggcaacgaggagtgactatttgtttaccggaaatgccagccgtgcagactataggcttacccggttattcgtttgatcgcgtccggtatgaaattcagtccagtgatgcgagagagaacgctatgttaccagtgagttatttgtcggtcagcgactttgtggagaaaacctggcgttcattgttatgcatcgatcattatgacgaacacgcggttattttcgaatacggagcgacctcgatgcacgttatctctttcgtcgacagctgtaaccacatttataaaatcggactgactgccgccgatatttatgccagacccgctatccgtgagcacagtgaatttatctccgaatgtgttgatggtattttatga

SEQ ID NO: 4884 - DNA, 1506 bp, Escherichia coli
atggaacacgttagcattaaaacattatatcatctcctgtgctgtatgctgctctttatttccgctatgtgcgctttggcgcaagaacatgagcctatcggggcgcaagatgagcgcctgtcgacattaattcaccaacggatgcaggaggccaaggtcccagccctttccgtaagtgtgaccattaagggggtacgtcagcgatttgtctacggtgttgccgatgtggctagtcagaaagcgaatactctagacacagtttacgagctgggatcgatgagtaaggcgtttaccggacttgtggtgcaaatactgattcaggaaggcagactccggcaaggggatgatatcattacctatctgccggaaatgcgcttgaattatcagggaaaacctgcttccctgaccgtggctgatttcctttatcatacatcaggattgcctttttcaacactggctcggctggaaaaccctatgcctgggagcgctgtggcacagcaactgcgcaacgagaatctgctgtttgcgccgggtgcgaagtttagctatgcctccgccaattatgatgtgttgggcgcggtgattgaaaatgtgacgggaaaaacctttacagaggtcattgcggaacgactcacgcagccgctgggcatgtcggcgactgtggcagttaagggggatgagattattgtcaacaaggcaagcggctataaactgggattcggcaaacccgttctgtttcatgcgcctctggcccggaaccatgttcctgccgcctatatccatagcactctgcctgatatggaaatatggatagacgcctggttgcacagaaaggctttgccggcaacgctgcgtgaggcgatgagtaacagttggcgtggtaatagtgatgttccgcttgccgcagacaatcgtatcctctatgccagcggttggtttatcgaccagaatcaaggcccttacatcagtcacggtgggcagaatccaaacttttcttcttgcattgcgttgcgaccggatcagcagattggcattgttgcgctggcaaatatgaattcgaatctgatactacagctttgcgcggatatcgataattatctgcgcattggcaaatatgctgacggcgctggtgatgcaattacagccaccgatacccttttcgtctacctcacgttgttgctgtgtttttggggggcggtggttgtagtgcgcggtgctttccgtgtttatcgcgcaacggcgcatggccctggaaaacagcagaggttacgtttacgcgtacgtgactatatcatcgccttggcggttcctgggctcgtggccgccatgctctatgtcgcaccgggtatactatctccaggacttgactggcgttttatcttggtatggggtccatcgagcgtgttggcgataccgttcggaattatcctgttagctttcgttctgacattaaatcatcaaattaaacgaattctattacacaacaaggagtgggacgatgagtaa

SEQ ID NO: 4885 - DNA, 723 bp, Escherichia coli
atgagtaatatcagtttgtattgtttgccatattcaggtggttctgccgccatgtattataaatggcgtagcgtgctgtcggacaatattactttgcggcctttagaacctgcggggaggggaactagaatacgccagccgctgtgtcttacgatggtggatgccgtcgctgacctttatcaacaatttgtgaaacactacacaggtggagactacgccatttttgggcatagtctcggagggatcatggccttcgaactggtgcattatattctcgatcatggacatgacatgccatgcgcgctgtttttttccggctgtcgcccacccgatcgggcctctcatgaagtaatactgcataccttgcccgatcaggcgtttatggaagagatcgtcaagctgggcggaactccggttgatgtctttcgtaataaagagttaatgacaattttcacccccatcattaaaaacgattatcggctctatgagcagtatgtatttcaggccaaggcgcgcacattaacctgtccgatcgtgctatttcatggcgatgctgacaatctggtaatgcaggatgaattacttgcatgggaaaaattcaccacacgaaagacgcggactattatatttcctgctgccgatcatttttttgtcgataagcattttgaacaggtggtaggttatgtgaaccagacgattgaatcactcgaaatagtagggtag

SEQ ID NO: 4886 - DNA, 513 bp, Escherichia coli
atggctgttccatcatcaaaagaagagttaattaaagctattaatagtaatttttctttattaaataagaagctagaatctattacgccccaactcgcctttgaacctctattggaagggcacgcgaaggggactacgattagcgtagcgaatctggtttcctatctgattggctggggagagctggtgttacactggcatgaccaagaggcaaaaggaaaaactattatttttcctgaggaaggatttaaatggaatgaattggggcgtttagcacagaaattctaccgtgactatgaggatattacagagtacgaagttttattggcacggttaaaggaaaataagcagcaactcgtggctttgattgaacgattcagtaacgatgagctttacggtaaaccttggtataataaatggacccgaggtcgtatgattcaatttaataccgcctcgccttataaaaatgcttcggggaggttaaataaactgcagaaatgtcttgcagaatag

SEQ ID NO: 4887 - DNA, 1272 bp, Escherichia coli
atgtcccttaacgacgcaaaaatccgtagtctcaagcccactgataaaccctttaaagtctccgattcccacggtctgtatctgctggtcaaaccaggcggttcccgtctctggtatcttaaataccgtattaatggcaaagaatcccgtattgcactgggtgcctaccctgccgtctccctgtctgacgcccgccagcagcgcgaaggcatccgtaagatgctggcgctgaacatcaacccggcgcagcaacgtgccgctgaacgcggctcgcgcatgcaggagaaaatgtttaaatccgtggcactggagtggcacagtagcaagaaaaaatggtcgcagaataccgcagatcgcgtgcttgcccgtctgaacagacatgtctttccgaccatcgggcatctaccagttaccgagcttaaatcacgtcatttcattgaattactgaaaggcattgaggaaaagggcttgcttgaagttgcgtcccgctcgcggcaacacctcagcaacattatgcgttatgctgttcatcaggggttaatcgaaatcaacccagctgcaaatcttgacggcgtgacggcttctcccgccagacgacattatcccaccctgccactggagcgccttcctgagctgcttgaacggattgacagttatcaccaaggacgggaactcaccaggcttgcagtcctgctgacgttgcatgtgttcattcgctcaagtgaactgcgctatgctcgttggacagagattaacttcagaaatcggatctggacgatacctgccacacgcgaagcgattgcaggcgtacgttattccagtcgaggtgccaaaatgcgtacaccgcatattgtgcccctttctgagcaggttatctctattctgaaaaggattaaggaaatatctggcgggtatgaactggtgttccccggctatcatgacccctacaagccgatgagtgaaaatactatcaataaggcacttcgccagatgggatacaacacgaaacaagatatctgcggtcatggtttccgggcaatggcgtgtagcgcgctgatggaatccggtttatggtcgcaagatgcagtggagcgtcagatgagtcaccaagagcgcaacactgtgcgtctggcttacattcataaggccgaacatatggaagcccgcatggacatgatgcagtggtggtcggattatctggatatgtgcagtgaaatctgggtgcccccgtacatctggagtcagcaaaacattaatctcgcagtaacctga

SEQ ID NO: 4888 - DNA, 1455 bp, Escherichia coli
ttgaatatctcctctgctttacgccaggttgttcacggcactcgctggcactctaaacgcaagagctacaaagtgttgttctggcgcgagataaccccgcttgctgttcctatcttcatggagaacgcctgtgtcctgttgatgggggtcctgagcacttttctggtcagctggctgggaaaagatgcgatggccggcgtggggttggcggacagcttcaatatggtcattatggctttttttgcagctatcgatcttggtactactgtcgttgtagcatttagtctcggtaagcgagatcgacgacgagcgagggtggcgacgcggcagtcattggtgatcatgacgttgtttgccgtactgttggcaacgctaattcatcattttggcgaacaaattattgatttcgtcgcgggtgatgccacgacagacgttaaagcactggcgttgacttatctggagctgaccgtactcagttatccagcagctgccatcactcttattggtagcggggcacttcgtggtgcagggaatacgaaaataccgctactgattaacggtagcctgaatattcttaatattattattagcggcatattgatttacggccttttctcctggccgggactgggatttgtcggggctgggttgggtttaaccatttctcgttatattggcgcagttgcaattttgtgggtgctggcgattggttttaatcctgcgctaaggatttcgttaaagagctattttaaaccgctgaattttagcattatctgggaagtcatggggattggtattccagcgagtgtcgaatcagtgttatttaccagtggtcggttattaacccaaatgttcgttgccgggatggggaccagcgttattgccggaaattttatcgcgttctcaattgcggctcttatcaacttacccggaagtgcgctcggttctgcttctacgatcattacaggccgaaggttgggggtagggcagatagcgcaagcagagattcagttgcggcatgtgttctggctgtccactcttggattaacggccatcgcctggctaacggctccctttgccggggttatggcatcgttttacacccaggatccacaggttaaacacgtcgttgtgattctgatttggctaaatgctttatttatgcctatttggtccgcctcatgggtgctacccgctggatttaaaggtgctcgtgatgcccgttacgccatgtgggtttcgatgttgagcatgtggggttgtcgggttgtagtcggttatgtgctgggaatcatgcttggctggggtgtggttggcgtctggatgggaatgtttgccgactgggctgtgcgggccgtgctgttttactggcgaatggttactggacgttggctatggaaataccctcgatccgagccgcaaaagtgtgaaaaaaagccagttgtatcggaataa

SEQ ID NO: 4889 - DNA, 498 bp, Escherichia coli
atgtggactattccagccgaacgcgaacctctgcccggcgtaaaattctcacaccggggctccaagatgcgaacaccacatcttgtgccactcagcaaacaggctgtagccatactgacagaacttcagacatgggctggtgaaaatggtctgatatttacgggtgcacatgacccgcgtaaaccaatcagtgaaaatactgtaaataaggccctgagggtgatggggtatgacacaacccaggaagtctgtggccatggattccgggcgatggcgtgcagtgcattgattgaatcaggtttgtggtcccgcgatgctgtggaacgtcagatgagccatcaggagcgtaatggtgtacgtgctgcgtatatccataaagcagaacatctggaagaacggcgactgatgttgcaatggtgggccgattttctggatgcgaaccgggagaagggtatcagtccgtttgaatatgcaaagattaacaatccattaaaatag

SEQ ID NO: 4890 - DNA, 153 bp, Escherichia coli
atggtttccatgagagcaggtaataacccccggtgttttcggctgctctggtatccccgtccaacacaggcaattattataaacggtaaaaaatgtattcactgttatgaaatcaacagtcctgacgtactgtttaatgagcttgtgttctga

SEQ ID NO: 4891 - DNA, 3516 bp, Escherichia coli
atggatgaaaatgctttagggtttgcctcatactggcgcaactcgcttgcggatgctgagtcaggaaagggcagttttgaacggaaagacgccaaaaatttcactcactggcatgggatagcggcgggacgtcttgacgaagcgattgtcagtaaattttttgagggagaaaaagacgatgtcgaaacggtcgatgtcgtcttgcgcccaaaagtttatttccggttactgcagcatggtaaggaccgttccgcaggcgcacctgatattgttaccccgctagtgacgccagccttgctaagccgtgagggttttttatatccgacgccagcgacctccattcccagagacctgcttgaacctttgccaaaaggagcattttcgattggtgagattgggcagtatgacaaatacaagacaatccatacctcgttctctatcaactttgatgacagcattgataagactgccgaaacggatgaagaacgggaagcacgatatgcagccttgcagcaggagtggcgtcaatatctggatgattcagagaggctgctgaagaacgttgccggcgactggattaaaaatcctgagcaatatgaactcgctgagcacggttatattgttaaaacggcgcaatctggtggtgccagtttccatatcctttcgctttatgatcacctgcttgtttgcaagaaggatgtgccgctcttcaatcgcttcgcctcgcgagaggttcatgctgcagagtctttgctggccccaggagcaaaattcagcgacaggcttggacactccggagataagtttccgctggcaaaggctcagcgcgatgccttaagccattttctggatgcaagacatggcgatatccttgctgttaatggacctccgggaaccggaaaaaccacgctggtgctttctatcatcgccacgcagtgggccagagcggctctcgaaaaatctgagcctccggttattatcgcgacttcaacgaacaaccaggctgtaacgaacattatcgaagcgttcgggaaagatttttcacagggcactggtgcaatggccggacgatggttacctgagctgaaaagcttcggcgcttattttccctcaagcactcgtaaagctgaggcagccaaaaaatatcaaactgaagatttcttcaaccaggttgagtcaaaagagtatgtagaggatgcactgctgttttatctcgagaaagctaaggcagcttttcctgaaaaagagtgttcatcccctgaaaaggtcattgaactcctgcatggtcagttggtagcaaaatccgagcaattgaaaagactgaacgcaacatggcaaacgttaagccaggtacgggctgcgcgtgagcttattgctaatgatattgagcaatatctcgataatttaaataaattactttccggacaagaacaaaaagtcactctactgaagagtgctaaaacggaatggaaaaaatatcgcgccggtgaatcactgatctattcattattttcctggctcccagcggttcgtagtaagcgacagtaccaaatacagctgtttctcgaagataaattaggcgcgctgattgcaggaaatcagtggtctgatcctgaaactatcgaacgtaatattgatgggctgctcaattccgctgagcgcgagcaaacaacataccggcagcagattgactccgcccatgaaatcgttcttaaagaacagcaggcggttcaggagtggcagaggctggcatttgatttagggtatgagggcgacgaggaactgagcttctcacaggccgatgaactggctgatacgcagattcgcttccctgcatttttactgacgactcactactgggaaggtcgttggctgatggatatggccagaattgatgatctgcaggaagagaagaagaaaaaaggcgctaaaggggtaaccgcccgttggcaacgtcgaatgaaactcactccatgtgtggtgatgacatgctatatgctgcccggcaatatgcagataagtgagcacaaaggacaacgtaaattcgagaaaagttatttgtatgattttgccgatttactcattgtcgatgaagccgggcaggtgcttcctgaagtggctgctgcctcgtttgcattagctaagaaggcattagtgattggcgatacggagcagatcccgccaatatggagtattgctcccgcgattgatgtcggtaacatgcttgcggaaaaaattctgtctggcagtacgcaagaagagattaccgagaaatatacggcaatcgcagaccttggtaaaagtgccgcatctggcagcgttatgaaaatagcgcagtttgcttcgcgctatcaatatgatcccgaactggctcgtggtatgtacctatatgaacaccgccggtgcttcgataatattattggatactgtaatacgctctgctatcacggtaagttgttgcctaaaagagggcgtgaagagagcaatttaatgcccgcaatgggttatctccatattgatggtaaaggagagcaggcaagtagtggaagtagatataatttgcttgaggctgaaacgatagcggcctggttggcagagaaccagcaaaatattgaagcgcattacggcaaatcgcttcatgaagttgtcggtatcgtgacgccttttagcgcgcaggtatccactatcaaacaggcgctgggtaaacaaggtatcagtacgggcgcgaatgaaaagtcgctcacagtgggcaccgtgcactctcttcagggagcggaaagagcgattgttatattctcgccagtctattcaaaacatgaagacggcgggtttattgatagcgataacagcatgctgaatgttgcagtctcccgtgcgaaggatagcttcctggtcttcggcgatatggatctgtttgaggtccagccagcctcatctccacggggattactggcaaaatacctctttgagtcagagaagaatgcgctctcttttgattataaagagcgtaaggatttaaaaacttccgagaccaaaatctacacacttcatggtgtggagcagcatgataacttcctgaatcagacgttcgaaaataccgataaacacatcacgatagtttctccatggctgacctggcaaaagctggagcaaaccggttttcttgattctatgattgcggcgtgttcacgtggtattaacgtcacgatagtcactgacagaagctacaacactgaacataaagattttgagaagcgaaaagagaagcagcagaaccttaaagcggcgctggagaaactgaatgcgctgggtattgctacaaagctggtaaaccgtgttcatagcaaaattgttattggtgatgatggtttgctatgcgtgggatcgttcaactggtttagtgcgacacgggaagcgcgatatgaacgatacgatacctcaatggtttattgcggtgataacctgaagggtgagattgaggctatttataatagtcttgagaggcgtcaggtttag

SEQ ID NO: 4892 - DNA, 1500 bp, Escherichia coli
atgaatatcagaaaactgttttgtccgggcaatacaccccggattttattgtttttattcttttttgttgtttctgtcataaccacaattgcatgcggatacactgagaagaatgccaccgggaatgtgttgctgctgttccttcttctgctccttgcacacagaaataccctcacatccattacagcgctgttatttctgttctgttgtgcactgtatgcgcctgccggtatgacgtacggtaaaatcaacaacagttttattgtcgcgttgttgcagaccacaactgatgaggcagcggagtttaccgggatgattcctgtttatcattttctggtcagtgccgcgattcaggtattcatggtgattttctggcgaacacaccgccgtggtcaccgtaactggctggcactgctgctgttcgtattatgctcagtaaacagctggccgttgcggatggttaaaggaactgttgtggggacaactgacacattgcgtgaaatgcagcgttataaacaactgaatcagcacggggctgacaactggaaaatcctgccgggtgtaccgttgtatgacacgattgttatcgtcactggtgagagtgtgcgcagggattatatgtcggtatatggctatcccgtgccaaccacgccgtggctgaatacagctcccggtttatttattgacggctatacatcggcagcagccagtaccgtaccttccctgagccggacactgatttatgactatgagcagaaccctgactccggcaacaacgtggtggcgctggcagcaaaagcaggatacagcacatggtggatatccaatcagggaaaactgggggagcatgatacacgcatctctgttattgcttctgatgcggagcataccgttttcctcaagaaaggcagctttgcttcccgtaaaacggatgacatgttgttgttacaggaaacagaacgtgcactggcggataaatcctctccgaaggtgatattcctgcacatgatggggtctcatccgaacccgtgtgaccggcttcactcctggccgaatcattacctggagcagtatccccgaaaggttgcctgttacctcgccagcatcagtaaactggataactttctcggtcagcttgatggtatccttcgccggcattcccgtcatttcgccatgctttacttttctgaccatggtctgtcggtcagcgacagcgctaatcctgttcatcatgatggtcatgtgcagggaggctacagcgttcccctgattattaccgccagtgacatcacgtctcatcagtccgtcagcagaaaaatcagtgcccgtcatttcgcaggtatttttcagtggctgaccggcattcgtactgaaaatataccgccattcaatccgctgacagacgaagataatgaacccgttatggtttttaacggggagaggaatgtaccggcagacagtctgaaaccgcagcctctgattcttccggacagaagataa

SEQ ID NO: 4893 - DNA, 747 bp, Escherichia coli
atgaaaaaggttattgttgtttcagcgcttgctatggcgggggtattttcagcccaggctctggctgataggggtaaaacaggcttttatgtgaccggtaaagctggtgcttcggttgtgactcagactgaccagcgcttccgtcaggactttggggatgatgtttataagtataagggcggtgataaaaacgatactgtatttggtgcaggccttgcggtgggctatgatttttatcaacattacaatgttcctgtgcgcacggaagtggaattctatggccgcggagctgcagactcccattatacactggatacatggcattctccgatgggggatggtggtcgggaagacacacagaacaggctcagtgtgaataccctgatggtgaatacgtattatgacttcagaaacagcagtgcattcactccatgggtgtctgttggactgggttatgcacggatacatcataaggcaacatatactgatacctcctggaataaatctggtgaggtgagcgatatttctgcgttgcattactcgggatatgataacaatttcgcatggagcattggggccggtgttcgctatgacataaccccggatatcgctcttgacctcagctatcgctatctggatgctggtaaatcctccctgtcttacaaggatgcagaaggggataaatataaatcagaggctgacgttaaaagtcacgacatcatgtttggtgtgacttataacttctga

SEQ ID NO: 4894 - DNA, 1011 bp, Escherichia coli
atgaaaaaatggttcccagctttgttattttccttgtgtgtgtctggtgagtcctctgcatggaataatattgtcttttactcccttggaaacgttaactcttatcagggagggaatgtggtgattactcaaaggccacaatttataacttcgtggcgcccgggcattgctacggtaacctggaatcagtgtaatggtcctaggtttgctgatggttcctgggcttactacagggagtatattgcgtgggtagtattccccaaaaaggttatgaccaaaaatggatatcccttatttattgaggttcataataaaggtagctggagtgaggagaatactggtgacaatgacagctatttttttctcaaggggtataagtgggatgagcgggcctttgatgcaggtaatttgtgtcagaaaccaggagaaacaacccgtctgactgagaaatttgacgatattatttttaaagtcgccctacctgcagatcttcctttaggggattattctgttacaattccatacacttccggcatgcagcgtcatttcgcgagttacttgggagcccgttttaaaatcccatacaatgtggccaaaactctcccaagagagaatgaaatgttattcttatttaagaatatcggcggatgccgtccttctgcacagtctctggaaataaagcatggtgatctgtctattaatagcgctaataatcattatgcggctcagactctttctgtgtcttgcgatgtgcctgcaaatattcgttttatgctgttaagaaatacaactccgacatacagccatggtaagaaattttcggttggtctggggcatggctgggactccattgtttcggttaacggggtggacacaggagagacaacgatgagatggtacaaagcaggtacacaaaacctgaccatcggcagtcgcctctatggtgaatcttcaaagatacaaccaggagtactatctggttcagcaacgctgctcatgatattgccataa

SEQ ID NO: 4895 - DNA, 501 bp, Escherichia coli
atgattcgtttatcattatttatatcgttgcttctgacatcggtcgctgtactggctgatgtgcagattaacatcaggggaaatgtttatatccccccatgcaccattaataacgggcagaatattgttgtcgattttgggaatattaatcctgagcacgtggacaactcacgtggtgaaatcacaaaaaccataagcatatcctgtacgtataagagtggctcaccctggataaaggtcacaggtaatgcaatggctgggcagactaatgtactggcaacaaatatagccaattttggtatagcgttgtatcagggaaaaggaatgtcaacacctcttacattaggtaatggttcaggaaatggttacagagtgacagcaggtctggacacagcacgttcaacgttcacctttacttcagtgccctttcgtaatggcagcaggacactgaatggcggggatttccggaccacggccagtatgagcatgatttataactga

SEQ ID NO: 4896 - DNA, 522 bp, Escherichia coli
atgaaaaagataagaggtttgtgtcttccggtaatgctgggggcagtgttaatgtctcagcatgtacatgcagttgataatctgaccttcagaggaaaactgattattcctgcctgtactgtaagcaacacaactgttgactggcaggatgtagagattcagaccctgagtcaaaatggaaatcacgaaaaagagtttactgtgaatatgcggtgtccctataatctgggaacaatgaaggttacgataacggcaacaaacacttataacaatgctattttagttcagaatacatcaaacacatcttctgatgggttactcgtttatctttataacagtaatgcaggaaatattgggactgcgataactttagggactccatttacgcccggaaaaatcacaggtaataatgcagataaaactatatcacttcatgccaaacttggatataaagggaatatgcagaatttgatagccggtcctttctctgcaacagcaacgctggttgcatcatattcgtaa

SEQ ID NO: 4897 - DNA, 537 bp, Escherichia coli
atgataaaaagcacaggcgctcttttactgtttgccgcactgtctgccggacaggcaatagcctcagatgtggcattcaggggtaatctgcttgacagaccctgccatgtgtccggtgacagtctgaataaacatgtcgtcttcaaaacccgggcgtccagggatttctggtatccgcccggacgttcgccgacagagtcgtttgtcatcaggctggaaaactgccatgcaacagcagttggcaaaattgtgaccctgacctttaagggaacggaagaggcggccctcccgggccatctgaaggtaaccggagtgaatgccggccggttaggcattgcactgctggacaccgatggcagcagtctgctgaaacccggcgcttcccataacaaaggccagggggaaaaggttaccggaaacagtcttgagcttcctttcggcgcgtatgttgtggcaacgccggaagccctgcggacgaagagtgtggtacccggtgattatgaagcaacagccacgtttgaattgacatatcgttag

SEQ ID NO: 4898 - DNA, 582 bp, Escherichia coli
atggttgtgaataaaacaacagcagtactgtatcttattgcactgtcgctgagtggtttcatccatactttcctgcgggctgaagagcggggtatatacgatgacgtctttactgcagatgagttgcatcattaccggataaatgaacggggggggcgcaccggaagcctggccgtcagtggtgcactgctgtcctccccctgcacgctggtgagtaatgaggtgccgttaagcctccggccggagaatcactctgcgtcagccggagcacctctgatgctgaggctggcaggatgtggggacggtggtgcacttcagcccggaaaacggggcgttgcgatgacagtctccggctcactggtaaccggtcccggaaccggaagtgctttacttcctgaccgtaagctatccggctgtgaccatcttgttatacacgatggtgatacctttttactgtgccggcctgaccggcggcaggaggagatgctggccgcctggaggaaaagggcgacacaggagggtgagtattctgatgccaggagcaatccggccatgctgcgtctgagcataaaatatgagtaa

SEQ ID NO: 4899 - DNA, 720 bp, Escherichia coli
atgattcgaaaaaagattctgatggctgccatccccctgtttgttatatccggggcagacgctgctgtttcgctggacagaacccgcgcggtgtttgacgggagtgagaagtcaatgacgcttgatatctccaatgataacaaacaactgccctatcttgctcaggcatggatagaaaatgaaaatcaggaaaaaattattacagggccggttattgccacccctccggttcagcgccttgagccgggtgcgaaaagcatggtcaggctgagtaccacaccggatatcagtaaacttcctcaggacagggaatcactgttttattttaatctccgggaaataccgccgaggagtgaaaaggccaatgtactgcagatagccttacagaccaaaataaagcttttttatcgcccggcagcaattaaaaccagaccaaatgaagtatggcaggaccagttaattctgaacaaagtcagcggtgggtatcgtattgaaaacccaacgccctattatgtcactgttattggtctgggaggaagtgaaaagcaggcagaggaaggtgagtttgaaaccgtgatgctgtctccccgttcagagcagacagtaaaatcggcaaattataataccccttatctgtcttatattaacgactatggtggtcgcccggtactgtcgtttatctgtaatggcagccgttgctctgtgaaaaaagagaaataa

SEQ ID NO: 4900 - DNA, 2520 bp, Escherichia coli
atgcgtggaatgaaagacagaataccttttgcagtcaacaatattacctgtgtgatattgttgtctctgttttgtaacgcagccagtgccgttgagtttaatacagatgtacttgacgcagcggacaagaaaaatattgacttcacccgtttttcagaagccggctatgttctgccggggcaatatcttctggatgtgattgttaacgggcaaagtatttctcccgcatcgttacagatttcatttgttgaacctgcgttgtcaggagataaggcagaaaaaaaattgccgcaggcctgtctgacatcagatatggtcagactgatggggttaacagcagaatctctggataaagttgtttactggcatgatggtcagtgtgcggattttcatgggttgccgggagtggatattcgtcctgataccggagcgggcgtattacgcatcaatatgccgcaggcctggcttgagtattctgatgccacctggctgcctccctcacgctgggacgacggcattcccggactgatgctggattataacctcaacgggacggtttcccgtaattatcagggaggagactctcatcagttcagttataacgggactgtgggggggaatctggggccctggcgcctgcgggctgactatcagggaagccaggagcagagccgctacaacggggaaaaaacgacaaacagaaatttcacatggagtcgcttttatctgttccgtgccattccacgatggcgggcaaacctgacgctgggcgagaataatatcaactcagatatattccggtcatggagttatacgggagccagcctggaaagcgatgaccggatgctgccgcccagactgcgaggctatgcaccgcagattaccgggattgcggagactaatgcccgtgttgtggtgtcgcagcagggacgggtgctgtacgactcgatggtccccgcagggccattcagtattcaggacctggacagttcagttcgcggacgtcttgatgttgaggttattgaacagaatggacggaagaaaacctttcaggtcgatacagcctcggttccttatctgacgcgtccgggacaggtccggtataaacttgtctccggtcgttcccgtggatacgggcatgagaccgaagggcctgtatttgcgaccggagaggcatcctgggggctcagtaaccagtggtcgctgtatggcggggctgtgcttgccggtgattataatgcactggcagccggtgccggctgggacctgggtgtgccggggaccctttccgctgatatcacgcagtcagtagcccgtattgagggagagagaacgtttcagggaaaatcctggcgtctgagctactccaaacggtttgataatgcggatgccgacattacgttcgccgggtatcgtttctcagagcgaaactatatgaccatggagcagtacctgaacgcccgctaccgtaatgattacagcagtcgggaaaaagagatgtataccgttacgctgaataaaaacgtggcggactggaacacctcttttaacctgcagtacagccgtcagacatactgggacatacggaaaacggactattatacggtgagcgtcaaccgctactttaatgttttcggactgcagggtgtggcggttggattggcagcctcaaggtctaaatatctggggcgtgataacgattctgcttacctgcgtatatccgtgccgctggggacggggacagcgagctacagtggcagtatgagtaatgaccgttatgtgaatatggccggctacactgacacgttcaatgacggtctggacagctacagcctgaacgccggccttaacagtggcggtggactgacatcgcaacgtcagattaatgcctattacagtcatcgtagtccgctggcaaatttgtccgcgaatattgcatccctgcagaaaggatatacgtctttcggcgtcagtgcttccggtggggcaacaattaccggaaaaggtgcggcgttacatgcagggggaatgtccggtggaacacgtcttcttgttgacacggatggtgtgggaggtgtaccggttgatggcgggcaggtggtgacaaatcgctggggaacgggcgtggtgactgacatcagcagttattaccggaatacaacctctgttgacctgaagcgcttaccggatgatgtggaagcaacccgttctgttgtggaatcggcgctgacagaaggtgccattggttaccggaaattcagcgtgcttaaagggaaacgtctgtttgcaatactgcgtcttgctgatggctctcagcccccgtttggtgccagtgtaaccagtgaaaaaggccgggaactgggcatggtggccgacgaaggccttgcctggctgagtggcgtgacgccgggggaaaccctgtcggtaaactgggatggaaaaatacagtgtcaggtaaatgtaccggagacagcaatatctgaccagcagttattgcttccctgtacgcctcagaaataa

SEQ ID NO: 4901 - DNA, 501 bp, Escherichia coli
atgacccttcctgaatactggggagaagaacacgtatggtgggacggcagggctgcttttcatggtgaggttgtcagacctgcctgtactctggcgatggaagacgcctggcagattatcgatatgggggaaaccccggttcgggatttacagaatggtttttccggacctgaaagaaaattcagcctccggctcaggaactgtgaatttaacagtcagggtgggaaccttttctctgattcccggataagggtgactttcgatggcgtccggggtgaaacgccggataagtttaatttatccggtcaggcaaaaggaattaatctgcagatagctgatgccagggggaatattgcccgggcagggaaagtaatgcctgcaataccattgacgggtaatgaagaagcgctggattacaccctcagaattgtgagaaacggaaaaaaacttgaagccggaaattattttgccgtgctgggattccgggtcgattatgagtga

SEQ ID NO: 4902 - DNA, 549 bp, Escherichia coli
atgattaagtcggttattgccggtgcggtagctatggcagtggtgtcttttggtgtaaatgctgctccaactattccacaggggcagggtaaagtaacttttaacggaactgttgttgatgctccatgcagcatttctcagaaatcagctgatcagtctattgattttggacagctttcaaaaagcttccttgaggcaggaggtacatccaagccaatggatttagatattgagttagtaaattgcgatattacagcttttaaacaaggtcaaccagctaaaaacggtaaggttcaattatcttttactgggccacaagtaacggggcaggctgaagaattagcaactaacggcggtacgggcacagctattgtagttcaggctgcaggcaaaaacgtttctttcgatgggactgcaggtgacgcttatcccctgaaagatggtgataatgttcttcattatacagctcttgtgaaaaaagcgaatggcggtactgtttctgaaggtgctttttctgcagttgcaacctttaatttaagttaccagtaa

SEQ ID NO: 4903 - DNA, 273 bp, Escherichia coli
ttgctgaatatacgcgagagcgtactgttgcccggctctatgtctgaaatgcatttttttttactgataggtatttcttctattcacagtgacagggtcattctggctatgaaggactatctggtaggtgggcactcccgtaaggaggtctgcgagaaataccagatgaataatgggtatttcagtacaacacttgggagacttatacggctgaatgctcttgcagcaaggcttgcaccttattatacagatgagtcgtcggcatttgactga

SEQ ID NO: 4904 - DNA, 222 bp, Escherichia coli
atgaagaatgaaatactggaatttctgaacaggcatgatggagggaaaacggcagaaattgcggaggcgctggcggtaacggattaccaggcccgctattacctgttattactggaaaaagcaggtatggttcagcgctcaccattaagacggggcatggcaacatactggcttctgaaaggagagaagcaggcggggcagagttgttcttccacaacttaa

SEQ ID NO: 4905 - DNA, 237 bp, Escherichia coli
atgttgacctcaataacaggccacgacagtgtattgctgcgtgccgacgatcccctgatcgacatgaactacatcaccagtttcactggcatgacagataaatggttttacaagctgatcagtgaaggtcatttccctaaacccatcaaactggggcgcagcagccgctggtacaaaagtgaagtggagcagtggatgcagcaacgaatcgaggaatcccggggggcagcagcatga

SEQ ID NO: 4906 - DNA, 576 bp, Escherichia coli
atgaatgctattccttatttcgacgatagccttgcccccttctggccatcttatcagagcaaagtcatcggcgttcttgagcgtgcgctgcgtgaacagtcctgctcccgggtacggcggatcctgcttcgtctgccgtgggaacatgacaacgccttcaacagcagacagacctggtttggtatggattttatcgaaaccgtcagtgcgctgatgaatgcgaaacccggacgcgacctttgctggctcctgacccgtcatccggaaaagccggaataccacgtggtgttatgcgtcagacaagagtatttcgacggccctgaactggatcggctgattctggatgcctggagcaacgtactgggcttcgcatcaccgggtgaagcagcaccgtaccagaagcagatcacccgggatgtggtgctggacagtcgttcaccggactgcgaagacatcctcaaagacttgatctgggcgttcagtgatttcgcccgcgatcgtcgtggtgtgtgcgatccggaagcccgttgcctcgccggtaatcccggctatcccggatctgcaggactgttctga

SEQ ID NO: 4907 - DNA, 567 bp, Escherichia coli
atgcctaaatcttacacaccaaactggttttttaccgctttacttgacaatcacatcaatcaaatgatggcacgctattcctgcctgcgggccttacgcatggatttcttctacaggaaagatacgcctgatttcttacaacctgatcatcgctggcttgaattgcagttgcgtatgctgctggagcaggtggaacaatttgaaaatatcgttggcttcttctgggtgattgaatggacggctgatcatggttttcatgcgcatgcggttttctggatcgatcgtcagagggttaaaaaaatatatccctttgcggagcggattacggaatgctggcggtctattacgcataacagcggttcggcgcactgctgtacatatcagccgcattatacatacaacatcaacattcctgtgcgccataacgagcctgaaagcatcgataatattcgcggtgccctgcattatctggcgaaagaagagcaaaaagacgggctgtgtgcctacggctgcagtgaagttcctgagcgtcctgcagcagggcgtccacgtaagcttcagaagtga

SEQ ID NO: 4908 - DNA, 174 bp, Escherichia coli
atgtctaacactagttctaattttgagattgctggcgttttgttaggaaaagaggtgcgtaaacgtaaaacacctcagaaaaaaaatcgcaattattcaacagactatggagcctggcatgactgtgtcccacgtggcacgtttgcatggcattcagcccagcctgttgtttaa

SEQ ID NO: 4909 - DNA, 279 bp, Escherichia coli
atgactgtgtcccacgtggcacgtttgcatggcattcagcccagcctgttgtttaagtggaaaaaacaatacctggaaggaagcctcactgctgttgctgccggtgaagacgttgttcctgcttctgaactggccgctgcgataaagcagattaatcagcttcagcgtttactgggcaagaaaacaatggaagttgagatcctcaaagaagcggtggagtacgcacaatcgcgaaaatggatagcgcatgtgcccttgttaccttcggacaaggaatag

SEQ ID NO: 4910 - DNA, 714 bp, Escherichia coli
atggatagcgcatgtgcccttgttaccttcggacaaggaatagctccggtaagccgtgttctgggcgtgtcgcgtgcgcagctaacattacggatgaaggcatctgataacaagccagataaacggcgtcagagacgcgatgaggctgcggatgcagaagtcttatcgcgcatcctggatatcattggcgatatgccagcatatgggtatcgccgtgtctgggcgatactcagacggcagtcccgaaatgaaggcttgccgttcgtgaatgcaaagcgcgtttaccgaataatgagcgaaaacagcctgttgttgttacatgacaaaccatcacggctgcagcgggaacataaaggccgaatatcggtgaaggaaagcgaccagcgttggtgttctgatggcttcgagttcggttgtgatgatggcgaaaaagtccgggttacgttcgccctggactgttgtgatcgtgaagccatcgactgggcagccagtacgggaggttacgataaagcgacagtacaggatgtgatgtcaggagcgatagaaaaaggctttggcgataaagtgccggaagagcccatccagtggctgacagataacggttcagcgtacagagcgcatgaaacacggcagttcgccagagagctgaatctggagccctgcacgacggcagtcagcagtcctcagagtaatggaatggcagacggttcgtga

SEQ ID NO: 4911 - DNA, 192 bp, Escherichia coli
atgcccgtctcgatgatccgcgtagtacacgacgccttgtatcactggcctcttctctcgctcatgccaggtcgtgatcgattcagatgccattttgcaccttcagaatttgagcttgctgcagttgttcctgataaggatctggataaatatgacgagtatttaccagagtctttgcttgcgaaagggtag

SEQ ID NO: 4912 - DNA, 645 bp, Escherichia coli
atgatgaagaaagatatggcggacagtgtgtcaatgacatggcaacttttatgcgatgaacatggttttacccgggagcactacaatcagctgaagaagttcagcccggagacattacgtgaaattattgctgaaatagccagctgtcatccatcaaccagtgtattgctcaggaataagtggctgacaccgccggaggatattctggagcagattacccgtgaatacgaacgaagaatacaaaactgtccatcgttcaggagcgagaaggaagcggaatcctggttaaatgaactgtcttttgctgtgattgctccgctataccgtgttgtccccgaacaaacagaacaggttgagtcctttgttctgcagcttattgccgagcaggagcgggtttgggagcttattttaaccaatgatggttattcatggcattgcgcactttatgatatattatttcatctggttttacgaaatatggaagaccagcctgaacatcagagacagcgaataacaaaaatacttaatgagtccgatacaagacgggtggcagaagagattaaattccggattcaatatcttcaggatgaagaacaaaagagagttttaagtgatctggtaaatgtcctgatttcaaaaagataa

SEQ ID NO: 4913 - DNA, 564 bp, Escherichia coli
atgggggattctgtgacacctgaagtggaggtactgagtgacatgattcgtcagtacttcagccaggaacgatcagaaaaagagactatacaggctctgaatcatctgcgcagggtacttcatgaagtcagcccttttgcacaggagcctgtggactgtgtgctgtgggtgaaagcagatgaggtggtggccaacgattataaccccaatgtcatggcgccgggtgagaagaaactgctgaagcagtcactggagaaagatggtttcacccaacccgtggtggtgtcggcggagaagaacccctatctggtggtggatggttttcatcgtcagttactgggcagggaagcaggtacaggaaaacgcctgaaaggctggttgccagtggcctgtattaatccggaaagaaagggacaggccacacgtatggcggccaccatacggcataaccgggccaggggtaaacaccagataacctcaatgtctgatattgtcagggacctgtcacgcctgggctggacggatgaacgcattggtacagagcctggggatggaccaggatga

SEQ ID NO: 4914 - DNA, 1233 bp, Escherichia coli
atgaatgataatttattaacggagaaagtccttactggagagaatgttctgcgtgcagcaattgctcgtattgagtggatttttgaaacatttccatcagtttgtctctctttttccgggggtaaagattccaccgtgcttttccatcttttggctgatgtggcccgcaggaaaaaacgtcgtttctctgtactgtttattgactgggaggctcagtaccagtgcaccattgaacatattcagaagatgcgggaaatgtaccatgatgtgacggaaaccttttactgggtggcacttcccctgaccacggtaaacggcgtctcgcagtttcagccggagtggatatgctgggagccaggagtgacctgggttcgccagccaccggaagaggccattacagacatgacgtatttcccattttatcggtatgccatgacgtttgaagaatttgttccggcattttcttcctggtttgcagacaataaatgtggtgtggcagtactgaccggtgtccgtgcggatgagtcccttaaccggttcatgggactggtgtcccagcgcaaactgagatacgccgatgataagccctggaccacggcatcgcctgaagggttttactacaccatgtatccactgtatgactggaaaactcgtgatatctggatatatcacaccagaacccgtgccatctacaatcccctgtatgacctgatgtaccgtgccggcgtaccgttacgcaacatgcgtgtctgtgaaccttttggtcctgaacaacgtaagggactgtggctttaccatgttctggagccggatacctgggccaggatgtgtgagcgggtatcaggggctgccagcggggcactttatgccaatgaaagcggtgcttattttgccctgcgcaagcgcatatcaaaaccagcccatcatacctggcgcagctacgcgatgtttctgctggatgtgatgccggaaagaacagcagaacattaccgcaacaagatagctgtctatctgcgctggtatcagacgcggggcttcccggatgacattcccgatgaacaggagaatgacctgggctgccgggatatcccgtcctggcgacgtatctgtaagactcttataaagaatgatttctggtgccggacgctgtccttcagcccgaacaaaccccggcactatgaacgttacctgcagcgtatgaaggaaaggaggaatgaatgggggattctgtga

SEQ ID NO: 4915 - DNA, 645 bp, Escherichia coli
atgaatggtaaatataatgtcaggagtgaattgttagctcgttgtatcggaacaggtagattgaaaggagatgtggtaagtgattttattgggtttaatggtagcaaacagataggttatgttttattaactttatttttaataaaagtaataaatcctgatttgctctctcattatcgtatatttaatcgttttttgcgttatgagagaaaagttatggatatatataattctttgagtgatatagaagttgattgtatttgccgggaagtgatggctatatatgaacatactcagcgatgctgcaacgaaaagaaaattacaactgtccagttaggcaggaaacttaatggcaggtatgcagatatgattgctgagttaaaagaaacagcagagatgaggggggagggggtaatttcttttgagatggatatattgaattcttttaatgatgcgaatgaatatcacggacgtgttaaactggaattggatatacctgcttcagatatattatattgccatgattttattgattcagaacatataaactcctggctggttgaaccacatgagtgggtggttattaatcgttctcttactgggattgttacagtgccagtatcagcaataaaaatctcttattga

SEQ ID NO: 4916 - DNA, 1449 bp, Escherichia coli
atgcgaattagatcactggatgatgcagcgactacagaagagacattgctcactcttgcgttgactcccttagtgaaagagttgaaggctctggagtgtaataaagagtcacaaatatcaaaagttaaagcagctttggttaaagctgtaaatgagatcgctgaacctcatcaagaacgattttcttctatttctcgacaaattcagacagggtttcaacatgtctttcctgctcttggtgttcagctcagtgttgaaatgaatccacctgagcttaaaatagacaatttattaaagcaggggtctggtttattagtcaaagaggctgcgggaaactctcgcattgggcaacaggggacaggagcaagacgagctcttttttgggcaatgctccaggttcataatgaaattagccgacaaaatgaaaagcgagaagctcttcttaaatcctttagagaacaacttaaaaaagaggtgaggaaaaatgtaaaaagtgaaaatataaatcttctgaaacaacaaatagatgctattgaaaatggcgcccctgttcctgaagatacagacgatccagccttgcccggatatattcttttaatggatgagccagaaaatgcgttacacccaatggctgccagagcggcgcaagcgcatctttatgaacttggtaaacatccagattggcaggtgctattaacaactcattcaccatactttataaaccctcttgaggatcatactacgattgctcgtatgcaacgttcaacagatgggaaatcactttctccacgcttgtatgtggctgatgaagctaacttctcacttgatgagaaagataatttacaggcactacaacttacagatattggttttgctgaaatattttttgggagttatccaattattgttgaaggtgatactgaacatgcggcatttatttcagcaatcactaaagaaaaacatgagatgtcaggtaaggtaagtattgtcagagccagaggtaaggcggttctggttcctttgataaagatgttaaatcattttaaagcagattttgggattgtacatgatattgattggccttatcgtagagatggttcgaataatggttcatggacgcttaatacgatcattagaaatgagattataaaatgcaggaataatgggaaaaaagtatatcatcgttggagtgcccccgattttgagcgttttttaggtggtgaggagttggggaaagataaaccctatacagcatttaatcgaatttcgcgcgatgaaaaattaaaagaaaagattcaaaatcttataattaatttgtttgaaggggagtgttatgatcctgatgactttgaacccgatgatgattttaatgctcaactcatggaacaattaaaaatatgggcaaaaaataatggtgaaagtgataatgttcgcgttatgggatgctga

SEQ ID NO: 4917 - DNA, 888 bp, Escherichia coli
atgccactgctggataagctgcgtgagcagtacggggtcggaccgctatgcagcgaactgcatattgccccgtcaacgtattaccactgtcagcagcagcggcatcatcctgataaacgctgtacccgtgcgcagcgcgatgactggctgaagagagagatacagcgcgtatacgatgaaaatcatcaggtgtacggtgtgcgtaaagtctggcgtcagttgttacgggaaggaatcagggtggccagatgtacagtggcgcgcctcatggcggttatgggacttgccggtgttctccggggtaaaaaggtccgcactaccgtcagccggaaaaccgttgccacaggtgaccgcgtaaaccgtcagttcgtggcagaacgtcctgaccagctgtgggtggctgattttacttacgtcagcacatggcagggcttcgtctatgtggcgttcatcattgatgtgtttgccggatacatcgtggggtggcgggtctcatcgtctatggaaacgacattcgtgctggatgcgctggagcaggcgttgtgggcccgtcgtccgtctggcaccatccatcacagcgataaaggctctcagtatgtgtcactggcctatacggagcgactaaaagaagccggattactggcatcaacaggaagtacaggcgactcgtatgacaacgcgatggctgagagcatcaatggtctttacaaagcggaggtaatacaccgtaagagctggaaaaaccgtgcagaagtggaactggccacactaacgtgggtggactggtataacaatcgacgattgctgggaaggctgggccatactcctccggcagaagcagaaaaagcttattatgcttccatcggaaacaatgatctggcagcctga

SEQ ID NO: 4918 - DNA, 327 bp, Escherichia coli
atgactaaaaaaacacttttttcccccgaagtccgtcaacgggcagttcgtatggttctggaaagtcagggcgaatatgactcacaatgggcgacaatttgttccattgctccaaagattggctgtacgccggagactctgcgtgtctgggttcgccagtatgagcgggataccggaggcggtgatggagggctcaccaccgctgaacgtcagcgtctgaaagagctggaacgtgaaaatcgtgaactgcgccgcagtaacgatatccttcgccaggcttccgcttattttgcgaaggcggagttcgaccgcctctggaaaaaatga

SEQ ID NO: 4919 - DNA, 453 bp, Escherichia coli
ttgtcggaaagcgaaggcgctaacttctggctgtcagtattaagtgatctgcaaaaccgtggcgttgaagacattctgattgcctgcgtggatgggctgaccggcttccctgaagcgataaacagcatttatccgcagacagaggtacagttgtgcgtcattcaccagatacgtaactcgattaaatatgtggcgtcaaaacaccataaagcgttcatggccgacctgaagccagtgtatcgtgcggtgtcaaaagaagcagcggaaacggcgctggatgagctggaagcgaaacgggggcagcaatatccggtggtgctccagtcctggcgccgcaagagggaaaatctgtcagcgtacttccgctatccggcgaatatccgcaaggtgatctacacaaccaacgcgatagaatcagtccaccgcaagttcaggaaactgaccaaaacctaa

SEQ ID NO: 4920 - DNA, 2049 bp, Escherichia coli
atgaagaacaaatatatcattgctccgggcattgccgtgatgtgttctgcagttatatcatcaggttatgccagttctgataaaaaagaagatacgcttgttgttactgcctccgggttcactcagcagctcagaaatgccccggccagtgtctcagtcattacttcagaacaactgcaaaaaaaaccggtttcagatctggtcgatgcagtaaaagatgttgaagggattagtatcactggtgggaatgaaaaaccggatatcagtatacgtggtctaagtggcgattacacgctgattctggtcgatggacgacgtcagagcggtcgggaatccagaccaaacggcagcggcggttttgaagccggatttatccctcctgtggaagcaattgaacgcattgaagtgatccgtggccctatgtcttccctgtatggttctgatgccatcggaggggtcattaatatcataaccaaaccagttaataaccaaacatgggatggcgtacttggacttggggggattattcaggaacatgggaaatttggtaactcaaccacaaatgacttctatctgtcaggcccattgattaaggataaacttggtcttcagctatatggaggaatgaactatcgcaaggaagatagtatctctcagggaacaccggcaaaagataataagaatataacggcaacgctccagtttactccgactgaaagccagaagtttgtttttgaatatggaaaaaataaccaggtgcatacattaacaccaggtgagtctctcgatgcctggactatgcggggaaatcttaaacaaccaaacagtaaaagagaaacgcataattcacgtagtcactgggtagcagcatggaatgcccagggcgaaatactgcatcctgaaattgctgtttatcaggagaaagttattcgtgaggttaaatcaggtaaaaaagataaatataatcattgggatcttaattacgagtcaagaaaaccggaaataaccaacacaatcatagatgcaaaagtgacggcatttctgccggaaaatgtactgaccatcggaggtcaatttcagcatgcagagctccgtgatgactcagccacgggtaaaaaaacgacagaaacacagtctgtttcaattaaacagaaagctgtttttatagaaaatgaatatgcagcaacggattctctcgccctgactggaggactgcgtctcgataatcatgaaatctatggcagttactggaatccaagattgtacgctgtttataacctgaccgataatctcacactcaaaggggggatcgcaaaagcatttcgggctccttcaattcgtgaggtgagtcctggatttggaacactgacgcagggtggtgcctctattatgtatggaaacagggacctgaaaccggagaccagtgtaaccgaagagatcggtattatttatagtaatgatagtggtttttcggcgagcgcgacgctgtttaatactgattttaaaaataagttgaccagttacgatataggtacaaaagatccagtcaccgggttaaacacttttatttatgataatgtaggtgaggcaaatatcagaggggtggagcttgcaactcagattcctgtgtatgataaatggcatgtatctgcaaactatacatttactgactctcgtcgaaaaagtgatgacgaaagtctcaatggcaagtcgctgaaaggggaacctctggaaagaactcccagacatgcagccaatgcaaaactggaatgggattacactcaggatattacattttattcatctctgaattatacgggaaaacaaatctgggcagcacaaagaaatggtgctaaggttccccgcgttcgtaatggattcacatctatggatattggtctaaattacctgattctgccagacacgctgattaattttgccgttcttaacgtcacagacagaaagagcgaggatatcgataccattgatggtaactggcaggtcgatgaaggacgccgttattgggctaatgtaagagtatccttctga

SEQ ID NO: 4921 - DNA, 741 bp, Escherichia coli
atgaatcaaccaatacacaatgcttactggttatcccgttttgacatccttctcgacagtgccctggcgcagcaccgtgccgtctcgttaatccgagtggatttacgtttccctgagtatatgcctgtcaccatcatggatcccgatccggattcagcggtgatttctcgtttttttgcatccctgaaagccaaaattcaggcttaccagcggaaaaaaagatgtgccaatcagcgtgtgcatgcaaccagcctgcgttatttctggtgccgggagttcggcaagatgtatggcaggaaacattatcacgtgatattactgctcaacaaagatacctggtgctcgatcggggatttcagcgaaccgtcttcgctggcgacgatgatccaggaggcatggtgcagcgccctgcatcttgagccctggcaaggcgatggcctggtccatttttccaggtggacgccttcccgtaaaccagcatcgtctgatgctcgcccttcttccgatgacacgcctttgtcgggtggatgttctgatacctggaaggcttcagacaaaaagccgggtgaagccgctgttctctggatcaagcgtggtgatgtgggagcgctgcagaaagcccggaacagagccagttatctcgtaaaatatgaaacgaagttgcataacggttccgggcaacgtaattatggttgcagtcgtgggccgggacgtctactggatggcaggagaagcctgtaa

SEQ ID NO: 4922 - DNA, 789 bp, Escherichia coli
atgaaacaatataaaggcggttataacgtgaatagatatgactggaaaaataaaacaactgagcatttattgaatgataataatctggcagataatcacatacctgaatggatcagaaaaaatgaaattgcagcattctggttctggttaattatgtctcatacagttcccgaaaaacttaaacttaataatgaatctgagttcaattctgccttgaagggggtgatcgttatgaaggataaccccatgacaattattccttcaagtcatgaaacacgactgaatgttatagggaaatggattaatgcgttaatcctttatggggaagcagatcggattatctcaataatgcatcaaaactggctgggactcgaaaagagaaacgaagccaaatggcttaaaaagaataccgaacaactgaaatgggcatgggaatatattgatgcacgtatctcacccacatatctttcctggtttaatcctgtaaatgataacgaaagatatattgccattgtagttttactaaaaatgttattccccacagacacaccctgtttactgacgccaaaagaatttcacctaggattcgctgcaaaagaaagatttttcgacaagatgcacaatgcattcagaaaacagtttatcgatggaaaaaaagataaacgggtacaaatcaacgtaaagatatcgccatccgcaaaaagcgctctggacagactgaccagagcgcggaaaacaacacagcaggctattctggaacaactgattctgtacggtagactggattaa

SEQ ID NO: 4923 - DNA, 951 bp, Escherichia coli
atggcatcactgtcgattaatacgctacgccgaatgagcatttgtaaaagtcaggcctggaaagatacccagcgaatactgaagcgtagtggacttgtgtacagaggggaacggtcagaatcgtttgatcctgagaaacattttaatcgttatacggtgcgttatctgtacctgcttaacataattgcgcttaagataaggtcggttagtaaattttcctgttggatcgaggtgggacaatgccatcgtatgactggtaaacatttatctcttaatgccccgccttttatgctgattccgcgtagtatccggagaaaagtggatggattcagacagtcaaaaggtgaagcaaccccaaaatcggctcaaccgttcacgggcagtttgtatgaggttttgagcaaggagagcgattcagctaagctggacgcatggattgctgaactgcctctgaacttgcaggaggagggaaaggaaatctcagtcatgggatttagtccacgggctgtggcccgacctgttcttcggtcagcatccccgacgtttgaactgttttatcaggagtatcaatccctaagattaaaatctgtttttaaatttgaaccaagatttgaacaacttttaacaagactgagctttagaaaacaatcaattctcagaaaacaacaatacagggttaaatcgcaattactggagagactggggaatgtgttgtttttcacgtcgctttataaccagggatgtttagaggagtttataaatgcacttgtggaaaaggaggacatttatctgaaaatgtcccctggggaggaaaaggtgaaagcacaccagaaaatggttaactacattgaagcgttctgcaacaaaatgacggaaaaatacctgatgcccgcagcaagcagacactacaaaaagaagaaaatcgctaggagcgaaagtggtgaaagttaa

SEQ ID NO: 4924 - DNA, 885 bp, Escherichia coli
atgtcattcagccattcttccctctccgcacaagtgaaatcatatctgacgtttcttcctgaagaaattcgccagaaaatccttgaacatctccacagtgttattcattacgagcccgtgattggcattatgggtaaatccggcaccggcaaaagcagcctgtgtaatgccatttttcagtcccgtatctgcgccacgcatcccctgaacggctgcacccgccaggctcatcgtcttaccctgcaactcggtgaacgcagaatgacgctggtcgatctgcccggcattggtgaaacaccgcagcatgatcaggaataccggacactttatcgtcagctgctaccggaactggatctgattatctggatcctgcgggcagatgaacgcgcgtatgccgccgacattaccatgcatcagtttttactgaatgaaggcgcagatccctcgcgttttctgtttgttctcagccatgccgatcgcgtgtttcctgctgaagaatggaatgccacagaaaaatgcccgtcccgtcagcaggcgctctcactggcgacggtgacagcccgggtggcaaccctgttcccttcatcatttccagtactcttcgttgctgcacctgtcggctggaaccttccggcgtttgtgtcgctgatgatccacgcactgccaccacaggcaaccagcgcggtgtattcacatatccggggagaaaaccgctctgaacaggcccggaaacacgcacaacagacttttggtgaaaccatcgggaaaagttttgacgacgccgttgcccgtttcagttttccggcctggatgttacagcttctgcgcaaaacccgggaccgcattatccacctgctgatcacactgtgggagcgtctgttctga

SEQ ID NO: 4925 - DNA, 177 bp, Escherichia coli
atgcagcagaaaaaatattcttttaattatctgatttttaagcatgatttcataaaaagaagaatgctcgttaatccagcgacacatcctgtcggcgtgagtgtgtcagaacagacgctcccacagtgtgatcagcaggtggataatgcggtcccgggttttgcgcagaagctgtaa

SEQ ID NO: 4926 - DNA, 681 bp, Escherichia coli
atgtctgataatcgttcccggcatgatcgcctggcggttcgcttatcactcattatcagccgactgatgaccggagaatctctgtcactaaaaacactgtcagatgaatttggcgttacagaacgtactttacagcgcgattttcatcagcgtctggttcacctggatttagagtacagaaatggcaggtacagcctcagacgacagagcagcccgggtgcgatccctgaaatgctttcttttatacagaataccgggatcgcacggatacttccgctccggaacggacgactgataacctgtcttaccgacaaccaggagccctctccctgccttatctggctaccggcgccggatatcactgcaacgttccccgagtgtttctcgcaactcatcctggcaataagacagtgtatccacatctctctgatggctgagcgatggtatccgtcactggagccctgccggctcatttattacagcggtagctggtatctgatcgcgttacagaagggaaaactgcaggtctttcctctggcagatatcaaatcagtcagcctgacatcagaacggtttgaacggagaggccacatccacagtctggtcgctgaagagcgttttatctccgccctgccacatttctctttcatccataaacttatcaacacctttaacctgtga

SEQ ID NO: 4927 - DNA, 678 bp, Escherichia coli
atgaataccagagctctttttcccctgctgttcactgtggcatcattctccgcctccgccggcaactgggctgtcaaaaacggctggtgtcagaccatgacggaagatggtcaggcgctggtaatgctgaaaaatggcacgattggtattaccggcctgatgcagggatgcccgaatggtgtacagacgctcctgagcagccgtatcagtattaacggtaacctgatccccacatcacaaatgtgtaatcagcagacgggattcagggctgttgaggtggaaatcggacaggcgccggaaatggtcaaaaaagccgttcactccatagcagagcgtgatgtgtccgttttacaggcatttggtgtacgaatggaattcacccgcggtgatatgctgaaggtctgtccgaaatttgtcacatcacttgccggtttttccccgaaacagacgaccactattaataaagattccgtcctgcaggctgctcggcaggcatacgctcgggaatatgacgaggaaacaacagaaaccgctgattttggctcttacgaagtaaaaggcaataaggttgagtttgaagtattcaatcctgaagaccgtgcgtacgacaaagtgaccgtcacggttggtgctgacggtaatgccaccggcgccagcgttgaatttatcggaaaatag

SEQ ID NO: 4928 - DNA, 234 bp, Escherichia coli
atgtcggactgccaccctgttttattgcccgaaggccctttctcacgcgaacaggcggttgccgtcacaacagcttaccgcaatgtgcttattgaggatgaccagggaacgcatttccggctggttatccgcaatgccgaagggcagctacgctggcggtgctggaattttgaacctgatgccggaaaacagctaaattcgtatctcgccagtgagggaattctcaggcaataa

SEQ ID NO: 4929 - DNA, 819 bp, Escherichia coli
atgcaattagccagtcgttttggtcatgtaaatcagatacgccgtgatcgtcccttaactcgtgaagaactgatgcaggtcgtccccagcgtattcggggaagataagcacacatccagaagcgagaactatacctggatccccaccatcacagtgctggaaagcctgcagcgggaaggttttcagccattcttcgcctgccagacccgtgtgcgcgacccgggccgccggggatacaccaaacacatgctgcgtctgcgccgtgacggggagataaacggacaacatgtccctgaaatcatcctgctgaactcccatgacggtacctccagctaccagatgctgccgggttacttcaggttcgtctgccagaacggatgcgtctgtggtcagtctctgggggaagtgcgtgttccacaccggggaaatgtagtggagaaagttatcgacggggcttacgaggtggtgggggtttttgaccggattgaagaaaagcgtgacgccatgcagtcgctggtcctgccgccaccggcacgccaggcgctggcacaggcggcactgacttaccgttatggtgacgaacatcagcccgtcaccaccgccgacattctgacgccgcgacgccgggaggattacggtaaggacctgtggagcgcatatcagaccatccaggagaatatgctgaaaggcgggatttccggtcgcagcgctaaaggaaaacgtatccacacccgtgccattcacagcatcgacacggacattaagctcaatcgcgcattgtgggtaatgacagaaacgctgctggagaacatgcgctga

SEQ ID NO: 4930 - DNA, 486 bp, Escherichia coli
atgaaaactgtttctcagaacacctgtacactttctgcttccgtagtcacagcttcagagaatgaccagcctcaactggttgccactctcgttcctcatgaacagcgcatcagcttctggccgcagcattttggcctcattccacagtgggtgaccctggaaccccgtgtcttcggctggatggaccatctttgcgaagactactgcggtggtatctggaatctgtacaccctgaacaacggcggggcatttatggcacccgaaccggatgacgatgatgacgagacatgggtactgttcaatgccatgaacggtaaccgtgctgaaatgagcccggaagccgccggcattgctgcctgtctgatgacgtacagtcatcatgcctgtcgtacggagtgttatgccatgacggttcattattaccgtctgcgggattacgccctgcagcatccggaatgcaacgccattatgcgcatcattgactga

SEQ ID NO: 4931 - DNA, 489 bp, Escherichia coli
atggtccggcacccggatatccaccaggcccagtgcctgtaccagacgttccgtgataaggcggtctgccttgctgggtgtgacttcaccggacgggtgattgtgcgccagtaccacggcagcggcattgtggtacagggcgcgtttaatcacttcccggggatggacttccgtgcggttgatggtgccggtgaagagggtttcaccggcaatcagcttattctggttgttcagatacagcacccggaattcttcacgctccagtcccgccatgttcagaatcagccattcccgtgccgcacgggtggaggtgaaggccacaccgggttcatgaagatggcggtccagggttttcagggcccgctgaatgaggctgcgctcgccgggcgtcatctctcctggcagaaaggaaagctgttgcattgttccagcccctttcagtcaatgatgcgcataatggcgttgcattccggatgctgcagggcgtaa

SEQ ID NO: 4932 - DNA, 1539 bp, Escherichia coli
atggcaatcactaaatcaactcctgcaccattaaccggtgggacgttatggtgcgtcactattgcattgtcattagcgacgtttatgcaaatgttggattccactatttctaacgtcgcaataccgacaatatctggctttctgggagcatcaacagacgaaggcacctgggttatcacctcgtttggcgtagcaaatgccattgcgatccctgttaccggcaggctggcacaaagaataggcgaattaaggttatttttactttcagtaacctttttttcgctgtcttcattaatgtgtagtttatcgaccaatcttgatgtgctgatattttttagagtcgttcaggggttaatggcggggccgttaattccactgtcacagagtttattattaaggaattatccaccagaaaaaagaacatttgctctggcattatggtcaatgaccgtgattatcgctccgatatgtgggccgatattgggcggctatatttgcgataactttagctggggttggatatttttaatcaatgtccctatggggattatcgtcctgacattatgcttaaccttacttaaaggacgagaaactgagacttcaccggtcaaaatgaatctaccaggactgaccctgttagtgctcggtgttggtggcttgcaaattatgcttgataaagggcgcgatctggattggttcaactcgagtacaataatactactaacagtagtatcagttatttctctgatctctttagtcatttgggagtcgacctcagagaatccgattcttgacctcagtttgtttaagtcccgtaatttcaccattggtattgtgagtatcacatgcgcgtatttattttactctggagcgatagttcttatgccgcagttactccaggaaacgatggggtataatgcgatatgggccggacttgcctatgcgcccatcggtatcatgccgctattaatatcacctttgataggacgttatggcaacaaaattgatatgcggttgttggtgacatttagttttttgatgtatgcggtttgctattactggcgttctgtgacatttatgccaacgattgattttacaggcatcattttgccacagttttttcagggattcgccgttgcctgtttctttttacccttaacaacgatttcgttttcaggcttgccagataataaatttgccaatgcctcgagtatgagtaatttttttcgcaccttgtcaggatcagttggtacgtcgttgacaatgacactgtggggacgccgcgaatcgttacaccatagtcagttgacagcaaccatcgatcaatttaaccccgtgtttaattcatcgtcacaaattatggataaatactatggttcgctttcaggagttcttaatgaaattaataatgaaataactcagcagtcactttctatttctgcaaatgagattttccgtatggcggctattgcttttatcttacttacggttttggtttggtttgcgaaaccgccgtttacagcgaaaggcgttgggtga

SEQ ID NO: 4933 - DNA, 201 bp, Escherichia coli
atgcaacacgaactacaacctgattcactggttgatttgaaattcatcatggccgatactggcttcggtaaaaccttcatctatgaccggattaagtccggcgacctgccaaaagccaaagttatccacgggcgagcaagatggttatatcgtgaccattgtgaattcaaaaataagctcttaagccgcgccaatgggtaa

SEQ ID NO: 4934 - DNA, 168 bp, Escherichia coli
atgcacttccgagtcacaggtgaatggaatggagagccattcaacagagttatcgaagcagagaacatcaacgactgctatgaccactggatgctgtgggcgcagatagcacatgcagacgtaactaatattcgaattgaagaactgaaagaacaccaagccgcctga

SEQ ID NO: 4935 - DNA, 285 bp, Escherichia coli
gtggctaacctgcaacttgccgttaaaggtgaatacttcgatgccatgattcgcggagagaaaacggaagagtatcgcctgtgtaatgactactggaataagcgaattatgttccgcgagtatgaccgcctgattatcacaaagggatatccgaagcgcgacgattccagccgcagaattgacgtcccgtatgacggatatgaaatcaagacaatcacacatccgcacttcggcgataaaccggtaaaggtgttcgctataaaggtgaatatcgacaatgaatga

SEQ ID NO: 4936 - DNA, 285 bp, Escherichia coli
atggtctccttcgcgaaatatacgattattgactggatagcattcattcaggttttgctcatctggttttatatggcttacaggagtggacagtggattgtcagtgtagcctgtagcaatggatggcgttggtggaaccgaaagaataaaaaagcgctggccttggcttcgttttacgaagcattcaatcttaacagtcttcagcctggttttgtcgttgtagtcaccactcaaagcggcatgacgatacaaattcacaagccaaaggaggaaggtcgtggctaa

SEQ ID NO: 4937 - DNA, 573 bp, Escherichia coli
atgaccaaaattaactatcaggcactgcgtgaggcggcagaacgtgcaattccggcaatggaacgcctgttaatgttgccagttgatgatgatttgttaagtgaacaggaacttaaggattacggtgtggatattgatgcgctcaacgccttcaaatttctgaccggaccagaaaccgtgctggcgctgctggatgaacgggaaagaaaccagcaatacatcaaacgccgcgaccaggagaacgaggaaattgcgctaacggtagggaagctgcgcgttgagctggaagctgcagagaagcgcattgcagaactggaagccgaacctgtaagccaaacttacaagttgaacgagctgtcgggcaactatccggtaactccggatggttggataagctgtagtgagcgaatgcccgctcaagatgattggattttaatttattcaaagcacggcgagtatatggcaggacaggtacaaggggaatacgtggagttgagcgacggcactttatcgtggttagggaacgccttgtactggatgcctctaccggaaccgccgcaggaggttaattga

SEQ ID NO: 4938 - DNA, 300 bp, Escherichia coli
gtgactgtatgtcttattgataaacgtcgacgtgggcaacaaataccatctgttgaaatgccgaatcacacatggttttgcgtacttgatatcgatggtatggatacgttggttgacactcgtcattactgcgataccgcaacagctactccggcgaaagcaaagaaaatggctgctctgatagaaaactggactccacctgatggttggtgcaatgggaatgatcgagattggcacgaaaaaatgaagggctatatctgcgattttttacgtaaatgcaacggcttcagggggatgtga

SEQ ID NO: 4939 - DNA, 321 bp, Escherichia coli
atggctgctgaaaatacctcacttaagcaatctgagaaggaatttaatgacttttgtcgtgaggagtttagcgaatgggaagatgatgttactgaaaccccagccaccgatgcttttctggctgaagtgcgggcgcagggggtggatgctgctatagaagctgcaaaaaatctggtggcccaagaatatgagtataaggatttcaaagcggcgcagagtgattgctgtatgcaccctggttcagacctggtagggaaggttgaaatgactgagtggttagttgactttgctgcccagcttcgcaaaggaggcaaccagtga

SEQ ID NO: 4940 - DNA, 744 bp, Escherichia coli
atgtctatcacggcgcagtccgtataccgtgacaccggaaattttttccgtaatcaatttatgaccattctgttggtatcgttgctatgtgcgtttatcacagtggtgttagggcatgttttctcacccagtgatgcacagcttgcgcagctcaatgacggcgtacccgttagcggcagtagtgggttgttcgacctggttcagaatatgtcaccggaacagcaacaaattttgctgcaggcttcagcggcgtccactttttcaggattaatcggtaacgccattctcgccgggggcgtaatattaattatccagctggtgtctgcgggtcagagagtcagtgcgctgcgagctattggtgccagtgcgccgatattaccaaagttatttattctgatttttctgactacccttttagtacagattggcatcatgctggtggtcgttccgggaattatcatggccattttactggctctggcaccggtgatgctggtacaggacaaaatgggcgtttttgcctcgatgcgtagcagtatgcggctgacatgggcgaatatgcgtctggtggcacccgcagtactgagctggttgctggcaaaaacactgttgctgctttttgcctcttcttttgccgcattaaccccggaaattggtgccgtactggcgaacaccttgagcaacctgatttcagccgtattgctcatctatctgttccgcctgtatatgttgattcgccaataa

SEQ ID NO: 4941 - DNA, 639 bp, Escherichia coli
atgaaaaagttaacagtggcggctttggcagtagcaactcttctctctggcagtgcctttgcacatgaagccggcgaattttttatgcgtgcaggttctgcaaccgtacgtccaacagaaggtgctggtggtacgttaggaagtttgggtggattcagcgtgaccaataacactcaactgggcctgacgtttacttatatggcgaccgacaacattggtgtggaattactggcagcaacgccgttccgccataaaatcggcacccgggcgaccggcgatattgcaaccgttcatcatctgccgccaacactgatggcgcagtggtattttggtgatgccagcagcaaattccgtccttacgttggtgcaggtattaactacaccaccttctttgataatggatttaacgatcatggcaaagaggcggggctttccgatctcagtctgaaagactcttggggagctgccgggcaggtgggggttgattatctgattaaccgtgactggttggttaacatgtcagtgtggtacatggatatcgataccacggctaagtacaaatctggtgttactaccgtaaaagactcggtacgactggatccgtgggtgtttatgttctccgcaggatatcgtttttaa

SEQ ID NO: 4942 - DNA, 1131 bp, Escherichia coli
atggcgcgcccgcgaaaatataaaaccgatgttccgggattatctccgtattttgacaaaagaaataacaaagtttactggcgttacaggcatcccataacaggcaaaaatcacggtctcggcagtattgaccagaaactggcagaaactattgcagcagaagcgaacagccgtcttgcccggcagcaaatggaacaaatgctcagtctgcaggagaaaattattagtgacaccggcggttcatcaaccgttaccatttttctgaataattacagaaaaattcaacaggaaagatatgaaaacggcgagatcaaactcaacacgctgaaacagaaagcggcccctctcagggtatttgatgaacgttttggcaccagaccgttagatgccataaccgtaaaagatgtggtatcagtactggaagagtacaaggccagaggacataacagaatgggacaaattttcaggaaagtactgatcgatgttttccgggaagctcagcaaacgggcgatgtcccgccaggctttaaccctgcagaatcggcaaaaaaaccgcaggtgcggatatcaagacagcgactgacttttgatgagtggatgatgatttataacgcagcggaaaaggatggttactttttacagcgcggtatgctgctggcactgatgacaggccagcgcctttcagatatttgcaaaatgcaattttcggatatccgggatggttatcttcatgtcgaacagcaaaaaacaggaacccggattgccatccctctggctctgcgttgcgataaattaaatctcaccctagatgatgtggtgtcatcctgccgcgattgcgttcttagtccgtggctattgcaccaccatcacgcgaaagggacagctaagcgcggcgggatggttaagccagcaacattaaccgttgcatttaaaaaagcccgggattctgtggattacaactggcgtgctaatggcaccccaccctctttccatgagcagagatctttatcagagcgattgttcagagagcagggggttgataccaaaattttgctgggccattcgaatcaaaaaatgaccgatatttacaacgacgcacgcggtaaggaatggaaaaaactggtcatttga

SEQ ID NO: 4943 - DNA, 2472 bp, Escherichia coli
atgagtaaagtctttatttgcgccgccattccggacgaacaggcaataaaggaagaaggtgccgtcgctgtagccactgccattgaagccggtgatgaacgtcgcgcccgcgcaaaatttcactggcaattcctggaacattatccggctgctcaggactgcgcttataaatttcttgtttgcgaggataaacccggtataccccgccctgccctcgattcctgggatgctgaatatatgcaggaaaaccgctgggatgaggcgtctgcttcctttgttccggtcgagactgaatccgatccgatgaacgtcacttttgacaagctggcccctgaagtacagaacgctgtcatggttaagttcgacacatgtgaaaacatcaccgttgatatggttattagcgcacaggaattgttgcaggaagacatggcaacattcgacggacatatcgttgaagcgttgatgaaaatgccagaagttaacgccatgtatccggagcttaagttgcacgccattgggtgggttaagcataaatgtattcctggtgctaaatggcccgaaattcaggcagagatgcgcatctggaaaaaacgtcgcgaaggtgaacgcaaggaaaccggaaaatacacgtctgttgttgatctcgcccgcgccagagccaatcaacagtacactgaaaattcaacaggaaaaatcagcccggtcattgctgccattcatcgcgaatacaagcagacatggaaaacactggatgacgaactggcctacgctctctggcctggtgatgtggatgccggaaacattgacggcagcatccatcgctgggcaaaaaaagaagttatcgacaacgaccgcgaagactggaagcgtatctcggcatcaatgcgcaaacagcctgatgcccttcgctacgaccgccaaactatttttggccttgtccgtgagcgtccgatcgacattcacaaagatcccgtagcactgaacaaatatatctgcgaatacctgacgacaaagggcgtgtttgagaatgaagaaacagacctgggcactgttgatgttctccagtcatcagaaacacaaactgatgcagtggaaactgaggtatctgatatcccaaaaaatgaaaccgcgccggaagctgaaccatctgtagagcgtgaggggccgttctatttcctcttcgcagataaggacggagaaaaatacggtcgcgcaaacaaactttctggtctggataaggcactggctgctggcgccactgaaatcacaaaagaagaatattttgcccgaaaaaatggcacatacacgggcttaccgcaaaatgtagataccgctgaagattcagaacaaccagagccgataaaagttaccgctgacgaagtaaacaaaattatgcaggcagccaatatcagccagcctgacgccgataagttgcttgctgcatcacgtggtgaatttgttgaagggattagtgacccgaatgatccgaaatggattaaggggatccagacccgcgattctgtgagccagaaccagcatgaatcggaacggaactaccaaaaagcggaacaaaacagtccaaatgcgttacaaaacgagccagaaacgaaacagcctgaaccagtggcgcaccaggaagtggaaaaagcctgcaccgcctgcggtcagaccggcggcggcaactgtcctgattgtggcgcggtgatgggcgacgcaacataccaagaaacattcgatgaagagtatcaggttgaagttcaggaagatgatccggaggaaatggaaggcgctgaacatccacacaaggagaacactggcggcaatcagcatcacaatagcgataatgaaactggcgagacggcagatcacccaattaaggtgaacggtcatcacgaaatcacatccaccagcaggacgtgtgaccatctaatgatcgaccttgaaaccatgggaaaaaatcctgatgccccgatcatctcaataggtgcaatatttttcgatccgcaaaccggagatatgggaccggaatttagtaagactatcgatctggaaactgctggcggagtcattgatcgggacaccattaaatggtggcttaagcaatcacgcgaagcgcaatctgccattatgaccgatgaaatcccgttagatgatgcactgttacaattgcgggaatttatcgacgaaaactccggtgaattttttgttcaggtttggggaaatggagccaacttcgacaacacgattttgcgccgttcatacgaacggcaggggatcccctgcccgtggcgttactacaacgatcgcgatgtacgcacaatcgttgagctggggaaagccatagacttcgatgccagaacggctattccattcgaaggtgagcgccataatgcacttgatgacgcccgttaccaggcaaaatacgtttcagctatctggcaaaaactgatcccaaatcaggctgatttttaa

SEQ ID NO: 4944 - DNA, 192 bp, Escherichia coli
atgaatacagcatttgcacttgttctgacagtttttcttgtttccggagagccagttgatactgcagtcagtgttcacaggacaatgcaggagtgtgtgactgcagcaaccgaacagaaaattcccggtaactgttacccggtcgataaagttattcaccaggataataacgaaatcccggcaggtctttaa

SEQ ID NO: 4945 - DNA, 189 bp, Escherichia coli
atggaaacgttattaccaaacgttaatacgtctgaaggttgttttgaaattggtgtcactatcagtaaccctgtatttactgaagatgccattaacaagagaaaacacgaacgggagctattaaataaaatatgcattctttcaatgttggcccgtttacgtccgatacaaaaaggatgctggcaatga

SEQ ID NO: 4946 - DNA, 165 bp, Escherichia coli
atgaaccagctacctcgccgtgcgctttcgcgttatggtctgacttttcagggaaatatcctttcagtaaactgtcagtgccggatgctcacccgtgtccggcgcacgcactccacctcacccgtggagaactccttaattaccaaccttagcttcgttggttag

SEQ ID NO: 4947 - DNA, 222 bp, Escherichia coli
atgcagaaacgagaacccgtcatcatcgcgccagactataccaatgatgaactttatgagtggatgcgccagaaaattaatgcagcgcaggatttgaaatgggccaatgaagccagggctaagcaggctgaaaatctgtccgctctggagcaggatatcaccaatctggaaaaagcagcggcattaagcattgccagaatgattacatacccgcgtgaatag

SEQ ID NO: 4948 - DNA, 339 bp, Escherichia coli
atgaaaaattcctcaataacctcttgtgtgcagcttgtcggagaaatcccggccaatacctttgcagttgttctagagagtgacagtatgtcaacatctggtgggggagtttccatcccaaatggttcaacagtttttgttgatcccgatcgaaccgtacaaccaggaaatattgtccttgccttacccaaagggaccacaacacctgtcattcgtaaactggagatagaagggccggatattcttttagtccccacgaatcctcgctacccttcaattatgctggatgatctatcttgcatattgggcgtatgctttaaaattcaacaaaatatttaa

SEQ ID NO: 4949 - DNA, 243 bp, Escherichia coli
atgaaaaaatcagaagtattaggctattttggcggagttgttaaaacagccgcagctctaggaacgtcaaaaaccacagtcagcatgtggggggaagaggttccgtggaaatgggcgttgctaattcaggcagtcactgccggggcgctcaaatatgagttacacataccgacggttgtcattcccggttctgatcataatccgccttctaaccaaggggggattcatgaaaatcaagcatga

SEQ ID NO: 4950 - DNA, 423 bp, Escherichia coli
gtggcaaaagtttttacacaagaagagcgggaaaaaattaaaggacaggttgttgaactcgtacgccagagtgggcgtgagacgttacggcaactggaagtcaagacaggtgcgacaagatatctgatgagcgttctcgcaagagagctggttgccagcggcgatgtatgcaactctggttacgggttattcccgtctgaacaggcgcgtaaggactggcaaaatgcccgtaaaaagctctcaagggcaaagctgaagaaaccatctgcggttgatccggaccttatctggtcattacctgacggagaaatacgtcgctacgacaggcgtcagaacataatctgtcgcgagtgccggaagagtgaagttatgcagcgcatattgtcgttttatcagggtgatgttcggtatttattgaagtga

SEQ ID NO: 4951 - DNA, 1023 bp, Escherichia coli
atgccctgtatttcgctgtggtataatagttgcgcaattgatacaagggagcgttacatcgtgaaaattgttttcgaggttaatggaaagaaagttccactaaaatctttaaaatacataagcaaaaaagatcaactcgaagtaatgaaaaactggttctttgaaaactttgaagatccggcaaatgcttgtccgtatgaaagtagagaaggtggctatgcttacatatatggcgggccgtatgatgcgagcgaagaactacaatccatcttcggtcaatatgttaaatctgagtatattgaggaattagtagatgaattacaaacacaatgttttgactggtctggaaactcaaataatatagatgattggtacgatgatgatatctacgacgctgtaacgtcttccggtaatccgtatttaaaattcattgataatatcgataaaataaaaaaacttgcaaaagataaaactgaacaacagcaaaaaaaccacttgcttagtttgctctacacgaatgttattacagctttggaaacgctttatgttgagctattcattaattctatagagaaagatgatgtctacatagccaattgtatagaaaaaggtaagactgaatttaaagtaagcaaagatattgctgcgttgcctttcaagggtgaacccatcgagaaaattaggggagagctaatcaggtcaatcaaggaacacttgatcagtgcaagctggcatagcactaaaaaggtaatcgaccgctatgaagctacattcgatataaaagtacaaaaagactgtccgatagaagctattgaattggcaaccctcaatcgaaatcacttagtgcatcgtggtggaaaggataaagaagggaacctcgtagtgattacagaccaggatcttgaaacgctgattgaaaatgcatcgaacctggcaattatgctctacaacagtttaaatgtagcaacgaataaaaccaccattttgcaaccagatgacaaaccgttcattcatgaattttaa

SEQ ID NO: 4952 - DNA, 1002 bp, Escherichia coli
atggatattcgcacacgaaagacaaaatttttagagtcgttagattcaactgaagtgatacgcaaagcagtaagtctcgctatagattgcattattgataatcataatagtaatgaagatacccccttagttattaccagctatgatgatctctgtagaatccaggtgctaaattatgtacaggagttttgcgaagctgcattccctgatatggatgaatattactttagtcctaacatacttcgcatcaacggcaagactagtgaagaagcttgtattaacttaattaaactcttaagaagtacaaaaggcatgctattctggtccgatgccccatcgtggttcgctagcctccccgacggattattccatgttgttaacattgatcaaaaaatcgttactcgcggccttaataagaaaaactctaagccgacaataatcaataaagattacagtgtagatacactactatcagagctatttttgaatggcgcacacatggagcaacccaacgtacacaacgtttctgagggaaacatgaagttctatgatgaatgccatgctggattaatcagaccaatacccgctccaataggcgcgtcatacgatgaagagatcacaattaattctccagattggcaaaagctcgcgtgtgtagctttacgccgctatcagtcgaaggaatgtcatgacggaatgcaatgggatacaaccgatcatggttggactgatgtaatcgcgtatccattcgtcgaagaaatacaatcaatggataatagtggttatcgacaatgtttagttgggctggtcacaataaacaattcaaatgcaaattctccgtacctatctaccgtttggatacatccattttatcgcaggagagggttattaagtaagttatggccaaaattacaagagttatatggaagtaacttcgaaattgagcgacctaatgaaaatatgaaagcatttctgaaaagtgcgaaacacgcagattactaa

SEQ ID NO: 4953 - DNA, 213 bp, Escherichia coli
atgaacggcaaatctaggttagcctcttacgtgccgaaaggcaaggagaagcaggctatgaagcagcaaaaggcgatgttaatcgccctgatcgtcatctgtttaaccgtcatagtgacggcactggtaacgaggaaagacctctgcgaggtacgaatccgaaccggccagacggaggtcgctgtcttcacagtttacgaacctgaggagtaa

SEQ ID NO: 4954 - DNA, 1047 bp, Escherichia coli
gtgcgagtattacttcgacctgttctggtaccggaactcgggctggtgatcgttaagccgggccgtgaatccatgccggtattccacaatacccgggtactggtggagccggaaccgaaaagcatgcgtaatctgccgtccggggttgttcctgccgttcgccagccgctagaggaagacaaaacattgctgccgtttttcagtaacgcacgggtgattcgtgctgctggtggtgctggtgcattgtctgactggctgttgcgccatattaaatcctgccagtggccacacggcgattatcatcacagcgaaaccgtcattcaccgttatggtaccggcgcaatggtgttgtgctggcactgcgacaaccagctgcgtgaccagacatccgaatcactcgagcaacttgctcatcaaaacctgtcagcatggatgattgacgtcatactccatgcaatgaatggctcgcaggaacgggaattatcgctggctgaattatcctggtgggcggtccgcaatcaggtggcggacgcgctaccggaagcggtattacgtcgttcgctggggttgcgtgcggaaaaaatccgctcaatgtaccgtgaaagcgacatcgtaccgggagagcagaccgccaccagcatactgaagcagcgcacaaaaaatcttgcgccgctgcctcacgcccaccagcaaaacccgccacaggaagagacggtggtcagcattgccgttgatcctgagtctccggaatctttcatgaaacgacctaaacgtcgccgctgggttaacgagaaatacacacgctgggtgaagacacagccgtgtgcgtgttgtggtaagccagccgacgatccccatcacctgattggtcatggtcagggcggaatggggacaaaatctcacgatattttcacgctaccgctgtgtcgggagcatcacaacgagcttcatgcggatcctctggcgttcgaagaaaagcatggttctcaggttgatttaatttttcgttttcttgatcacgcctttgcaactggcgtgcttgggtaa

SEQ ID NO: 4955 - DNA, 375 bp, Escherichia coli
atgctcatagatttggttttaccttacccgccgacggtgaacacttactggcgacgccgtggcagcacatattttatctcggaggagggaaagcgttatcgccgggctgtggcgcttattgttcgccagcagcggctgaaattaagcctgtccggaaggctggcgataaaggtgattgcagagccaccggataagcgtcgtcgcgacctggacaatatcctgaaagcaccgctggatgcgctgacgcatgcgggagtgttaatggacgatgagcagtttgatgaaatcaatatcgttcgtggtcagccagtatctggtggacgtatgggggtgaagatttaccccataatgcatgaagagcaggtcaaaaaatga

SEQ ID NO: 4956 - DNA, 822 bp, Escherichia coli
atgaaactggaagatttaccgaaatactactccccaaaatcccctggcctgaccgatgcatcggcctcaacgtcaaaagatgcgctgagtatcactgatgtgatggccgcgcagggcatgacacagaatcgggctgagatggggttttctgcgttcctggggaaaatgggcatcagtatgaatgacagggcgcgggcaacagaattactggcagattatgcactcagtcggtgcgatcgtgtggcggcgttgagaaaacttccggcagaaataaaaccggtagtgatgcgcattatggcttcgtatgcgtttgaagattatgcccgtagcgcggcgagcaaaaaacagtgcccttgctgtcacggaaaaaaatttattgaaagcgaggtttttacaaacaagatccagtatccggatggtaagccaccagtgtgggcaaagtgcacaaaaggcgtgtatccgtcttactgggaagaatggaaaaaagtcagggaggtggtaaaagttgcctgtccggagtgtggcggaaagggtgaggtttccaccgcctgtaaggattgccgtgggcgtggtgtcgccattcatcgtgaagagtcggtaaaacgtggtatgcctgttatcagagattgccagcgttgtggtggtcgtggctgtgaaaggctgccatcaacggaggcatttaatgccatatgcaaagtgacgagtgctatcacgcttgatacgtggaaaaaatcagtgaaacgcttttacgatacgttggtggttcggtttgacattgaagaggcatgggcggagcggcagttaaagagggtaacgcgatag

SEQ ID NO: 4957 - DNA, 198 bp, Escherichia coli
atgctaaaacagcaggatatgacagaaaccgccagagtggtgtttaatgaattaagcgttaccgacccggcgacagtcggggagatagcgcagaatacttacctttcacgcgaacgctgccagttaatactgactcagctggttatggcgggtctggcagactatcagttcggttgttacagacgccttccgcagtga

SEQ ID NO: 4958 - DNA, 1050 bp, Escherichia coli
atgcttaatactgtaaaaatatccagttgtgagttaatcaacgccgactgcctggaatttatccggtcgttacccgaaaattctgttgacctgatagtcacggacccgccgtactttaaagtgaagcctgagggctgggataaccagtggaagggcgacgatgattacctgaagtggctggaccagtgtctggcgcagttctggcgggtgctgaaacctgccggaagtctttacctgttctgtggtcatcgcctggcatctgatatcgaaatcatgatgcgtgaacgcttcagtgtgctgaaccatattatctgggcgaagccgtccggacgctggaacggatgcaacaaggaaaggctgcgggcgtatttccccgccacagagcgcattctgttcgcggaacattatcaggggccgtatcgtccgaaagatgccgggtatgcggcgaagggcagtgcactgaaacagcatgtgatggccccgctgatttcttactttcgtgatgcgcgcgcggccctggggataacggcaaaacagattgcagatgccacaggaaagaaaaacatggtgtcgcactggttcagtgccagtcagtggcagctaccgaatgaaagcgattatctgaaattacaggcgctgtttgcccgggtggcagaagagaagcatcggcgtggtgaactggaaaagctccaccaccagctggtggatacgtatacctcactgaaccggcagtatgcggagctgctgagtgaatataaacatctgcggcggtattttggcgtgacggtgcaggtgccgtataccgatgtgtggacgcataaaccggtgcagttctatcccgggaaacatccgtgcgaaaaaccggcagaaatgctgcagcagataatcagcgcaagtagccgtcctggtgatctggttgcggattttttcatggggtcgggttcaacggtaaaagcggcgatggcactggggcgtcgtgcgattggtgttgagctggagaccggacgttttgagcagacagtcagggaagttcaggatttaatcgtttga

SEQ ID NO: 4959 - DNA, 228 bp, Escherichia coli
atggcatttaaacactatgacgtggtcagggcggtatcgccgtcagaccttgcgaaacgactgacacaaaaactgaaggagggctggcagccgtttggtagtccggtggccataaccccttataccctgatgcaggcgattgcagcagaaggtgatgtggtggtcagtggtgcaactgagccggattggtactacgtcatcgtactggcccggcattccaggccataa

SEQ ID NO: 4960 - DNA, 216 bp, Escherichia coli
atggaccagatggaaaaaatcacaacaggtgtgtcatacaccacgtcagcggtgggaacgggctactggttcctgcagttgctggacagggtttccccgtctcagtgggcggcaataggcgtgctggggagtctgctgtttgggctgctgacatatctgactaacctgtatttcaaaatcagagaggaccgtcgtaaggcggcacggggagagtaa

SEQ ID NO: 4961 - DNA, 345 bp, Escherichia coli
atgactcaaaactatgaactgattgtgaaagggatccgcaattttgagaataaagttacggtaactttagcattacaggacaaagaacgctttgacggtgaaatttttgacctggacatctcgctggaccgtgttgaaggtgctgcgctggagttttatgaggcagcggccagaaggagcatcagacaggtcttcctggatgtcgctgccgggttatgtgaaggggatgagcagtcgccggaaaagcgccccgtaattttagaggcgcagaatgtatggataacctacaaaggaaagctaccgggaaggattactggttccctgaagactccgccgaaatggtag

SEQ ID NO: 4962 - DNA, 273 bp, Escherichia coli
atggacaatagcaccatttctctacaggagttgctcgactgcatttccaggcttcgggatgatgtaaatgccctcactgttgcattttcacatctggccttatcaattcccagggagcaaatgctgccaacgctggcatccattcattttgaatcacgcaaccccaaatggtcccaggaacaacaaaattctttcaagtggctggcggcattgctggaagaaaattatgctggcaaaactaccatttcggcggagtcttcagggaaccagtaa

SEQ ID NO: 4963 - DNA, 534 bp, Escherichia coli
atgaacgcaaaaatcaaatacggcctgtcagctgcagttctggcgctgattggagcaggcgcatcagctcctcagatacttgaccagtttctggatgaaaaagagggtaaccacactacggcataccgcgatggttccggcaactggaccatctgtcggggggccacgatggtggatggaaaacccgtttttcccggtatgaaactgtcgaaggaaaaatgcgaccaggtcaacgccattgagcgtgataaggcgctggcatgggtggagaaaaacatcaaagtgccattgagcgaaccccagaaagcggggatcgcgtcattctgtccgtacaacattggtcccggtaagtgtttcccgtcgacgttttataaacgaattaatgcaggtgatcgcaggggagcgtgtgaggcgattcgctggtggattaaggacggtggcagagactgccgtattcgttcaaacaactgctacggtcaggtatcccgtcgtgaccaggagagcgcgctggcgtgctggggtatcgacagataa

SEQ ID NO: 4964 - DNA, 465 bp, Escherichia coli
atgaaccgcgtactgtgcgtggtcatcattgccctgctggtggcctgtggtgcgcttagtctggggctgaatcattaccgtgataacgccattacctacaaagcccagcgcgacaaaaatgtcagagaactgaagctggcgaacgcggcaattactgacatgcagatgcgtcagcgtgatgttgctgcgctcgatgcaaaatacacgaaggagttagctgatgcgaaagctgaaaatgatgctctgcgtgatgatgttgccgctggtcgtcgtcggttgcacatcaaagcagtctgtcagtcagtgcgtgaagccaccaccgcctccggcgtggataatgcagcctccccccgactggcagacaccgctgaacgggattatttcaccctcagagcgcgactgataataatgcaaaaacaacttgaaggggcacagctatacattcgagagcaatgcctcagataa

SEQ ID NO: 4965 - DNA, 411 bp, Escherichia coli
atggctcagattgccatttttaaacaaatattcgataaagtgcgaaataatttaaactatcactggttttattctgaactaaaacgtcacaatgtctcacattacatttactatttagccacagagaatattcatcttgttcttgaaaacgataatacggttttaataaaaggacagggtaaggttgtaaatgtaagattttcaaaaaataaatgccttatagaagccaccttaaaaggattcaaatcaggagagttatcattttacgaatacaggaaaaatcttgctacagcaggggttttcagatggattacaaatatccacgaaaacaaaaggtattactatacctttgataattcattactctttactgagaacattcagaacactacacaaatatttccgcactaa

SEQ ID NO: 4966 - DNA, 699 bp, Escherichia coli
atgcaggatatccgacaggaaacactgaatgaatgcacccgtgcggagcagtctgccagcgtggtgctctgggaaatcgatctgacagaggttggtggagaacgttattttttctgtaatgagcagaacgaaaaaggtgagccggtcacctggcaggggcgacagtatcaggcatatcccattcaggggagtggttttgaactgaatggcaaaggcaccagtacgcgccccacgctgacggtttctaacctgtacggcatggtcaccgggatggcggaagatctgcagagtctggtcggcggaacggtggtccggcgtaaggtttacgcccgttttctggatgcggtgaacttcgtcaacggaaacagtgacgccgatccggagcaggaggtgatcagccgctggcgcatcgagcagtgcagcgaactgagcgcggtgagtgcctcctttgtactgtccacgccgactgaaacggatggcgctgtttttccgggacgtatcatgctggccaacacctgcacctggacctatcgcggcgatgagtgcggttatagcggtccggcggtcgcggatgaatatgaccagccgacgtccgatatcacgaaggataaatgcagcaaatgcctgagtggttgtaagtttcgcaataatgtcggcaactttggcggcttcctttctattaacaaactttcgcagtaa

SEQ ID NO: 4967 - DNA, 342 bp, Escherichia coli
gtggctgagataaaaacgctgcatctggtcccgcgtgaagggatgcaggtgagtgagaaaccgtcggtggtgagggttcggtttggtgacggttatgaacagcgccgccccacaggactgaatcctcaactgaagacgtttcaggcggtgttccgggtgacggatgagtcaacccggcgctggctggatgaatttttatcctggcatggtggttaccgtgcctttttgtggcgaccgccgaaacataaccggacggtgagggtggtgtgtcgggagtggagcgtcacggataacgcccggtacagtgatttcagctgtacgattgagcaggtggtgaactga

SEQ ID NO: 4968 - DNA, 3228 bp, Escherichia coli
gtggcgacattacgtgaactgattattaaaatctcggcaaattcccggtcattccagtcagagatctcccgggcttcgcgtatggggcaggattactaccgtaccatgcagaacggaggccgacagtccgctgctgcatcccgtgaaatgcggcgtgcactggcagaagtgacggatcagataaatacagctaaatcttcggcactgaacatggcgggggcatttgccggggcttttgctaccggtcatcttatttctctcgccgatgagtggaattcagtaaatgcccgtctgaagcaggcctcacagtccagtgatgattttcagtcatcacagcgtgaattaatggcgatcagccagagaacggggacggctttttctgataacgccagcctttttgcccgctctgcagcttccatgcgggagtatggttacagttctgaggaggtactgaaagtcaccgaggcgatctccacgggcctgaaattatccggtgccagtacagcagaagccagttcggtgatcacgcagttcagtcaggctctggcgcagggagtgctgcgcggtgaagagtttaactcggtgaatgagaacggcgatcgtgttattcgtgctctggctgcgggaatgggagttgcccgtaaggatctgaaggccatggcggataacggaaagttgaccgccgataaggttgttcctgcactgattagtcagcttggggcattacgtgatgaatatgcggcaatgcctgatacggtttcatcctctgcaaccaaagttgaaaacgcctttatggcctgggttggtggtgcgaacgaggcaagcggagtgacgaagacgctctccggtgtgctgaatggtattgcaggcaatattgacaccgtggcaaccgctgccggtgctctggttgccgtcggggtagcccgatattttggcaatatggcgtcgtctgctggatctgcaactgccggattaattactgcagccagaaacgaagtggctcttgctgaagtgcaacttcgggggacacagatagcaaccgccagggcgcgtgcggcggtttatcgtgcgcaacaggcggttgttgctgctcgcggtaccgaaaggcaggccgcagcagaagcgaagctgacagctgcccaggtgtcacttacccgtaatattgcggccagaacagcggcacagacaacgctgaataatgttacgtcagtggggagtcgtttattaagtggcgcgctggggctggttggtggtgtgccgggactcgtcatgctgggggctgcggcctggtacacgatgtatcagaatcaggagcaggccagagaatctgcacgccagtatgccgcaacaatcgacgaaattcgccagaaaacgtcggcaatgtcgcttcctgaagcgtcagataatgaggaaaagacgcgacaggcactgaaggagcaaaacaggttaattgacgagcagaaaagtaagattaaatccttacaggaaaaaattgctggctatcagtatgtgctggcaaacccgggctggacaaccgataacggttttatgattaaccacatgacgtcggtaaaaactgtcacagaagggcttgcagaagcaacaaatcaactggcagttgaacagtctcgcctcactcaaatgcagggcaaagcgcaatccattcaggatgtgcttgccgggctggaggagcgacgggtggcgttgatccgtcaacaggcagcggaacaaaacaaagcgtatcagtccctgttgatcatgaatgggcagcataccgagtttaatcgccttctcgggctcggtaatgaattacttcagcagcgacaggggctggtgaatgtaccgttacggctaccacaggcaaccctggatgataaacagcagaccgcactgaataacagcgagcgcgaactggctctgtcccgcctgaagggggaagctcgtgagcgtgcccgcctgggttatgctgcggatgatctcggctttgtgggagaggcgtatcagacagcaagactgaattatataaataactcactggatgcatggcgaaataaccaggcaaataaacccaaagcgcataaaaagaccgaagcggaaaaaacagaggatatttataaacggctgattaaacagcaaaaagaacagatagcactggcagggcagaatactgaactggctaagatgaaatatcaggtcagtcagggcgaattatcaaccctgtcagaagcgcagaaaaaaacgcttttgcagaatgcagcacttatcgaccagaaaaagattcgtgagcagcttgctgcgtatgagagcagtctggcggacagtaatgccagtgtcagagcatcaaatgaggctcagttactgggatatggtgaaggctcacggatgcgtgaacgacttcaggaaatgtggagcatccggcaggagtttgagcagaaaaataacgagctactgagacagtatcaggccggagaaattgaagaagccctgtggaaacaggagaaagagctgaataaaaaatatctggaagagcgtctcagcgatcagcaggattattatgcaaaggctgatgctttacgcagtaactggaatgccgggctcaaagaggggctgacgaactgggcagacagtgccaccgattatgcttcgcaggcggcagatgctgtcgtttccacgatggacgggctggtatcaaatatttccgatgcactggccgggaatgttgtggactggaggaactgggggagttcagttctccgggaagtttcaaaaattctgatgaatgcagccattgttaacggactgaaatcactctccggtgccggagggtggcttggtacggtcggcggatggatttcgggggcagtggcaaacgcaaaaggtggtgtttacacatcggcaaatctgagtgcgtacagcaacagcattgtggacacgcccacgtactttgcgtttgcaaaaggggccgggctgatgggggaagccggacctgaagccattatgcccctgacccgggcggcggatggctcgctgggcgtacgcgcggtgggcagtatgaacggcagtgccggtctggtgtattccccggtctaccacatcgccattcagaatgacggggctaacggacagatagggccggaggcggcaggcagtcttgtgcagctgattgaccagcgggtgcaggcggtgatgctgtccatgcgacgtgacggaggaatgctgagtggctga

SEQ ID NO: 4969 - DNA, 279 bp, Escherichia coli
atgatgctggcgctcaggatggggcgcacattgtcagagttacgccgggaaatgtccgcatcagaaatcatgatgtgggcagaatttgacaggttcagcccgctgggtgacgagcgggctgatatccgggctgcccagattgtttcagctgtttacggtgcgcagggggtcaaagtgccactgaatgatgcgcttcttcagtgggagcaggagcagacagaaggcgtctcagatccatttgccggactggaaaacgcgcttttaatagtgtctcagtga

SEQ ID NO: 4970 - DNA, 372 bp, Escherichia coli
atgactaaaaatatccgtaatctggcactggcaacgatgtcggggtttcgccataaaaccgttgatgtgcctgaatgggagggagcaacggttgtgttacgggaaccttctgcagaagcctggttgcgctggcaggagatcgttaaagcaaaagatgatgagacaccgttatccgttgcggagcgcgcccgccgaaatctggaggcagatgttgaactgttcattgatgttctgtgtgataccggactgcaacccgtattttcagaggatgatcgtgaacaggtgattgccgtgtatggcccggtgcatgcgcggcttcttcggcagtctctggaactgatcagtgatgccggcgaggttaaaaaaaagtag

SEQ ID NO: 4971 - DNA, 756 bp, Escherichia coli
atgatttacccacccgccgctggcgggtttttttattttcaggagacgagtatgtcctctaattttgagcgttcgcaactgacgaaaattatgatttcgtctgcaccggtaacagcagaaaccctggattctgccagctatcttggcctgagctgtacaatcaaagaggtgcagtttaccgcaggacaaaagcaggatattgatgtcaccacgctgtgttctgttgagcaggaaaatattaacggccttggggctgcttcagagatttccatgtcaggcaacttttatctgaatgctgcccagaacgcgttgcgcagtgcctatgacaatgacaccacgtatggctttaaagttatttttccgtcaggcaacggatttacctttatggcagaggtgcgtcagcatacctggtctgcaggaaccaatggtgttgtggctgcaacgttttccctgcgtctgaaaggtaaacctgtgctgacgacagagccgctgaaagtgaaggtcgatttaaaaagcacgctgcgggtttcttccggagcgaaacttgaaatggcggttgaggctgcggggggtgtgccgccttattcttatgcctggaaaaaaggtggttctcctgtttccggacagacggcggcaacgttcagtaaggcatcagcagcatccggtgatgccggtgcgtatacctgcgagatttctgattcagcaagccctgttaacaaggtgacctccacttcctgcactgtaaccgtcagttaa

SEQ ID NO: 4972 - DNA, 345 bp, Escherichia coli
atgagggagggcacactgtattccctgttgtctcagctggccggaggacaggtttatccttatgtggtcccgctgacggagggaaagcctgcggtatctccgccgtggctggtgttttctgtggtgtctgacacggcatctgatgtgcttgatgggcaggctgaatccagaattaccgtgcagatcgatgtctgggcgacagtacctgatgacgcagataatattcgtgagcaggcgcttgatgcggtaagaaaactggcaccctccgttatttctaaaacgcaggggtatgatcctgactcccgtctgagcagagccacgcttgaatttcaggtaatagcctga

SEQ ID NO: 4973 - DNA, 447 bp, Escherichia coli
atggatttcagtcttgatttttccggcctggcggatattgcacgggatttggaggcgctcagcagggcagaaaacaataaggttctgcgcgatgccacccgtgccggtgctgaagttatgcgggatgcagttgttgaacgtgcgccggagcgaaccgggaaactgaagaaaaatgtggttgttctcactcagcgttcaaagcgtcggggggaaattatctcgggtgtccacattcgcggacggaacctgcgaaccggaaacagtgataacagcatgaaagccagcgatccccgaaatgcattttactggcgctttgtggagctgggaacgataaacatgcccgcgcatccattcattcgtccggctttcgatacgacagaggagctggcggcgcaggttgccatacagcgaatgaatcaggctattgatgaggtcttaagtaaatga

SEQ ID NO: 4974 - DNA, 339 bp, Escherichia coli
atgcaggcgggcagattacgtgatcgcgtaattattctgaatgtcaccaccgcccgctctccgtcagggcatccggtggagacggtgacggagggagctaccgtatgggcagaagttaagggtatcagcgggagggagataatctcaggcggagcagaaaccgctcaggctacggtcagagtctggatgagattccggcgcgatgtgacagcgacttcacgtctgaaagtgctgaccggtgcattcaaaggcgcgattctgggtatagaaggtccaccaataccggatgcacgcgctacccggcttgaaatgctctgcagcctgaagggaaatgtgtga

SEQ ID NO: 4975 - DNA, 318 bp, Escherichia coli
atggcagcaatagtggaaaaactcagggcgcagtgccgtattgatacagatgatgcaactgatgatgagttactgatgctgtatttccgggctgcctgccgcaaggcagaaaattttatcaaccgtaagctttatgaggagacggtgccagaaggtgatcctgaaggggtgcttatagctgatgatgttttgctggcgctcatgttgctggtcgggcactggtacgaaaaccgggaaaattcctcagatgtcagcaaggcaccagtcccgtttggtttttcttctcttctggagccttatcgttttattcctttgtag

SEQ ID NO: 4976 - DNA, 1218 bp, Escherichia coli
atgaaacttcatgagatgaagcaaaaacgaaacaccattgcaaaggatatgcgtgcactgcatgaaaaaattggtgataacgcatggactgatgagcaacgggcagagtggaacagggcgaaagctgagctggatgcgctggatgagcaaatcgcccgtgaagaagagttgcgccgtcaggatcaggcatatgtggatgagtccgggccggaagagcgccagaataatgaggcggagaacgggaaaaaggcggtggaagagaagcgcgctgcggcatttaaccgttttctgcgtgccggatttgcagaactgaatgctgaagagcgtaatctgatgcgtgaactgcgggctcagagtgtaacaacggattctcagggcggatatacggtgcccacgcagatgcgtaacaaaatcattgacaccatgaaggcttatggcgggattgccagtgtggcgcaacttctgaccacatcaaccgggcaggatatcacctggtcaacgtctgatggcacgactgaagagggcgaactgctggcggaaaatacagccgcaacggaacaggatgtgacgttcgggaccgctattctgggggctaaaaagctgtcatcaaaaataattcgtgtgtccaatgagctgctccaggacagtggggtggatattgaatcttatctggcaaaccgtattgcccagcgtattggtcgtggagaggcaaaatatctggttcaggggaccggaacgggatcaccgttacagccaaaagggctggcagcgtcggtgacgggaaccatccagactgcagcctctgccgctttcacctggaaagaaatgaatgccctgaaacatgccattgatccggcatatcgtggtgggccgaaataccgctgggcattcaatgatgccacattgcagactattgaagagatggaggatggacagaaacgcccgttatggctgccggatattgcaggcggtacgccggctactgtgctggggatcccttatgttattgatcaggctattgacgggattggtaccggaaaaaaattcattttcctgggggatttcaaccgctttatcattcgccgcgttacttatatggaactgaaacgtctggttgagcgttatgctgagtttgatcaggtggcatttctggctttccatcgttttgactgtgtgctggaagatgtggcagccatcaaggcgctcactggcaaataa

SEQ ID NO: 4977 - DNA, 600 bp, Escherichia coli
atgaatgaccgtgaaacgcgctgttacagcggggaggtgcgggcggaacaatatgataatgccccgacccacattctgggctatggctcggtatttaacagtcgttcagaacctctgtggggatttcgtgaaatcatcaagccgggggcttttgatgatgtactgaatgatgatgtacgtggcttgtttaatcatgatcctaatttcattctcggacgaagttctgccggcacgttgtcattgtcggtggatgaacgcggtttacgttatgacattgttgcaccggatactccgactatttgtgacctggtgctgtctccaatgttgcgtggtgacattaatcagtcctcgttcgcgtttcgtgtcgcccgtgacggagagagctggtatgaagacgacgaggggattgttatccgggaaatcacgcgcatttctcgtctgtatgacgtcagcccggtgacatatccggcctatcaggacgcagactctggtgtccgctcaatgaaagcctggcaggaagcgcgggcgagtggtgcgctgaagaaagctgttaacgaacgaatggcgcgtgagcgtcttttgacccttcttaatgcataa

SEQ ID NO: 4978 - DNA, 1227 bp, Escherichia coli
atgcttcttgatgctctgtttcgcagtgagcctctggaaaatccctcggttccggtaaccggagaggccgctgagacggataatatttttgcccgggatgtgtatgtcagtccggaaacatccatgaagctggctgctgtctatgcctgtatttatgttatttcatccagtgtggctcagatgcccctgcatgtgatgcgaaaaacgaatgagcatgttcagccggcacgcgatcacccgttgttctggctcgttcatgatgaacctaatgcctggcagaccagctataagtggcgggaactgaagcagcgtcatgtgctggggtggggcaatggttatacgtgggtaaaacgtaatcgtcgtggcgaggttaccagtcttgaatgctgtatgccatgggaaaccacgttacttaacaccggagggcgtcatacctacggtgtgtataacgaagagggtgcatttgcggtaagtccggacgacatgatccatatcagggcgctgggaaacaatcagaaaatgggactgagtccgatcatgcagcatgctgaaaccattggtatgggaatgagtggtcagcagtataccagtgctttttttaacggtaatgcccgtcctgccgggattatttctgtgaaaaatgaactgaacgaacagagttggagcaggctcaagaatatgtggcagcgggcggtgacagcgcttcgcagtcaggaaaataaaaccatgctgctgcctgcgcaactggattaccgcgctctgacagtttctccggtggatgctcagatcattgatatgaccaagctgaaccggtcgatgattgccgggatttttaatgtcccggcgcacatgattaatgacctggaaaaagccacattttcgaatattacgcagcaggcgattcagtttgttcgctacacgatgatgccctgggttgcgaactgggagcaggagcttaaccgtcgcctgtttacccgtacagaacgggctgccgggtattacgttcgtttcaacctcacggggttgctccgtgggaccccacaggagcgtgcgcagttctatcactttgccattacagatggctggatgagccggaatgaagccagggcatttgaggatatgaacccggttgacggtctggatgaaatgctggtcagcgtaaatgcagcaaatccgttgaataactttaaagatacgaaaggcaaagaggaaaagaacgatgaatga

SEQ ID NO: 4979 - DNA, 1758 bp, Escherichia coli
atggcaaaagtggctgacgggatccgctacgccgaacgtgttgttgcaggagaaattgttgctggcgaatttgtccgcctggcctgccagcgttttcttgatgatctgaagtacggcgaaaagcgggggatttatttcagtgaaccccgtgcgcagcacatcctgaatttctacaaatttgtgcctcatgtaaaaggggcactggcaggccagcccattgagttgatggactggcatgtatttatcctcattaatatttttggttttgtcattccgctggtcaatgaagaaaccggggaagttgtcatgcgcagcgatggcagcggacgtccggtgatggtgcgccggttccggacggcgtacaacgaagtcgcccgtaaaaacgcaaaatcaaccctgtcatcgggtatcggcctgtatatgacgggggcagatagtgaaggcggagctgaggtgtattcagccgcaaccacgcgtgaccaggccagaatcgtgtttgaagacgccaaaaatatggtcagaaaagcccggtcgacactcgggcggttgtttgatttcaacaagctggcgatttaccaggagcagagcgcatcaaaatttgaaccgctttcctcggatgcaaacaacctggacggtctgaacatccactgcgccattattgatgagctgcatgcacataaaacccgcgacgtgtgggacgttctggagacggcaaccggtgcccgtctgcagtctctgttatttggcatcaccacggctggctttaacaaggaagggatttgttacgagcagcgtgattacgccatcaaggtattgcgaggctataacagcgacgtggagggcgcggtaaaagacgactcctactttgcgatcatttacacgctcgatgagggagatgatccgtttgatgaaacggtctggcagaaagcgaatcctggcctgggcatctgtaaacgctgggatgatctgcgtcgtctggcgaaaaaagcgaaggagcaggtctctgcgcgggtgaatttttttaccaaacacatgaatgtgtgggtcactgccgaatctgcctggatggatatgattaagtgggagaagtgcgaatacattgctccacaacatgagctgaaaacatatcccatgtgggtcggcgtcgaccttgctcataagattgatatctgtgcggcggcaaaactctggcgaaccgataacggacatgttcatgctgattttaaattctggcttccggaaggacggctggaacgatgctcgcggcagcaggcagaactttaccggaagtgggcggagatggataagctcatcctgacggatggtgatgttatcgatcatgctcagataaaaagtgacttactggaatggattggcggtgaaaacctcagggaactgggatttgacccgtggagcgcaatgcagttcagcctggcactggctgaagaagggataccgctggtggaggttccgcagacggtccgcaatctgtcagaggccatgaaggaaacggaatcactggtttatgccgggcgtttccatcacagcaatcatccggtcatgaactggatgatgtctaacgttactgtaaaaccggacaaaaacgacaacatcttcccgaataaatccacgccggaagccaaaatcgacggccctgttgcgctttttacagccatgagccgctttctggtaaatggcgggggcgtgaatgactttctgtccacgcttgatcctgatgaggacttgttaattctgtga

SEQ ID NO: 4980 - DNA, 483 bp, Escherichia coli
atgtctggacccccgaaaaccccgccacgcctgcatttgatacgaggcaacccctcaaagcggccagttaaagacctcaaaaaaaccgctaaaaaggatgaaaaaggtctccctaaaattccgcaacatttaggggcgcaggggaagtactggttcaggcgaatggcggaagagctgaatgcggaagggatcatttctcagcttgatgcgcgtgcgcttgagctactggtggaagcctataccgaataccggcatcactgcgaaacactcgatgttgaggggtacacctaccgctcggaaacgcagaacggtgatgtgctgattaaggcacacccagctgctgcgatgaaagcggatgcctggaagcggatccgggcgatgcttgcagaatttggtatgtcaccggcaagccgggcaaaagtaaataccgccggaccggataatgttgatccgctggcagagcttttaaaagcgagagactga

SEQ ID NO: 4981 - DNA, 351 bp, Escherichia coli
atgccatcacgaatcccacgcgcctgccgtaagcgtggatgtgcaggtacaaccacagacagttctggttactgcgataaacatcgtggcgaaggatgggtacagcatcaacgcggactgagccgccaccagcgtggctatggctcgaaatgggatgccatacgtgcgcgcatactgaagcgtgataatcatctgtgtcagaactgcctgcgcaatgggagagccgttgaagccagaactgtggaccacatcattccgaaagctcatggtggcacggatgcagacagtaacctgcagagtctgtgctggccctgtcataaagcaaaaacagcgcgtgaacgcatcaactga

SEQ ID NO: 4982 - DNA, 189 bp, Escherichia coli
atgaattaccaactggcaaaactttatcgtggtaaacatttcgtagggtatgggattgcagttaatggtgagttactggaagggcagctttccgccaggacagagtcacgtggaggcgagccaccaacagtcactgtgactttcagactgacagcagaacatattgagaatcagccgtcattcaactga

SEQ ID NO: 4983 - DNA, 240 bp, Escherichia coli
atgaagaaattactggtaaccgtaaagccctttaacggaacaattccgtttcggattttacagcgtggtcgtgttctggctgaaggtacattcagtggtaaatgcacggaatgttattcacgaatatatgaagtggatgcctcggatgaagatataaccgttgagtgtaatgccgggattgtatcggccacattgcttcatgggcgaattgggttgtcgctggaggatgcaggcaaatga

SEQ ID NO: 4984 - DNA, 465 bp, Escherichia coli
atgaaccgcgtactgtgcgtggtcatcattgccctgctggtggcctgtggtgcgcttagtctggggctgaatcattaccgtgataacgccataacctacaaagagcagcgcgataaaaaagtcagtgagctggagcaggcaaatgcaaccattactgatatgcagcagcgccagcgtgatgttgctgcactcgatgaaaaatactcaagggagttagctgatgcgaaagctgaaaatgatgctctgcgtgatgatattgccgctggtcgtcgtcggttgcgcatcagagcagtctgtccagccgtgcgtgaagccaccggcaccaccggcgtggatgatgcagcccgccccggacttactgacgccgctcaacgggattatttcaccctcagagagcgaatcgcaaccagcgacagaatgattcggggattgcaggaatatatccgcacccagtgcattaagtag

SEQ ID NO: 4985 - DNA, 315 bp, Escherichia coli
atgcataacgatcaacataattatgatttatgcctgcaagccataaatgagcgggtaaaatcagagtgcctcttactcctcccacaagaacacgatgcagtaaaatccattcaggctgagccgtatggacatctcacacctgtgactctcggcattatcgccagagcattaacacagcccatgcttatgcgtattaagaccaatataaataactggttgaatgaagaattaagctaccttgattgtgagtgggacaatcattacgcaaaaacacaaaaagaacgcatcttcagtcgattatccagcaacagataa

SEQ ID NO: 4986 - DNA, 279 bp, Escherichia coli
gtgacggcgcaggtgccgtataccgatgtctggacgcataaaccggtgcagttctatcccgggaaacatccgtgcgaaaaaccggcagaaatgctgcagcagataatcagcgctagcagtcgtccgggtgacctgattgcagattttttcatggggtcgggttcgacagtgaaagcggcactggcgctcgggcgtcgtgcaattggcgttgagctggagactgaacgttttgagcagacggttcgggaagtacaggatttagtcagccagaacggatga

SEQ ID NO: 4987 - DNA, 381 bp, Escherichia coli
atgcgtgatattcagatggttcttgaacgctggggggcatgggctgcaagtggtaacaccggggtggactattctccgatcgctgccggattcaaaggacttttaccatctgccactaaaccacgtccggcctgctgcgatgatgacggacttatcattgaaaactgtcttgctcgtctgaagcagaaaaaacctgaggagtattcgcttctcattgctcattatttgttgcgaatatcaaaaagacagatagccaggacgagaaagaaaagcgaaaaagcaatacgaattgagatgcagatagccgaagggtttattgacggatgtttgtctgtgctgggggtaagactggagatggacgactggctgctaaaaaagtaa

SEQ ID NO: 4988 - DNA, 990 bp, Escherichia coli
gtgagagcactactgacccctgaaattgccccgcgtatggggatcgtattgttcagaccaggttcagagctgatgcccctgtttatgcaggggcgtgtcctgctggagcctgagccggaacgttattcatctttcgccagtggtgccgttccggcggcatcacaaccgctggcggatgatcctgccgttcgggccgtgttccgcaatgaggcagtgatccgtcgtgctggtggcgtggaatgtcttgaaagctggttacttcgtgaaaaaggctgccagtggcctcattccgactggcacagcgagaacatgaccacaatgcggcacgctccgggcgcaatccgtctgtgctggcactgcgataaccagttgcgcgatcagttcacggaacggctggaatcaatggcaacggataactgtgcccgctgggtgttatctgttgtgcgccgtgatctcggttttgatgacagtcacgttgtgacaatgccggaactgtgctggtggctggttcgtaatgacctggcggatgccttaccggaaagtgcagcccgtaaggcactgagattaccgaagcctgttgtgccgtctgtcacccgggagagtgaccttgttccttcggttcctgccaccagcattatccaggataaagcgaaaaaggtgctggcgctgaaagtggatccggagtcgccggagtcttttatgttacgcccaaaacgtcgccgctgggttaatgaaaagtacacgcgctgggttaagacacagccgtgtgcatgttgtggaaagccagctgatgatccccaccacctgataggccacggtcaggggggaatgggtacaaaagcgcatgacctctttgtgttgcctttgtgcagaaagcatcacgacgagctgcatgcggataccgtggcatttgaagagaagtatggctcccagctggagctgatatttcgttttatcgatcgtgcgctggcaattggcgtgctggcctga

SEQ ID NO: 4989 - DNA, 798 bp, Escherichia coli
atgaataatctgatggtcattgatggtattgaagttcgtcgtgatgcttatggtcgttacagcctgaacgatctgcacagggctgccggttctctggataagcataagcctgcattctggctccgcaatgagcaaactgaacgtttaataagcgagttgcagatttgcaactcggtcaatatagagccagttaacgttattcgtggcggaaataaccaggggacgtatgtctgcaaagaactggtgtatgcctatgcaatgtggatcagtccgtcattccatctgaaggtgatccgtactttcgatacggtaaccagcgcaccggaaaaattatccgggcaggctgctgacaagatgcaggctggtgtgattctgctggactttatgcgtcgggagttaaacctgtctaactcatctgtgcttggtgcctgtcagaaactccaggaggctgttggcttaccgaatctggcaccgcgctatgccattgatgctcctgccgatgcacccgatggctcaagtcgccccacgctgtcgctaagtgcactgctgaaacagtatggtatccgcctgacggctaatcaggcatatcaccagatggtgaagctggggatcgtcgagcagcgcgaacgatacagccgtaccgcgattaacaacatcaaaaaattctggtcgctgacggcgaaaggctgcatgttcggcaagaacatcaccagtcctgcaaatccgcgcgagacgcagccgcacttcttcgaatcccgattccctgagctgttaaagctgctcgataccgttcattga

SEQ ID NO: 4990 - DNA, 390 bp, Escherichia coli
atgaagctgattctgccttttccacccagcgtgaacacctactggcgacaccccaacaaaggggcatttgctggtaagagcctgataagcgcggcggggcgaaaattccagagtgcggcgtgcacagcaatagttgagcagttacgtcgtctgccgaaaccaacgtcggcacctgcttcagtggagatcgtgttgtttcctccggataaccggatccgcgatctggacaactataacaaggcgctgtttgacgccctgacccacgcgggtgtgtgggaagacgacagccaggtgaaaagaatgctggtggagtggggaccggttatcccggaagggaaggtcgagatcactatcagtaagtacgagaaaactgcgggtgcagccgcctga

SEQ ID NO: 4991 - DNA, 327 bp, Escherichia coli
atgacgacgttaactcaatgccagcagcaggtgctggatatgctgatttcttaccagaaagaacgtggcttcccgccaaccaatcaggaggtggctaccatgctgggataccgttcagtgaatgcagcggtggagcatcttcgcgcactggagaaaaaaggcgtcatcacgataaagcgtggcgtggcccggggcatcacgcttcataccgcggtgaaggacgacgacagcgaggtggccgggattatccgcgcactgcttgctggtgaggaaaacgccaggctgcgtgcagcccactggttacatgagagggggctgaaagtatga

SEQ ID NO: 4992 - DNA, 489 bp, Escherichia coli
atgagtcttttgaatgacgttcagaaattcattgaagcccatccggggtgtacttccggagacattgcggatgcttttgcaggttactcacgacagcgcgttctgcagtcagcaagcaagttacgtcagagtgggcgtgtggctcaccgttgtgaaggggatacacgcagacatttcccgcggctgactgagataccgcaggagccggaaccgcaaccagttcgtgaatccagacctgtgcgcaatttctatgtcggcactaacgatccccgggtgattttgtgcctgacccgccaggcggaagaactggagtccaggggcttataccgtcgtgctgcaacggtgtggatggcggcattccgtgaaagccactcccagcaagagcgaaacaattttcttgcgcgtcgtgagcggtgtttacggaaaagcagcaagcgcgctgtatcgggtgaagagtggtatctgtcagggaattacgtgggggcttaa

SEQ ID NO: 4993 - DNA, 993 bp, Escherichia coli
atgagcctgttaatgacatcccagcccattgtgataaatcgtgatcttgcatgccgtattggtctgaatgaggcaattgtgttgcagcagcttcattactggctgaatgaaacgaattcaggcactgagcatggcggaattcgctgggtttataacacgacagaacagtggctggagcagtttccgttctggtcagagtccactctgaaacgcacatttgcaagcctgaaatcacttggggttttgcgtcgcgagcaactcaataaatcgaagcgtgacatgaccaacttctacacgatcaactatgaaagtgagcttttagaagaggtcaaagtgaacgaatccatcaggtcaaaatgcacttctccatcgggtcaaagtgacctgatggatgggcgcaaaatgacacgatccattggttcaaaacgacacgctgtcatcgggtcaaaatggcccaatgatcttacagagaatacaacagagattactacagagaataaaacctcttctcgtccggacgcttcgcaaccggacacgcaaacggctgaacaggattttttaactcgccatcctgatgcggttgtattcagccctaaaaagcgccagtgggggacgcaggatgatttgacctgcgcacagtggctctggaaaaaaatcatcgccctgtacgagcatgccgccgaatgtgacggcgaggtggttcgtcccaaagaaccgaactggacagcatgggcaaacgaaattcgcctgatgtgtgtgcaggatggtcgtactcataaacaaatctgcgagatgtacagccgcgtcagtcgcgatccgttctggtgccgtaacgtgctcagcccgtcgaagctgcgggaaaaatgggatgagctttccctgcgcttatcgccgtccgtcagcacgtacaccgaaaaacgcgaagacccgtacttcaaagccagttacgacaacgtggactacagccagatcccggcaggattcagggggtga

SEQ ID NO: 4994 - DNA, 339 bp, Escherichia coli
atgaacagtttaacaacacactaccgtcgctcgcaactgattgcgcttcctgtgccgggtggaaaagcgaaggtggagtattgctatgcagtgaatgtaccaggtgacagggaaattgtaacccacagctttgcagagtgggctgtgggtgatttcaaccggcagaaggagacagtcctttgcgacaagttaaccgctggttcaaagatcactacggagtgcccgtcagagtcattcgttgggagccggaaacacaacgggttatctacctccgtgaaggctatgaacatgaatgcttcagtccgctcgaacagtttcgtcgtaaattcagggaaatag

SEQ ID NO: 4995 - DNA, 585 bp, Escherichia coli
gtgggtaaagaacctgaatggaaagttgataagcaaccagcatggctggtggcagcaatacgaagaacgattgctgatttacctcatggctatgaggaagcagcagaaattcttggtttgtataaatctgatgatatcaccccagcaaaagatcaattgcataacagactgcgtagcggtggggatcaaatttttccacttgagtgggccatggttttacaggatgccagtggtaccaggcatgtaacggatgcaatagcccgtcgtagtaatggggtgtttgtgccgctggtggtcattgatgacattgacaatggtgacattaatcagcggctgatggagtcaatagaatggattggcaagcattcccagtacttacgcaaggcaactgctgatggagttattgaccaagctgagcgtgagcaaatcgaagagaacagctaccaagtaatggcgaagtggcaggagcatttaacactgttatttcgtgttttttgtgcgccggaaaagagtaacgcccgcgagtgtgcagctccgggcgtcgtggcgtcgattgcttctggttgtggagaaactaacgcatga

SEQ ID NO: 4996 - DNA, 201 bp, Escherichia coli
atgacgactgacgatatcgaaagctacttcggcagcattgagaaagttgctgcttttttcggcataacaactgaagccgtttatcagtggcgaaaccgtcctggccagttaattccaaaaggacgtgcagcagaggctgcatatagaacttgcggacggttgccatttaaacctgagctttatgaaaaatctaatggataa

SEQ ID NO: 4997 - DNA, 627 bp, Escherichia coli
atggaaacggttggtcagcgtataaaagctctgagaagagttaccagaacgtcccagaaagaattgggtaaattttgtggagtaagtgacgttgctgtggggtactgggagaaagacatcaatgtccctggtggggaagcactttcaaaattagcgaagttcttcaatacgtcaatagattacattctttatggtgcggagtttgaaggcaaactcgtcacaaacatgcgcagagttcctgtaatctcgtgggttcaggctgggcagtttactgagtgcaggacagcagaagtgtttagtgaagtagacaagtgggtagatacatcattaaagattggtgataactcatttgcattggaggttaaaggcgactccatgactaaccctaacggcctcccaacaataccagaaggcgcaacagtgattgtagatcctgatgcagaaccccggcatggaaaaatagtcatcgctagacttgatggaacaaacgaagccacagtaaaaaaattagttatcgatggccctcaaaagtttttagtgccattaaatccccggtaccccaacatcccgatcaatggtaattgcctcatcattggtgtagtcaaaggagttcaatacgaactctag

SEQ ID NO: 4998 - DNA, 495 bp, Escherichia coli
atgaccagagacgattataaattttatgttcactactcttatgtattggagaagatgaattacacgttgttaactcgcattgataaattaataacgttgatgttaatcgttctcggtttttcagttttcgccccgtacagtaatttatttattttcggtttgtttgttgccgtactttcggttcttcagttggtctatcagtttggccaagaggctggaatgtctaaagagcaagcgaggcattacaaaagactgctgattgagtctgatacccttcctgaagatcagttgcaagctaggtatttaaaaatccaagatactgatagtaatccatggaaatcacttgaacgagcggctttcattcgggcctgtatttttgctggtgttccaactaagtacgatttaacaaccaaagaaaaatttatagcttggtgtgcgggagatctacctctagagaatgaactaacggatattaatgatgaccaacaagcataa

SEQ ID NO: 4999 - DNA, 204 bp, Escherichia coli
atgagcgtgataaaaactcatacaggaattgttatcacccgagacggtccgcaggtaaaaaaactgcaccagacaaagcggatgtgggtcgtcggaaaaaacgagttttaccacaaagaaaacggacgccgccactttgcagaaaatactcgccgccgactgctgatcgataccatcaagcctatcgaggtgaagcatgtttaa

SEQ ID NO: 5000 - DNA, 240 bp, Escherichia coli
atgtttaaacagaacgaaaaatctatcgctcaaattgctgagtatatcccgcgtgcgtgccggggtatgcagttgcaggaagccaaagcacgcctggagaaaaaaattgcgctctatatcgatgacggctgtgatgctgccgttcttaacgcggcgttcgcgccagctcttaacagtcatacgcgagagtcttttttttcgtgcatcgcagcgcagatccgtaaaggaggcaaccagtga

SEQ ID NO: 5001 - DNA, 330 bp, Escherichia coli
gtgaacaagattgactatcaggtactgcgtgaggcggcagaagcaataaaaatagtagccacaccacaaaaattgctggcatttcgtatgaaagtcacaccgcaggttgtgctggcgctgctggatgaactagaagctaaaaacaaacgcattacagaactggaagcgagggaagttcaattaccgactcgctacgaccttcgatatgggcacccaataaatgctaataagcggcatgtcatgatacctaaagaaaatggcagttggctttgcctgattgacttagaacacgcactacgcgtcgctggcattcgcatcaaaggagagtga

SEQ ID NO: 5002 - DNA, 1134 bp, Escherichia coli
atgaattatgaaaaatatcatagcacaaacagaagcaagggtttgcgaaccttctgctacttaatttattatgtgcaggtgatttttaatgtgatgaagtgttttatgactcgcggaaactttgattttataaactctaacgtggttttctcagaagccgataagtcattgtggattgatctcattaacaccgattgtatttggtatgatatgataattaatcctcctgatgatataagaacaaataagataataaagaactatctcagaattatggaaaaatatacgagggaaagctgtgaaaagagatttatttatttcttaggttcaagaaaaaaagtaaggttttcaaccaagaaacagcctaggtataacccattcacaaaaaatatagtattcactctgttgattggcaaagaagagcgaaagcttcggataaaatattccttttgcacgtttacgcagaatggggtagtgaaggtaactccaaatgttagagtaactgagaagtttctctacattgaatatgaaaatggcaatttatgtgtgatgtcagttcatgacttcgtaaacggacattatattgatttaggaattcatacagaagtgcattacgtaggatatacacgtcatccgcatcggcgccctgttgattttattcaccgtggcttatcaaagatgctgtatagcgtttcaaatgacgataatgatttttttgtttgttttagtatatttaatccaaggattatatctctgaataataaatgtaatgtggtctttaatatttcaaattctctactggatgaaattgatgttgataatgaggggagaattattgaaaactgcttaatacgttactttgatcctaagcttcaagatgatgacaaggaaagtaaaaggtcagatttaaataaaatgtttatggacctggtggaaaataaaaaaattaaaaaaatatacgttaattttcaatatgaaaggaataatgagtatttctgcttttactctaaagttgttccgccgaaatttcatcatttctttgtgttggatttttctgatggcaagataaatattgatagagaccaggatatgatgactcagatggcattgtgtatggggtattataattattaa

SEQ ID NO: 5003 - DNA, 474 bp, Escherichia coli
gtgaaagtatcattaatggctgcaaaagcgaaaaacggagtgattggttgcggtccacacataccctggtccgcgaaaggagagcagctactctttaaagccttgacgtacaaccagtggcttttggtgggccgcaagacgttcgaatctatgggagcactccctaataggaaatacgcggtcgttactcgctcagcctggacggccgataatgacaacgtaatagtattcccgtcgatcgaagaggccatgtacgggctggctgaactcaccgatcacgttatagtgtctggtggcggggagatttacagagaaacattgcccatggcctctacgctccatatatcgacgattgatattgagccggaaggagatgttttctttccgaatattcccaataccttcgaagttgtttttgagcaacactttagctcaaacattaactattgctatcaaatttggcaaaagggttaa

SEQ ID NO: 5004 - DNA, 1014 bp, Escherichia coli
atgaaaaccgccactgcgccgttaccaccgctgcgttcggtcaaggttctggaccagttgcgtgagcgcatacgctacttgcattacagcttacgaaccgaacaggcttatgtccactgggttcgtgccttcatccgtttccacggtgtgcgtcacccggcaaccttgggcagcagcgaagtcgaggcatttctgtcctggctggcgaacgagcgcaaggtttcggtctccacgcatcgtcaggcattggcggccttgctgttcttctacggcaaggtgctgtgcacggatctgccctggcttcaggagatcggaagacctcggccgtcgcggcgcttgccggtggtgctgaccccggatgaagtggttcgcatcctcggttttctggaaggcgagcatcgtttgttcgcccagcttctgtatggaacgggcatgcggatcagtgagggtttgcaactgcgggtcaaggatctggatttcgatcacggcacgatcatcgtgcgggagggcaagggctccaaggatcgggccttgatgttacccgagagcttggcacccagcctgcgcgagcagctgtcgcgtgcacgggcatggtggctgaaggaccaggccgagggccgcagcggcgttgcgcttcccgacgcccttgagcggaagtatccgcgcgccgggcattcctggccgtggttctgggtttttgcgcagcacacgcattcgaccgatccacggagcggtgtcgtgcgtcgccatcacatgtatgaccagacctttcagcgcgccttcaaacgtgccgtagaacaagcaggcatcacgaagcccgccacaccgcacaccctccgccactcgttcgcgacggccttgctccgcagcggttacgacattcgaaccgtgcaggatctgctcggccattccgacgtctctacgacgatgatttacacgcatgtgctgaaagttggcggtgccggagtgcgctcaccgcttgatgcgctgccgcccctcactagtgagaggtag

SEQ ID NO: 5005 - DNA, 201 bp, Escherichia coli
atgaacgccaatgaaccgagcaccagttgctgcgtgtgctgcaaggaaatcccgctcgatgccgccttcacgccggaaggggccgagtacgtggagcatttctgcgggctggagtgctatcagcgcttccaggcgcgggccagcactgcgaccgaaaccagcgtcaaaccggacgcttgtgattcgccgccgtcaggttga

SEQ ID NO: 5006 - DNA, 561 bp, Escherichia coli
gtgcaggggcaccgcatcggctacgtccgggtcagcagctttgaccagaacccggaacgccagctggaacaaacccaggtgagcaaggtgttcaccgacaaggcatcgggcaaggacacccagcgcccccagctcgaagcgctgctgagcttcgtccgcgaaggcgatacagtggtggtgcacagcatggatcggctggcccgcaacctcgatgacctgcgtcgcttggtacagaagctgactcagcgcggcgtgcgcatcgagttcctgaaggagggcctggtgttcactggcgaggactcgccgatggccaacctgatgctgtcggtgatgggggccttcgctgagttcgagcgcgccctgatccgcgagcggcagcgtgagggcatcgccttggccaagcagcgtggcgcgtaccggggccgcaagaaagccctgtccgatgagcaggctgctaccctgcggcagcgagcgacggccggcgagcccaaggcgcagcttgcccgcgagttcaacatcagccgggaaaccctctaccagtacctccgcacggacgactga

SEQ ID NO: 5007 - DNA, 2967 bp, Escherichia coli
atgccgcgtcgcttgatcctctcggccacggagcgggacaccctgcttgcgctgccggaaagccaggatgacctgatccgctactacaccttcaacgactccgacctgtcgctgatccgccagcgacgcggcgacgccaaccgcctcggcttcgccgtgcagctctgcctgctgcgctaccccggttacgcgctgggaaccgacagcgagctgcccgagccggtcatcctgtgggtggcgaagcaagtccaggccgagccggcgagctgggcaaagtacggcgagcgcgacgtgacccgtcgcgagcatgcccaggaactgcgcacctacctgcaactggccccgttcggcctgtccgacttccgcgccctggtgcgcgagctaaccgagctggcccagcagaccgacaaaggcttgctgctggccggtcaggccctggagagcctacggcagaaacgacgcatcctgccggcgctgagcgtgattgaccgggcctgctcggaagccattgcgcgagccaatcggcgggtctaccgcgccctggtcgaaccactcacggactcgcatcgggccaagctggacgagctgttgaagctcaaggccggcagcagcatcacctggttgacctggctgcgccaggcaccgctgaaacccaactctcggcacatgctggaacacatcgagcggctgaagacatttcagttggtggacttgcccgaaggcctgggccggcacatccaccagaaccgcctgctcaagctggcccgcgagggtgggcagatgacgcccaaagacctcggtaagttcgagccgcagcgccgctacgcgaccctggccgccgtggtgctggagagcaccgcgaccgtgatcgatgagctggtcgatctgcatgaccgcatcctggtcaagctgttcagcggcgcgaagcacaagcatcagcagcagttccagaagcagggcaaggcgatcaacgacaaggtgcgcctgtactccaggatcggccaggcgctgctggaagcgaaggaaagcggcagcgacccctatgccgccatcgaggcggtgattccctgggacgagttcaccgagagcgtcagcgaggccgagctgctggcccggccggaaggcttcgaccacctgcacctggtcggcgagaacttcgccaccctgcgccgttacacgccggccttgctggaggtgctggaactgcgcgccgcgccggccgcgcaaggcgtgctggcagccgtgcagaccctgcgtgagatgaacgccgacaacctgcgcaaggtgccggccgatgcacccacggccttcatcaagccgcgctggaagccgctggtgatcaccccggaaggcctcgaccggaaattctacgaaatctgcgccctgtccgagctgaagaacgccctgcgctccggcgacatctgggtcaagggctcgcggcagttccgcgacttcgacgactacctgctgccggccgagaagttcgccgcactcaagcgcgagcaggccctgcccctggcgatcaacccgaacagcgaccagtacctggaagagcgtttgcagctgctggacgagcagttggccaccgtcacccgcctggccaaggacaacgagctgcccgatgccatcctcaccgagtcagggctgaaaatcaccccgctggatgcggcggtgccggatcgggcgcaggcgctgatcgaccaaaccagccagttactgccgcgcatcaagatcaccgaactgctgatggacgtggacgactggacgggcttcagccgccacttcacccacttgaaggacggggccgaggccaaagacaggacgttgctgctgtccgcaatcctcggtgatgcgatcaacctcgggctgaccaagatggccgagtcgagccccggcctgacctacgccaagctgtcctggctgcaagcctggcacatccgcgacgaaacctattcggcggccttggccgagctggtcaaccaccagtatcgccacgcctttgccgcccactggggcgacggcacgacctcatcctccgatggccagcgcttccgcgcgggtggccggggcgagagcaccgggcacgtcaacccgaagtacggtagcgagccgggacggctgttctatacccatatctccgaccagtacgcgccgttcagcacccgcgtggtgaatgtcggcgtccgcgattccacctatgtgctcgacggcctgctgtaccacgagtccgacctgcggatcgaggagcactacaccgacacggccggcttcaccgatcacgtctttgccctgatgcacctgctaggcttccgcttcgcgccgcgcatccgcgacctcggcgaaaccaagctgtacgtgccgcagggcgtgcaagcctacccgacgttgcgcccgctgatcggcggcaccctgaacatcaagcacgtgcgtgcccactgggacgacatcctgcgcctggccagctcgatcaagcagggcaccgtcaccgcctcgctgatgctgcgcaagctcggcagctacccgcgccagaacggactggccgtggccctgcgcgagctgggccggatcgagcgcacgctgttcatcctggactggctgcaaagtgttgaactgcgccgccgcgtgcatgccggcctgaacaaaggtgaggcgcgcaactcgctggccagggcggtgttcttcaaccgccttggggaaatcagggatcggagcttcgagcagcagcgctaccgggccagcggcctcaacctggtgacggcggctatcgtgctgtggaacacggtgtacctggaacgcgccacccaggggttggtcgaggccggcaagccggtggacggcgagctgctgcaattcctgtcgccgctgggctgggagcacatcaacctaaccggcgattacgtctggcggcagagccgcagactggaagacgggaagtttcggcccttacggatgcccggaaaaccttag

SEQ ID NO: 5008 - DNA, 849 bp, Escherichia coli
atgaataatgatgagctggccaccagacgtgcgcaggcgattgccgaagacaggtgtttctcgaaagaacggctgcgcgatgaattcagaatgaagccagcccccggtgctgagccggttaagtggtataaaaacacttatggtggcaggttcgctgtataccgaattgcagactgtgttccgatgcgtgagaaacgcccactgacgagtaaacaacttctggctggccagcgactttccgttttatccagacttaacagcaccagtggccggatggcacggcaggcatatgactggctgagtctggcaccgctctttctggatactgaaacgacaggactggacaataccgcggaagctctggaaatcggcctgaccgatgcgtccggtcaggtggtatttgaaaccaggctgaagcccacggtcgccatcggggcgcaggccgccgctgtgcatggtatcagcgagcaggctctctgcggcgcaccatcatggacagatgtggcgcggcaactgcgtcatgcaatcggggaccgaccagtaattatctttaatgcccggttcgacatccgcattctgaaacagactgctgccgcacatagcgatccggctgactggctggaagaactgacggtatattgtgcgatggagctggctgcaggatattatggggccaccaaccgctatggcacgatttcactggcctgtgctgccagccaggccggactgacctgggaagggcaggcacactcagcgatcgccgacgcacggatgacggcaggggtggtaaacgctattgctgcatatcatctggaactgctgcaggaacaggcacggctgaaaatctga

SEQ ID NO: 5009 - DNA, 1881 bp, Escherichia coli
atgtctgaccctgtacgtattacaaatcccggtgcagaatcgctggggtatgattcagatggccatgaaattatggccgttgatatttatgtaaaccctccacgtgtcgatgtctttcatggtaccccgcctgcatggagttccttcgggaacaaaaccatctggggcggaaacgagtgggtcgatgattccccaacccgaagtgatatcgaaaaaagggacaaggaaatcacagcgtacaaaatgacgctcagcgcgcagcagaaagagaatgagaataagcgtactgaagccgcaaaacgcctctctgcggcgattgctgcaagggaaaaagatgaaaacacactgaaaacactccgtgccggaaacgcagatgccgctgatattacacgacaggagttcagactcctgcaggcagagctgagagaatacggattccgtactgaaatcgccggatatgatgccctccggctgcatacagagagccggatgctctttgctgatgctgattctcttcgtatatctccccgggaggccaggtcgttaatcgaacaggctgaaaaacggcagaaggatgcgcagaacgcagacaagaaggccgctgatatgcttgctgaatacgagcgcagaaaaggtattctggacacgcggttgtcagagctggaaaaaaatggcggggcagcccttgccgttcttgatgcacaacaggcccgtctgctcgggcagcagacacggaatgacagggccatttcagaggcccggaataaactcagttcagtgacggaatcgcttaacacggcccgtaatgcattaaccagagctgagcaacagctgacgcaacagaaaaacacgcttgacggcaaaacgatagtttcccctgaaaaattcccggggcgttcatcaacaaatcattctattgttgtgagcggtgatccgagatttgccggtacgataaaaatcacaaccagcgcagtcatcgataaccgtgcaaacctgaattatcttctgacccattccggtctggactataaacgcaatattctgaatgaccggaatccggtggtgacagaggatgtggaaggtgacaagaaaatttataatgctgaagttgctgaatgggataagttacggcaaagattgcttgatgccagaaataaaatcacctctgctgaatctgcggtaaattctgcgagaaataacctcagtgccagaacaaatgagcaaaagcatgcaaatgacgctcttaatgccctgttgaaggaaaaagagaatatccgtaaccagcttgccggcatcaatcagaagatagcggaagagaaaagaaaacaggatgaactgaaggcaacgaaagacgcaattaatttcacaacagagttcctgaaatcagtttcagaaaaatatggtgcaaaagctgagcagttagccagagagatggccgggcaggctaaagggaagaaaatacgtaatgttgaagaggcattaaaaacgtatgaaaagtaccgggctgacattaacaaaaaaattaatgcaaaagatcgtgcagcgattgccgcagcccttgagtcagtgaagctgtctgatatatcgtctaatctgaacagattcagtcggggactgggatatgcaggaaaatttacaagtcttgctgactggatcactgagtttggtaagggtgtccggacagagaactggcgtcctctttttgttaaaacagaagccattatagcaggcaatgccgcaacggctcttgttgcactggtcttcagtattcttaccggaagcgctttaggcattatcgggtatggtttactgatggctgtcaccggtgcgctgattgatgaatcgcttgtggaaaaagcgaataagttctggggtatttaa

SEQ ID NO: 5010 - DNA, 336 bp, Escherichia coli
atgaacagaaaatattattttaataatatgtggtggggatgggtgacggggggatatatgctgtatatgtcatgggattatgattttaaatacagattactgttctggtgtatttctctctgcggaatggttttgtatccggttgcaaaatggtatattgaagatacagctctgaaatttacccggcctgatttctggaacagcggtttttttgctgatacacctggaaaaatgggattgcttgctgtttatacgggtactgttttcatattatctcttccgttaagtctgatatatattctttctgttattataaaaaggctgtctgtaagatag

SEQ ID NO: 5011 - DNA, 258 bp, Escherichia coli
gtgacctttgagcagaaaaaagcccgggccattgccctgatggacagcaaaaagatgtggcggagcaattatgcccctcctcttctgtgtattctctggcggctgggtatccggcttccgccattaccctttatgccgttctggcaggtcacggtgctgacggggggcttatggggcatttcctggggatgtgcaatgtggtttatctactgggggcgcaggaaagttaaccggctgccaccatgggatgatgtgtaa

SEQ ID NO: 5012 - DNA, 591 bp, Escherichia coli
atgactcagagccgccgaccgtcgccactgcagcgaagaatgctgattgtgctggctgcccttgatgaaaaacggccaggacccgtgctgacgcgggacatagaacgggtgctggagcgaagcggggaagccccagtctacgggccaaacctgcgcgcctcctgccgtcgtctggaggatgccggctggctgcgtaccctgcgcgctccgaacctgcagctggcagtggagctgacggacgtcggccgggccgtggcacagcctctgctgctggcagaacaggaccgcctccgggcagaacagcgtgcggcagaagtcgtcgtactgccgctggtcccggcagcaggtctgcccgcagatggcacttctgccactgatctggcggtgcagctgaacggcataacgtatcaggcctgccgtggggattttgtggtgcatctcgacggcagcacctgtctgcagttatggaataaagaaggcagggtggtacgccgggagggcgatccgctggaagtggcgcagtggctgcaggcctgtcacgatgcaggaatggaggttcgcgtacagataaatgaaagtgccgctccgtaa

SEQ ID NO: 5013 - DNA, 261 bp, Escherichia coli
atggatgaagaaagggtgttttcactcagctatgaacaactgacccggtttgcggaaaaacgcatccgggaatgcaatctggacagccagggcgtaacttatctctgcgagtcagccaaagccggagctgtgctgatcttctggcatgaactggccataaatggctatgcctcaatgaatgccataaagagacaggagatcattgacgccgaccatcagcgcctcagaaagctcatctggccggaggatgactggaaatga

SEQ ID NO: 5014 - DNA, 453 bp, Escherichia coli
atgaaatttatggaatgtgctgtccgggatgtgatttatgggaccaatgtccgtattgtcaaaccggtcaacatttatgaatgtgaactcagggacaacgtgtttgtcggccccttcgttgagatacagaaaggctgtgtcattggtagtggaagccggatacagtcgcacacgtttatttgtgagaacgtaacactgggggagaactgcttcattggtcataacgtgacgttcgccaacgatctgtttcgttcaggagcaccagatccgtcaccggataactggatcagcattaccctgggggattcggttactgttggcagtggagccattattctgtctccgtatatatgcagcggagctgttattggtgcgggttcagttgtggtaaaaccgattgagaacaaaggcatttatgcaggaaacccggcaagactgctcagaatattatga

SEQ ID NO: 5015 - DNA, 267 bp, Escherichia coli
atgaatattgcaatcatcggcgcgggtcctgccggcatcatttctgcccgtaatgcgattaaagcaggtcactccgtggttctgtttgagaagaatacccgaattggggggatctggaacccctggagtggtggcgcttaccgtaatgcctgtatgcagaactctcgttatacatttcattatactggctttccccctggcgatatcgatgaacgaagttggatgcaaatgtcagatcgtgtgcgcctgttagggcgcggctggtaa

SEQ ID NO: 5016 - DNA, 270 bp, Escherichia coli
atggataccattcttttaaccgggctgtttgctgcatttttcacaacgtttgcgttcgctccccagagcataaaaactatcaggacacgcaataccgaaggtatctccgttgttatgtatatcatgttcctgacaggtgtaatctcatggatagcgtatggcattatgcgatctgattttgccgtactgatcgccaatattgtcacactgtttctggctgcaccagtgcttgtaataacacttatcaaccgcaggaaaaaacacgtatga

SEQ ID NO: 5017 - DNA, 405 bp, Escherichia coli
gtgggtacaaaatcagatggtcaggttgaagtggatgataacggctatgtaatgggcagttcagaaaagggagcttatttcagagttcatgccagtaaatcggaaacagatcataatttgggactgcatatacagcttgtatttgaaaatggtgaaatcagatattcaacccaccatgaaaatcgcctgctcctgattctatttaatgatacgaatacggaaacaattggcttcgacgctctgaaacgcttgcctgatccaccacgggagcttccattctggtctgattcgtttattcatcttcatgacgactggtgtgctcttattaaatatggtcactcgtctcctaagctggcggacctgtcatccggccttcatatacaggaaataattgaggcattctga

SEQ ID NO: 5018 - DNA, 312 bp, Escherichia coli
atgagaactctgactctaaatgaattagattctgtttctggtggtgcttcagggcgtgatattgcgatggctataggaacactatccgggcaatttgttgcaggaggaattggagcagctgctgggggtgtggctggaggtgcaatatatgactatgcatccactcacaaacctaatcctgcaatgtctccatccggtttagggggaacaattaagcaaaaacccgaagggataccttcagaagcatggaactatgctgcgggaagattgtgtaattggagtccaaataatcttagtgatgtttgtttataa

SEQ ID NO: 5019 - DNA, 2097 bp, Escherichia coli
atgactaacaggaatttcagacaaattataaatctgcttgatttgcgctggcaacgtcgtgttccggttattcatcagacggagaccgctgaatgtggactggcctgcctagcaatgatatgcggtcattttggtaagaatattgacctgatatatcttcgccggaagtttaatctctctgcccgtggagcaacccttgcaggaatcaatggaatagcggagcaactggggatggccacccgggctctttcactggagttggatgaacttcgagtcctcaaaacgccgtgtattctccactgggatttcagtcacttcgtcgttctggtcagcgtaaagcgtaaccgttatgtactgcatgatccggccaggggcataagatatatcagccgggaggaaatgagccgatattttacaggcgttgcacttgaggtctggcccggaagtgaattccagtcggaaaccctgcagacccgcataagtcttcgttcactgattaacagtatttacggtattaaaagaacgctggcgaaaattttctgtctgtcagttgtaattgaagcaatcaatctgctaatgccggtggggacacagctggttatggatcatgctattcctgcgggggacagagggctactgacgctaatttctgctgctcttatgttttttatattactcaaagctgcaacgagtacgctgcgcgcatggtcttcactggttatgagcacgctcatcaatgtacagtggcagtcggggctgttcgatcatcttctcagactaccgctggcgttttttgaacgccgaaaattaggtgatatccagtcacgttttgactcccttgacacattgagggccacatttaccaccagtgtgatcgggttcataatggacagcattatggttgtcggtgtttgtgtgatgatgctgttatacggaggatatctcacctggatagttctctgctttaccacaatttacatttttattcgtctggtgacatacggcaattaccgacagatatcagaagaatgtcttgtcagggaggcccgtgccgcctcctattttatggaaacattatatggtattgccacggtaaaaatccaggggatggtcggaattcggggggcacactggcttaatatgaaaatagatgcgataaattcgggtattaagctaaccaggatggatttgctcttcggaggaataaatacctttgttaccgcctgtgatcagattgtaattttatggctgggagcaggccttgtgatcgataatcagatgacaataggaatgtttgtagcgtttagttcttttcgtgggcagttttcggaaagagttgcctctctgaccagttttcttcttcagctaagaataatgagtctgcacaatgagcgcattgcagatattgcattacatgaaaaggaggaaaagaaacctgaaattgaaatcgttgctgatatggggccaatatccctggaaaccaatggtttaagctatcgttatgacagtcagtcagcaccgatattcagtgctctgagtttatctgtagctccgggggaaagtgtggctataactggtgcttccggtgcgggaaaaaccacattaatgaaagtactatgtggactatttgaacctgatagcgggagggtactgataaatggtatagatatacgccaaattggaataaataattatcaccggatgatagcctgtgttatgcaggatgaccggctattttcaggctcaattcgtgaaaatatctgtggttttgcagaggaaatggatgaagagtggatggtagaatgtgccagagcaagtcatattcatgatgttataatgaatatgccaatgggatatgaaacattaataggtgaacttggggaaggtctttctggcggtcaaaaacagcgtatatttattgcacgagccttataccggaaaccaggaatattatttatggatgaggcaaccagtgctcttgattcagagagtgaacatttcgtgaatgttgccataaaaaacatgaatatcaccagggtaattattgcacacagagaaacaacgttgagaactgttgatagagttatttctatttaa

SEQ ID NO: 5020 - DNA, 1275 bp, Escherichia coli
ttgtttcgccaggatgctttagaaaacagaaaaatgaagtggcagggacgggcaatattacttcccggaataccactgtggttaatcatgctgggaagcattgtgtttattacggcatttctgatgttcattattgttggtacctatagccgccgtgttaatgtcagtggtgaggtcacaacctggccaagagctgtcaatatatattcaggtgtacagggatttgttgtcaggcagtttgttcatgaagggcagttgataaaaaaaggggatcctgtttatctgattgacatcagtaaaagtacacgcaatggtattgtcactgataatcatcgccgggatatagaaaaccagctggttcgtgtggacaacattatttcccgtctggaagaaagtaaaaaaataacgctagataccctggaaaaacaacgtctgcaatacacagatgcgttccgtcgctcatcagacattatacagcgtgcagaggaagggataaaaataatgaaaaataatatggagaattacagatactatcagtcaaaaggactgattaataaagatcaattaactaaccaagttgcattatattatcaacaacaaaacaaccttctcagtctgagcggacaaaatgaacaaaatgccctgcagataaccactctggagagtcagattcagactcaggcagcagattttgataatcgtatctatcagatggaactgcaacgactcgaattgcagaaagaactggttaacactgatgtggaaggcgaaatcattatccgggcgttgtctgacgggaaagttgactccctgagtgtcactgtagggcaaatggtcaataccggagacagccttctgcaggttattcctgagaacattgaaaactattatcttattctctgggtcccgaatgatgctgttccttatatttcggctggtgacaaagtgaatattcgttatgaagccttcccctcagaaaaatttgggcagttctctgctacggttaaaactatatccaggactcctgcgtcaacacaggaaatgttgacctataagggagcacctcaaaatacgccgggtgcctctgttccctggtataaagtcattgcgacgcctgaaaagcagataatcaggtatgacgaaaaatacctccctctggaaaatggaatgaaagccgaaagtacactatttctggaaaaaaggcgtatttaccagtggatgctttctcctttctatgacatgaaacacagtgcaacaggaccgatcaatgactaa

SEQ ID NO: 5021 - DNA, 198 bp, Escherichia coli
atggaccgtaatggctctcagttaatccgggattttatgcgccagaccgtggaacggcagcataatacctggttccgtgaccaggttgaggcaggacgtcagcaactcgagcgcggcgatgtgcttccccatgacatggtcgaatcttccgctgctgcatggcgggatgaaatgagcaggaaagtcgccggtaaatga

SEQ ID NO: 5022 - DNA, 183 bp, Escherichia coli
atgatggagatattctggaccatgctgaccagccaggacaggaagcgcattcgtgagtacattgcggagcagaacctgatagccgccattgaactggacgaacggattggttgttcagccagcctcctgttctccctttcttttatcagtgtacaggtgcatgacaacataatcacggtatga

SEQ ID NO: 5023 - DNA, 294 bp, Escherichia coli
atgtggcggagtaattatgctcctcctctgctgcgtattctctggcggctgggtatccggcttccgccattgccctttatgccgttctggcaggttacgctgctgatggggggcttatggggtatttcctggggatgtgcaatgtggtttatgtactgggggccgtcaggaatggtagcaggtgaggccattattataagtatcacgagtggttttttgttcggactgctcatggcctctttccactggtggcgcaggaaagttaaccggctgccaccatggaatgatgtgtaa

SEQ ID NO: 5024 - DNA, 1035 bp, Escherichia coli
atgcagtcagctagtaaattaatctaccgcgggaagttgcttggcagtttacccactgtgggcgagattcataaagaaatcgcagtatcggaagaaaccgtaacatggatctctctgcaacgagatattatagcgaatattttgctgggaaaagatcctcgcttacttgtgattgttggtccatgctcaatccatgacgttcaggccgcagttgattatgcgaagcgattgttcgtattacagaataagtacttatcgaaaatgtacattgtaatgcgcacttattttgagaaacctcgaacccgtaaaggctggaagggaataatgcacgatcctgatctaaatggaagttatgatgttgagaaagggatacgatatgctcgccagtgtttgtcttcaatcacaacgatgcgtgtcgcaaccgctacagaattcctcgatccttttcttactccctatattgctgatttaatatgttggggtgctattggtgccagaaccactgaatcacaaacgcatcgtcaacttgcgtctggtttacattgtccagttggatttaaaaacagtactgatggaaatattaacttagctattgacgctattattgcagcccgtgaacaacatattgtatatatgacatctttaacaaatagtatatctacactattaaccgatggcaatccacatggacatctaatattacgtggaggtagagaacctaactatggtttgtctgatataactaaggcagtgaaattaatgcatgatgagggtattaaccatcgtctgataattgattgtagccatggtaatagcggtaaagtggctaaacggcaaatttccgttgcacgtcaagttatagataatcggaaaaaaataccaggatatgtagctggcattatggtggaaagctttttacaagatggaaaacaatccgatagttttccgctagagtatggtcagtctgttactgatgaatgcatatcatggcaacagacagaacaattattatcaactctggcagcacagctttaa

SEQ ID NO: 5025 - DNA, 1116 bp, Escherichia coli
atgcgtattttgtttgtaggcccgcctctctatgggctgttgtatcctgtgctgtctctggcgcaggcatttcgcgttaacggtcatgaagtgctgatcgccagtggaggacaattcgcacaaaaagcggcagaggccgggttggtggtgtttgacgccgcacccggtctggattccgaagctggttaccgccaccatgaggcacagcggaaaaaaagtaatatcggaacccaaatgggcaacttctcattcttcagcgaagaaatggccgaccatctggtggagtttgccggacactggcggcctgacctcatcatctaccctccgctcggagtcatcgggccgctgattgccgccaaatatgatataccggtcgtgatgcaaaccgtaggcttcggccataccccctggcatatcaagggtgtaacgcgttcgctcacggacgcctatcgtcgccacaatgtgggggccacaccacgtgatatggcctggatcgacgtaacaccgccgagtatgagcattctggaaaacgacggtgaacccattattccgatgcagtacgtcccgtataacggtggcgcggtgtgggaaccatggtgggagagaaggcccgagcgtaaacgtctgctggtgagtctcggcactgtcaaaccgatggttgacggccttgatctaatcgcctgggttatggattctgccagtgaggtcgatgccgagatcatcctgcatatttcagccaatgcgcggtccgatttgcgctcgctgccgtcaaatgttcgcctggttgactggatacccatgggtgtcttcctcaacggcgcagatggtttcattcatcatggcggagcaggcaataccctgacagcgctacacgctggtattccacaaatcgtcttcggccagggagccgatcgcccggtaaatgcccgcgttgttgccgaacgcggctgcgggattatccctggcgacgtcggcctgtcgagtaacatgatcaatgctttcctcaacaatcgctcacttcgcaaagcctctgaagaggtagcagcggaaatggcggcgcaaccctgcccaggtgaagtggcgaaaagcctgatcacaatggtacagaaagggtaa

SEQ ID NO: 5026 - DNA, 561 bp, Escherichia coli
atggacgccattgagctcagaatgggtgaaatgcgtcgctatatcattaccatgatcgacgaacacagcgattatgtactggcgctggctgtgccgtcgctcaacagtgatatcgtcaatcactttttcagccgtgcagcccggctgttccctgtcggtatcagccagatcatcacagataacgggaaagagttcctgggaagctttgacaaaacgctgcaggaagccgccatcaaacacctctggacctatccctacacgccaaaaatgaacgctatctgtgaacgttttaaccgggcattaagagagcaattcattgaatttaatgaaattttactctttgaggatctggcgttgtttaacctgaaactggcggaatatctggcgctgtataacagcaaaagactccacaaggcgctcgcactaacgacgcccgtggaatatattttaaaagagaacaaaaattgcaatatgtggtggacccatacacagcaaacgcacaggccgccccggttgggtagatatgtgggatggctggttcagacttcaggatatggttga

SEQ ID NO: 5027 - DNA, 291 bp, Escherichia coli
atggctgatatagcaacaatgagaatgaaggctctgcacttctgggataaacacggtatttctgcagcttctgaagcctttggcgtatcctgccgcacgctttactggtggcgtcagttactgatcaagggaggacctgaggggctaatcccgcacagtaaggcacctctggtgcgacgaaaaaagcactggcatcccgatgtgctgaaagagattcgacgcctcaggacagagctgccgaacctcggtaaagagcagatttttgttcgcctgaagccctggtgcgcataa

SEQ ID NO: 5028 - DNA, 294 bp, Escherichia coli
atgaaaaaaatgttattttctgccgctctggcaatgcttattacaggatgtgctcaacaaacgtttactgttggaaacaaaccgacagcagtaacaccaaaggaaaccatcactcatcatttcttcgtttcgggaattggacaagagaaaactgttgatgcagccaaaatttgtggcggtgcagaaaatgttgttaaaacagaaactcagcaaacattcgtaaatggattgctcggttttatcacttttggcatctatactccgctggaagcccgggtatattgctcacaatag

SEQ ID NO: 5029 - DNA, 984 bp, Escherichia coli
atgaataatgaacaacgcggcgtagcactgctcattgtactcatgttactggcgctcatggctgctctggctgcagacatgacgatcagttttcacggccagcttcatcgaacccgccaggtaaaccatcatttgcaacggcaatatgatattgagctggcggagaaacttgcgcttgccagcctcacccaggacgttaaagataacgacagacaaaccacgttgcagcagtactgggcacaaccgcaacagttgcagctggaaaatggcaatacagtgaagtggcagttacgcgatgcccagcactgttttaatctcaatgccttagcaaaaatatctgacgccccactggcttcccctgatttccccgcccaggtattcagtgccctgctgattaacgccggtatcgatcgcggaaacaccgatgagatcgtgcaatcaatcgctgactatattgatgccgatgattcgccacgctttcacggcgcagaagataacttttaccaaagccaaacgccgcctcgccatagcgccaatcaaatgctttttctgaccggtgaattgcgtcagataaaaggcataaccgaaaacatctatcagcggcttatcccgtatgtctgcgttctcccgacctcggaacttagcatcaatcttaatatgctaacggagaacgatattccgctcttcagagcattattcctcaataacatcacggatgctgacgctcgggtcttattacaaaaaaggcccagggaaggctggctcaccacagatgcatttctttactgggcgcagcaggatttctccggcgtgaagcccctggttgctcaggtgaaagggcatctctttccctatagccgctattttacgctgagtacggaaagtatcagcgacgaacaatcccagggatggcaaagccatatttttttcaaccgtaaacagcagagcgcccaaatctatcggcgtacgctgcaactctactaa

SEQ ID NO: 5030 - DNA, 501 bp, Escherichia coli
atgcctgaatcgttgatggtaatacgttctttctcgacgctgcgtaagcattgggaatggatgacgttctccgcagatagcgtatcttcggtacatacgctcacagacgatcttccgctggagtcgctggccgatcagcccggtgccggaaatgttcaccttttgatcccacctgagggtcttttatatcgttccctcacgctgcccaacgccaaatacaaactcaccgcgcaaacattacagtggttggcggaggagacattacccgacgccagccaaaattggcactggatggttgtcgataaacaaaacgaaagtgtcgaggtgataggcattcagtcggagaaactcagtcgttatcttgagcgtttacatactgccggactcaacgtgacgcgggttttgccagatggctgctatcttccctgggaagtagatagctggactctggttaaccagcaaacaagctggctgaaccgccccgggaatcctggagactaa

SEQ ID NO: 5031 - DNA, 2481 bp, Escherichia coli
atgggtattcagaatttcgaccactcacaccacaagctcaaaattcgcggcctgaaaagcccggtggacgtgctgacttttacaggccacgaacagctcagctcacccttccgctacgacattcagtttaccagcagcgataaagccatcgcgccggaatcggtgctgatgcaggacggcgcattcagcctgacggcaccgcccgtacagggaatgccggtacagactgccctgcgcaccctgcacggcgtcattaccggctttaaacatctctcatcgtcacaggacgaagcccgttacgaagtgcgccttgaaccccgtatggcgctgcttacccgcagccgccagaacgccatctaccagaaccagacggtgccgcaaatcgtcgaaaaaatcctgcgcgagcgacaccagatgcgcggtcaggacttcgtgtttaacctcaaaagcgaatacccggcccgcgaacaggtgatgcagtatggcgaggacgacctgacgtttgtctcacgcctgctgtcggaagtgggtatctggttccgcttcgccaccgacgcccggctgaaaatcgaagttatcgaattttacgacgaccagagcggctatgagcgcgggctgacgctgccgcttcgccatccttctgggctgtttgatggtgaaacggaagccgtatgggggctgaacacggcatacagcgtggtggagaaaaacgtcaccacgcgggactacaactaccgcaccgccacagcggagatgatgacagagcagcatgacgccaccgggggcgataacaccacctacggcgaagcctaccactatgctgacaacttcctgcaaaaaggcgataaagaggcagcggaaagcggcgcgttttatgcccgtatccgccacgaacgctacctgaatgaacaggccattctcaaaggccagagcaccagttcactgctgatgccggggctggaaatcagggttcagggcgacgacgcgccagcggtgttccgcaagggtgtgctgattaccggcgtgacggccagcgcggcgcgtgaccgcagctatgaactgacgttcacggcgataccctactcagaacgctacggctaccgcccggcgcttatcccccgcccggtaatggccggcacgctcccggcgcgggtcaccagcacggtgaagaacgatatttatgcccatatcgacaaggacgggcgctaccgggtcaatctcgactttgaccgcgacgcatggaaaccgggttatgaaagcctgtgggtacgccagtcgcgcccgtatgcgggagacacctacggcctgcacctgccgctgctggcgggaacggaggtcagcatcgcctttgaggaaggcaacccggaccgaccttatattgcaggcgtaaaacacgactcggcgcacaccgaccatgtgaccattcagaactacaagcgcaacgtactgcgtaccccggccaacaacaaaatccggctggatgacgaacgcgggaaggagcatatcaaggtcagcaccgaatacggcggcaagagccagctaaacctcggtcatctggtggatgccgggaaacagcagcgcggggaaggctttgaactgcgtaccgatatgtggggcgcagtgcgggcgaagaaagggatttttatcagcgccgatgcgcaggacaaggcgcagggtcaggttctggatatgactgatgcactagctcaacttcgcgaggcacagtctttggtagaggcactatgtagtgctactgaagtggcaaaggctgaacttgcagatttgcagactcagaaagtaatgatgtcagaggctctggaggaactcaaaaaatcagcgatgttgctttcggctccggaaggaatagctcaggttacgccaaaaagcctgcagctgtccgcaggagaaaacatcattagcaccagtggaaaaaattcagatttcagcgtgttgaagaagtttaccgttgctgctggagaaacggtaagtctgtttgcccaaaagctggggataaaaatttttgccggtaagggaaaagtagagattcaggcgcagggagatgaaatgttgctagatgcgctgaaagatatccgcatcagcagcagtgaggggcgaatccttattagcgcaaaaaacgaaatcattctgaccagcggcggcggatatattcgtattggtgatggtacggtggaatgcgcagccccagacaagatcatagagcgtggggccgtatggcagaagttcagcggccagagcatcagtcaggcgatgcaacagtgggattctgctgattttgctgtcacaccagaaatactctggcaacaaactggcaaacctgcaaaaaatcaaaaggtacaggtcacacggggtgatggctcagtggtggaaatgaccaccgatgaacaaggacgattgcccatacagtcagggcttttcgttgagtcaataaaaattgatctgccggatagtcaggaaaactga

SEQ ID NO: 5032 - DNA, 1770 bp, Escherichia coli
atgacatcgacgatgcatatggacagggccgataagaataaagttggcaccgttgaaattgaggatctacgggttattccggttatttttctgcccggagtcatgggttcaaaccttatggataagaaaggaaaatccatctggcgatatgatgactctatgagtctgatgggctggtcactacctacatcaggaccaaaagagaggaaaagattattgcatcctgacagggtggaggtcgataatcgtgggagaattcccgcacctccggatgcccaagaaaaacttattcagttaggtcaacaatatccggaggacccatccgataaagaagcaatggataattacactcaggcagtacgtgacattttggataatatagagccagaagcgaaattatttggttcaagaaaagatcgcggctggggagaggttgcaaatgctagctacggttcctttctcgatgtattacaaacagcattgtaccgggacaaacctacaaagaaaggtgagacgttaagtgcgacctaccagcaactactcgatgtacctttgggtttggagtatggtcctgactcacttgatgaagagtatcttgaagtcataaggttgtatcaatttccggtccatgtcgttggctataactggcttggttctaatatgctctcagcaatcagactacaagaacagatcaagaaaattgttggaggctatcaaaaacgaggaatgaaatgccataaagttattctggttacgcattcaatgggaggactagtggcaaggtacttttcagagtgtctttcggggaatacggatgtctacggtattgttcatggcgtattaccatcaattggtgctgcggcgacatatacccgaatgaaacgtggaactgaaaacccagagtcaaatccggaagggtatgttatcagtcatatcttaggtcgtaatgcagctgaaatggtagctgttttttcccagtcgccaggaccaatggaattactacccatgaatgattatggtgaagagtggcttaatattgtcgatcgtgatggtagtacattaacgctccctaaaaatcctcccattaaagaaggtattgcccccgaagaacgcacctacgctgaactttatctaaatagagaaaattggtggaaattggtggatgagaatctattgaatccttttaatacttcattaaatcaaaagcaaattgatactgattggaatatatatgaaaatttaattactgagagtgtcaatccatttcataagcaaattgctggaaaatatcatatcaatacttactctttctatgggagagcgaaattgggagatattcctgaagcgcatttaacgcaggaaaatgttctttggaaaggctcattatcaatgggaaaaaaaagtgatatatctttagaaccaaaattcattgatggtcgtcttgatttaaatgaagttggtaacattagaactattaaggatgaattttctcctgaagaacaggcgtgggaaataaatactgacgacggtgatacatatgttaagataggacagcgttttacattacgagactcttgtgaaaacggggatggtacagtacctcttcgtgcaggacaaatcgtacacaagaacatcctagagcgtttggctgtacaggtttctcacgaggctgcttatcgaaatcccgttagtcaggcatttgcattacgttctattataaaaatagctcaggaggtaaaaaaggatggtaaaatgtcatactctgattaa

SEQ ID NO: 5033 - DNA, 834 bp, Escherichia coli
atggtaaaatgtcatactctgattaaccgtagaaataaatgtctgctgattgtttttatagtccttattggatggattatattcagacctaaagcatatacttattcactaaatgataaagaaaaagagatgctcataatgttatcacaacatcctgaaactcggtactttggattttattccatagaacttccggctgattacaaaccaacaggaatggttatgttcatacaaggatcggcgatgatccctgtagaaacaaagctacaatattatcctccttttctgcaatatatgacacgatatgaggcagaactaaaaaacacctcagcattagatccactggatacgccttatttgaagcaagttcacccactaagtccacctatgaatggagtcatttttgaacgaatgaaagcgaaatacaccccagattttgcacgagtattggatgcatggaaatgggaaaatggcgttacgttttcagtaaaaatagaagctaaagatggtagagcaacccgctatgatggaattagtaagattgccgaatacagttatggatataatattccagaaaaaaaagtacagttacttactattctttcaggactacaacctcgtgcagataaccaacccccatcagaaaataaattggcgatacaatatgcacaggttgacgcttcactacttggagagtatgaattatctgtagattataaaaatagcaataatattaaaataagtttgcagacggataataatagttatattgactcattattagatataagatatccgagtaatggaaacagagcatggtataactctatataa

SEQ ID NO: 5034 - DNA, 294 bp, Escherichia coli
atggaaacagagcatggtataactctatataaaggtcgtaagaaaattaatggtctggagatatctgaatggtgggttcgtaagcaaataatgttgaactcagaaccatcacgagattatgaattcaatctggcaatccatgaggataagaaaaacaacaaacagttattaaaacttgttatgaattacagtgttgacatcttacacgctgacaatgcattaactgaacatgaactgatggcgctgtgggaaagtataacagggacaattaaatatcatcccacgcagtggtaa

SEQ ID NO: 5035 - DNA, 261 bp, Escherichia coli
atgcctgggatcgtttgtttaggtgatgccacgactcatggtggtaaggtgattaccgcaacttcaacgctttttatcaatggcattcaggtagctctcgtaggtgatctggtttcctgcccaaagcacggcgtgaatcccatacaagaaggtgacccgacagcgacggaaaaaggtcgtaatgtcgttgttaatcattgccaatgtgcatgtggctgtagggttatcagttctcaaccagaaaatagtatcgagtcataa

SEQ ID NO: 5036 - DNA, 1137 bp, Escherichia coli
atgggatggcctgtacccgatattccagaaagaaaaatgctacctgagcctgtttatcgacgctggattatattattaatatctatgttaacagttggtactctgtttattttatcggtctggaattctgcgacatactgggatatttttatttatggcgttctgccaatgctgtttctttggctatgtttgtttggtattgcgctgaacaaatatgaacaatccgttgcagcctgtataagttgggagtctgaaagacaacaagttaaacaactctggcaacactggagccaaaaacaactggcaatagttgggaatgttctttttacaccggaagaaaaaggcatgagtgttttactggggccacaggaagagatccctgcatatcctaaaaaggcacgaccgttattctctgcatcccgttattctctttcgtctatattccatgatattcaccagcaactgacacaacaatttcctgattatcgtcattatctacatactatctacgtattacagcctgagaaatggcgtggagaaaccgtgagacaggctattttccatcaatgggacttagtacctgaacggaccaatactcttaatcaaatccagtctctttatgatgaaagatttgacggtctaattctggttgtttgtttacaaaactggccggagaataaacctgaagatacgagtgaactggtatcagcacagcttatctcctcatcgtcatttgtacggcagcaccagatacccgttattgctggtctggggcgtgtaatgccattagaacccgaggagttggagcataatctggatgtgttatttgaatataaccaattggataacaaacaactacagcatgtctgggtctctggtttagatgagggaacgatagaaaaccttatgcagtatgctgaacaacatcaatggtcacttcctaaaaaacggcccctacacatgattgatcattcctttggccctacaggagagtttatttttcctgtctctctggcaatgctgtcagaggctgccaaagaaactgaacaaaatcatttaattatctatcagtcagcacagtatgctcagaaaaagagcctttgcctgattacccggaagctttatttaaggacatga

SEQ ID NO: 5037 - DNA, 555 bp, Escherichia coli
atgtacaggcaagaatatcagatggttgtcactgtaccaactgctgacgcgaacgatcccaactggccaaataaaaggatacagtttgataccagcgaatggctacagcaacttcaatatattaaaatagatgatcattatatattgaatactcaatatactccaattgctaatttggatgactttggtattacattaaaattacagaacgcattaaatgggtcggataaaagacttcctgcactatatggccttgctgagatggatgttcagaaatttaaagacctgatgcgcggtaaaattaaatgtgaatatctgaggacgacatttgatgcggaaacattaaagcctgtcaatgattatttccttatttcttttacttataaagataagtggtatgaatttgagacagaaagaaaaatatctaaaacaagtgatgatgggtattttttgtgggcatttgataatactgtccacgaagcaggctattggcataacacagatccggctgcgtattcctatagagattaccagaatggtaaggctgtgaaataa

SEQ ID NO: 5038 - DNA, 444 bp, Escherichia coli
atgaatattcaggcaataaaagaaatggtaaatttaatttgtagttttttatttatattctttctgtcctcggcttttgtttcttttgggtgttatgctatttatgaattgtttttatggaatgatattattgtatatagctggggatatatattaattgtctttttacctttcacattatatgtaatgtcgtttgagattttgttttttgctattagtgggcgacgattgtctaaagtaacaatggtgcgcctttggttgataattaaaattattattgctttctctatttgcgcagtgttgattttttcttcaatttacaaaaaagaattattatctagaaattatattgcttgtagtggtatcccgtctgggtggatgccgggtctggcaacgaaatacgttaaagaaaaatcattatgcgaaaaaaatggcaataattaa

SEQ ID NO: 5039 - DNA, 1080 bp, Escherichia coli
atggacagagcatcacagccagcgcgtaccgggctgaccgaccggctggccccggatattgcgcggatcaatttttaccgtttttgccagttgctggaacagagccagcagaaagcgccgctgggcagtaccgacaaccccgccgccgatgcggtgcgttttcgcccccatcccggaatgggctttccggtcagcgagttaaagaacgttgaacgtgacgtggacaatcccgacgcgccacccacggtgcgcaccacctttctcggcctgtacggcgtggattcaccgctgcccaccgcctatctggactacattacccagcgtcatgacggacatgacgcagtgatggcgtttctcgatatttttaaccatcgctttatcacccagtattaccgcatctggcgcaaatataactacccggcgtcgtttgaagcaggtgccgtggatgacatttcccgttgtctgctggggttaatcgggctgggtattcccggcagcgagaaccatatcgccacgcctgtatcccgttttctggccctgctcagcgtgatgcgcctgcccacccgcacggctgaaggcgtcacggcactggtggggctgcttgccccgctgacgaaagccacggtggtgcctcacgatccgcagcctgtaattctcccggcccctgcgggtctgtcaaaaaattcacgcatcagcctgaaaacgcgaacgctgctggggcgtaccggtaccgacgtcaacagccagttgctgctgaaactgtataccgaagatgccgcagaagcacgtggctggctgcccggcgggcaactgcacagcgatttgctggtgctgctgcgcgtttatctgggctggcgctgtcaggcccgtctgcaactgacgctgcccgtcagcctgttgcctgctgcccggctgggaaaacagcgtgtacagattagccgtaccggcatccttcgcgcctcctttgccgcgcccgcgaccggaacagtgacggtcagtctggggcgttatcagggattaatacccgctttttccattcgtaacagggagagtatgactcatgtttcctattcgttttaa

SEQ ID NO: 5040 - DNA, 948 bp, Escherichia coli
atgaaaaatgttctggtcaccttccccagcttttcagcacgctgtgtttccgccagcaagttgctaagagagaataattttaatcttattattaagaataatgtggagcatctgcttaaatcagaatccactgcattacgagaatctatttgcgcggtcatcgccggaaaagatggttatcaggcggacacgctatcattgctgcctggtgtgagaataatatcgagattcgggacggggatagacaatattgatcttcgtgcggcacagcaatccggtattgttgtcaataatgcggttgggattaattcaaatgcggttgcggaatttatcattggacttatcttcgcgagcatgagaaatatccctggcagctatcatgcgatgcaaaatggctactggggtgagtcgcatggctgtgaattacaagggaaacggattggcctggttggctacggtaatataggtaaaactctggcgaaaaggttatctggttttgatgttgagcttttagcttttgacaaacaacccgactatcaggttgctgacaaagctggagttcagtttgtatcaattgaagatatctttatgcagtcgcatgtcatcattgttcttttgcctttttcttctgagctggagaacttcattagtcataaatatttgtcgatgatgcgcaatggtgctctgatcatcaatgccgcaaggggaaagttgctggatgagggcgctttacttcaggtgattgaagaacgaaatgtgtttgcggcgctggatgtgtttagctctgaaccgttggcgcaatttagcccactgctacatgccaaaaatatcattacaacgccgcatatcgcggccgccaccgttgagtcataccagcaaaccgggatacacgttgcccagtcgataattgattacttcgcaggaagggagataaaaaacgtgttgtga

SEQ ID NO: 5041 - DNA, 597 bp, Escherichia coli
atgaataacacggatcttatctatctcattaaacattttatgcataacgaacttaaagcagtagaagaggttatttattccccactttctgaattcgctaatttaattaaagtattacaatcttgtcagggaaaagttgtttttattggtgttggtaagtccggtattattgccagaaaactcgcagcaacttttgccagtaccggaactccctcgttttttgttcacggtacggaagcggtacacggcgaccttggaatggtggcgaaagacgatgttgttattcttatttcaaacagtggtgagacggcggaaatcctggcgacactgcctagtttgaaaaaaatgggtaattatttgatctcttttacccgcagtcatcactcatcgcttgcgataagttgtgatttatctgttgaaatccccgtcaaaagtgaggcggataatttaggtttagcaccgtcatgctcgtcgactgttgttctggttgttggtgatgcggtggcgcttgcactctctgaattgaaaaaatttactcgtgctgatttcggcttatatcatccaggaggtgcactcggcattaaagcaaattcataa

SEQ ID NO: 5042 - DNA, 1176 bp, Escherichia coli
atggatgtttttaatactcctgtttcccgcaaaggaacatattgtacccaatgggacttttgcgaggacagatttggtgtaaaagatgtactaccattctctatttcagatatggatcttccgataccagacgctatcaccagagcattaaaaaaacgcctggaacacccgattttagggtacagtcgttggcaacatggtgaatatctgaatgcgatagtaaactggtattatcaacaatatcaaacagatattaaacctgaatggataacctatagccccagtgtgatgtactctattgcaaaagcaatagagttattgacatcgcatggtgataatattctcgtttttacacctgtctataatgcattttttgatgtaattaaacatagcgagcgaaatattctgacagcctctttgattataaaaaatgaggggggctacgctatcaactggcaagattttgatcttaagattaaaagcgcaaagatggtgttattatgtaatcctcataacccgacaggaacagtctggtcggaagaagaactgcataaaatcgctgcaagctgtacaaggcataatgtctggttatgttcagatgaaatccatagtgattttgtttttaatcgtagctttacatccgcgcttaaaataaaaaaagaaaaagtagtagtatttaactcgatatcgaaaacatttaatgttcctgcactaacaggatcgtatatgatttcaactgacgataattttaatcataagttcagaacgatatcgaggtatcgcgattttgtaaactccccatcagtactgaatataattgcaactattattgcctataacgaatgtgagggatggttaaagtcattaaaggcacatattgcctctaacattcaattcacccagcagtatctgaatgaaaatattccagaattgatcgtaaggccagctgatggttgctatttttcctggatagattgttctgctattggttatccttttgatgaattctacagtcgattaattcatgaaggcaaagtgggcattatggcggggcatgtctatggaatggagggggagggctaccttcgtctgaacctggcctgcggtcgagaaaaattatatatggggcttacgcgtcttgtgagtgtaattaaaaatattaatcagggagaataa

SEQ ID NO: 5043 - DNA, 819 bp, Escherichia coli
atgcgactagccagtcgttttggttatgcgaaccagatacgccgtgaccgtccgctgacacacgaagaactgatgcactatgttcccagtattttcggtgaagaccggcatacttcccgcagtaaacgatatgcgtacattcccaccatcaccgtactggaaagcctgcagcgggaaggctttcagccattcttcgcctgccagacccgtgtgcgcgacccgggccgccggggatacacaaaacacatgctgcgtctgcggcgggccggagagataaacggagaacatgtccctgaaatcattctgctcaactcccatgacggtacctccagctaccagatgctgccgggttacttcaggttcgtctgtcagaacggatgcgtctgtggtcagtctctgggggaagtgcgtgttccgcaccggggaaatgtggtggacagattcattgaaggggcttacgaggtggtgggcgtgtttgaccggatagaggagaagcatgatgccatgcagtcgctggtcctgtcgccaccggcacgccaggcgctggcacaggcggcactgacttaccgttatggtgacgaacatcagccagtcaccaccgctgacattctgacaccacgacgcagggagggttacggtcaggacctgtggagcgcatatcagaccatccaggagaatatgctgaaaggcggaatttccggccgcagtgcaaaaggaaaacgtatccacacccgtgccattcacaacatcgacaccgatattaagctcaaccgcgcattgtgggtaatggcagaaacgctgctggagagcctgcgctga

SEQ ID NO: 5044 - DNA, 159 bp, Escherichia coli
atgccgggttgtacatctcgtttattgcccgaaggccctttctcacgcgaacaggctgttgccgtcaaaacagcttaccgcaatgtgtttactgaagatgaccagggaacatattcccggctggttatccgtaatgctgaaggtcagttgcgctggtga

SEQ ID NO: 5045 - DNA, 3120 bp, Escherichia coli
atgaaacgacatctgaacaccagctacaggctggtatggaatcacattacgggcaccctggtggtggcctccgaactggcccgctcacggggaaaacgcgctggtgtggcggttgcgctgtctcttgctgctgtcacatcagtcccggcactggctgctgacaaggttgtacaggcgggagaaaccgtgaacgacggaacactgacaaatcatgacaaccagattgtcctcggtacggccaacggaatgaccatcagtaccggtctggagtatgggccggataacgaggccaataccggcggacaatggatacaaaatggcggtatcgccaacaacactactgtcaccggtggtggtcttcagagagtgaatgccggaggaagcgtttcagacacggttatcagtgccggaggcggacagagccttcaggggcaggcagtgaacaccactctgaacggcggtgagcagtgggtacatgaaggcgggattgcaacgggtaccgtcattaatgagaagggctggcaggccatcaaatccggcgcagtggcaaccgacacggttgtgaataccggcgcggaagggggaccggatgcggaaaatggtgataccgggcagaccgtctacggagatgccgtacgcaccaccatcaataaaaatggtcgtcagattgtggctgctgaaggaacggcaaataccactgtggtttatgccggcggcgaccagactgtacatggtcacgcactggataccacgctgaatggggggtaccagtatgtgcacaacggcggtacggcgtctggcactgttgtaaacagtgacggctggcagattgtcaaaaacgggggtgtggccgggaataccaccgttaatcagaagggcagactgcaggtggacgccggtggtacagccacgaatgtcaccctgaagcagggcggcgcactggttaccagtacggctgcaaccgttaccggcataaaccgcctgggagcattctctgttgtggagggtaaagctgataatgtcgtactggaaaatggcggacgcctggatgtgctgaccggacacacagccactaatacccgcgtggatgatggcggaacgctggatgtccgcaacggtggcaccgccaccaccgtatccatgggaaatggcggtgtactgctggccgattccggtgccgctgtcagtggtacccggagcgacggaaaggcattcagtatcggaggcggtcaggcggatgccctgatgctggaaaaaggcagttcattcacgctgaacgccggtgatacggccacggataccacggtaaatggcggactgttcaccgccaggggcggcacactggcgggcaccaccacgctgaataacggcgccatacttaccctttccgggaagacggtgaacaacgataccctgaccatccgtgaaggcgatgcactcctgcagggaggctctctcaccggtaacggcagcgtggaaaaatcaggaagtggcacactcactgtcagcaacaccacactcacccagaaagccgtcaacctgaatgaaggcacgctgacgctgaacgacagtaccgtcaccacggatgtcattgctcagcgcggtacagccctgaagctgaccggcagcactgtgctgaacggtgccattgaccccacgaatgtcactctcgcctctggtgccacctggaatattcccgataacgccacggtgcagtcggtggtggatgacctcagccatgccggacagattcatttcacctccacccgcacagggaagttcgtaccggcaaccctgaaagtgaaaaacctgaacggacagaatggcaccatcagcctgcgtgtacgcccggatatggcacagaacaatgctgacagactggtcattgacggtggcagggcaactggaaaaaccatcctgaacctggtgaacgccggcaacagtgcgtcggggctggcgaccagcggtaagggtattcaggtggtggaagccattaacggtgccaccacggaggaaggggcctttatccaggggaataagctgcaggccggtgcctttaactactccctcaaccgggacagtgatgagagctggtatctgcgcagtgaaaatgcttatcgtgctgaagtccccctgtatacatccatgctgacacaggcaatggactatgaccggattctggcaggctcccgcagccatcagaccggtgtaaacggtgaaaataacagcgtccgtctcagcattcagggcggtcatctcggtcacgataacaacggcggtattgcccgtggagccacgccggaaagcagcggcagctatggcttcgtccgtctggagggtgacctgctgagaacagaggttgccggtatgtctctgacgacaggggtgtatggtgccgcaggccattcttccgttgatgttaaggatgatgacggttcccgcgccggcacggtccgggatgatgccggcagtctgggcggatacctgaatctggtacacacgtcctccggcctgtgggctgacattgtggcacagggaacccgccacagcatgaaagcatcatcggacaataacgacttccgcgcccggggctggggctggctgggctcactggaaaccggtctgcccttcagtatcactgacaatctgatgctggagccacaactgcagtacacctggcagggactctccctggatgacggccaggataacgccggttatgtgaagttcgggcatggcagtgcacaacatgtgcgtgccggcttccgtctgggcagccacaacgatatgaactttggtaaaggcacctcatcccgtgacaccctgcgcgacagtgccaaacacagtgtgcgtgaattgccggtgaactggtgggtacagccttctgttatccgcactttcagctcccggggtgacatgagcatgggtacagccgccgccggcagtaacatgacgttctcaccgtcccggaatggcacgtcactggacctgcaggccggactggaagcccgtgtccgggaaaatatcaccctgggcgttcaggccggttatgcccacagcgtcagcggcagcagcgctgaaggttataacggtcaggccacgctgaatgtgactttttga

SEQ ID NO: 5046 - DNA, 873 bp, Escherichia coli
atgaatccgtctgatgccattgaggcaattgaaaaaccgctctcctccctgccttactcactttcccgtcacatcctggaacatctgcgcaaactcaccagtcacgaacccgtgattggcattatgggtaaaagcggggccggtaaatcctcactctgtaatgcactgtttcagggggaggtcaccccggtcagtgatgttcacgccggcacccgggaagtacggcgcttccgtctgagtggccacggtcacagcatggttatcactgacctgcccggggtgggcgagagccgggacagggatgcagagtatgaagccctgtaccgtgacattctgcccgaactggacctggtgctgtggctgattaaagccgatgaccgcgccctgtctgtggatgagtatttctggcgacacatcctgcaccggggacatcagcaggtgctgtttgtggtgacgcaggccgacaaaacggagccctgccatgaatgggatatggccggcattcagccttctcccgcacaggcacagaacattcgggagaaaacggaggcggtattccgtctgttccggcccgtacatccggttgttgccgtatcggcccgcaccggctgggaactggatacgctggtcagtgcgctaatgacagcacttcccgaccatgccgccagtcccctgatgacccgcctgcaggacgagctgcgcacggaatctgtccgcgctcaggcccgtgaacagtttaccggtgcggtggaccggatatttgacacggcggagagcgtctgtgttgcctctgttgcccgtacggttctgcgtgccgtccgtgacacggtggtctctgttgcccgcgctgtatggaactggattttcttctga

SEQ ID NO: 5047 - DNA, 1485 bp, Escherichia coli
atgtcattcggtcagccttgtgatgagtttcccctgagttcgctgcctccactcattcgtgatgccgttattgaagctcagcaaattacgcaggctccccttgggcttgtggcagcgtctgccctgggcgctgtttcacttgtctgccagaatctgattgatgtctgcagactgaatacactgcgggggccggtctctctttttttcctgacgcttgccgagtccggagaacgaaaaaccgcagtggacaaattattaatgaagcccctgtaccagcaggagatgcagttatattccagatacaaaagtgaactggctgtctggaaaaacaaggaagagcttttaaaggctcagaaaaaagcattgttgtcaaaactgaataaagaactccgcaaaggcgcggatgagtcagaaaccctcagacaactggaagtacttcagaaaaacagtgcggaagaacctgtgaggtataaattcatttttaatgatgccacgactgcggcaattaagaatcagctttgtggtaaatggcgttcagtgggtattatgtcagatgaagccggtattatatttgatggatataccctgtctgagttgccttttattaacaaaatgtgggatggctctgtattgtctgtggacagaaagaatgaacccgaacagatgattgaaaatgccagaatgacgttatccctcatggtgcaacccggtctttttgaccgatatatggagcgaaaaggttctgttgctagggacagtggttttcttgcccgttgtcttatcagtaaacctgcaaccacgcaggggaaacgctttattaacggagctgtgattccgggaggatcattaacggcatttcatgaacgattaatggaactggccagaggcagtattgaaaaatccagtgaggatgaacggtattgtctgcatttttcgcctgaagcgcaaaaaatatttattgagcactataatgttctggagcaggatttatccccttccggacccttaagcccgtttcggggacatgtttcaaaaaaaacagaaaacattgcaagaattgcagcgttatttcagtatttcagctatggtgaagggaaaatctctgccgatatcatgacgtctgctgtcgtaataagttcgtggtacacagatgaatataaaaaattatttgcgttacctgatgaatctgaactgcagcagaaggacgccgaggagctgttcgactggctcattgaggagtgccgcggagaatgcccgccccgtgtcaggaaaaattatattctccagtgtggcccgggccggttcagaaacaggaaaaaactgaacgcattgctgaacattcttgaatctcagttcaggctttctgtcgtgccggaaggaaaaaccatgtatgttctgcttccccagatagccagtttaaagttgtctgatgtctctggtatttttacctcgggttatcactacaataagctgagagcgaagtaa

SEQ ID NO: 5048 - DNA, 603 bp, Escherichia coli
atgaaacaacagtatcagacccgctacgaatggctccacgaaagctaccagaaatggctgaccggcttcacccggcacgccgtattctggggcgtgtgtcatccgaatatctactacttccataatctgacgcccggttgggtgtcattcaatggtgaaaaaccggagattgccatcgtaccccagagcctgcaccggctgatttatggccctgacaaacgggccacaccgcccctggatgatgatctgatagtgaatttatgcaccagtgaacatctgctggttcatcatccgatgctggaaggcattctcctgtctgaatgtgaacgtctgaggcagcgttctctggcaaataaactgatcagcctcttccgtcagtttggtggcacggagttgcgcctcaaactggtctggctttgctggcttgatttaatgaccggaaactgccttgacgactggacggagaatctgaaacggaaatcagaaaaagagctggaggaatggatcatcaaccgtcagaagcagagcgcagcactgacggatctgatggatcagtacgtgctcctgtcataccgcacaacggttgacgataagcgcacctga

SEQ ID NO: 5049 - DNA, 207 bp, Escherichia coli
atggctacccctgtttcgctgatggatgaccagatggtcgacatggcgtttatcactcaacttaccggcttaaccgataagtggttttacaaactcatcaaagatgggggctttcctgcccccatcaaaatggggcgcagctcccgctggctgaaaagtgaagtggaagcctggctgcaggcgcgtattgcacagtcccgtccgtaa

SEQ ID NO: 5050 - DNA, 1023 bp, Escherichia coli
gtgagtcagcccgttcctggcgaggaggagactgataccgccgaacagctggagttgatgcgtagcgccttccgggttatccggacggtacgggaaaaacatgcctgtactcagtgcgatgccatcgtgcaggcacctgcaccttcgcggcccatcgagcggggtatcgccggaccggggctgctggcccgcgtgctgacctcgaagtatgcagagcacaccccgctgtattgccagtcagaaatatacggccggcaaggtgtggagctgagccgttcactgctgtcgggctgggtggatgcatgctgccggctgctgtctccgctggaagaggcgcttcatggctatgtcatgactgacggcaaactccatgccgatgataccccggtccaggtactgctgccgggtaataagaagacgaagaccgggcggttgtgggcgtatgttcgtgatgaccgcaatgccgggtcagcgttggcacctgcagtgtggttcgcttacagcccggacagaaaaggcatccatccgcagactcatcttgcttgcttcagcggtgtgctgcaagcggatgcgtacgccgggttcaacgagctgtatcgcaatggtgggataacggaagctgcctgctgggctcatgcccgccgaaagatccacgatgtgcacgtccgcatcccgtcagcactgacggaagaagccctagagcagatcggtcagttgtacgccatagaggcggatataaggggaatgccggcagagcagcggcttgctgaacgtcagcgaaaaacgaaaccgctgttgaaatccctggaaagctggttgcgtgaaaagatgaagaccctgttcttcggctctggccatggtggtgagcggggagcgctactgtacagcctgatcgggacgtgcaaactgaatgacgtggatccagaaagctaccttcgccatgtgcctggcgtcatagcagactggccggtcaaccgggtcagcgaactgcttccgtggcgcatagcactgccagctgaataa

SEQ ID NO: 5051 - DNA, 1359 bp, Escherichia coli
atgaaaagaaaaattattcccgtgctaatcggttgtacgctctctttctctgccctggcggcacaacctacggctgagcgctatgtcgtcagttttccagaaggcacgcacgtgaactacgccggcgcatttgccagtgcattcccgaacggccttccggttgggataggttctggcctgctgttcaccggtaaacagggcgatgccctgacattcgcaaccattaccgatcgcggtccgaacgcggattcaccgaaagaggggaaaaacgaaactaaaattttcgttacgccagatttcgcgccgctgctgatgacgattcgtgtacaaaacggcaaagcggaggccatcgatccccgtcctctgcatgacgataaaggcgcgatcaacggtctgccgctggcaagcgacgtgattggctccaccaatgaagtggccttcagcgacacgttacatagactgaagggggataatcgcgggctggatacggaagggatcactccggatggtaaaggaggttactggctgtgcgatgagtatggcccgttcctgattaacatcgacagtaaagggaaaatcctggcaatccacggtccgcaggcggcggaaggggaaaaagcgattgcgggcggtttgccaaatatcctcaaatggcgtcaggcgaaccgcggctttgaaggcctcacccgtatgccggacgggcgtattattgtcgccgtgcaaagtacgctggatatcgacgctaagagcaagaaaaaggcgctgtttacgcgtctggtgagcttcgatccggcaagcggaaaaaccgcgatgtacggttatcctatcgacagcgcggcctacagcaaaaacagcgacgctaaaatcggagacatcgtggcgctcgataaccagcacatcctgctgatcgaacagggaagagataaaaacaacagaatgcgtaacctgatttacgaggtcgatctcaataaggcgagcgacctgtcaggcttcgacaagccgggtgagtatccggagtttgatgatgagaaaaccctgtcacagcgcggcattacccttgcgcagaaaacgcaggttgttgatctgcgctccttgggctggcagcaggagaaggctgaagggttggcgctgatcgacagcaaaacgctggcggtggcgaacgataacgactttggcgtgaaggtggcgatgcaacatccggtcgagggcaagacattcaaggattatcgggtgaacgcggaaggaaagctgacgcttgacgacaagcaggttgaaacgaccctcagagtgaagccactggagaaaccggagtctgacagtgaactgtggattgtgacgctgccggaagcgttgaaataa

SEQ ID NO: 5052 - DNA, 258 bp, Escherichia coli
atgcacagtgattattataatatggtttttggtgaaaaattggccaatattttatatgaagctaactctcaatttttttacgagagaaatgtcatagaagaggcagtcaacgctttattctgtgagcgtgaaataataaacaacaagaacataataaagaagctgatgttctttttgtcagatgttaatcacaccaagaaagatgttgttcagagcgcacttaatattatcattgacattacatcaggtgatatttga

SEQ ID NO: 5053 - DNA, 210 bp, Escherichia coli
atgacggatggctggccgctgtatgaatcacgcctgaagggaaagctgcacgttatcagcaagcgttacactcagcgcattgagcgacataatctgaatctgagacaacatctggcaaggctgggacggaagttactgtcgttctcaaaatcggtggagttgcatgacaaggtcatcgggcattatctgaacataaaacactatcagtaa

SEQ ID NO: 5054 - DNA, 522 bp, Escherichia coli
atgtctgaccgcgccactaccacagcttccttaacgttcgagtcgctttatggcacacatcacggctggttgaaaagctggctgacgcgcaaactccagtctgcttttgatgcagatgacattgcccaggacacttttttgcgggtaatggtcagcgaaacgctctcgacgatccgcgatcctcgctccttcctctgcactatcgccaaacgcgtgatggtggacctgtttcgccgaaacgcgctggaaaaagcgtatctggagatgctggcgcttatgccggaggggggagcgccttcacctgaggaacgcgaaagccaactcgagaccctacaactcctcgacagcatgctggacgggctaaacggcaaaacacgtgaagcgtttctgctttcgcaactggatggtctgacatacagcgagattgcgcacaaactcggtgtttccatcagctccgtgaaaaaatacgtggcgaaagccgtcgagcactgcctgctgttccgtctggagtatgggttatga

SEQ ID NO: 5055 - DNA, 954 bp, Escherichia coli
atgaatcctttgttaaccgattcccgccgtcaggcgctgcgttcagcttcccactggtatgccgtgctaagcggcgagcgcgtcagcccacaacaggaagcgcgctggcaacagtggtatgaacaggatcaggataaccagtgggcctggcagcaggttgaaaacctgcgcaaccagcttggcggtgtgcctggcgacgttgccagccgggcgttgcacgatacccgcctcacccgccgtcacgtgatgaaaggattactgctgttgctcggcgctggcggaggctggcagctctggcagtcggaaaccggcgaaggtctgcgggcagattaccgcaccgccaaaggcacagtcagccgtcagcaactggaagatggctccctgctcacgctgaatacccaaagcgcggcggatgtgcgttttgatgcgcatcagcgcaccgtccggctctggtacggtgaaatcgccattactaccgcgaaagatgccctgcaacgccccttccgtgtcctgacccgtcagggccagctcactgctttagggacagaatttaccgtccgccagcaggataatttcacgcagcttgacgttcagcagcacgctgtggaagtgcttctcgccagtgcccccgcgcaaaaacgcatcgtgaacgctggtgaaagcctgcagttcagcgcctctgagtttggcgcagtgaaaccgctggatgacgagagtacaagctggacgaaggacatcctgagcttcagcgataaaccactgggtgaggtgatagccacgctaacccgttaccgcaacggcgtgctgcgctgcgatcccgccgttgccgggctgcgcctgagcgggacgttcccgctgaaaaataccgatgcgatcctgaacgttatcgcgcaaacgcttcccgttaaaattcagtctattacgcggtactggataaacatttcaccactgtaa

SEQ ID NO: 5056 - DNA, 2325 bp, Escherichia coli
atgacgccgttacgcgtttttcgtaaaacaacacctttggttaacgccattcgcctgagcctgctgccgctggccggtctctcgttttccgcttttgctgcacaggttaatatcgcaccgggatcgctcgataaagcgctcaatcagtatgccgcacacagcggatttaccctctcggttgacgccagcctgacgcgcggcaagcagagcaacggcctgcacggcgattacgacgtcgagagcggcctgcaacaactgctggacggcagcggactgcaggtaaaaccgctgggaaataatagctggacgctggagcccgcgcccgcaccaaaagaagatgccctgaccgtggtcggcgactggctgggtgatgcgcgtgaaaacgacgtatttgaacatgctggcgcgcgtgacgtgatccgccgtgaggatttcgccaaaaccggcgcaaccaccatgcgtgaggtacttaaccgcatccctggcgtcagcgcgccggaaaacaacggcaccggcagccacgacctggcgatgaactttggcatccggggcctgaacccgcgcctcaccagccgctcgaccgtcctgatggacggcatccccgtccccttcgccccttacggtcagccgcagctttcactggctcccgtttcgctcggcaacatggatgccattgacgtggtacgcggtggtggtgcggtgcgttacggaccgcagagcgtgggcggcgtggtgaactttgttacccgtgccattccgcaggactttggtatcgaggcgggcgtggaaggtcagctcagcccaacctcttcacaaaacaacccgaaagagacgcacaacctgatggtgggcggcacagcggacaacggttttggcaccgcgctgctctactccggcacgcgcggcagtgactggcgcgagcacagcgccacccgcatcgacgacctgatgctgaaaagcaaatatgcgccggatgaggtgcacaccttcaacagcctgctgcaatattacgacggtgaagccgacatgcccggtggcctgtctcgcgcggattacgacgccgatcgctggcaatccacccgcccgtatgaccgcttctggggtcgtcgcaagctggcgagcctgggctaccagttccagccagacagccagcataaattcaacattcaggggttctacacccaaaccctgcgcagcggctacctggagcaaggcaaacgcatcaccctctcgccgcgtaactactgggtgcgcggtattgagccacgctacagccagatctttatgatcggcccttccgcgcacgaagtgggcgtgggctatcgctatgtgaatgaatcaacgcatgaaatgcgttactacaccgccaccagcagcgggcagttgccgtccggctcaagcccttacgaccgcgatacgcgttccggcaccgaggcgcacgcctggtatctggatgacaaaatcgacatcggcaactggaccatcacgccgggtatgcgtttcgaacatatcgagtcataccagaacaacgccatcacaggcacgcacgaagaagtgagctataacgcaccgcttccggcgttgaacgtgctctatcacctgactgacagctggaatctttatgcaaacactgaaggctcgttcggcaccgtacagtacagccagattggcaaggctgtgcaaagcggcaatgtggaaccggaaaaagcgcgaacctgggaactcggtacccgctacgacgacggcgcgctgacggcggaaatggggctgttcctgattaactttaacaatcagtacgactccaaccagaccaacgacaccgtcactgcacgtggcaaaacgcgccataccgggctggaaacgcaggcacgttacgatctgggtacgctaacgccaacgcttgataacgtttccatctacgccagctatgcgtatgtgaacgcggaaatccgcgagaaaggcgacacctacggcaatctggtaccattctccccgaaacataaaggcacgctgggcgtggactacaagccaggaaactggacgttcaatctgaacagcgatttccagtccagccagtttgcggataacgccaatacggtgaaagagagcgccgacggcagtaccggccgcattcccggcttcatgctctggggcgcacgcgtggcgtatgactttggcccgcagatggcagatctgaacctggcattcggtgtgaaaaacatcttcgaccaggactacttcatccgctcttatgacgacaacaacaaaggcatctatgcaggccagccgcgcacgctgtatatgcaggggtcgttgaagttctga

SEQ ID NO: 5057 - DNA, 903 bp, Escherichia coli
atgttggcatttatccgttttgtttttgcaggcctgctgctggtgatcagccacgcctttgccgccacggttcaggacgaacacggcacgtttacactcgaaaaaacgccacaacggattgtggtgctggaactctcgttcgccgatgcgctggccgccgtggacgtcagcccgatcggtattgccgacgataacgatgcaaaacgcatcctgcccgaagtgcgtgcgcacctgaaaccgtggcagtccgtcggaacgcgcgcgcagccgagcctggaagccattgccgctctgaaaccagacctgatcattgccgacagcagtcgccatgcgggggtttacatcgccttgcagcaaatcgcgccggtactgctgcttaagtcccgcaacgaaacctacgctgaaaatttgcaatctgcggctatcatcggcgaaatggtgggtaaaaagcgagagatgcaggcacgcctggaacaacataaagagaggatggcgcagtgggccagccagcttcccaaagggacacgcgtggcctttggcacatcacgcgaacagcaattcaacctgcatactcaggagacctggaccggcagcgtgctggcctctctggggctgaacgttcccgctgcgatggcgggtgcgtccatgccgtccatcggcctggagcaactgctggcggtcaatcctgcctggctgctggttgcccactatcgcgaagagagcattgttaaacgctggcaacaagatccgctctggcagatgttaaccgccgcgcagaagcagcaggttgcttcggtcgacagtaacacctgggcgcggatgcgcggtatttttgctgcagagcgtattgccgctgacacggtaaaaatcttccaccatcagccgcttaccgttgtgaaatga

SEQ ID NO: 5058 - DNA, 999 bp, Escherichia coli
atgaccgcgataaaacacccggtgctgctgtgggggcttcccgttgcagcacttattattattttctggctgagtctgttttgctactcggccattcctgtttccggagcagatgcaacccgcgccctgctgcctggacacacgccaacgctaccagaagcgctggtgcaaaaccttcgtttgccacgaagcctggtcgccgttctgatcggcgcaagcctggcgctcgcgggcacgctgctgcaaaccctgacccacaacccaatggcctctccttcactgctcggcattaacagcggcgcggcgctggctatggcgcttaccagcgcgctgagtccgacgccgattgcaggctattctctgtcgttcatcgcggcatgcgggggcggcgtgagctggctgctggtcatgaccgcaggaggcggatttcgtcatacccatgacagaaacaaactgatcctcgcgggtatcgcgctgtcggccttttgtatgggccttacccgcatcaccctgctgctggccgaagatcatgcttacggcatcttttactggctggcaggcggagtgtcccacgcccgctggcaggatgtctggcagctcttgccggtggtggtcactgcagtccctgtcgtgttgctgctggcgaatcaactgaacctgctcaacctcagcgacagcaccgcccatacgctgggagtgaacctgacgaggctacgtttggtcatcaatatgttagtgctgcttctggttggtgcgtgcgtcagcgtggcaggtccggtggcgtttatcggtctgctggtgccacatctggcgcgcttctgggcaggcttcgatcagcgcaacgtactgccagtgagcatgctgctgggggccacgctgatgctgctggcagatgtactcgcacgcgcactggccttccccggagatctgcccgcaggcgcagtgctggcgctgattggcagcccttgctttgtctggcttgtgaggaggcgaggatga

SEQ ID NO: 5059 - DNA, 957 bp, Escherichia coli
atgaaaattgcgctggttattttcatcacccttgccctggcgggctgtgcgctgttatcactccatatgggagtgatccccgtgccgtggcgcgcgctgctgaccgactggcaggccggacgcgagcattattatgtattgatggagtaccgactgccgcgcttgctgctggcactgtttgtcggtgcagccctcgccgtggcgggcgtgctgatacaggggattgtgcgcaaccctctggcatcaccggatattctcggtgttaaccatgccgccagcctggcctctgtgggggctctacttcttatgccgtcactgcccgtgatggtgctgccgctgctggcctttgcgggcggcatggcggggttgatattgctgaagatgctggcaaagacccaccagccgatgaagctggcgctcaccggcgtggcgctttctgcatgctgggccagcctgacggattatctgatgctctcgcgcccgcaggatgtgaacaacgccctgctgtggctgaccggcagcttatggggccgtgactggagctttgtgaagattgccatcccgctgatgattttatttctgccgctgagcctgagtttttgccgcgatctcgacctccttgcactcggcgatgcgcgcgccaccacgctcggtgtgtcggtgccccatacccgattctgggctttgttactagctgtcgccatgacatctaccggcgtggccgcctgcggcccgattagctttattggtctcgtggtgccgcatatgatgcgtagcatcaccggtggacgtcaccgcagactgctgcctgtttcggccctgacaggtgcgttgctgttggtggttgccgatctgctggcgagaattattcatcccccactggagctcccggttggcgtgctgaccgccattatcggtgcgccgtggtttgtctggttgcttgtgagaatgcgataa

SEQ ID NO: 5060 - DNA, 768 bp, Escherichia coli
atgactttacgaactgaaaatctgacggtcagttacgggacagacaaggtacttaacgacgtttcactctcactgccaacggggaagatcaccgccctgatcggtcctaacggttgcgggaaatcgacgctgttaaactgtttttcgcggcttttaatgccgcagtctggcaccgtatttctcggcgataatcccataaatatgctctcatcgcgccagttggcccgcaggctttcgctgctgcctcagcaccatttaacgccagaggggatcacagtccaggagctggtttcgtatggtcgtaatccctggctgtcactctgggggcgtctctccgctgaagacaatgcacgagttaatgtcgccatgaaccagacccggatcaatcatcttgccgttcgtcggttaaccgagctttccggcggtcagcgccagcgcgcatttctggcaatggtcctggcccagaatacgcccgttgtattacttgatgagccaaccacctatcttgatatcaatcaccaggtggacctgatgcggttgatgggcgaactccggactcaggggaaaacggtggtcgctgtgctgcacgaccttaatcaggctagccggtactgcgatcaactggtggtaatggcaaacggacatgttatggcgcaaggcacaccagaagaggtgatgaccccaggattgctgagaacagtattcagcgtggaagcggaaatacaccccgagccggtatctggcaggccgatgtgcctaatgaggtag

SEQ ID NO: 5061 - DNA, 258 bp, Escherichia coli
atgactctggttaatgataccggctttgaccccgtattttccggctctatcgctgaatcatggcgtcagcagccgtgcacaccatcctattgttgtgactgggaggctgccaccatgcttcgcgctttccctctggcgaaaaagggagaaggacgggcccgtctgccttcactttatgccagcttcggtaagctgggtgagacaccgactcatgaagatatcattgataacaatcgatccatcaactggcctgtataa

SEQ ID NO: 5062 - DNA, 243 bp, Escherichia coli
atgagtcggcgtggaaactgctgggataacagcccaatggagcgcttcttcaggagtctgaagaacgaatgggtgccagcgacgggctatgtaagcttcagcgatgcagctcacgcaataacggactatatcgttggatattacagcgcactaagaccgcacgaatataatggtgggttaccaccaaacgaatcagaaaaccgatactggaaaaactctaacgcggaggccagttttagttga

SEQ ID NO: 5063 - DNA, 303 bp, Escherichia coli
atgagcagaaaaacccaacgttactctaaaaagttcaaagccgaagctgtcagaacggttcttgaaaatcaactttcgatcagtgaaggcgcttcccgattatctcttcctgaaggcactttaggacaatgggttaccgccgccagaaaagggctcggtactcctggttcccgcacggtggctgaactggaatctgaaattctgcaactgcgtaaggcgttaaatgaagctcgccttgagcgagatatattaaaaaaagcaactgtagattttgcacaggagtcgctgaaaaatacgcgttaa

SEQ ID NO: 5064 - DNA, 1998 bp, Escherichia coli
atgagtgaaaatgatacaatcccaaagaagtctacaagtcagattaacaaagcggtattctttacatctgctttgctaattttccttcttgtcgcctttgccgccgtattcccggatgtcgccgacaaaaattttaaactacttcagcaacaaatcttcacgaatgccagctggttctacatccttgctgtggccctgattttactgagtgtcacgttccttggactctcacgctacggtgatatcaagctgggcccggaccatgcgcagcctgatttcagctaccactcctggtttgcgatgcttttttcggcagggatggggatcggcctgatgttctttggcgttgccgaacctgtaatgcattatctttcgccacccgttggcactccagaaaccgttgcggcagccaaggaagcaatgcgtctgacctttttccactggggactgcacgcatgggcaatttatgccattgtggcgctgattctggcgttcttcagttaccgtcacggtctgcctttaactctgcgctccgcactctatcccattattggcgatcgcatatacggacctgtaggacatgcggttgatattttcgctgttataggcacggtctttggcgttgcgacatcactgggttacggtgttttgcaggtgaatgccggtttgaaccatcttttcggggtgcccatcaatgaaacggtgcaggtaattctgatcgtggtcatcacggggttagcgacgatttcagtggtgtccggtctggataagggaatacgtatcctgtctgaactcaatctgggtctggctttgttgctcctggcgctggtcctgtgtctgggaccaaccgtgcttctgctgaagtcatttgtggaaaatacgggcggttatctttcggaactggtgagtaaaacgttcaacctttacgcgtatgagcccaagtcgagcaactggctggggggctggacattactgtactggggatggtggctttcatggtcgccgtttgtggggatgttcatcgcacgggtctcccgcgggcgaaccattcgcgagtttgtcaccggcgtgctgtttgttcccgcgggttttacgctaatgtggatgacggtgtttggtaacagcgcgatctatctcattatgaaccagggggccacagacctcgccaatactgttcagcaggatgtgtcgctggccctgtttaatttcctggagcatttcccgttctcttctgtgctgtcattcattgcaatggcgatggtcatcgtcttctttgtaacgtctgctgattcgggggcaatggttgtggatactctggcatcaggtggagtggcaaacacacccgtctggcagcgaatattctgggcctcgctcatgggcattgttgcaattgcgcttctccttgccggagggctaagtgcgctgcaaacggtgacaatagcgagtgcattgcccttctcagtgatcttactaatatccatatacggacttttaaaagctttgcgccgggatttgaccaagcgtgaaagcctgagcatggcgacaattgctcctacggctgcacgtaacccaattccttggcagagaaggttacgcaatatcgcgtatctgccgaagcgatctcttgtgaaacgttttatggacgacgttatccagcccgccatgacgctggttcaggaggaactgaacaagcaggggacgataagccacattagtgatgcagtcgacgatcgtattcgtcttgaagtcgatttgggcaacgagctgaattttatatatgaagtgaggcttcgcgggtatatctcaccgaccttcgcgctcgccgcaatggataatgatgagcagcagagtgaacaacatcgatattatcgcgctgaggtttatctcaaagaaggcggtcaaaattatgatgtgatgggctggaaccaggaacagctgattaatgacatactggaccagtacgaaaaacacctgcacttcctgcacctggttcgttaa

SEQ ID NO: 5065 - DNA, 258 bp, Escherichia coli
atgatactcagcgaaaatgtggtcactgccagcatactcgatgccagtatgttcagaatgttatcgactgcttccgcaccaaccttcacggaaaccgactcaggtatcattgatttaaaaagaattgataaaagggccgttattatcgcgacaattgcgaataacgttgccctgaaccatagttttttaattgtctgcttcagcatccatttccagcgtgaaatcattctgcattccctcatattgcggccgagataa

SEQ ID NO: 5066 - DNA, 273 bp, Escherichia coli
atgaaaaaaagaaatttcagcgcagagtttaaacgcgaatccgctcaactggttgttgaccagaaatacacggtggcagatgccgcgaaagctatggatgttggcctttccacaatgacaagatgggtcaaacaactgcgtgatgagcgtcagggcaaaacaccaaaagcctctccgataacaccagaacaaatcgaaatacgtaagctgaggaaaaagctacaacgcattgaaatggagaatgaaatattaaaaaggctaccgcgctcttga

SEQ ID NO: 5067 - DNA, 126 bp, Escherichia coli
atgattaagaattttatcttcgataatctcataattttagcagtgccatttatgataaaaacatcccttaaaaccaatctaatctttttcttcctctgtgtatttgttccccatatggcgtcataa

SEQ ID NO: 5068 - DNA, 1119 bp, Escherichia coli
atgattaattatggcgttgttggtgttggatactttggcgctgaattagctcgttttatgaatatgcatgataatgcaaaaattacatgtgtatacgatcctgaaaatggagaaaatattgcccgtgaattgcagtgtatcaatatgtcaagcttggatgctttagtctcaagtaaattagtcgattgcgtgatcgtagccaccccaaattatctgcataaagaaccagtaattaaagcagcaaagaataagaagcatgttttttgtgaaaaaccaattgcattaagttatgaagattgtgtggatatggtcaaagcgtgtaaagaagctggtgtgacctttatggccgggcatattatgaattttttcaatggggttcaatatgcacggaagttaattaaagaaggtgttatcggcgaaatattatcatgtcatactaagagaaatggctgggaaaacaaacaagagagactttcctggaaaaagatgaaagaacaatctggtggacatctatatcatcatatacatgagttagattgtgttcagcatttacttggagaaataccagagacggttactatgattggtggaaatttggcccattctggtccaggatttggcaatgaagatgatatgttatttatgaccttggaattcccgtcaggaaaactagcaaccttagagtgggggagtgcatttaactggccggaacattatgtcatcatcaatggaactaaaggctctattaaaattgatatgcaagaaacagcagggtcacttaggattggcggtcagacaaagcattttttggtccatgaaacacaagaagaagatgatgatcgtcggaaaggcaatatgacctcagaaatggatggcgctatagcatatggtcatccaggaaaaaaaacaccattatggcttgccagtttaataagaaaggagacgttattcctccataatatcctctgtggtgcaaaacctgaagaagattatattgaccttctcaatggtgaggcggccatgtcggcgattgctactgctgatgctgccactctttcaagatcgcaggacaggaaagtgaaaatcagtgagatcattaaacatacatcagtaatgtaa

SEQ ID NO: 5069 - DNA, 1218 bp, Escherichia coli
atggcaacagcatggtataaacaagttaatccaccacaacggaaagctcttttttccgcatggcttggatatgtatttgatggctttgattttatgatgatattttacattcttcatattataaaagcagatcttggcattacggatattcaggctactttaatagggacagtggccttcatagccagacctattggaggtggtttttttggtgccatggctgataaatatggtcgtaagccaatgatgatgtgggcaattttcatttactcagtcggaacaggccttagcggtattgctacaaacttatatatgctcgcagtttgccgttttattgttggcttagggatgtctggtgaatatgcatgtgcttcaacttatgcggtagaaagttggcctaaaaatcttcaatctaaagctagtgcttttttggtaagtggtttttctgttggaaatattattgcggcacaaataatccctcagtttgctgaagtatatggatggagaaactctttttttataggcctgttaccagttttactagttctttggatcagaaaaagtgctccagaaagtcaggagtggattgaagataaatataaggataaatcaacatttttgtctgtcttcagaaaaccacatctttcaatctctatgatcgttttcctcgtctgtttttgtctatttggtgcaaactggccgataaacggactacttccttcctacctggcagataatggagttaatacagtggtcatttcaactctgatgacaatagcaggtttaggaacactgacaggtacaatattttttggttttgttggtgataagattggtgtaaaaaaagcctttgtagtcggtctaataacttcatttattttcctttgtcctcttttttttatttctgtgaaaaactcttctcttataggattatgtctctttggattaatgtttacaaatttaggtattgcagggttggttccaaaatttatatatgattactttccaacaaaattaagaggattagggaccggtcttatttataacttaggggcaactggaggaatggccgcacctgtattagctacatacatttcaggatattatggcttaggtgtttcattattcattgttacggttgcattctctgccttattaattttgttagttggttttgatattccaggtaaaatttataaactatccgtggctaaatga

SEQ ID NO: 5070 - DNA, 1215 bp, Escherichia coli
atgaaatttgaacgccatcatgaaatattgaaacgactcagtaaattcggttctgtaaaagtatccgatctgtccaatagcctcaatgtaacgaaagaaactattcgatcagatcttaatgaacttgccaggcttggctatctgactcgatgtcatggcggtgcttttatcgtcctagactcgcttgatactattgcgaaaaatgaaatcgcttatgcgcttgaaaattatgatacagcccagggaataaaaaaaggccactcaactatgaaaagtcaagtatgcgttattggttcgtttaatgttgatatcatcagttatttgccgaggcttcccactatcggagaatcgcttctggcaagtaattttatattttcaccggggggaaaaggctgtaaccaagcgctggcagcaagctttgccgatactgatgtttatttcataacaaaagtaggtacagatcactttagtgattatgcgatcaactttatgaattcgtctaagatttataaaagtataatttatcaaacgaaagaaacgcaaaccggaactgccacgatccttgttaatgaaggtactggcgataatgttattgcgatctatcccggtgccaacatgacaatgtcgtccgatgaaataactattcagaaagaagcgattattaattctgatgtcatacttctgcagctcgaaacaaattataccgctctgcaacaagcgatcacattggcgcaaaaaaacagtatcccggtcattattaacccggcaccctataatgatatcgtcaacgaacttattcaggatgttgattatatcacccccaatgaaacagaagctggtttactgtccggcatagacgtacacgatcttgaatcagctaaacgagctgcagaagctatccacaataaaggggtaaaaaacacggttatcacgctcggtagcaagggctcgctcgcatttgatggcaaaaaattcattcattcgccagcgtttccagcggtcgttaaaaatacggcaggagccggggatgcttttaacggcgctctggcatcaggacttgcgaaaggaaaatcactggaatcagcactgtgttatgccagcgcctttgcatccctagcggtggagacaagcaatgcttccgacatgcctgaacatgaatctgtgatacatcgaattcagagtatacattatcagcaaactatttttacgcattaa

SEQ ID NO: 5071 - DNA, 759 bp, Escherichia coli
atgaataacaccaaaaaatcactaaaagtgctctttattggggaatcctggcatattcatatgattcattcaaaaggatatgacagttttacctcaagtaaatatgaagaaggtgcgacctggttactccaatgtctgaaaaatagtcaggtagatgtcacctatatgccagcacatacggtacaaattgccttccctgaagatgtggcacagttagaacaatatgatgccatcgttattagtgatattggtagtaatactttcctgctacaaaatgatactttttatcaacttcgcataaaaccaaacgctctcgaactgattaaagaatatgtgaataacggtggtgggttattgatgattggcggctatctctcattcatgggaattgaagcaaaagccaattataaaaatacagttctggctgatgtgctcccggttacgatgttagatggtgacgatcgtgtcgaaaaaccagagggtgttattgcacagccatcacaacctgaacatccagttattaaagggttctctgaatatccttttttcctaggttataaccgggcgatcgctaaagaaaatgctgaggtggtattaacaataaacaacgatccattactggtctttggtaactatcacaacgggaaaatagcctgctttatgagtgactgttcaccgcactggggtacacagcagtttatgtcctggccgttctataccgcgttgtgggtaaatatactgactcatattgcaagataa

SEQ ID NO: 5072 - DNA, 966 bp, Escherichia coli
atgaaaaagaataagtactcaactcccttatggatgcttgccacgattcttgcgggtatgctctcccctatgcaatcagcggtgaatggtcaattaggtcactggttacaggatggtaatgcatgcgcagttatctcctttgccagtggtttagtcgtgatgttttttattattatggcgcgaaaagaaacccggcaacaatttgcggcaattccttctctgattaaaaaccgaaaagttcctctctggaactggtttgccggtctctgtggagcgatggtggtattttctgaaggcgcatcagccagcgcactcggggtcgcaacgtttcaaaccgcactgatctccgcgctattgctgtctggtttactttgcgatcgctttggtatcggtgtcgacgagaaaaaatactttaccccttatcgcatcatcggtgcattatttgcggttattgctacgatttttgttgtgtcaccgcagtggcattctacctctttcatcttacttgccattcttccgttcttagctggtttgcttgcaggatggcagcccgctggaaatgcaaaagtagctgaagctacgggatccatgctggtttcaatcacctggaatttcatcgttggattttgtgttttaggcacagcgctagctattcgtgtcgcattagggcacgtcactgttcaattaccagatgtctggtggatgtatcttggcggcccgcttggactaatgtctatcggtttaatggccattttggtcagaggtctggggttactgatgctgggggttgcttcaacggcgggccagttactgggatcagtattgattgacgtattaattccatcgctgggcaataccgtttatctggtcacgatcatcggaacactgtttgcactggtcggtgcaattgttaccactattccggaatacagaacctcgaaaacaatgaagaaaatggaggtataa

SEQ ID NO: 5073 - DNA, 1035 bp, Escherichia coli
atgaaagattatctacaaactgtgacgggccccgtcgcccgtgaagatatggggctaacacttcctcatgaacatctgttcaacgatctttcctctgttgtggatgctccttgctatcctttttcacaacggcttgttgataaaaaagtcacggcagaaatccagtgggcattaaaacacgatccttattgctgcgctgataatatggaccgcaaacctattgaagatgtgatcttcgaaattaataactttatctcgctcggtggtcgcaccattgttgatgccacagggtctgagtctatcggacgagatgcgcaggcattacgagaagtcgcattaaaaacaggtctgaatattgttgcttcctccggtccctacctggaaaaatttgaaagccagagaattcataaaacggttgatgaactggcggcaacgatcgataaagaattgaatcaagggattggcgatacggatattcgtgccggaatgatcggtgaaataggtgtctcaccgacatttaccgaagccgagcataacagcttgcgggctgcctcgctggcacagattaacaatcctcatgtggcgatgaatattcacatgccgggctggcttcgtcgcggtgatgaagtactcgacattgtgttaggtgaaatgggcgtctcgccaaataaagtctctctcgcacactcggatccgtcaggaaaagacgtggcgtatcagcggaaaatgcttgataagggtgtctggctggaattcgacatgattggcctagacattaccttcccgaaagagggaatagcgccaggggtgcaggagactgccgatgccgtcgctcatctcattgagttgggatacgccgatcagcttgttctcagccacgatgtcttccttaaacaaatgtgggctaaaaatggcggtaatggctggggatttgttccagatgtttttctggcctatctggcggagcgcggcgtcgataaaacgatcctcaaaaaactctgtatcgataatcccggacgattattgaccgcataa

SEQ ID NO: 5074 - DNA, 858 bp, Escherichia coli
atgttaatagtcaatcttgatactcaccgtcccctcgtcctgcttcccggccgtgatcagcgtacgctggcgacctggttcagaaaatatccggaaatacaggttgtctcgcgtgatcgcagtggagtctatgcgacagcagcacgtgaaggtgcacctcaggccagacaggtggccgatcgatggcacctgctaaaaagtattggtgatgagcctgaacgaatgatgtacagacatatgcctctgatacgtcttgttgtcagagagttatcactgaataaatcacctgagccagaaatatctgtgcctgtagcatcgctccgtcgtccggaacgccttaaacagcaaacccgcaaaaaacggcatcagcattggacagaggttatggccctgcataacaagggatgtagtttcagggaaatatcccgtattacaggcctgtcgcgagtgacagtcagtcgctgggtgcgttcaggaacattccctgaaatgtcaacccggcctccaaagcgagggcttctggacccatggagggagtggttaaaagagcaacgagaaagtggtaattataatgccagccggatatggcgggaaatggtggcccagggggggacaggcagtgaaaccatcgtcagggatactgttgccaaatggcgtaaaggctggaacccaccggttactactgccgcaagacttccttcagtgtcccgggtaagccgctggttgatgccctggagaataatcaggggcgaagaaaattatgcatcccgatttattagtctgatgtgtgaaaaagaaccggagttgaaaatagcacagcaactggtactcgagttctaccgtattctgaaaacctaa

SEQ ID NO: 5075 - DNA, 411 bp, Escherichia coli
atgcgaattctgaactgttatatggcgaatgacagcaaaggccattttgttacggcgaaagaagcagcgaagcacaaccgccaggacgttttgtgctgtgtgtcctgtggatgcccgttaacacttcagcggggcaatgacggacaaccaccgtggtttgaacatgaccagatgactgtcgctgagaaaatcctgctgcgatgcacctggcttgacccggcagagaaagaggcccgtcgtttgcatctgcagggtatgacggttccggattatacggtgaaggtgagaaagtggttttgtgtgatgtgtgacgaagattatgaaggagaaaagtgctgcccgcgttgtggtaccggggtatacagcagggagggggggctgcaggaaggcaactggaaggataggaactga

SEQ ID NO: 5076 - DNA, 402 bp, Escherichia coli
atgtacgcaaaatcctttctcgctcttgatagcaacggacgtctgacgggcgcccgtactgtacaggccgcaccttatgctcactacacctgccacttgtgtggcagtgcactcagataccatccgcaatacgacactgaacttccctggtttgaacacactgacgacaggctgacagagcacggtcaacagtgcccttatgtcaggccggagcgcagagaaatacagttgattaaacgtctgcagcaattcgtaccggatgccttacccgtggtgcgtaaagccagctggcactgcagacaatgtcaccacgattattatggggagcggtactgcacacactgccagaccggaggattcagtattccccggacaactcaggaggaaatatgcgaattctga

SEQ ID NO: 5077 - DNA, 570 bp, Escherichia coli
atgacctacaaatacaaccccttctggcagcaacgtattcgtgagacagtgcggcacgcactgaatgttcatccccgcctgacggcattgcgggttgacctgcgtttcccggatgtaccggcagcaacggacgcagctgtgatatcccgcttcatcaatgccctgaaagcccgaatcgacgcttaccagaaacgtaagcatcgggaaggtaaacgcgtgcatcccaccactctgcattacgtctgggcccgggagtttggggagtgcaaaggtaaaaaacactatcatctgatgctgctggtcaaccgggatacctggtgtcgtgccggtgattaccgcgctccgggatcactggccggaatgattgaacaggcctggtgcagtgccctgggggtggatgccggatgccatgccacgctggtgcattttccggcctggccggcggtgtggctggcgcgtaatgatgacaccggctttcagcaagtgctggaacgtgctgactatctggcgaaggagcataccaaagctcactgcaccggtgagcgcaactttggctgcagtcgtggctga

SEQ ID NO: 5078 - DNA, 201 bp, Escherichia coli
atggtgatacgcaaaaagaagtgcagggactgtggaaacgcgattactcataatacagtgtgttgcccgtattgtggttctgtcgaccccttcggctattaccggaatacagaccgtatcgttaccatactgctggcactgattattgtggtcctgctgactactgtcagcgtcagtgtgtatatactgtgtagctggtga

SEQ ID NO: 5079 - DNA, 1197 bp, Escherichia coli
atgaccgaatccagcgattacgaatccgtccaggtctttatcggcgttgatgtcggtaaagatacgcatcacgctgtagccattaatcgttcaggtaaacgcctgttcgataaagcattacccaacgacgaaaacaaactcaggtcgctaatatctgacctgaaacaacatggtcagatactgctggttgttgatcagccagctaccatcggtgcgttacctgtcgccgttgcccgctcagaaggagtccttgtcggatacctccctggactggccatgcgccgcatagccgacttacacgccggtgaagctaaaactgatgctcgtgacgctgccatcattgccgaagctgcccgtaccctgcctcacgcgctacgcacgctgaaactggctgacgagcaaatcgccgaactctccatgctctgcggcttcgatgatgatcttgccgcacagacaacgcaggccagcaaccgtatccgcggccttctgacccagatacatccggcactggagcgcgttctcggtccgagacttgatcacccggcggtactcgatcttctccagcgatatccctcaccagaaaaactcgcttcgctgggtgagaagaagctggcagcccagctctgcaaacttgcgcctcgtctgggtaaacgccttgcagcagacatagctcaggcactggccgaacaaaccgtcgtcgttcccggcacgaatgccgctgccgtagtactgccacgtctggcactccagctcatcacgctgcgtaagcaaagagacgaggtggcgcttgcggtagaacagcgagttcttgctcaccctctttacccggtcctgaccagtatgcccggagtcggtgtcaggaccgcagccagactcctcaccgaggtcgcctgccgcgccttcgcctctgtcgcacatctcgctgcttatgctggccttgcgccggtaactcggcgatccggctcgtcaatacgcggtgagcatccctcgcgacggggtaataaagctctcaaacgggcgttgttcctgtcggccttcgccgcgctcagggatccgctctccagggcttactacacccgcaaaatgagtcagggaaaacgacacaatcaggcgcttatcgccctggcgagacgacgctgcgacgttctgttcgccatgatgcgcgacgggactttttataccccgcaggcgtcataa

SEQ ID NO: 5080 - DNA, 207 bp, Escherichia coli
atggctaccccagtttcgctgatggatgaccagatggtcgacatggcgtttatcactcaactgaccggcttaaccgataagtggttttacaaactcatcaaagttgggggctttcctgcccccatcaaaatggggcgcagctcccgctggctgaaaagtgaagtggaagcctggctgcaggcgcgtattgcacagtcccgtccgtaa

SEQ ID NO: 5081 - DNA, 603 bp, Escherichia coli
atgaaacaacagtatcagacccgttacgagctgctccatgaaaactaccagaaatggctgaccggcttcacccggcacgccgtatcatggggcgtgtgtcatccgaatatctactatttccataatctgacgcccgggtgggtgtcattcaatggcgaaaaaccggagattgccatcgttccccagagtctgcaccggctgatttatggtccggacaaacggagctccccgtccctggatgatgatctggtggtgaatttatgcaccagcgaacacctgctgattcatcatccgatgctggaagggatcctgctgtctgaatgtgagcgcctgaagcaacattctctggcaaacaaactgatcagcctcttccgtcagtttggcggcacggagttacgtctcaaactggtctggctctgctggcttgacttaatgaccggaaacagccttgacgactggacgaaaaacctgaaacacaaatcagaaaaagatctggagcaatggatcattgcacgtcagggtcagagtgaaccactgacaaatctgatggatcagtacgtgcttatggcataccgtacatcggttgatgccgctcacagttga

SEQ ID NO: 5082 - DNA, 780 bp, Escherichia coli
atgatggaactgcaacatcaacgactgatggcgctcgccgggcagttgcaactggaaagccttataagcgcagcgcctgcgctgtcacaacaggcagtagaccaggaatggagttatatggacttcctggagcatctgcttcatgaagaaaaactggcacgtcatcaacgtaaacaggcgatgtatacccgaatggcagccttcccggcggtgaaaacgttcgaagagtatgacttcacattcgccaccggagcaccgcagaagcaactccagtcgttacgctcactcagcttcatagaacgtaatgaaaatatcgtattactggggccatcaggtgtggggaaaacccatctggcaatagcgatgggctatgaagccgtccgtgcaggtatcaaagttcgcttcacaacagcagcagatctgttacttcagttatctacggaacaacgtcagggccgttataaaacgacgcttcagcgtggagtaatggccccccgcctgctcatcattgatgaaataggctatctgccgttcagtcaggaagaagcaaaactgttcttccaggtcattgctaaacgttacgaaaagagcgcaatgatcctgacatccaatctgccgttcgggcagtgggatcaaacgttcgccggtgatgcagcactgacctcagcgatgctggaccgtatcttacaccactcacatgtcgttcaaatcaaaggagaaagctatcgactcagacagaaacgaaaagccggggttatagcagaagctaatcctgagtaa

SEQ ID NO: 5083 - DNA, 1023 bp, Escherichia coli
atggtcacttttgagacagttatggaaattaaaatcctgcacaagcagggaatgagtagccgggcgattgccagagaactggggatctcccgcaatacggttaaacgttatttgcaggcaaaatctgagccgccaaaatatacgccgcgacctgctgttgcttcactcctggatgaataccgggattatattcgtcaacgcatcgccgatgctcatccttacaaaatcccggcaacggtaatcgctcgcgagatcagagaccagggatatcgtggcggaatgaccattctcaggggattcattcgttctctctcggttcctcaggagcaggagcctgccgttcggttcgaaactgaacccggacgacagatgcaggttgactggggcactatgcgtaatggccgctcaccgcttcacgtgttcgttgctgttctcggatacagccgaatgttgtacatcgaattcactgacaatatgcgttatgacacgctggaaacctgccatcgtaatgcgttccgcttctttggtggtgtgccgcgcgaagtgttgtatgacaatatgaaaactgtggttctgcaacgtgacgcatatcagaccggtcagcaccggttccatccttcgctgtggcagttcggcaaggagatgggcttctctccccgactgtgtcgccccttcagggcacagactaaaggtaaggtggaacggatggtgcagtacacccgtaacagtttttacatcccactaatgactcgcctgcgcccgatggggatcactgtcgatgttgaaacagccaaccgccacggtctgcgctggctgcacgatgtcgctaaccaacgaaagcatgaaacaatccaggcccgtccctgcgatcgctggctcgaagagcagcagtccatgctggcactgcctccggagaaaaaagagtatgacgtgcatcctagtgaaaatctggtgaacttcgacaaacaccccctgcatcatccactctccatctacgactcattctgcagaggagtggcgtga

SEQ ID NO: 5084 - DNA, 1146 bp, Escherichia coli
gtgggaaaggaactggatgatatctgcaccagctgtccgtatatcgatgctataaaacggcacaaacaacagctcggtgccatagaggaatatacacagtggttaaaaaaagaaccacgggcatcttatttttttctgttccggctgtatacccgcattcacaatacatttttccccaaaaagcaacaactcccgttcactcccggtggcactcactgcccggaacctgatgtcacccttcgggacttaacgctttccccgggctaccacagtgattatgcccctcaacccattccggagatggacagttctgctgttgttcccccaactaatgaaaacacctcgcctccggaagatactcccgacaacactccggccggaggcaataccggacaagcggaaaagaccagaaactcaggactcacacccattcctgaaaaacgttcaggaatgcccccggaacatctgcggtttgccacagggtttccaccgcaaccgaagattgccggtcccaaaggaaagccgatgcgcaccgtgcatccggataaaatctaccgtgaaattatatggttctgctccggttacctgcggaaatccggaccagaggctacgaggacgatcatcaactcaatattctgtgaatgggccagcatcttcaatgattactcctcccccttttcgtgggtggacagcagggacagtgaacagtgtgactggttatggaacgccatgcaggtccggtgtgtgggaaccccgctgaatccccttaccccggagcagaaatactggttcgcctgcgccacgtttgataactgggaaggctggaatgagcaacaggtacagtttttactggaaagtaatcccagacggaacagagcgaagtttacgcaggcctccttccaggcccccaggattcagcataaagcgattcttcttgatgagctgaaaagtgcccgggagcaacaaaaaaggcgtgatgaacgtgctgatggttccgtcccgctgaaactgtccggaaaaatccacaaacagcttgaaagtattgcccgaagtcgtggtgtcctcccaaaaaaactgctgaatgaaatgattgagcaggcgtaccaggactttgtggcaaatgagcaacacaagacactgagttaa

SEQ ID NO: 5085 - DNA, 258 bp, Escherichia coli
atgcaacatatagaccgccttaatgtcattaaagcacttgtgcttctagaagatgagcagattgttcgttttaacatcgctgcgaacgataacgcctcgcagatccacatgctcgttgacggtctgggcgtcgggctgacacatgagcctgtcgctgccggaatgatttcgcaccggacagcttgtcaccgttctaggcaacatgacagacctgcgcattcctatttctattatctatccgcctaccaagttgcttaa

SEQ ID NO: 5086 - DNA, 768 bp, Escherichia coli
atgagcgggcttacgattaatgcgctgtgcgccggttacggcaaacggcggattattgagcatctgtcgatttctacgctgccgcgcggcgaagtcactgtactgctggggcctaatggctgcggtaaatcaacgctactgcgcgccctggccgggctaaatcgcgccagtggcgaagcctggctgaatgaagagaatctcttatcgctgccgtttgctcgtcgggctgaaaaagttgtgttcctgccgcagtccctgccgcagggcgtgcatttacaggtgctggagtcggtggttgtcgcccagcgcgcctccggcgccgggcaaaatcaggcgcaggctatagcgctgctcgaagagctaggcatcgcacatctggcaatgaactacctcgatagcctgtccggcggtcagaagcagctggtggggcttgcacagtcgcttattcgccgccccgcattattattgctggatgaaccactgagcgcgctggatctcaattatcagttccatgtgatggatgttgtatcgcgcgaaacgcgaagacgcaatatggttacgctggtcgtcttacacgatatcaatatcgcactgcggcatgccgcccaggtcatcatgctgaaagaggggaaacttatcgacagcggcgacccgcaaacggtgatccatgcagagagccttgcgcaggtatacggcgtacgcgggagagttgaacgttgtgctcagggaagatcgatggtgatagtggatggtgcaatcgaaaaatag

SEQ ID NO: 5087 - DNA, 1059 bp, Escherichia coli
atgactgtattggaaagtacgctgtcggtcgagaaccgctatcgccagctttttcgccagcgtctggtaatactggcggttatttttatcgctatcattgcttcgctgctgctcgatttcaccctcggcccctcagggctccctttacattcgctgataaagactttgatgcatccgtccggggcgactaacggcatgcgggttatcgtttgggacatccgtttgccctatgcgctgatggcgctcctggtaggaatggcgctgggtttggccggggcagagatgcaaactattctgaataactccctcgccagcccgtttacgcttggcgtttcgtcggcggcggcctttggcgcagcgctggcgattgttctgggcatcggtattcccggcgttcccgaaagcgggtttataccggcaaacgcttttctttttgcgctcctgtccgccctgctgctcgatagtctgacccgctggacgcgcgtgccgacgtcgggcgttgtgctgtttgggattgcgctggtgtttaccttcaatgcgctggtgtccattatgcagtttgtcgccgatgaagatactttgcagggcctggtgttctggacgatgggcagcctggctcgcgcatcatgggagaaactggcggtgctggcggcggcgatggcgattgttttaccctggtcgctgcgtcgtgcctggcagcttaccgcgctacgcctcggcgaagagcgggcgatgagttttggcattgatgttcgccgtttgcgcctgggttccctgctgcgcatcagcctgctggcggccctttcggttgcgtttgtggggccaattggctttattggcctggttgcaccgcatatttcccgcctgttgctgggagaagatcatcgcttttatttgcccggaagcatccttatcggtgggctggtgctatcgctggcctcggtagcgtcgaagaacatcattcccggtgtcattttaccggtaggaattgttacctcgctggtaggcgttccgttctttctgagcattgtaatgcgtcatcgagggagtatgtcatga

SEQ ID NO: 5088 - DNA, 990 bp, Escherichia coli
atgaaactctcccgtttatttccgctgctggcgctgctgctggcggccagcctgcacgcagaaaatacgcacaaggaggtgcgtatcgcgtcaccgtggccggcgcaaaataccattattgccatgctggggtacggcgataacattgtcggaacctcgatgattgcaaaaaggatccccctgtttcgccagagcctgccgcgcatagagaaagtcgcagcagttagcgtaaacagcgggcatgaaatcaatcccgaacagattatcgcgctgggggtcgatatgctttttgtaccgcagaatatggtagtgcctcaacaggcgttgctgaaacaggctggggtgcaggtgctggcgtttgaggcgaattcactgcgggcgttaacgcagcgcgtacagcaaacggcagcggtgctggggcccgatgcgcagcaaaaagcgctcgcctatcaacgctacttcgatcgcaacgtggccctggtcaccgggcgcctgaaagatcttcctgcgtcacagcgcgtgtcgctctatcacagtatgggcaatccgctgaccaccaccggtagaccctcgctaaaccaggactggattgacctggccggcggcaaaaatatcgctgaaaattggtttggcgagcatcaacaaaaccgttcgggtgaagtcgcgctggagaaaattgtcactgccaatccggcggttatcatcgcgatgaacaagcgcgacgcggatgccattctgagttctccgcagtgggcaagcgtggacgcggtcattcatcatcgcgtttacgttaatccgaaaggaatgttctggtggtgccgtgaaaccagcgaagaggcgctgcaatttttgtggctggcgaaaacgctttatcctgcgcgatttgctgatgtggatatacgcaaagagacgcgtgagttttatcggcagttctttggcctgacgttaagcgatgcgcagatgagcgatgtgctcaatccgccgcgctaa

SEQ ID NO: 5089 - DNA, 2166 bp, Escherichia coli
atgaaaactcaaataactttcgctgcgcttttgccagcattagcgtctttcataccgcttcatgctcatgcctcgtctacttctgaagatgaaatgattgtcacgggcaacaccgccgccgacaccaccgattctgccgccggtgccggtttcaaaacgaacgatatagatgtcggcccgctgggaacgaaatcctggatcgaaacaccatattccagcaccactgtaactaaagagatgattgaaaatcagcaggcgcaaagcgtcagcgagatgctgaaatactctcccagtacgcaaatgcaggcgcgcggtggaatggatgtcgggcgtccgcaaagtcgggggatgcagggcagcgtggtggccaacagccgtctggacgggctgaatatcgtttcaacaaccgcgtttccggtggaaatgcttgagcgcatggatgtgcttaacagtttgaccggcgcgctgtacggcccggcgagcccagcagggcagtttaatttcgtggcgaagcgcccaaccgaagagacgctgcgtaaagtgacgctgggctatcaaagccgcagtgcgtttaccggccatgccgatctgggtggccattttgatgaaaacaaacggtttggctatcgcgtgaacctgcttgatcaggaaggggaaggcaatgtggatgacagcacgctgcgtcgcaaactcgtttccgttgcgctcgactggaatattcagccgggcactcagctacagctcgacgccagccattacgaatttatccagaaaggctatgtcggtagctttaactatgggccgaacgtcaaactgccgtctgcgccgaatccgaaggacaaaaatctggcgctcagcactgcgggcaacgacctcactaccgataccatcagcactcgcctgatccactactttaacgacgactggtccatgaacgctggcgtgggctggcagcaggctgaccgcgcgatgcgtagtgtttccagtaaaatactcaacaatcagggcgatatctctcgttcgatgaaggattccaccgctgccggacgttttcgcgtcctgagcaacaccgccgggctgaatggtcatattgataccggctctatcggccacgatctgtcactttctaccacgggatatgtctggtcgctttatagtgccaaaggaacaggttccagctatagctggggtacaacaaatatgtatcacccggatgcgatagatgagcagggtgatggcaaaatccgcaccggcgggccgcgataccgctccagcgtaaatactcagcagagcgttacgctcggcgatacggtgacatttacgccgcagtggtcggcaatgttctatctcagccagagctggctgcagactaaaaactacgataagcacggtaatcaaacgaaccaggttgatgaaaatggtttaagtccgaacgccgcgctgatgtataaaattacccctaacacaatggcctacgttagctatgccgattcgctggagcagggcggtaccgcaccgacggatgagagcgtaaaaaatgccggtcaaacgctaaacccgtatcgcagcaagcagtatgaagtggggctaaaatcggacatcggcgagatgaatctaggcgccgcgctgttccgactggaacgtccgtttgcctatcttgatacggataacgtgtataaagagcagggtaaccaggttaacaacggccttgagttaaccgctgccgggaatgtgtggcaggggctgaatatttacagcggcgtgaccttcctcgacccgaaactgaaagatacggcgaatgcctcaaccagcaataaacaggttgtcggcgtgccgaaagtgcaggccaatctgttggcggaatacagtttgccgtccataccggaatgggtttacagcgctaacgtccattatacgggcaaacgcgcggcgaacgataccaacacctcttacgccagcagctataccacatgggatttgggaacgcgttacaccacgaaagtgagcaacgtcccaaccactttccgcgtggtggtaaacaacgtgtttgataaacattactgggcttctatcttcccatcgggtaccgatggcgataacggttccccaagtgcgtttatcggcggcggccgcgaagtgcgtgcatccgtcaccttcgatttctga

SEQ ID NO: 5090 - DNA, 435 bp, Escherichia coli
atgaatccgtctgatgccattgaggcaattgaaaaaccgctctcctccctgccttacccgatttcccgtcacatcctggaacatctgcgcaaactcacccgtcacgaacccgtgcctggcattatgggtaaaagcggggccggtaaatcctcactctgtaatgcactgtttcagggggaggtcaccccggtcagtgcactcatgacagtgcttcccggacatgccgccatccatctgatgacacgcctgcaggacgaactgcgcacggagtctgtccgcactcagacccgtgaacagtttaccggtgcggtggaccggatatttgacacggcggagagtgtctgcattgcctctgttgcacgcacggttctgcgcgccgtccgtgactcggtggtctctgttgcccgcgcggtatggaactggattttcttctga

SEQ ID NO: 5091 - DNA, 2385 bp, Escherichia coli
atgcacgaaaagaacatcgccctgctttgtgatgaagccgaccgacttttgcaactgaacattaatctgctccggcaaatggttgaggagccagatgtgttatctgacagtaagaacgaaaacagactgctttttgataaacagaaagcactgaaaagaattgaggagctggagggcgaacaaatcaaaaccgcccgcagggagatggtgctggctgttgtcggcacgatgaaagcaggcaaatcaaccaccatcaacgccattgtggggcaggaaattctgcctaaccgtaaccgccccatgacctctgtaccgacgctcatccgccacgttcccggaaaaactgagccggttctccatctggaacatattcagcctgtccgcaatttattaatcacactgcaggaaaaactcgccaccccggcaggacagcaggtcgcacagaccctgcagcaaaccggggatacccgcgaactgctggatattctgacggatgatggctggctcaaaaatgaataccacggggaggaggaaatctttaccggactggcatcgttaaacgatctggttcgtcttgctgcggcaatggagactgaatttccttttgatgaatacgcagaagtgcagaaactgccggtgatcgacgtggaattcagccatctggtggggatggatgcatgccagggaacactcacactgctggatacccccggccctaatgaggccggacaaccgcagatggaagtgatgatgcgggatcaactgcagaaagcctctgcggttctggctgtgatggattacacccagatgaactcaaaagcggatgaagacgtccgtaaagagcttaatgccattgctgacgtatcagccggccgcctgtttgtactggtcaataaatttgatgagaaagaccgcaatggcgatggggcagatgccgtacgccagaaagttccggcaatgctgaacagcgatgtgctgcccgcctcccgcgtttatcccggatcctcacgccaggcatacctggctaaccgtgcgcttcatgagttacggaaaaacggaacccttcctgttgatgaagcctgggtcgatgattttgtcagggaagccttcggtcgcatgaaaaaagattacgtctgtaaagacagcgaactggcaactgaaggggcgacagacctgtgggaatgctcacttatcgatcaactgataacggaagtcatactgagttcacactccagagctgcggcactggcggttgattctgccgccgcaaaactgatgcagaatgcagaaaatatcagtgaatacctgtcgttacgccatcaggggctgatgcaaagtattcagtcactgcaggcgcatatcaccagcctgcttgaggatatccgggaaatagcagactgtcaggagcaggtgaccgctgatgtcagaatggccatggaggagatcgatgccagaacccgggaattactgacgggggtctgcacctcactggaagaggagctgaatgactatttcagaagcggtaaacgcaaagaacagcaaatgctggaggaagaaaattcagcgcagccccgggagagaaacgcattcgctttctttcacgatattttcggaaccggaaatcagcatgacaggatgcgggactttgatcccgacagccccgaaataaaattcagtgatcgcagggaagcccttgaactgatgacgcaaatcgaatcgaccgtgaccagcctgcaccgtgaggctgaagcacagttccggcctgagctggagaaaatcgtcagcgggattgaaacaggttttcgtggcacggccctgtacgccacagaaaacattgccggtcgcatcaatacccgcctggaggatgagggctttaccgtaaaaatcagttttccggcagtcagtcagttacaaacccggctcgcggtaaaaacaaatctgagtgcgcttatggaggaaagaacggagaccgtcacccgtcgccgtcggcagagtggtttatggggaaagatttgtggagcgtttggcaccagtgactggggctgggaaacctataaagaggatgtgagccgcagtgttatcaatatcaacaccgtcaggaaggaagttatgtcactgacccgggcatatttcggggagctgcaggcatccattgagcaggatattaaccagcccgtccgccaggaaatcgatgcctttttctgcgcattcagggagaaagttgaacaactgcgtaacacgctgattcagagctctgaagatcataaacgcgatcagcaggcacaggaacggcttaccaggcgacttcaggcattaaatgaaagggttcctgagctcattactgacagtaaggcgctgagggaagagctggagacaatgctgtga

SEQ ID NO: 5092 - DNA, 906 bp, Escherichia coli
gtgacttcaccatttattcaacaaattgctgataaccgggtatgtcaggtactcacctgtcttcctgaaaaatttgtggttgatttcgcaaacggaatcgatgttgcacaggagcatatccgcacggccggagagcgcacgttcttccggcgtttaaaagagggactgaccggcgaaggcgctgcacggcagaatgccatcaatgcttcggttgcacagggccttgaggcgtccctgcgctggctgacggagctgacaacgtcacttgccaccacaaactacgcgattacccgggtaaacgacagggtcagttcactggtcagtgatactgccaggctggcgcattattccgcagatacacgggagcagttactcatcctggccgatcaggttcaccataaactgaatcatcttgaagaaaaactccaccgtgttgaccaggttcagcgggcgcagttacatcttgagcagatattctcatggtggagcgccgggcgatatgcgtcattttcccctgccggacgttgttatgtggcgcttgaagagcttcgctggggcgcgtttggtgatgtgatacgtcagggcgaaacaggccaggttaaccagctactggatattctcagacataaagcattaacgcagatggcacaggagagtggcggtagtgcaaccgtgcgtctgaacactctggactggcttggtggtcagggccgggagcaggcagataacgagtggcatgacgcgattaactggctgggagactggtgcagtgaagagcagcatccggtgatctggtcaaccacgcaggctgcagaacacttaccggttcgcatgcctcgcctctgctctgcagaacgcctctctgaaagtatggtcgatgaaatatttcagaagggggctgcatga

SEQ ID NO: 5093 - DNA, 1071 bp, Escherichia coli
atgagtacagaaatgaaaacggggctggtgctgtccggtggcggggcggtgggcgcttatcaggcgggagtggttaaggcactggcagagtgtggtacacagatcagcatggtttcaggggccagcattggcgcattcaatggtgccattatcgcggcctctcccgatctgtcagaagctgccgtacgcctggaggcgctctgggatcatctggggaataatcaggtgctgtcggtaaaccgattggtttacttttcattgctgaaaaaattgttccaggcaatgaacctctgccagatccccggacgtgcaggagcactgcttacgacgcttcttcgccatatatcgatactcaacgggtttgacaatctgatggctcagccgttgttgtcagatgagcccctgacagcgctgttggatcattatcttgatactgatgctctggcagacgggctaccgctgtatgtgtcgctgtaccccacagaagggggcatgcaggatattattgactgcattcgtgctgaactgggtgccggaaccacgaaaaacgccgtttttcagcatatccagagcctgccccgcggacagcagaaagaggctctgcttgcgtcagccgcgctgcccctgctgttccgtccccgtgaggttcaggggacaatgttcggtgatggtggtatgggaggatggcgaaatatgcagggaaatacccctgtgacgcctctggtcgatgccggatgcaatatggtgattgtgacgcatctgagtgacggttctttatgggatcgccaggcttttccggacaccacaatccttgagatccgtccccggaaaaggctgaaatatgcaggtgatggtgacaacagcggcggtctgctcagtttcacgttggcacataccgacgcctggcgtcagcagggctatgaagacacgatgctgacgatggagcatatccggaaaccgctggcagcacgtcaggtactgtcccggtcagaaacggtgttgcagaaaagtctggagataacggaagaggcagatttggcactgagaaacgcgatggcccggattaaataa

SEQ ID NO: 5094 - DNA, 678 bp, Escherichia coli
atgcaattacctgtaaagttattaatgagccttatatctctggtcagcgttattgcacgtgccgggaaatataaaaattacatccgggatgaaataaaatactggcgatatacatcatacaaggggggggaatttccggaaggtttcactgatgagaaattttccagcgccatttacaacggaagaatatttacaatgaaacgtttacataccctgatgttatttctggcggttctgtttactggctttaacgtggaagcagcgagcgtgaaacaagcgctcagctgcgacccaaacgcccgggctgaacaacctggagcgtgtccaacaacgtacgagttgtacgaaggtgacgctgcctacaaagctgcgcttgacaaagcattaaaaccggtcggactgagcggcatgttcggtaaaggcgggtatatggatggccctggcggaaacgtaacgccagtaaccattaacggtacagtctggctccagggcgacggttgcaaagccaatacctgcggctgggactttatcgtaacactctataacccaaaaacccatgaagtcgttggctaccgctactttggtttagatgacccggcctacctggtttggttcggcgaaattggcgtgcatgaattcgcgtatctggtgaaaaactacgtagctgcggttaactaa

SEQ ID NO: 5095 - DNA, 411 bp, Escherichia coli
atgaaaacttttatcaaaactttactcgttgctgtaactattctgttctctgtcttcgctacggcgaaacaagtaaaactgccaaacaacatcaaatacgttaatactacagaggcgttttcctgtactgagattgacggtatgaattgccagacgaagaatccgtttaactataaagataacagctatgttttcgtgcttgaacgtggtggtgcctggtgttacgactacactgtctcggtacttaacctgaaaaccgggaaagcacagatgctcgaatacaaagacaaccagctgtgctcaggtagcaacaaaccgttcttcgaaatcaaaaatggcgtaccgacggtaggagtcatcgacacatccggaaaacctgtcgttgtggctctggacaaacttaaaacctga

SEQ ID NO: 5096 - DNA, 315 bp, Escherichia coli
atgggagttgagcagaataatttcaggcacatgctgaccggttatctgtccggcccgccgcagacgcagcatatgtttggtatattcccggcggctctggtcgcgcacacgggtctggcaggcgaagaacggctgaaagccttcccgctgcagattttccagtacggtgatggtggggatgtacgtatagttctggcttcgggacgtgtgtttctcttccccgaaaatccccggcacatggtgcatcagctcttcatgtgtcagtggacggtcacgacgtatctggtttgcagcataaccaaaacgacttgctaa

SEQ ID NO: 5097 - DNA, 3324 bp, Escherichia coli
gtgcgcctgattatcacttttctgatggcctggtgcctcagttggggggcgtacgccgcgacggcccccgatagcaaacaaatcacccaggaactggagcaggcaaaagcggcgaaacctgcgcagccggaagtcgtagaggcgctccagtctgccttaaatgcgcttgaggaacgaaaaggttcccttgagcgcatcaagcaatatcaagaagtcattgataattatccgaaactttccgccactctgcgcgcgcagttaaacaacatgcgtgacgagccacgcagcgtgtcgccgggaatgtctaacgatgcgctgaatcaggaaattctccagatcagcagtcagttgctggataaaagccgtcaggcccagcaagagcaggagcgcgcccgcgagattgccgattcgctgaatcaactgccgcaacagcaaaccgatgcccgccgtcagttgaatgaaatcgagcgccgcctggggacgcttaccggcaataccccgctcaatcaggcacaaaatttcgcgttgcagtctgactccgcacgtctgaaagcgctcgttgatgaactggagctggcgcagctatctgccaataaccgccaggaattagcgcgcttgcgctctgagctggcggaaaaagagagccagcagctggatgcatatttgcaagcactacgcaaccagttgaatagtcaacgccaacaggaagcggaacgggctctggaaagtaccgagcaactggcggaaagtagcgccgatttgccaaaagatatcgtcgcccagtttaaaattaaccgcgaactatcggcggcactgaatcaacaggcgcagcggatggatctcgttgcctcgcaacagcgtcaggctgccagccagacgttacaggtccggcaggcgttgaatacgctgcgtgaacagtcgcaatggctgggatcatctaacctgctcggcgaagcgttgcgggcgcaggtggcacggctaccggaaatgccaaaaccacaacagcttgataccgaaatggcgcagttacgtgtgcaacggttacgttatgaggatctgcttaataaacagccgctgctacggcaaatccatcaggccgacggtcagccgctgaccgccgagcaaaaccgtattctggaagcacagctacgcactcagcgtgagttgctaaactcattgttgcagggtggcgacacgctactgctggagctgaccaagctgaaagtctccaacgggcaactggaggatgcgctgaaagaggtgaacgaagcgacgcaccgctatctgttctggacctctgacgtgcgcccgatgaccatcgcctggccgctggaaatcgcccaggatctgcgtcgtctcatttcgctggacaccttcagtcagttgggcaaagccagtgtgatgatgctgaccagtaaggagacgattttgccgctgtttggcgcgttgattctggtcggttgcagtatttactcgcgccgctatttcacccgttttcttgaacgttcggcggcgaaagtcggcaaagtgactcaggatcacttctggctgacgttacgcactcttttctggtcgattctcgtcgcgtcaccgctgcctgtgctgtggatgacgctgggttacggcttgcgcgaggcgtggccttatccgctggcggtcgcgattggtgatggcgtaacagccaccgtgccgctgctgtgggtagtgatgatttgcgccacctttgctcgcccgaacggcttgtttatcgctcattttggctggccgcgcgaacgtgtttcccgtgggatgcgttactacctgatgagcatcgggcttattgtgccgctgattatggcgctgatgatgttcgataacctcgacgaccgcgaattttccggttcgctgggacggctttgctttatcctcatttgcggtgcgctggcggtggtcaccctcagcctgaaaaaggccgggatcccgctgtatctcaacaaagagggcagcggcgacaacattaccaaccatatgctgtggaacatgatgattggcgcacctctggttgccattctggcgtcggcggtgggttatctggcaacggcgcaggcactgttagcgaggcttgaaacctcggttgccatctggttcctgctactggtggtttatcacgttatccgccgctggatgctgatccagcgccgcaggctggcgtttgaccgggcgaagcatcgccgggcagagatgttagcgcagcgtgcgcgtggcgaagaggaagcgcatcatcacagtagcccggaaggagcaattgaagtcgatgaaagcgaagtcgatctcgatgccatcagtgcgcaatccttgcggctggtgcgctcaattttgatgttgatcgccctgctttcggtcattgtgctgtggtcagaaatccattccgctttcggcttcctcgaaaatatttcgctgtgggatgtcacttccacggtacagggcgtagaaagcctggagccgattaccctcggtgcggtactgattgccattctggtgtttatcatcaccacgcagctggtgcgcaacctgcccgcgctgctggaactggcgattctgcagcacctggatttaacgccgggtacgggctacgccatcaccaccatcaccaaatatctgctgatgctgattggcgggctggtcggcttctcaatgattggtattgagtggtcgaaattgcagtggctggttgccgcgctcggtgttggtctcggttttggtttgcaggaaattttcgccaactttatctctggcctgatcatcctgttcgaaaaaccgattcgcattggcgatacggtaacgatccgcgatcttaccggtagtgtgacgaaaattaacacccgcgccaccaccatcagcgactgggaccgcaaagaaattatcgtgccgaacaaggcgtttattaccgagcagtttatcaactggtcgctctctgactcggtcacgcgtgtggtgttgacaattccggcccctgccgatgccaacagtgaagaagtgacggaaatcctgctcaccgcagcgcgtcgctgctcactggtgatcgacaacccagcaccggaagtcttcctggtggatctgcagcaggggattcagattttcgagctgcgtatttacgccgctgagatgggtcaccgtatgccgctacgccatgagatccaccaactaattctggcgggcttccacgcccacggtatcgatatgccattcccgcccttccagatgcgtctggaaagcctcaacggtaaacaaacggggagaacattaacttctgcgggcaaaggtcgtcaggcgggaagtttgtaa

SEQ ID NO: 5098 - DNA, 303 bp, Escherichia coli
atgtttatcttgtgctgcatctggtttattgtggcgttcctctggataaccatcacttccgcgctggacaaagagtggatgattgatggacgcgggattaataacgtctgcgatgtgctgatgtatctcgaagatgacgatacccgtgatgtcggtgtgataatgacgttaccgctctttttcccttttctctggttcgctttgtggcgaaaaaaacgcggctggtttatgtacgccaccgcgctggctattttcggctattggctgtggcagttttttctgcgctatcagttttgcttataa

SEQ ID NO: 5099 - DNA, 315 bp, Escherichia coli
atggacgacgctagtcgggatccagtgataaccgaagatgaaatcagggagctgcaattttctgccggggatgtggcggaaatagagcaaacggtcctctcttttgtcgatacccgccacacccgcaaagtagcgatggtggtgggtaacactattaataccctcaaagagcgcgatggtccgcggtggggaaacctgccggatatctattgcgcttatcttattagatgtctggtttttcgcggagaattagtgggatacggcgatttgtttcgtatacgctatagcgaaattaagcgaccgattatctcatga

SEQ ID NO: 5100 - DNA, 1458 bp, Escherichia coli
atgatctttacttctgtatttggatttgccaatagcccatcggcttattacttaatgggttatagtgcgattcccttttatatattttctgcattgttattctttattccattcgccttaatgatggctgaaatgggagctgcttatcgcaaagaagaaggcggtatctattcctggatgaataatagtgtcggaccacgttttgccttcattggtacgtttatgtggttttcctcttatatcatctggatggtgagtacctccgcgaaagtttgggtaccgttctcaacattcctctacggtagcgacatgacccagcactggcatattgccggactggagcctacgcaggtggttggtctgctggcagtggcatggatgattctggtcaccgtcgttgcttcaaaagggattaataaaattgcccgcattactgcggtgggcggtattgcagtaatgtgtctgaatttagtattgctgttagtaagcattactattttgttattaaatggtgggcatttcgcgcaggatattaatttccttgcatcaccgaacccaggttatcagtccggtctggcaatgctatcgtttgtggtatttgccatttttgcctatggcggaattgaagcggttggtggtctagttgataaaacggaaaatccagaaaagaactttgccaaaggtattgtttttgccgctattgttatttcaatcggttattcgctggcaatatttttatggggcgtcagcacaaactggcagcaggtattaagtaatggttccgttaacctcggcaatattacctatgtgctgatgaagagcctcggggtgacgctgggtaacgcactgcatttgtcacctgaagcgtcattgtcgctgggcgtatggtttgcgcgtattaccggactgtcgatgttcctcgcttataccggtgcgttctttacactttgctattcaccgctgaaagccatcatccaggggacgccgaaagcattgtggccggaaccgatgacgcgcctgaatgcgatggggatgccgtctatcgccatgtggatgcagtgtgggttggttactgtcttcatcctgctggtttcgtttggtggcggtaccgcatcggcgttctttaacaagctgacgctgatggcgaacgtgtctatgacgcttccttacctgttcctcgcgctggctttcccattttttaaagcacgtcaggatctcgacagaccgtttgtgattttcaaaacgcatatgtcggcaatgattgcaacagtggttgtcgtactggtggtgacatttgcgaacgtcttcaccatcattcaacctgtggttgaagctggagactgggacagcacattgtggatgattggcggccctgtcttcttctcgctgttagcgatggcgatttaccagaactattgcagtcgcatggcgaacaaacctgagttagctctcgactga

SEQ ID NO: 5101 - DNA, 969 bp, Escherichia coli
atggggaatgttcggttcttgcaaggagtgaaaaaatatttttgtactaaggcattagatgtcattctgctaatttatctactccttggttttatacttctcccttataaatatctgtggaaagatattattttatctctgtgctttgttggtattcttctttatgcattagtggaagaaaatcgcattacagaatatatggggtattttgttaagttcagtaataaaaacaggttgaatagttgtgctgcttggtgttcacttattgcatggtttatatttttgttctttgtgctttcaattaatatttttccagtcagtgcctctgtatatatttttagtgctttttcattatttgtttttctgggaggtatttttattatattagagttagagtttaaagaaaataaaaaattaatgattattaggtctgtgactatagcagtcatgccaattatatatttattcacaagtagttatgcttccagtttgtttttaagtttgagtaatctaaacatcacgctaactccatgggttgagtatttctggaaagggatggcttttatgttgcttttcttcatgttaatgcaacttattatctattttgcttttttaactctggtgactaaattaaatgtgtataggttatttatacttgccggagcatttatcgtatctactattttagtggcttttgcttcaaaaaatgtagaaggtatttcgtactacgttttaaaaagcaccatagattttgaatggcgtaatcagattaaatgtggccagttgaatatttcacgttcgaatgaaaagtattttgggtttaatactgataaatatactgtattttattccaatagagagggtaaatggggttttgatgagttgaaatgtaagaaaggttctgacaggagagatgcatattccattgagaatgtctcagaatataacgtgcctggatggctgaaataa

SEQ ID NO: 5102 - DNA, 192 bp, Escherichia coli
atgagcatggttaaacataaacggggcacactctacacacttgatgtgcatcaagaagctgaacttaaagctttggttaataaatccgacgaacatattgattacagcgacattcctgcgtctggtagcgaagcatgggctgacgccacacgcggcaattttttgccagatccaggtattcacgcgcaataa

SEQ ID NO: 5103 - DNA, 2151 bp, Escherichia coli
atggatactaaaaagatattcaagcacataccctgggtgattctcggaatcatcggtgcattctgcctcgcggtagttgcattacgtcggggggagcacgtcagcgccctgtggatcgtggtcgcctctgtgtcggtgtatctggtggcgtatcgctactacagtctgtacatcgcccagaaggtgatgaaactcgaccccacgcgcgcgacgcctgcggttattaacaacgacggtctgaactacgttccgactaaccgttacgtgttgtttggtcaccacttcgccgctatcgccggtgctggtccgctggtgggtccggttctcgccgcgcagatgggctacctgcctggcacgctgtggctgctggcgggggtcgtgctggccggtgcggttcaggactttatggtgctgtttatctcctctcgccgtaacggcgcatctcttggtgagatgatcaaagaagagatgggaccagtaccggggactatcgcgctgtttggctgtttcttaatcatgatcatcatcctcgccgttctggcactgattgtggttaaagccctggccgaaagtccgtggggggtcttcaccgtttgctcaaccgtaccgattgcgctgtttatgggtatctacatgcgctttattcgtccggggcgtgtgggtgaagtctctgtcattggtatcgtgctgctggttgcctctatctacttcggtggcgtgattgctcacgatccgtactggggtccggcactgacctttaaagataccaccattactttcgcgctgattggctatgcgtttgtttccgcactgctgccagtgtggctgatcctcgcaccgcgcgactatctggcaaccttcctgaaaatcggcgttatcgtcggcctggcgctgggtatcgtggtgctgaacccggaactgaaaatgcctgccatgacccagtacattgacggtactggcccgctgtggaaaggcgctctgttcccgttcctgttcatcaccatcgcctgtggtgcggtatctggcttccacgcgctgatctcttccggtacgacgccgaaactgctggctaatgaaaccgacgcgcgtttcatcggctacggcgcaatgctgatggagtccttcgtggcgattatggcgctggttgctgcgtccatcatcgaaccgggtctttacttcgcgatgaacaccccgcctgctggcctcggcatcaccatgcctaacctgcatgaaatgggtggcgagaacgcgccgatcatcatggcacagctgaaagacgttaccgcacacgcggcagcgaccgtcagctcctggggcttcgtgatttcgccagagcagatcctgcaaaccgcgaaagacattggtgagccttctgtcctgaaccgtgcaggtggtgcgccaacgctggcggtaggtatcgctcacgtgttccacaaagtgctgccgatggctgacatgggcttctggtatcacttcggtattctgttcgaagccctgttcatcctgaccgcgctggatgcgggtacccgttctggccgctttatgctgcaagacctgctgggtaacttcatcccgttcctgaaaaaaaccgactctctggttgccggtatcatcggtactgcgggctgtgtgggtctgtggggctacctgctgtatcagggcgtggtcgatccgctgggcggcgttaagagcctgtggccgctgttcggtatctccaaccagatgctggcagccgtggcgctggtactgggcaccgttgtactgattaagatgaagcgcacccaatacatctgggtaactgttgttccggctgtatggctgcttatctgcaccacctgggcgctgggcctgaaactgttcagcaccaacccgcagatggaaggcttcttctacatggcaagccagtacaaagagaagattgctaacggtactgacctgacggcgcagcagattgccaacatgaaccacatcgttgtgaacaactacaccaacgcaggcctgagtattctgttcctgattgtggtgtacagcatcatcttctacggtttcaaaacctggctgaaggtgcgtaacagcgacaaacgtactgacaaagaaacaccgtacgttccaatcccggaaggcggcgtgaagatctcttcgcaccactaa

SEQ ID NO: 5104 - DNA, 258 bp, Escherichia coli
atgaaagttatattcacttctaatcgtcttgttgattttcttatccggctttcgattacagcgattgtcatttccccggtaattatctggtcgtgggatacggtaaaagaaaccacggcagacgggatgcttgccgctgctttcgttatcctttactccggtgtgctcctgtttattctgtatttttgtttttctgccctgactggcctgcagaaagatgatgaaagaaaaaatgatgaaaggaatgaagatgaataa

SEQ ID NO: 5105 - DNA, 345 bp, Escherichia coli
atgcatacaggggatttgtgtttttttacaggtgccagcctgtttatcgtgggggttgttggttatttctttacaggaccaaataataaaggagtttatctgctgagctcgtttgtcttctttgtagtaaatgtcataagtgtatgtatgctgccagataatttcttgtttctttgtggtgcggttatgaatcagtgtgccgtaccggttgtttcaatggcagtcagtaccataccggttatcacgaagtttgacagtttcagaaggatgtttgtttgtattatgttgtcatcagcatggtccggagtgatgtggttttttataagggggcttatgacaggctaa

SEQ ID NO: 5106 - DNA, 393 bp, Escherichia coli
atgaaagaaaaaagaaatgatgcggaactaaaaaacagaaaaactaaacgggattatgattatgaacgcagggtttctgatatatattttgatctgttttttgtgttcgttgctgccggaacttttttatgggtgattatgcatagtatttttgatgcctgtattgattcgtggaaagctgacccggaattaaataattttcgttatatgtggaacatcctgatgtatgtcattccgtatacgttatgggcgtttgcaggtggatttcttatcgtatacgtcaggaaccctttaaatgaattaataaacggggggatcagaatattccggctgaaacgccgtatgcgccgggagaagaaattaagggagggtggcaataatgcttcgcattaa

SEQ ID NO: 5107 - DNA, 1374 bp, Escherichia coli
atgcttcgcattaaacctcttctggttctttgtgccgctttactgacggtcacacccgcagcgtcagcggatgtgaacagcgacatgaatcagttctttaataagctgggatttgcttccaataccacacaaccgggcgtctggcaggggcaggccgccgggtatgcctatggtggctccctgtatgcccgcacccaggtcaaaaatatccagctgatttccatgacgctgccggatatcaatgccggatgtggcggcatcgacgcctatctcggctcgttcagttttattaatggcgatcagttgcagcgttttgttaagcagattatgagcaacgctgccggttacttttttgaccttgccctgcaggcaacggtgccggaaatcaaaaccgcaaaagacttcctgcagaaaatggcaagcgacattaacagtatgaacctcagctcctgtcaggtggcgcaggggattgtcggaggattatttcctcagactcaggtgtcacagcagaaggtctgtcaggacattgccggtgagagcaatatttttgctgactgggccgcgtcccgtcagggctgcacggtcggaggacagtcatcgtctgttcgtgacaaggccagtgacaaagataaggaacgggtgctgaagaacatcaatatcatctgggactcgctgtccaaaaacaggatgcttgatggtaacaaagaactgaaagaatttattatgacgctcaccggtacgctgatttttggggaagacagcgagattacccccctgccggcgcgtaccactgaccgcgatatcctccgggcgattatggaggggggaacggcaaaagtttatcactgcaacgattcggacaagtgtctgaaggtggtggcggatgcaaatgtgaccatcgcccgggataaagccctgaaatcacagattacaaaactgctcaccagtattcagaataaagcggtgagtgatactccactggatgacagggaaaaaggcttcatttccagcaccaccgtccccgtctttaaatatcttattgacccgcagatgctcggtgtatccagcagcgtggtttaccagctgacggactatatcggctacgacatcatgctccagtacattcaggaactgcttcagcaggcccgggccatgattgccaccgggaactatccacagaccgtgctggacagtgtgctggagaatctgaatcaggcacagcaacagattgcggttttccaggggcaggtaaaggtccagcaggatgcattgctggttgttgaccgtcagatgagctatatgcgccagcagctttccgcccgcatgctcagccgttaccagaacaactatcacttcggagggagcacgctgtga

SEQ ID NO: 5108 - DNA, 732 bp, Escherichia coli
atgaaaatgaaaaaattgatgatggttgcactggtcagttccactctggccctttcagggtgtggtgcgatgagcacagcaatcaagaagcgtaaccttgaggtgaagactcagatgagtgagaccatctggcttgaacccgccagcgaacgcacggtatttctgcagatcaaaaacacgtctgataaagacatgagtgggctgcagggcaaaattgctgatgctgtgaaagcaaaaggatatcaggtggtgacttctccggataaagcctactactggattcaggcgaatgtgctgaaggccgataagatggatctgcgggagtctcagggatggctgaaccgtggttatgaaggcgcagcagttggtgcagcgttaggtgccggtattaccggctataactcaaattctgccggtgccacactcggtgtaggccttgctgctggtctggtgggtatggctgcagatgcgatggtggaagatgtgaactataccatgatcacggatgtacagattgcagagcgtactaaggcaacggtgacaacggataatgttgccgccctgcgtcagggcacatcaggtgcgaaaattcagaccagtactgaaacaggtaaccagcataaataccagacccgtgtggtttcaaatgcgaacaaggttaacctgaaatttgaagaggcgaagcctgttctcgaagaccaactggccaaatcaatcgcaaatattctctga

SEQ ID NO: 5109 - DNA, 738 bp, Escherichia coli
atgacatcagacaatatcgctgaatatgttggtgagaataatcaatttactgagaagcctgtaactgaataccccccggtgatacaggataatacagtgaccactaaagactatctgtacagcaataatattgatactgaccttttagtggttatcggagggcttattgttatattgtttctcatgatgcttatcatgtactttattaattctctcaggcataaggaattaactgaaatactgacaaaaatatcttttcctgaaaaatccgggagcaatttgcttaaaccggaggcggtcagctgtaatttgttgtccctgtgtgtgctggcaccggtattctgtacacccagaaagctggctgaagtttccagggagatcatcgtggcgagtgcgcaggaaattgcatggacgccggggagcagtcgtattgatggccaccaggcggagaatatcacctgggcgatttcatcgcagtctcctgccgataagtatgatctcatcaataaaacgtcctgtgtttctcctgacagtggccgtttttatgaaccggacacagttctggatcaccgtgaacgggtacgcctttttattcagatccagtttccgcatgggagtgactggtctgaagtattgcgcctgactgacattgttacagagaaggtctcttccggcaggactgcaggcgggcatcaccaccggcatacagggtacacctggtctgtttctgtgaattaa

SEQ ID NO: 5110 - DNA, 2280 bp, Escherichia coli
atgagttttaacgcaaaggatatgacccagggcggtcagattgcgtccatgcgtatccgcatgttcagccagatcgccaatatcatgctttactgcctgtttatttttttctggatcctcattggtctggtcttatgggtaaaaataagctggcagacgtttatcaacggctgtatttactggtggtgtacgtcactggaaggcatgcgggatttaataaaatcccagccggtctatgagatccagtattacggcaaaaccttccggatgaacgctgcccaggtactgcatgataaatatatgatctggtgcggagagcagctatggtctgcattcgttctggcgtctgtcgtggccctggttatttgcctgatcaccttctttgttgtctcctggattctggggcgtcagggtaaacaacagagcgaaaatgaagtcacaggtggtcgtcagctgacagacaatccgaaagacgttgcccggatgctgaaaaaagacggcaaggactccgatatccggattggcgacctgccgattatccgggattccgaaatccagaacttctgtctgcacggcacggtcggggccggtaagtcggaggttatccgtcgtctggccaactatgcccgtcagcgcggtgatatggtggtgatttatgaccgttcaggggaatttgttaaaagttactatgatccctccatcgataaaatcctgaatccgctggatgcccgctgtgccgcatgggatttgtggaaggagtgcctgacacagccggattttgataataccgcgaacacgctgatccctatgggtacaaaagaggacccgttctggcagggttcaggacgtaccatttttgcggaagcggcgtacctgatgcgtaatgaccccaaccgcagctacagcaaactggtggacacactgctttccatcaaaattgaaaaactgcgtaccttcctgcgtaattcaccggcggccaacctggtggaagagaaaattgagaaaacggcgatttccatccgtgctgtgctgaccaactacgtgaaagccatccgttacctgcaggggattgagcataacggtgatcccttcaccatccgtgactggatgcgtggtgtccgggaagatcagaaaaacggctggctgtttatttcgtcgaacgccgacacccatgcctccctgaagcctgtgatctccatgtggctgtccattgccattcgtggtctgctggcaatgggagaaaaccgtaaccgtcgtgtgtggtttttctgtgatgagttacccacgttacacaaactgccggatctggtggagatcctgccggaagcccgtaagttcggtggctgttatgtgtttggtatccagtcctatgcccagctggaagatatctacggtgagaaagcggcggccacgctgtttgacgtcatgaacacccgtgcttttttccgttccccgagccataagattgcagagttcgctgccggtgagattggtgagaaagagcacctgaaagccagcgagcagtattcctacggtgctgacccggtacgtgacggggtatcgaccggtaaggatatggagcgtcagacgctggtcagttattccgacattcagtctctgccggatctgacctgctatgtcactctgcccggaccgtatccggcagtcaaactctctctgaaatatcaggcacgaccgaaggtcgctccggagtttattccgcgtgacatcaacccggaaatggagaaccgtctgagtgccgtacttgccgcaagggaagcagaaggtcgtcagatggccagcctctttgaaccggaggttgcctccggagaagatgtgactcaggctgaacagccacaacagccacaacagccacaacagccacaacagccacaacagccacaacagccacaacagccacaacagccacaacagccacaacagccacaacagccacaacagccacaacagccacaacagccacaacagccacaacagccagtgtcttctgtcatcaatgataagaagtcagatgcaggtgtgagtgttccggcaggggggatcgagcaggagctgaaaatgaaaccggaagaagagatggaacagcaactgccacccgggatcagtgaatccggtgaagtggtggatatggccgcttatgaggcatggcaacaggaaaatcatccggacatccagcagcatatgcagcgtcgtgaagaggtgaacattaatgtgcaccgggagcgcggggaggatgttgagccgggagatgatttctga

SEQ ID NO: 5111 - DNA, 5271 bp, Escherichia coli
atgttgagtttcagcgttgttaaatcggcaggcagtgccggaaactattacaccgacaaggataattactatgtgctgggcagcatgggagaacgctgggctggtcagggggctgaacagcttgggctgcagggcagcgtcgataaggatgtttttacccgtcttctggagggcaggctgccggacggggcggatttaagccgcatgcaggatggcagtaataagcatcgtcccggctacgacctgaccttctccgcccccaaaagtgtctccatgatggccatgctcgggggggataaacgtcttattgatgcacataaccaggccgtggattttgctgtccgtcaggtggaggcgctggcttccacacgggtgatgacggacggacagtcagaaacggtgctgaccggtaatctggtgatggcactgtttaaccatgacaccagtcgcgatcaggacccacagttacacacgcatgtagtggtggctaatgtcacgcagcataacggcgagtggaagacactgagcagtgacaaagtggggaaaaccggattttccgagaacgtgctagcgaaccggattgcgttcgggaaaatatatcagagtgagttacgtcagcgcgttgaggcgctgggttatgaaaccgaagtggtcggtaagcacggtatgtgggagatgccgggcgtaccggtggaggccttttccagtcgttcacaggctatcagggaggccgtcggtgaagacgcctcgctgaaatcccgggatgtggcggcactggatacgcgaaaatccaaacagcacgtcgatcctgaagtcagaatggctgaatggatgcagacgctgaaggaaaccgggttcgacatccgggcatatcgtgacgcggcggatcagcgtgcggagatccgcacgcaggcgcccgggcctgcttcacaggacgggccggatgtgcagcaggcggtgacacaggcgattgccggattaagtgaacgaaaagtgcagttcacgtatacggacgtgctggccaggacggtcggcatactgccgccggaaaatggtgtgattgaacgggcacgcgccggtatcgatgaggccatcagccgtgagcagcttatccccctcgaccgtgagaaggggctgttcacatcaggaattcatgtgctcgatgagctgtccgtccgggcactcagtcgtgacatcatgaaacagaaccgggtgaccgtacatccggagaaaagtgtcccccggacggctggttacagcgatgcggtcagtgttctggcacaggaccgtccgtcgctggccattgtgtccgggcagggcggtgcagccgggcagcgtgagcgggtggctgaactggtcatgatggcccgggagcaggggcgggaggtgcagattatcgctgctgaccgtcgctcgcagatgaacctgaagcaggatgaacggctgtccggtgagctgataaccggacgtcgtcagctgcaggagggcatggtcttcacgccgggcagtactgttatcgtcgaccagggcgaaaaactctccctgaaagagacgttaaccctgctggatggtgccgcacgtcataacgtacaggtcctgataaccgacagcgggcagcgaaccggtacaggcagtgcgctgatggccatgaaggatgccggggtgaacacgtatcgctggcagggcggagaacagcgaccggcaaccatcatcagtgaaccggaccggaatgtccgctatgaccggctggccggagattttgcggccagcgtgaaagccggagaagagagcgtggcacaggtcagcggggtacgggaacaggccatactgacacaggccattcgcagtgagctgaaaacacagggcgtgctcggacacccggaggtgaccatgaccgccctgtcaccggtctggctggacagccggagccgttatctgcgggatatgtaccgaccggggatggtgatggagcagtggaacccggagacacgcagtcatgaccgctatgttatcgaccgggtgacggcgcagagtcacagcctgaccctgcgggatgcgcagggcgaaacgcaggtggtgcgtatttcctccctggacagcagctggtcgctgttccggccggaaaaaatgccggtggcagacggcgagcgactgagggtgacagggaaaattcccggactccgcgtctccggcggtgaccgcctgcaggtggcatccgtcagtgaagatgcgatgacggttgttgtgccggggcgggctgaaccggccaccctgcctgtggctgattcaccgttcacggcactgaagctggagaacggctgggtggaaacgcccgggcattccgtcagtgacagtgcgacggtgtttgcctccgtcacacagatggcaatggacaacgccaccctgaacggtctggcccgcagcggtcgtgatgtccggctgtattcctcactggatgaaacccgtactgcggaaaaacttgcccgccatccctcctttacggtggtttctgagcagataaaggcgcgggccggtgagacatcgctggaaaccgctatcagtctgcagaaaaccgggctgcacacgccggcacagcaggccattcatctggcccttcctgtgctggaaagtaaaaacctggccttcagcatggtggacctgctgacagaggcgaagtcgtttgctgcagaaggaaccggttttactgaactgggaggggaaatcaatgcgcagataaaacgcggtgacttactgtatgtggatgtggcaaaaggctatggcacaggcctgctggtttcccgtgcgtcgtatgaggcagaaaaaagtattcttcgccatattctcgaaggtaaggaggcggtcacgccgctgatggagagagtacccggcgaactcatggagacgttaacgtcgggacagcgtgccgccacccgtatgatactggaaacgtccgaccgtttcacggtggtacagggttatgccggtgtgggtaagaccacacagttccgggcggtgatgtcagccgtgaacatgctgccggcgagtgagcgtccccgagttgtggggctggggcccacgcaccgtgcggtcggtgagatgcgcagcgccggcgtggatgcacagacgctggcgtcctttctgcatgacacgcagctgcagcagcgcagcggagaaacgccggatttcagcaacacgctgttcctgctcgatgagagctcaatggtgggcaataccgacatggcacgggcatacgccctgattgcggccggtggcggtcgtgccgtggccagtggtgacacggaccagctgcaggccatcgcgcccggtcagcctttccgtctccagcagacgcgcagtgctgccgatgtggtcatcatgaaggagattgtgcgtcagacgccggaactgcgggaggcggtatacagcctgattaaccgggatgtggaaagggcactgtccgggcttgagagtgtgaaaccgtctcaggttccccgtcaggagggcgcatgggcaccggagcactccgtgacggagttcagtcacagccaggaagcgaaactggcagaagcgcagcagaaggcgatgctgaaaggtgagacttttccggatgtccccatgacactgtatgaagccattgtccgcgactataccggcaggacaccggaagcacgggagcagacgctgattgtcacgcacctgaatgaggaccggcgcgtactgaacagcatgattcatgatgcacgggaaaaggccggtgagctggggaaagagcaggtcatggtgcctgtcctgaacacagcgaatatacgtgacggggagctgcgtcgtctctccacctgggagaataacccggatgcccttgccctggtggatagtgtgtatcaccggattgccggtatcagcaaggatgacgggctgataaccctggaggatgcggaaggtaacacgcggctgatttcgccccgggaggcggtggctgaaggtgtcacactgtacaccccggacaaaatccgggtggggaccggcgaccggatgcgcttcacgaagagtgaccgggagcgcggttatgtggccaacagcgtctggacggtgacagcggtttccggtgacagtgtcacgttgtcagacggacagcagacccgggtgattcgccccggccaggagcgggcagagcaacatattgacctggcttatgccatcaccgcccacggtgcgcagggggcgagtgaaacctttgccatcgcgcttgaaggcacggaaggtaaccggaaactgatggccggctttgagtcagcctacgtggccctgtcgcgtatgaagcagcatgtgcaggtgtacaccgataaccgtcagggctggacggatgccattaacaatgccgtacagaaaggaactgcccacgatgtgctggagccgaaaccggaccgggaggtcatgaatgcgcagcggctgttcagtacggcacgggaactgcgggacgtggcggcaggccgtgccgttctccgtcaggcagggctggccgggggagacagccctgcacggtttattgcaccgggacgtaaatatccgcagccgtatgtggcactgccggcgtttgaccgtaacggcaagtccgccggtatctggctgaacccactgaccacggatgacggaaacgggctgcggggattcagcggtgaaggacgggtgaaaggcagcggggatgcgcagttcgtggccctgcagggtagccgtaacggagagagcctgctggctgataatatgcaggatggtgtccggattgcccgtgataatcctgacagcggtgtggtggtaagaattgccggtgaaggtcgtccgtggaatcccggtgccatcaccggtggtcgcgtgtggggggatatcccggacagcagcgtccagccgggagccggaaatggcgaaccggtcacggcagaggtgctggcacagcggcaggctgaagaggccatccgccgtgaaacggaacgccgtgcagatgaaattgtccgtaaaatggcagagaacaaacctgacctgccggatggcaaaacagagcaggctgtcagggaaattgccgggcaggagcgtgaccgggctgacataactgaacgggaagccgcgctgccggagagtgtgctgcgtgaatcacaacgggagcaggaagcggtccgggaggttgcccgggaaaatctgctgcaggagcgtctgcagcagatagagcgggatatggttcgtgacctgcagaaagagaaaaccctgggcggagactga

SEQ ID NO: 5112 - DNA, 747 bp, Escherichia coli
atgacaacggataacacgaacacgacacgtaacgattcactggctgcacggaccgatacctggttgcagtcgtttctggtctggtcacccggacagcgggatatcatcaaaacggtggcgctggtgctgatggtactggaccacatcaatctgatattccagctgaagcaggaatggatgtttctggccgggcgaggagcctttccgctgtttgccctggtgtgggggctgaatctgtcccgtcatgcgcatatccggcaaccggccattaaccggctgtggggatggggaattattgcccagttcgcatattatctggccggctttccctggtatgaggggaatatcctgtttgcctttgcagtggcggcacaggtgctgacgtggtgtgaaacgcgcagtgggtggcgtacagcagcggccattcttctgatggccctgtgggggcctttgtccggcaccagttacggcattgccgggctgctgatgctggcggtcagttaccgactgtaccgggcggaagacagagcggaacgtctggcgctgcttgcatgcctgctggccgttattccggcacttaaccttgcctccagtgatgcagcggcggtggccggtcttgtaatgacggtgctgaccgttggtctggtgtcgtgtgcaggaaaatcattaccccgtttctggcccggggattttttcccggtattctacgcctgtcatctggctgtgctgggcgttctggcgttgtga

SEQ ID NO: 5113 - DNA, 861 bp, Escherichia coli
atgaaaattacggatcacaaactctctgaaggtattgccctgacatttcgtgttcctgaaggaaatataaaacatcctttgattatcttatgccatgggttttgcggtatcaggaatgttctgctcccttgctttgcgaatgccttcacagaagcaggattcgcaacgattacttttgattatcgaggattcggtgagagtgatggagaacgagggcgtctggttcctgcaatgcagaccgaagatattatttcagttatcaattgggcagaaaagcaggaatgtattgataatcagcgtattgggttatggggaacatcgctgggaggggggcatgtcttcagtgcagctgcgcaggaccaacgcgtaaaatgtattgtcagccagctggcttttgctgacggtgatgttctggttaccggagagatgaatgaatcggagagagcgtcttttctgtccacgctgaataaaatggcagagaagaagaaaaacaccgggaaagagatgtttgtgggggttacccgggtactgagtgataatgaatcaaaggtattcttcgagaaggtaaaaggtcagtatcctgaaatggatataaaaatacctttccttacggttatggagacgttgcaatataaaccggcagagagcgcagccaaagtacagtgcccagttttgattgttattgccggccaggatagtgttaatccaccagaacagggaaaagccttatatgatgctgttgcttctggtactaaggaattatacgaggaagctgacgcatgccattatgatatttatgaaggcgcgttttttgaacgtgtggcggcagtacagacgcaatggtttaaaaaacatctttaa

SEQ ID NO: 5114 - DNA, 561 bp, Escherichia coli
atgacagagcagaaacgaccggtactgacactgaaacggaaaacggaaggggaaacaccgacccggagccggaaaaccatcatcaatgtcaccacgccaccaaaatggaaggtgaaaaagcagaaactggcggagaaggctgcccgggaagcagagctgacagcaaaaaaagcgcaggccagacaggcgctgtccatttatctgaacctgccctcgctggatgaggccgtgaacaccctgaaaccctggtggccgggattatttgacggtgacacaccccgacttctggcctgcggtatccgggacgtgttactggaagacgtggcgcagcggaatatcccgctctcgcataaaaaactgcgcagggcgctgaaggccatcacccgttcagaaagctatctgtgtgccatgaaagccggtgcctgccggtatgacacggaagggtatgtgacggagcatatttctcaggaggaagaagtgtatgcggcagagcgtctggataaaatccgccgccagaaccggataaaggcagaacttcaggccgtgcttgatgaacaataa

SEQ ID NO: 5115 - DNA, 462 bp, Escherichia coli
atgaggaaatatattccactggtattatttatcttttcatggccggtattgtgtgcagatattcatggacgggttgttcgtgtactggacggtgataccatcgaggtcatggactcacggaaggcagtgcggatcaggctgataaatattgatgcaccggaaaagaaacaggattatggccggtggtcaacggacatgatgaaatcactggttgcaggaaaaacggttaccgtcacatattttcagcgagatcgttatggtcgtattctcgggcaggtttatgcaccagacggaatgaatgttaatcagtttatggtccgggccggggctgcctgggtatatgagcagtacaacacagatcccgtgctgcctgtccttcagaacgaagccagacaacaaaaacgtgggctctggtcagatgctgatccggttcccccctggatatggagacaccgtaaataa

SEQ ID NO: 5116 - DNA, 210 bp, Escherichia coli
atggcgaaaacaaaacaggaatggctgtatcagttacggcgatgttcatcagtcaatacgctggaaaaaattattcataaaaacagagacagtttattaaacagtgaacgtgaatcatttaattcagcagcagaccaccggttagcggaattaatcaccggaaagttatatgacaggataccaaaagagatatggaaatatgtaaggtaa

SEQ ID NO: 5117 - DNA, 591 bp, Escherichia coli
atgaagctgattatttttattcttattgttctgattattgcagcgttacttatccggattatcctcagaagtgtaaatcagcattctcctttgctgatgcaattgcatgcggcaggtatacggaccggtgatgcagagcgaatactgtccggcggtgaatactggcaacgtcagaagacgctgctgacagaaagggaagtcagttttatgaaaggactgttcagaattgtggatatgaagcggtggtatctgtgtccgcaggtacgggtcgcggatatcgtccagctgaacgggaatatccggccacgatcacgccagtggtggcagttattcaggatggtgtctcagtggcatgttgatgtggttatcgttgagcggcgttcgttcagtattgttgcagcagtagagctggatgatgccagccatttacgaccggaacgcagacgccgggatattcttctggaagaggttctgaggcaggctggtattccgttgctcagaagccacgatgccagaaaactgctgcagatgaccggagaatggctgaatacaacaggggctgatcagcagtccccggaacatcgtagctga

SEQ ID NO: 5118 - DNA, 255 bp, Escherichia coli
atgtcgcagacagaaaatgcagtgacttcctcatctggcgcaaaacgagcatacagaaaggggaatccgctttctgatgcagagaaacaaagattatcagtggcccgtaaaagagcttcgttcaaggaagtaaaagtatttcttgaaccaaagtataaggccatgctcatgcaaatgtgtcatgaagatggtctgactcaggctgaagttctgaccgcactgataaaaagtgaagcgcaaaaacgatgcatgtga

SEQ ID NO: 5119 - DNA, 858 bp, Escherichia coli
gtgactgatcttcaccaaacgtattaccgccaggtaaagaacccgaatccggtgtttacaccccgtgaaggtgcaggaacgctgaagttctgcgaaaaactgatggaaaaggcggtgggcttcacttcccgttttgatttcgccattcatgtggcgcatgcccgttcgcgtggtctgcgtcgacgcatgccaccagtgctgcgtcgacgggctattgatgcgctcctgcaggggctgtgtttccactatgacccgctggccaaccgcgtccagtgctccatcaccacgctggccattgagtgcggactggcgacggagtctgctgccggaaaactctccatcacccgtgccacccgggccctgacgttcctgtcagagctgggactgattacctaccagacggaatatgacccgcttatcgggtgctacattccgaccgatatcacgttcacatctgcactgtttgctgccctcgatgtatcagaggaggcagtggccgccgcgcgccgcagccgtgtggtatgggaaaacaaacaacgcaaaaagcaggggctggataccctgggcatggatgaactgatagcgaaagcctggcgttttgttcgtgagcgttttcgcagttatcagacagagcttaagtcccggggaataaagcgtgcccgtgcgcgtcgtgatgcggacagggaacgtcaggatattgtcaccctggtgaaacggcagctgacgcgcgaaatcgcggaagggcgcttcactgccaatcgtgaggcggtaaaacgcgaagttgagcgtcgtgtgaaggagcgcatgattctgtcacgtaaccgtaattacagccggctggccacagcttccccctga

SEQ ID NO: 5120 - DNA, 654 bp, Escherichia coli
atgattcaaacacgtaatcaatatctgcagtttatgctggttatgctggctgcatggggcattagttggggagccagatttgtcatggagcaggccgttctgctttatggatcaggaaaaaactatttgttcttcagtcatggtactgttctgatgtacctgctgtgtgttttcctggtataccgccgttggatagctccgctaccggtcgttggtcagctgcgcaacgttggcgtaccgtggctggtcggtgcgatggccgtggtgtatgtcggtgtatttctgctcggtaaggcgctggctctgcctgctgagccatttatgacgaaactttttgccgataagtccatacctgacgtgatcctgacgttgctgaccatctttatccttgccccgttgaatgaggaaacgctgttccgggggattatgctgaacgtcttccgttcacggtactgctggacgatgtggctgggggcgctgataacgtcgttgttgttcgtcgccgcgcacagccagtatcagaacctgctgacactggcagaactgttcctggtggggttgattacatcagtggccaggatcagaagtggtggcttgctgctgccggtattgctgcatatggaagcaaccacgctgggtttactgtttggttga

SEQ ID NO: 5121 - DNA, 258 bp, Escherichia coli
atgcataccacccgactgaagagggttggcggctcagttatgctgaccgtcccaccggcactgctgaatgcgctgtctctgggcacagataatgaagttggcatggtcattgataatggccggctgattgttgagccgtacagacgcccgcaatattcactggctgagctactggcacagtgtgatccgaatgctgaaatatcagctgaagaacgagaatggctggatgcaccggcgactggtcaggaggaaatctga

SEQ ID NO: 5122 - DNA, 333 bp, Escherichia coli
atggaaagaggggaaatctggcttgtctcgcttgatcctaccgcaggtcatgagcagcagggaacgcggccggtgctgattgtcacaccggcggcctttaatcgcgtgacccgcctgcctgttgttgtgcccgtaaccagcggaggcaattttgcccgcactgccggctttgcggtgtcgttggatggtgttggcatacgtaccacaggtgttgtacgttgcgatcaaccccggacaattgatatgaaagcacggggcggaaaacgactcgaacgggttccggagactatcatgaacgaagttcttggccgcctgtccactattctgacttga

SEQ ID NO: 5123 - DNA, 216 bp, Escherichia coli
atggcggaaaatcgtgttgaggccaacgcccataatgcgggcggttgcccggcatccaacgccattcatggccatatcaatgattttctggtgcgtaccgggttgagaagcggtgtaagtgaactgcagttgccatgttttacggcagtgagagcagagatagcgctgatgtccggcggtgcttttgccgttacgcaccaccccgtcagtagctga

SEQ ID NO: 5124 - DNA, 534 bp, Escherichia coli
atgatccggaccgctggctccctgaagctgggcaaagtacaggcttcagtgctggtccgttcattgctgaaaagtgaacgtccttccggactgactcaggcaatcattgaagtggggcgcatcaacaaaacgctgtatctgcttaattatattgatgatgaagattaccgccggcgcattctgacccagcttaatcggggagaaagtcgccatgccgttgccagagccatctgtcacggtcaaaaaggtgagataagaaaacgatataccgacggtcaggaagatcaactgggcgcactggggctggtcactaacgccgtcgtgttatggaacactatttatatgcaggcagccctggatcatctccgggcgcagggtgaaacactgaatgatgaagatatcgcacgcctctccccgctttgccacggacatatcaatatgctcggccattattccttcacgctggcagaactggtgaccaaaggacatctgagaccattaaaagaggcgtcagaggcagaaaacgttgcttaa

SEQ ID NO: 5125 - DNA, 294 bp, Escherichia coli
atgacactacccaagttcaggaatgacctacaagttgaagctaattactctatcaatcaagcccgtgaaatggttgggaaaacggtgaaatctgtccagattggttttcagaaaactggagtacaggttcatcagactgaaatgctaatcatcacgtttacagatgacactcaacttgccatctcaacaggttcaaacgttgtaaacataacgtcgttaattgggcgtggtggcagttgcgagcttaagcctgcggattttcacgtagattttgatttgacctggcaaagatga

SEQ ID NO: 5126 - DNA, 774 bp, Escherichia coli
atggatattaatgaatttccatctggagtaatcgaacatcttggctggtatgtataccgcctaattgacccgagggatggcagtacgttctatgtaggtaaaggcaaaggtaatcgtgtctttgctcatatgcgtggtgaggttgcagcagtggatgatgatgagttactgaataataaactcaggcaacttcgagagatcagacttgctggtcttgatgtgatccatgttattcatcgacacggtatggccgaagaaaagaccgcttacgaggttgaagcagcgctcatagacgcttatcccggcttaactaacatcatgaacggtgctggcagtaatgagttcggtgctgcacacataaaagaattaatcgctacgtaccagcctgaaactattacgttccaacataaggccctaatgatatcggttaataggagttcaaaggatattgacctctatgatgctgtacgttttagctggcgtgtcagcgttgaccgcgctcgtaaggctgagatcatactggcaacagtaagaggtatcgtgaggggggtatacatcgctgatgagtggctcaagtctacccgtgagaatttcccagagatgacttcatgggaggcagacgatgagtttgaagcgactcaatgttcccgctttggtttccggggtagggtggcatctcctgaaatcacacaactttatataggtaagaaaattcctgatgatctcagaaagaaaggtgctatgtctcctgtgagatattctcccggtttttga

SEQ ID NO: 5127 - DNA, 1890 bp, Escherichia coli
atgaaatccgagacgctaactgtccaacaactttttcaagaccgccgacaatactgtgttccattctatcaacgtgcctatgtatggactcagcaagaccagtggtcagctctactggaggatatcctagagaaagtacaatcccggctctcgggtacaaaaccaactccccatttccttggtgcggttgtactggaacctcaatcaaaaaaaggattattaggtgtagattccatacatattattgatggtcagcaacgattgaccactcttcaatatgttctggcatccatccgattagcattacgtgctacggatctttccagcttagaggctctcatttcgccttgcctgaaaaactcaaacgaagacacaatgcgaaataaagaagtagaacgcttcaaactgtggccaacttttcgggatcaaactcattttattcaaagttttaatgttgaaaatattgacgatctccgggacgtattctctgatagtttcacgcagcatggtacgttgcgtaagcattttaatcacccgccatcactagaagcattatgtttttttactgaagcctttataaaatggattaaaatagaaaaccactcaccacaagaaaatgctgtagctctaattgaggctgtcttaacagatctgaaactggtaagcatatttctcgaagctgaagatgatgcccaaataatttttgaaacattaaatgggcgaggggcggaacttcatgctacggatcttattcgcaactatatctttatgtgcgctgagcatgaaaatattaatgctattgaattatatgaaaatgagtggaagagctttgaagataaatactggtcggaaaaacaacgccgtggacgtattaataaaccacgcatggagtggctagtacatgcgacattgcaatcagaaaggcaacgtgaaattgatctgtctcgcctttacaatgagtatcgtgattatgtaagtaaggacttgtcttcacaacgagcagatctgcaagtaaagcgcctcaaacaatatgcatcacaatataaagaattggttgatggttttggcacaacccccatctcacactttggatatcgcatcgcagactatgatgtgacgacactttatccgcttgctttgttcatttcgatagctaacatcgctgatgatgagaaagcagccatgtataatgatcttgtctcctacgtagtacgaagagccgtatgtggcctgacgccaaagaattacaacaatgtatttatgaatgtattgcggcacttggctaaaacggaaatttccagtgttgagttacgtaatatcctcaataacttaaatggcgaagcctcacgttggcctggtgactcagaatttctcaacgcttgcatcaatgctccactttatcctggcaggctcgacgcaccgaaaatgcgctcaatgttaacggaacttgaaagagaactttgtcgccaagtaaagacagaaaagcctgatgttccaaatctttctaatctcgatatcgatcatcttatgcctcaaagttggtattcctgttggcctctcgaaaatggtcgtatggtgacaaattcagatgctacggtattgaaccaaattgttctgtctggaaccgatcttacccctgaacagctactggtaaggaaacggcaacaagcgatatctactttgggaaatctaactttgcttaaccttagcgtaaaccgttctgttcagaatgctgtatttctgaaaaaacgtgatgctctcatcgtccacaccaatctacgactgaacattccacttatagttaaggataaatgggatgaggatgaaatcctggagcggggtaaaaagttgggggaaattgcattgaaagtatggccaaaacacgattaa

SEQ ID NO: 5128 - DNA, 129 bp, Escherichia coli
atgcttattggctatgtacgtgtgtcaacaaatgaccagaacacagatctacaacgtaatgcactgaactgtgcaggatgcgagctgatttttgaagacaagataagcggtacaaagtccgagacctag

SEQ ID NO: 5129 - DNA, 492 bp, Escherichia coli
atgccatttgctcgttatttctgcattttcataaacgttggtttgggagaagcggcaaaacggaatgtgggcaacggggaaaaccaaatccctgatatgtctttctggacggttactggtggcaatggaaattttgtgattcgtcaacctgacgggctaatcattcagatggttactgtaagtataagcggcccagtggcgatgaatggaatgactgataatgcttatgccatcacaggttctaataagtcttatattgccacagccacattgccctttgtatttcctaataaggtgctgggcgttatccctctggtatcaacaacagcttatggtggtgtatccagtaatattacaggttcatacgcgacggcggtttgttcttttgccgctgtcagggggaataatacgattgtgttcaaagtcgacaaaccactgaatgcagcctttccttcagataccagcgtctcagcgttaatcattggacggtaa

SEQ ID NO: 5130 - DNA, 444 bp, Escherichia coli
atgaactcagtattcttttcacccggaagtaaaagtttttatctgcaagaattgtttccagaatatgaggatgcgggaacgcttcctgatgatgttattgaaattaccagagaaacatatgagcaatttcttggtctgcatccagaagggaaagaaattggcgctgacagttcaggacggccagtatggattaattccccacccccttcaaaagaggatgaggtgttgacggctgaaatgaaaaaaatatctttggtttcagaagtcaatacctacatcaatacccatcagtggcctggcaaagctgctattggtcgtctgaaaggcgaggaactggcgcaatataattcgtggctggattatctggacgcactggaactggtcgatacttcctgtgcgccagatattgaatggcctacgcctccggcagttcaggccagatga

SEQ ID NO: 5131 - DNA, 603 bp, Escherichia coli
atggataaagcaatattaaatagtggacttgttgctacaaaggcaggggatattaccgtttataactatgatggtgaaactcgggaatatatttccacttcaagtgaatatcttgccgttggtgttggtatcccggcatattcctgtctggatgcaccaggtatacataaggcgggttatgctatctgtcgttctgtgaatttaaattcatgggaatatgtgccagaccatcgcggtgaaatcgtctataacaccgaaacgggagaatcaaaacaaatcacagcaccgggtgattaccccgaaaatacaaccactattgccccattaacgccatacgataaatgggatggtgagaaatgggtgaccgatactgaggcacagcatagcgccgcagtagacgcggcagaagcacagcgtcagtcactgattgatgctgcaatggcttccatcggtctgattcagctgaaattacaggccggacggaagctgatgcaggcagaaacaacccggcttaacgctgtgctggattacattgacgcggtgacggcaacaaataccagcacagcgccggatgtcatctggcctgaactgccggaggcgtag

SEQ ID NO: 5132 - DNA, 744 bp, Escherichia coli
atgcatcgtatagacacgaaaaccgcgcagaaggataagttcggcgcgggtaagaacggttttacccgtggtaacccccagacaggcacgcctgccaccgatctggatgatgactactttgacatgttgcaggaagaactctgcagcgtggtggaggcatccggtgccagtctggagaaggcgcggcacgaccagctgcttaccgcgcttcgtgcgctgctgttaagccgcaagaatccgtttagcgatatcaaatcggacggcacggtgaaaacggctctcgaaaaccttggtttgggagaaggctctgcattacctgttggtgtgcctgttccatggccttcagccacaccgccaacaggctggctgaaatgcaacggtgcggctttttctgctgaagaatacccggaactggcaaaggcttatccgacaaataaattgcctgatttacgtggtgagtttattcgtggctgggatgatgggcgcggcgttgattcaaggcgtgcggtgctgtcaacacaagagccaactgtaggtactttttatgtggagctagctatcatctcgggaactttgagcggctcaggtgctaaatttaccgattcagtagggattggatcaaccagtagtaacattaccgttagcaacggtaatgaccagtccgtgtcgggtacagtggccgttaaccccgtcgatacccgtccacgcaacattgcatttaactatatcgtgagagcagcataa

SEQ ID NO: 5133 - DNA, 1059 bp, Escherichia coli
atggcggacagtgaatttcagcgcccgacgctggcagaaaatatcagtatgctccgtaacgatttattcgccaggctggacgtcagcgacacgctccggcgcatggatgaagacgtgcgggcaaaggtgtatgcggcggcgctgcatacggtttacgggtacatcgattatctggcaatgaacatgctgcctgacctgtgcgatgagtcctggctggcgcgacatgctgcgatgaaacggtgtccgcgcaagggggccacgactgccagcgggtatatgcgctgggaaggcgtcagcgatggcctgaaggtgaccgccgggagtgttattcagcgcgatgacctgattcagtacacggcaactgccgatgcaaccagcgccggtggtgtcctgcgcgtgccgatcgcctgctcaagtgcaggcgcggtcggtaacgctgacgacggtacgtcattaatcctggtcacgccggttaatggtctgccgtcttccggcgtggcagacactctgacaggtggatttgatactgaagagctggaaacgtggcgcgcccgcgtcattgagcggtattactggacgcctcagggcggggctgacggggactatgttgtctgggctaaagaattgcccggcattacccgcgcatgggcataccgtcactggatgggaacggggactgtcggtgtgatgattgccagcagtgacctgattaatcccattccggaagaatcaacggaaacggcggcaagacaacatatcgggccactggccccggtggcaggctctgatttgtatgtgttcaggccggtggcgcatacggtggattttcatatccgtgtgacgccggatacaccggaaatacgggctgccatcaccgcggagttgcgttcgttcctgctgcgtgatggttatccgcagggagaactgaaggtgtcgcgtatcagtgaagcgatttccggtgcgaacggggaatacagccatcaattgcttgcaccggcggaaaatatctccattgcaaaaaatgaactggcggttctggggacgatttcatgggcgtga

SEQ ID NO: 5134 - DNA, 1080 bp, Escherichia coli
atgaacgataacgtcacgctacgggtaaatggccgggagtggaatggctggacatcggtgcgcatcggtgccggtattgaacggctggcgcgggatttcagtgtggagatcacccgccagtggccgggtgatgagggtatcaccacgcttcagccgcgcattaaaaacggttcaaaagtggaggtgctgattggtgatgagctggtgatcaccggctgggtggaggcgacgcccgttcgttacgatgcccgttcggtcagcaccggtattgccggacgcagtctgaccgctgacctgattgactgtgcagccgaaccgacacagtttaacggacgatcgctggtacagattgcgcaggcgcttgctgcgcctttcggcattgaggtggtgaacaacggtgcgccgtcgggtgttattcctgacgtccagcccgatcacggtgaaacggtgattgaggtaatcaacaaaatactcggtcagcagcaggcactggcttacgacgacccacacggcaggctggtgattggcggtattggctcaacgcgggcacatactgcgctggtactcggggaaaacatcctttcctgcgatacggagaagagtatccgggagcggttttctgtttaccaggtggcggggcagcgtgctggaaacgacgatgatttcggtgaggccaccaccagcgcgctgcgggcccgcacagaggacgcatttattgcccgttaccgtccgatgtatatcaggcagacagggcaggctacgggggcaggctgtattgcgcgtgctgactttgaagcccgacaacgggcggcgcggacggatgaaaccacctatgtggtgcagggctggcgacagggtaacggtacgctgtggcagcccaaccagcgggtgattgtcttcgatccggtctgtggtttcgacaataccgaactgcttgtctcggaagtcacgtttactcaggaccagaacggcaccctgacggaaatccgtgtcggcccacctgatgcttatctgcctgaacccgaagcccccggcgcgcggaaaaagaaaaaagccagagtacaggaggacccgttctga

SEQ ID NO: 5135 - DNA, 336 bp, Escherichia coli
gtgaaaaacacggttgacctgccaacgtgggaagaactgaccgacattcgcgacacactgaatacggcaattgataaggagttgtcccgtacaaccagtgatgtgctgtttctggcgctgcgccgggtgaaagcagatctgaatgcggatatcaacacgcgccttgaacagtctgcacggatcattcagcgcacaccggatgaggttttacccgcgctggtgctggcggcgacctggtttgataacgcggcgcgtgacgcggacattatccggcgtaatgccattacgcatcccggctttgtgccggtgatccctctgaaggtgccagtgcaatga

SEQ ID NO: 5136 - DNA, 495 bp, Escherichia coli
atggctggaacggcggggcgttccgggcgtcgccccaagccaacggcgcgcaaggcgctggccggaaaccccggcaagcgagccctgaacaaagatgaacctgtttttacgcccatcaaaggtgttgagccaccggagtggttcgctgaagaagatctccctctcgccacgatcatgtggcaactgacaaccaaagaactctgcggtcagggcctgctgtgcgtgactgacctcgcggtgcttgagcggtggtgcgtggcctatgagttctggcgacgtgctgtgaaaaatattgccatacagggcaataccatcaccggcgcaatgggcggcagggtcaaaaatccggagctgacagccaaaaaagaacaggagtccgagatgagcagcacgggggcaatgctcggactcgaccccagcagccgtcagcgtctgattggcctagcggggcagaagaaagccactaacccgtttctgaaaatcatcgaatcatga

SEQ ID NO: 5137 - DNA, 441 bp, Escherichia coli
atgagtatccccagtttagatgttcataaagttgttaagtgcgcagagcataaaaaggctttagatgcaatatctctcaaacttaagaataacattattgactcaagctctgaatacgattttcttggcgacacaataattttcaataaagataaaaaaaataggttaaccctcaaactttcaacatatgaactagaacttattttcaaagaaacactgctagtcattgatgaagctcctgtattgaagtttgctgccattgacccaaccgatgaaaataacaacgagctgattgatttatttttatccaaaggtggatttatttatattagagaatacaaatccgagccacattatgagtatggcgacacttctctatttttacatatacttgacgctactcttaaagagcttaaatctgcaaacaaaatatcctattaa

SEQ ID NO: 5138 - DNA, 225 bp, Escherichia coli
atgcgtattaaacctcaagattttaagtttgatgtgttgactgttgctggttacgctaaccctaaagctaaaacacatttcgcaccttctgcttctggatttaattttaaatgggagtgggaagggaaaatttatgagcttcatatcgagcaagaaaaattacagtaccctgattttattcttgaacgactttttgatgccgcaattgagatggctaaaaaatga

SEQ ID NO: 5139 - DNA, 438 bp, Escherichia coli
atgagcagagtaacggtgattatatccgctctggttatctgcatcatcgtctgcttgtcatgggctgttgataattaccgtgatgacgccatcgtctacaaagtacagcgcgataaagccacatccatcatcgctgatatgcagaagcgtcaacgtaatgtagctgaactcgatgccagatatacaaaggagcttgctgatgctaatgcgactatcgaaagtcttcgtgctgatgtttctgctgggcataagcgcctgcaagtcgccgccacctgtacaaagtcaacgaccggagccagcggcatgggcgatggagaaagccctagacttacagcagatgctgaactccattattaccgtctccgaagtggaatcgacaagataacctcacaggtcaattacttgcaggagtatatcaggacgcaatgtcccaactaa

SEQ ID NO: 5140 - DNA, 336 bp, Escherichia coli
atgattaatgccgttgagtacagattaccgttaggaaatatctctccagagaatcttgacgcgttgtcagaacttatcgttaagcattccgataaatttaataactatgtacttagttctatttctgatgatgatattcgatattcttacgattactacaattttgaaatcacagagatagatgaatatgggtttcactttatagcaccatatagctattatgaaggatgcgttgacaataacttctcaggagaggttgaaggttatgcagaatacgaaattattgataatgaattagtcttctctcttgaggaactaccttggggtgtaaaataa

SEQ ID NO: 5141 - DNA, 303 bp, Escherichia coli
atgacggtcagatattatatcagttctgcgggtttaacagcagagaagtttgcgacagtgattcgaaatcactggcacgtgaaaaataagctgcactggcgtcagggcgtggtaatgaatgaagaccactgcaaaataagaagaggaattgcagcagaattattttcagggatcaggtatatcggcattaatattttgacgaaacataaagtattcaaggctgggttaagatgtaagatgagaagagcagatatggacagagactacctcgcatcagtttttgcggggagctggctttcgtaa

SEQ ID NO: 5142 - DNA, 1398 bp, Escherichia coli
atgcctcttgccttgtcgaatgctgcagaaattgaatccttgggtattggtgaggtaattaaagttttttttgtttttattttgtttattataatttcattcattaccttgccttcaggggctctaaccgagcgtattaaatattataaattcaaccttctctgtatagtattattgctcgtgtgttctttcataagtgcgggaccagtatatgctttttatgaaacagcaaaattgttctatttacagcaaacctttaagcctagtaagaagatcggagatgcagggaaattctttttaaaaacaagtgtttttattaaccctatagaaaacaactacagtttcaaaggccgtaatgttattgtaatatttgctgagggattttcatctgaaattatgggtaatgccaaaccaagagcattttcagttacgcctaatttagataaattatctactgaagcactaagtttcaaaaattattataaccatacagctgcaacattccgaggattaagaggtcagttaacttctggttatcaatttcgagatggtttaactgacgctggcacaggtatcgcacaattatctaaagcagaaattaataatatttaccttcaccgtcaaacatctttacctgatatattaaaagagtatggatataaaagttattttatagcttccaccgaaaaaaatagcccactcaatacaatgttgaagacacttaattttgataaggttcttggtatgggtgattttattggttatcaacgagacagaatgacggataagcaaacatttaatgcactgcaatattttttacgttctcaggaaaataaaaaaggacccttctttattggtgtctatccatctggtactcatcatggtcaagatagcccaaatgaaaaatattttgatggtaacaaccctctctacaataagttctataactatgattttcagttagggaaatttattgacttctttcggcgcagttcattttataataatacattattaataataacgtcagatcattcaacatttccttcgacagaatataaaaaagcatttaatagcgattctcgttactttgtaggcgaaataccatttctggttattggaggagatattactcctgaaattttggatgcagacggtaaaaattcattaagctttgcgccaacaatattgcatatgttagggattcagtattcaatgaactattttttgggatgttctcttattgataaggaatgcacatcgccattttcacatctttctgctattggtagtgactatttcgttacaagcaaagaaaatcatgttgaactaataccaaacaataatgatagtgaattaataaagcttgcagaaagtttctataatatcagtggataa

SEQ ID NO: 5143 - DNA, 195 bp, Escherichia coli
atgatgacactggaagccgacagcgttaacgtacaggcgctggatatggggcacattgtcgttgacattgatggtgttaatatcactgaactgattaataaggccgctgaaaacggttattcactccgcgtggtggatggccgtgactctaccgaaacaccggcaacttatgccagccctcaccagttgctgtaa

SEQ ID NO: 5144 - DNA, 375 bp, Escherichia coli
atgaaaacattacctgtattacccgggcaggcggccagttctcgcccgtctcctgttgaaatctggcagatactgctgtcccgactgctggaccagcactacggcctcacactgaatgacacaccgtttgccgatgaacgtgtgattgagcagcatattgaggcaggcatttcactgtgtgatgcggtgaactttctcgtggaaaaatacgcgctggtgcgtaccgaccagccgggattcagcgcctgtacccgctctcagttaataaacagcatcgatatcctccgggctcgcagggcgaccggcctgatgacccgcgacaattacagaacggtaaataacattaccctgggtaagtatccggaggcgaaatga

SEQ ID NO: 5145 - DNA, 249 bp, Escherichia coli
ttgcattaccttgccgaccgtgccggtatcagaggcctgttcagcgatgcagatgcgtaccacctggaccaggcctttccgttgctgatgaaacaactggagctcatgctcaccagtggtgaactcagcccccgctatcagcataccgtcacgctgtatgcgaaaggactgacctgcgaagccgataccctgggctcctgtggttacgtttatctggctgtttatccgacgcccgaaatgaaaaattaa

SEQ ID NO: 5146 - DNA, 306 bp, Escherichia coli
gtgccggatacataccggtatcatctgtctcaccgtattcgtcgcgtggttgggaatgaaaacacatcattgccatatcagcaggttgcccgggaagtgaaagcgccccgtgaacggctgaagtatgcgctggaggcggggttactggtgaccgcactggacggcctgttctggtctggcagtcagcgtattgcggctgatgtcctgagactaagacagagcggaatgccggtggtgacaacgaccgtggaggtgcacgataacctgacgggaacaacccgcaaaataccggcataccatctctga

SEQ ID NO: 5147 - DNA, 234 bp, Escherichia coli
atggcaaggtccgattacgatattatcaatctgtctctggaacatgaactgaatgagtggctggcagagagaggttatgccggactggcgtataaccggaaccgggtggtagaggtggttacccgcaaattgcaggacagcttttatatcaacgtttcctgggatgcgctgaacacggcatacaatgaacacccggagtggttttcagggtttgtctccggggatgagaattaa

SEQ ID NO: 5148 - DNA, 351 bp, Escherichia coli
atgtctgctttattatcgcctttatctcttcaggcagcggatgtccggcgtagcggagatgaagcatttatcattcagcagcagcgtcaggaagcccttgagcaacaactgatgccttcagcccctgatgttcgcctttctgcacctggctcttttgcacgtaagattaattttcctgttgaaacgccctgttttcagattaaacagacggaactggagggggctgatgcgttaccacactggctgcctttacaaaaaatcgccaacggggcggtcgggcactgtctgggggcgaaaggaattaatctgctgatgagtacattgcagaaccgtctggtcgatcatggttaa

SEQ ID NO: 5149 - DNA, 384 bp, Escherichia coli
atggtacttttccccgacaatccccatgttcaggaaatggtggataactggcagaagagcgtaaggagtcgtgcgctcccggaagaggcgatgacgggctggaatgaaggcatgacccgcttacagcagctggctgaacgcctgaaccgtctggatgaacagcggggaaaatacatgacggtcagtgaactgagaacggaggtgtttggcatcatgcaggcctttaaccggcatatcccggcggaagagcagttacgtcgctatgatgaagcccgtaaccagaatggcagtgaacagcagcaaaaacaggctgaaatggcactgaatcagctgattaatcgttatcaggtggaacacgctggcaaaccggagaggcagccatga

SEQ ID NO: 5150 - DNA, 1167 bp, Escherichia coli
gtgacaatagcaagagattctgttagtggtgaaattgttcatggtcatgatcttcgggaaatggatgatctttatatacgaacaaccacttttgaatgcccgtatgacaaatgtaggatacccgctactccatgtagcttcaaagaaataaatttaaatcaatcatactttcgatataaagagactcataggccgggatgtaagattcatgatcctaagagtaaaaataagtgtaactcaaagaataataaaaagcataattcaccaccggcattagctatatctcttctgaaacttgatgtgtctgaaagaaattacgactcttctggcagaagaattatcaaacagacgcgaaatgatgaaaaagatttgggaggtaaagtacaccctgtgtcatcttcaagcatcaaaccggtagtagactactacattaatggagataatctctatgaaccattatcaattcccccttatggagttagaacttataaagatacttttcaactaatcatctataaagaaggaattagatataataagccagcaatttattttggtaaaattcaatctaatatacggctggagataaattcgaatagatattaccttacttttttagccagaaagaaaggtaccaaacaagcatataaacttgaaattgatgcttcagaatgggatgaaagtaaaaagagttttttctgtagtgagtatgaaaaacaaagagcagaagcaaataagtattataatggactaaaagacaagcgcaaagcaaccaaatatcttaatattttcttttttggttttcctgatgagtgcgatagttttttatttaagactagttgttttaaattgatttatatcgttttcttagatgattttgatgtgacttataatgacaaaaactacagcatagaaaaagaacagctaattagagatgaaattaacaaagaacatttgacagatcatcaaaatagaataaaccttgctgaggttgctgaggttgctgaggttgctgaggttgctgaggttgctgaggttgctgaggttgctgaggttgctgaggttgctgaggttgctgattttgacaagagcgaatttaacccttcggattctgataggaaaatatggactgggataagaaagcttatttcattctttaaaaaatag

SEQ ID NO: 5151 - DNA, 1785 bp, Escherichia coli
atgtggtcagacaaagagtcatcagaagactacctaaattttggtgaagtatctcagttagccgtggatgtacttaccacgaaagatatgttaccagtatctatcggaatttttggaaactggggggcaggtaaatcctctctgttaaaactgatagagcaaaaacttgagcaagacgacaaagattggattgttatcaattttgactcttggctctatcaggggtacgacgacacccgtgccgcacttcttgaagtcatcgctacagaattgacaaaagctgctgaaggtaattcagcccttatatcaaaaactaagagactccttagtcgagttgatggttttagagctatgggattactagctgagggtacagctttaatggcaggattacctactggcggtttgctttctagggggattggtgcattaagaaatatcaccgatggcatccagagccaggaagagtatgaggctttaggcaatatagctaaagaaggtaaagaaactgcttgtggtttgattaaaccacaaacaaaaaaaagcccccctcagcagattgatgcctttcgtaaggaatatggggaaattctagaagaacttggaaagccactcattgtggtaatagataacctagaccgctgtctccctgccaatgctatccatacacttgaagctatcaggctattccttttcttgactaatacagcctttattattgcagcagatgaggacatgattcgctcttctgtggctgattacttcaaaggggcatcacagcgccatcaaatagattatctggataagctaatccaggttcctattcgggtgcctaaggctggggtccgtgagatccgttcgtatctgttcatgctttatgccattgaacatggcttagaaggcgaaaaaataactatgctccgtgagggcttagagaaggcgttacagcaatcctggaaagatgaaccaatctcacgtcaggaggccttaaaaatgactggtgaagcggatgatagcaacctcgcgctggcgtttgcgcgtgctgaccgtattgctcccattttagccaactctccaattattcatggtaatcccaggatcgttaaacgcttgttgaatgttgtgaaaatgcgatctcaaattgcgaagcgacgagcaatgcctttggatgaagcaattattactaagctagtaatttttgaacgctgtgttggagtggatggcaccgctgatttatatcatctcgtggatattgaacaaggtgttccccagatacttaaacagcttgacgataatggcggtcaaatacctactgatgcaccaaagacatggactgatagtccaacgactaaatctttcatcagtcaatgggcccaacttgaacctcgtcttggtgggattgacttaagggccgccatatatctgtcccgagaaactatgccaataggtgcatatgtggttggtttatcgccatctggacgggaagtactaaatgcactaattgaattgaaaaacactagttctcctacagcagaaaaccttttgaaagcacttcctcgtgaggagcaaatacctgtaatggaaggtttaattaaccagttacggcaggtatcagattgggatcgtaagcccagaggcttttccggtgcatgtctgttggcccgctactcaacagatgcagccagcatattaattcgttatctacaggaattacagttggggatgaaacgaccagcgtggatgactgcagcattaaaagatgaacaatggaataaggacgcttaa

SEQ ID NO: 5152 - DNA, 753 bp, Escherichia coli
atgggaacatcacaatcaagtaaaggtccaggaggtggctctccgctggttccaccatgggctgatgatcagccacagcaaccgttaccctcgccgcaagaaaggaggtttgcgccatttcgagaatcgttgggaaatgcggtatcaaatggaaatcgagcagatttcagaaaagccatagggcactacgcgcgaaaagcctccggagggagcagtaacgctgctcggcgattagggagtgtcacgcaagctggggccgaattatttggggctttagtgggaatgccttcggctcccggagaaccaagcatcgatttgggcagtttggcaggccttccatgcgaaatagcaatatcaactattgctcaagctttaacatcacaggatggtgactcagaaaagatctgtgcggccatgaaccatgctttagtggaggctcttgatggcgtagaaattttcgatcctcaaaaaataactgatggtgtgattgttgacacaatgattggttatctagcggaaagtattttccttcagatggtaatggattctaatagggcatggaacaaagcagatacaccttcaaaggcaattcatgcagaaattgaactccgggaattgattaaagttgttgttgataaacatatggcaccaaaacttgccggtaacataagatcgttcacacgaaaccaaatggtaaaaattgaacgtcaggccattattgaggcctggcaagaatgggaggcataccagtga

SEQ ID NO: 5153 - DNA, 1320 bp, Escherichia coli
atgggaggcataccagtgacacaattagttttccatcataaacatcaccatttgccgccagcaagtgagaaagtgttacctgttcagctatatggattaagtggtcagaggcgcggagatatatctgttatcgggaatcctgcgattgatcggatcagacgtttgggagtacagcttccagctaaggtcatggattttctgagtgttgcattagcagtaactgcagcagatactttcgttcagcgtgaaagttccgaggatggttggacccgccaattgtcgttacgactcccccttcatgaaccatccagatggattagtctaaagaaagaacttgagagtgctttgcattttcttagtggagacatctgggatttcgaattttgtgacgatggttatgcaccgccagagccttatagccagcattcaaggcatcgtctgattaagctaaaagggcttgactgtgtcagcttattttcaggaggtctggattcagctattggtgcaatagatcttctggctgcagggcgcgctccacttttggttagtcatgcttataagggggacaagtctcgtcaagatcagatcgctgaaaaattaagtggccaattttcgcgctttgagattaatgctgacccacacatttatcaaggcgtgactgatattacgatgcgaactcgtagcctcaattttcttgcctttgcggccgtaggtgcttgtgccgtacaagagatatctcaacaagaaaagattgatttgttcgtacctgaaaatggatttatctcattaaatgcaccacttactccacggcggataggttcgctgagcacacgaacaacacatccacattttattacgagcatacaaaagatctttgatgcgctcggtatttcttgtcaaataatcaatccatatcagtttaagacaaaaggaaaaatgatctccgaatgttcaaataagcagctcttatctaaaattgtggaaagtacagtatcctgcagtcattggaaacgaatggggcagcaatgtggggtatgtataccgtgtatcattcgacgagcatcacttcatgcagggggaattagtagagatgttgaatatattttccagtccttagctaaagtaatgaatgaaatagatcgcagggacgacctgatcgcccttaggattgcgatcacgcagaaatcgactttgaaaataggtacatggattgccaaaagtggccctttgcctacggcagaatttgataatttcaagcaagtatttaaggatggcctagatgaggttgaaagctatttactgagtgagaacatagtatga

SEQ ID NO: 5154 - DNA, 726 bp, Escherichia coli
atgagcatcgatatgcactgtcatctagacttatatcctcggccagacctcgtggctgaagaaagtaagcgtcgagggacttatattctgtcggtgacaacaacacctaaagcatggcatggtacttctttattggctaaagaaagtcaacgaatccgaactgctcttgggctacatcctcaaatcgcgcatcaaagatcgcatgagttagacctgtttgattcattgctttcggaaactaagtatgtaggggaaatagggcttgatggtggacagggatttaaagaacattgggatattcaattgaaagtgttccgacacattctcaacagtgtaaatcgggctggtggcaagattatgactatccatagtcggggaagtgcatcagcggtgcttgatgagattgaaaatatcgatggggtggcaatattgcattggttcactggaacacctaagcagcttgaaagggcaattgatttaggatgctggttctcagtggggcctgctatgctcgatacaataaagggtaaggccttagttttgaaaatacccaaatcacgcattcttacagaaacagatgggccatttgctaagtttcgtaatgacccactaatgccatgggatagtgggattgcagagaaacagttagccgcattatgggggattagtcagatggaggttaatgctcagctagttgataattttaaggtattatgtacatcataa

SEQ ID NO: 5155 - DNA, 576 bp, Escherichia coli
atgacgcaatcagagatgctgaaattaatcgcccgacatggttataacgttggatttggcgctaagaaaaactttgccacctatgatctgatttgtaaggcatccggttggattagctttatttctcttgctgtcggtgtgttcgccctttttattcctgagctggccacaaacgtcatttccgcgatattaattatatttggtgttgctacaatgtacattcagttttatgactcggaaaagcagagttatgaaagtgcggggattgagcagaccaaaatttttaatgaacttgaagtcatctaccgcaacgtaaaaagcgatgcaaactttgactatcagcgtacacaacaatccatcgacgctatcatgtcccggttttacggcacggtcatcagcaaacagatcttcggaagtaactggtacgcacattataaattttactgtgaatttgaaaaagcatgggttgaagaagagctgaacctgacactgaaggacaaaatcccgctttcgctctgctttttcgccagtctggcgatcatttttactatagctgtcatctggaaaacgccctga

SEQ ID NO: 5156 - DNA, 1329 bp, Escherichia coli
atgagccacagggaattgttcagcgaatttcttgaaaatttgaatcttgacctcaaacaggcaaaaaagatcagctatcactatcgaaaaataaccaagtcattaaatcttgcgttcagaggaacgagttcccgggtagcaaaccgcttgaaagtggggtcagtaggcagacataccgcaataaaaggcatatccgatctggatatgctttatattatgccccccaatcagtatgaatattataaccgtaaggataatggtcagtctgcattgcttacagatgtcagaaacattctggcggaagaatatcctgaccagactgtgaaaaaggacagactggttgttcagatcatctttaaaaacttttatgtcgaggttcaacctgtattcagacaggatgatgacagctttaaattccctgaaagctataatggaggagcatggcgcattacaaaacctcttcacgaaaaggcggccatgaccgcattttcgcgagataaatccaataatctgcgcaagctgtgtaaaatgatcagagcctggaagaacctgcatggcgtcaatatgggtggcttactgatagacacactagcgtatcgctttctttcatcaacatcagattatgacaataccggaaatggcagcctgggagccctcgccagagacttttttgaatatctgtcaaatgaggagagaaaggaaaggtatctcgcgttaggcagtaatcagcatgtacgtgttaaatctccctggtttggccgggcagcgaaacacgcgtatgaattatgttgtgatgccttagacgctgagggggctgccagtgaaaatgaccgctggcgcaaagtgttcggacgagccttccccagacgtaaagtgggtattatggaagcccgtcttggtctggaatcgcatgcggcagatgctgttccctggaccgataccgaagagtttatagaggataaatatccggtggatatcaggtactcactcaaccttgactgtaccgtaacccaggatggtttccctcccagaagcctgagggagatgcttatcagaagattccgcctctccgctcgaaaatctctccttttccgggcagacttgacagaaatggaggcagaggaaccctacaccgttatgtggaaggtactgaacgtgggtgacgaagcacgcagaagaaatatgatccggggacaaatcgtttcggacggcggctactgtacgaagaaagaaactaccgacttccgcggagatcacatggtagaatgctatgtgataaaaaatgaggttgtggttgcccgggcccagattgaagttcccataagctga

SEQ ID NO: 5157 - DNA, 186 bp, Escherichia coli
atgttcttcggcagcgatcacggcggcgagcgaggagcactgttgtacgggctgatcggcacctgccgactgaacgatatcgatccggaagcgtatctgagccatatcctgagcgtactgccggaatggccttccaaccgagttgacgaactcctgccatggaacgtagtactcaccaataaataa

SEQ ID NO: 5158 - DNA, 543 bp, Escherichia coli
atgtcacccaacaggctccagcgacagttcaatccggatgctcctgatgagcgttgggtaacggacataacctacatcaggacccacgaaggctggctgtatcttgccgttgttgttgatctgttctcacgcaaaattatcggctggtccatgcaatcccggatgacaaaggacattgtcctgaacgcactgctgatggctgtatggcggcgtaatcccgaaaaacaggtgctggttcattcggatcagggcagtcagtacacaagccatgagtggcagtcgttcctgaaatcacacggcctggagggtagcatgagccgtcgcggtaactgccatgataatgcggttgcagaaagttttttccagttgttgaaacgtgaacggataaagaaaaagatctacggaatgcgggaagaagcccgcagtgatatttttgattacatcgaaatgttttataacagtaagcgtcggcatggttctagcgaacagatgtcaccgacagaatatgaaaaccagtattatcaacggctcggaagtgtctag

SEQ ID NO: 5159 - DNA, 288 bp, Escherichia coli
atgaaaaaaagaaattttagcgcagagtttaaacgcgaatccgctcaactggttgttgaccagaaatacacggtggcagatgccgccaaagctatggatgttggcctttccacaatgacaagatgggtcaaacaactgcgtgatgagcgtcagggcaaaacaccaaaagcctctccgataacaccagaacaaatcgaaatacgtaagctgaggaaaaagctacaacgcattgaaatggagaatgaaatattaaaaaaggcggcgtacttcgcaaagctgtccgactga

SEQ ID NO: 5160 - DNA, 348 bp, Escherichia coli
atgtttaaatccttattaatcagtaagatgtatggtcgccacagtgcccaaattgctgaaatcgctgaaagcgagctgccacagggggatgtggaggtcaatgtcgactgttcatctatcaactacaaagacgcactggctattacgggccgcgggcctatcgtccggcactttccaatggtgccaggcattgattttgccggtacagtgtccgccagctcacatcctgaatatcagaccggggataaggtcctgctgaccggctggggtgtaggagaaaaacattggggtgggctttccgaaaaagcgcgggtaaagggagactggctgacgccgctcccggcttga

SEQ ID NO: 5161 - DNA, 360 bp, Escherichia coli
gtggcgcttatctgcgagcttgatgagcaatggagctacgttggcagtaaagcccggctacactggctctggtacgcgtacaacaccaaaacaggcggtgtactggcctacacttttggtccccgaaccgatcaaacgtgccgggagctactggcactgcttacacccttcaacatcggcatgctcaccagcgatgactgggacagctatggccgggtggtgccgaagaataagcatctgaccggcaaaatattcacccaacgcattgagcgtaataatctgacgctacgcacccacattaagcggttggctcgtaaacaatctgcttctcacgctcagttgagatccacgaaaaagtga

SEQ ID NO: 5162 - DNA, 273 bp, Escherichia coli
atggccagcgttaatattcattgtccccgttgtcagtcagctcaggtttaccgccatggtcagaaccctaaaggccgtgacagatttcgctgccgtgactgccaccgtgtgtttcagctcacttatacttatcaagcacgtaagccgggtatgaaagagatgatcactgaaatggcctttaatggtgccggggttcgcgataccgccaggacactgaaaattggtattaacaccatcatccggactttaaaaaactcgcaccaacgcaaataa

SEQ ID NO: 5163 - DNA, 1470 bp, Escherichia coli
atgcatatcgattcgactgaaaaaaataataaacaaaagttgggcttgcttgcgctaacatccattgtcgtgagctcgatgatcggcagcggcgttgacggactcccccagaatatggcggagaattctgccgtgggcccggtggcgatagcatggatagtctgtggtatcggcatgtttttcatctccagaacttttatcgtgctgtcaaacattagacctgatctccagtcaggagtttatatgtatgcccgggaagggttcggccgatttacggcatttaacgtcgcctggggctactggctgatgactatattcagcaacgtcgcctttgccattatggtgatggatacgctgaattatttcttaccaggtgatttcaagggagggaacaatattccttccgttatcggtgcctctttgctgatatggggattcaactttttagtcctctccggtacccgcattgccgggtcgattaacatcgtcggcacgctggccaaactgatcccgctggtggcctttattattattctcatgctgtttatgaagtacaccacgttcgcagataacgtctgggggcacagcgcgagtaaggccagtcaggacctaggctctattttctcacaggtaacttcaccgcttagcgtggcactctggagcttcatcggcgttgagggggctgtcgctctttccggtcgggccaaaaataaacgcgacgtgggtaaagccacattcattggcttcgttgtatcactgattatctgtctgctggtctccatcctgccgtttggcgtgctgactcaacatgagctcagcgcaattccaaccccatccaccgccggtattctgaagattgttgtcggtgaatgggggaagattatgattatcttgggggtgctgatttcggtgcttaccagctggctggcgtggaccatcatctgcgccgaactgcctatggtggccgcgcagaacggcacattcccgaaaccgttcagcaaaaaaaatgtgaagggttcggcctcggtttcgctttatataagcagtgcgtttatgcaaatcgtcgtacttctggtctacttttctaacgatgcctggcttgcaatgctggctatctctaccctgaccgttttacctgcgtatttaatgaccacggcatacctgtttaaactatgtattagcggcgagtatgccagctataccacgaatcacagccgcagcgccgcgctggtcagcagtattatcggctttgtattctgcctgtttatgttctacgccagtgaaatcaaatatctggcgatggttccggtgctgcttacgctgggcgtgcccctgtttatctgggcaagaaaaaaagacgatcgcgcagataaaatatttacgctacgcgaactggcattttttattttactgctggtcctcgacatcattgtttttattctactgcattataaaacgatacatttttag

SEQ ID NO: 5164 - DNA, 2370 bp, Escherichia coli
atgaaatttaaccacaatcttttatttatttcctcacaatatcttgatggcgacaacccttcgcagcaggtactggaagagcttcaaaccgaactcgcggaacgcggttttaaaattcatatcacgcaccagatctctgatggattaaaaatcatcgaaaaaagcccccaatacagcgggattggtttttactgggagccagacaatccgacctttgcagaagagctacagcactttatcagcatattccgcaaaagaaatgccacgacgccgctgataattttctcagaacagaatattaccgatcgtatcccactcgacgtcttaaaagaggtcagcgaatatgtttatctgttctctgaatccgcagccttcactgccaatcgactgtactccttagtccaccgctatgcggataagcttcttcctccctactttaaaacccttaaggactttaccgaggacggtgactattactgggactgcccggggcatatggggggaatggcctatctgaaacatcctgttggcattgagttcattaacttctttggcgaaaacatgatgcgcgctgatattggcgtggctaccgcggagatgggggattatctgatccacgccggaccgcctaaaaaatcggaagaaattgcggcccgactgtttggctctgattggaccttctacggtgtttccggctcatcggggtcgaaccgtattgtggcccaggctgcggttggcgcagatgaaattgccattattgaccgaaattgccacaagtcacttaatcatggcctgaccttgtctcaggcaaggccggtttacctgaaacctacccgcaacgcgtgggggctgattggggctatcccgaccgggcgcctgaagaaggccagtattgatgcgctggtggcaaacagccgactggcatctggtgcggtcagccagtccccgtcctacgccgtggtaaccaactgcacctatgatggcttctgttataacgtgaacgatgtagtcagacacctgggtgaaagcgcaccgcgcatccattttgatgaagcatggtatgcctatgcgcgtttccatccgctataccagagtcgctatgcaatggacgcggaggaaacgccaaatcgtccaaccctattcgccgtacagtccacccataaaatgctgccctcactctccatggcctcaatgattcatgtgaagaaaagcgatcgcgcgccgcttaatttcgatgactttaacgatgcctttatgatgcacggcacgacctcaccctactacccgatcattgcatcaattgatgtggcagtaagcatgatggagggtgaatccggttattcgcttgtgcaggagtcaattgaagaagcgattgccttccgtaaagccgtggtcagcgtcaagcgccagctccaggagcaggaaggtggtgacgcctggttcttcgatgtgcttcagccaaccgaagtgcaggacagcgattctgggcagcgatacagttttgaagaggcacccgtatcgctgctgagccacagcgccgactgctggtcgctgcgctccggtgagcgctggcacggttttgccgatgatgatctggtcgaaaccaacagtatgctcgatccagtaaaagtgaccctgacttgtccagggatcggcccgaagggagaataccagaaaaacggtattccgggatatttgctgacccgttttctcgatgaccgtcgcattgaaattgcccgtactggtgactacaccgtgctgatcctgttctccgtcggcatcaccaaaggcaaatggggaactctgattgaaagcctgctggcctttaaaaagcattacgacaatgacgatctggccacagatgctatcccgtcgctgaaagcgcattctccacactacgacacgctaaccctcaaggagctatgtcagataatgcatgaaaaaatggatgagctggagctgatgtcgcatatcaacgacgcggtaaacaccgatccggaaccagttatgaccccggcagaagcctatcagaaagtcgtacgctacaaaaccgagcatatccggctggatgattttagcggcagaattgccgccagcatgctcgtcccatatcccccaggcattcctgtactgatgccgggcgaacggatgccgcaaggtaacaagggcattattggctatctgcgcgccctgcaggaattcgataagcaattcccaggttttgaacatgagatccagggcgttaacgtcgatgaaaacggggacttctgggtcagagcgattgtggaagaagaacgcgatgggcagtcgctacccggccacataacctttaaacgccaggtctctggtattaaaaagggccgccagtag

SEQ ID NO: 5165 - DNA, 1500 bp, Escherichia coli
atggcagagcaatcttcagatgtaaaaaatagtgacaatagcgccggaggacataagctggggcttatatccctcatcgctattgtcgttagctccatgctgggaggcggcgttttcagtctgccgcaaaacacggcggcctcttctgcactagggccagtaatcattgcatggattattgccgggatcggtatttattttatcgcaaactcctttcgcgtactatcagatctgcgcccggaccttcaggctggagtgtatatgtatgcccaggaaggttttggttcctttattggctttaacgtcgcctggggctactggctgatgaccgcatttggcaacgttgcctttgcggtaattttaatggatgcttttaatcagtttatgccgggggtttttacggatggtaataatctgaactccattatctgcggctcagtgctgatctggggctataattttcttgttctgtccgggacgaaagtggccggatttgttaacaccttgggaaccatcgccaagctcgtccctctgatcctattcgtattactgctgggtgtgctgatcgattattcggacctgtttaaaaacttttggggagaatcacccgcgatcctcagtggcaacggaaatgacgccgcaccagtatcgctgctgtctcagattctggcaccgatgaccgtaacgctctgggcctttattggcgtcgagggagcggttgttctatccggacgtgccaaaaataaacaggacgtagggaaagccacactgatcggctttctgctggcgctaattatttatatgttaatgtccattctgccgttcggtgtaatgcctcaggcagaactagcgcaggtcagtaacccctctaccgcaggcgtgctcgcccacgttgtcggtcagtggggcgactggctgatgagcgcggggctgattatttctgttctggccggctggcttgcctggaccatgctatgcgctgaaataccgatggtcgcaggacagaaaggcgctttcccgcgcgcgtttgcccgaacgaacagtaaacaggcggccaatgtgtcactgtgggttagtagctttgtgatgcaggcggccatgttacttgtttatttttcaaataatgcttggaccaccatgtataatatcagtgcgctgatggttgttccggcctatattaccaccacgctgtatctgaccagtatttgcagaaatggaaaatatgatcagtatgcaaaaaaaggccgcaggctggctttgtccagcggtgttttaggctcgctattctgtctgtttattctttacgccagccagattgagtatgttgcattaattcctatcctgttgacctgtggtctgccggtctttatctggtcaagaaaagaaaaaaatgatggtcagccgatatttaccaaaaaagagctgatttatctgattatgctgttgctgtgcgatattatcgtcgttgccctgtttattggtggatatttaaaggtataa

SEQ ID NO: 5166 - DNA, 207 bp, Escherichia coli
atggcactggacagttatgcatctccgaatattattccggagctaagacaaccgaatgccgcagcaggtaagatcacgctaggggggctggacagaatggctgttacgcccagtgtgaagaaaagaaggctaagtatggtagaatttccatacgcactagactggccccctgaatctccagacaaccaatatcacttatttaagtga

SEQ ID NO: 5167 - DNA, 180 bp, Escherichia coli
gtgttttatgttgttattttatgtgttttctatcgtctcctgaattatcacgtaaaaatcagaccttataatatcattattagtacacggttatttactttgaacacatttataaattattacataaaaatagcgaatattgataaaatccccgccaacgatgtgttgacggggctgtga

SEQ ID NO: 5168 - DNA, 2373 bp, Escherichia coli
atgaagcgagttcttattcctggcgtcattttatgtggcgctgatgtggcgcaggccgtcgatgacaaaaatatgtacatgcatgtttttgaagagatgacggtctatgctcctgtccctgtacccgtaaacggcaacacgcattacaccagtgaaagcatcgagcgtttaccgaccgggaatggcaatatcagcgatctgctgagaaccaaccctgcggtacgcatggattcaacgcaaagtacctcattgaaccagggagatattcgcccggagaaaatctctattcacggtgcgtcgccctaccagaatgcctatttgattgacggtattagtgcaacgaataacctgaacccagcgaatgagtccgatgccagtagtgcaaccaatattagcgggatgtcacaggggtattatcttgatgtcagcttactggacaatgtgacgctttatgacagttttgtgccagttgaattcggtcgcttcaatggcggggtaattgatgcaaagatcaaacgcttcaacgctgatgatagcagcgtgaaactgggttatcgcactacgcgttcggactggttaacatcgcatatcgatgagaataacaagagcgcatttaatcaaggttcttcaggaagtacttattactctccagattttaaaaagaacttttataccttgtcgtttaatcaggaactcgctgataactttggcgttaccgctggtttatcgcgccgccagtctgatatcacccgcgcggattatgtttcgaatgacggcattgtcgccggcagggcacagtataaaaacgttatcgatactgcattgagcaaatttacctggtttgccagcgaccgctttacccacgatttaaccttaaaatataccggctccagccgtgattataataccagcaccttcccggagtctgatcgcgaaatgggtaataaatcctatggtctggcatgggatatggatacccagctcgcatgggccaaactgcgtaccaccgttggttgggatcatattagtgattatacccgtcacgatcatgacatctggtacaccgaactttcatgtacatatggtgatatttcagggcgttgcacccgtggcggattaggacacatttcccaggctgtagataattacaccttcaaaacacgcctggactggcaaaaattcgccgtgggtaatgtttcgcatcaaccctacttcggcgcggaatacatctattccgatgcatggactgaacgccataaccagtctgaatcctatgtgattaatgctgccggaaagaaaactaaccatacaatttaccataaaggtaaaggtagtctgggaattgacaattacacgctgtatatggcggatcgcattagctggcgtaatgtgtcgttaatgcccggcgtgcggtatgactatgataactatctgtcaaaccacaatatctccccgcgctttatgacggaatgggatatttttgctgatcaaacctcaatgattactgcaggttataaccgttactatggcgggaatattcttgatatgggattacgtgatatccgcaatagctggacggaatcggtatcaggcaataaaaccctgacgcgttatcaggatttgaaaacgccttataacgatgaactggcaatgggattgcagcagaaaatcggtaagaacgttattgcgcgtgcaaactatgtttaccgtgaagcgcatgatcaaatcagcaaaagcagtcgtaccgacagcgcgactaaaaccaccattactgaatataacaacgatggcaaaaccaaaacacattcgtttaacctcagttttgaactggccgaacccctgcatatcagccaggtagatattaacccgcaaattgtctttagctatatcaagagcaagggcaacttgtcgttaaacaatggttatgaggagagcaataccggtgataaccgggtggtttataacggtaatctggtctcttacgatagcgttccagtggcggattttaataatccattaaagatctccttaaacatggatttcacgcatcaaccgagcgggttggtgtgggcgaatacgctgacctggcaagaagcgcgtaaagctcgcattatcctgggtaagacgaatgcgcaatacatcagcgaatattcagattacaagcagtatgttgacgagaaactggatagcagcctgacctgggacacccgcttgtcctggacgccacaatttctgaaacaacaaaacctgacgatcagtgccgatattctcaatgtactggatagcaaaaccgctgttgatacaacgaatactggcgtggcgacctacgccagtggccgtactttctggcttgatgtcagcatgaaattttaa

SEQ ID NO: 5169 - DNA, 1659 bp, Escherichia coli
atgttgatagcaaagtatctctgtctgctgaagcccttttggctgcgtaagaataataaaacttcagtgttgttaatcattattatcctcgccatgatccttggcgtggttaaaattcaggtctggttaaacgactggaataatgattttttcaatgcgctaagccagaaagaaactgataagctttggcagcttgtcctttggttccctgccctgctggggatctttgtattaatatccgtaaacaaaacatggttaattaaactactgactattcgctggcgcgaatggttaacagattactaccttaatcgctggtttgcagataaaaactactacttcacgcagatctacggcgagcataaaaatacagataaccctgaccaacgtatcgctgaagacattctcttactgatcagcaaaacgctcagcctttcatttggcttcatccagtcacttagcatgctgatcacctttaccgttattctttggcaaagcgcgggtacgctctcattcactgttggtggaactgaatggagtatccaggggtatatggtctataccgtcgtgctcattgtgatcggtggaactttatttacccataaggttggtaaacgtattcgtccacttaatgtggaaaaacaacgtagcgaagcgacatttcgaactaatcttgtgcagcataataagcaggcagaactgattgcgctaagcaatgctgagtctctacaacgccaggagttgagcgaaaattttcataccattaaagagaactggcatcgtttaatgaatcgtcagcggtggcttgattactggcagaatatttattcgcgctcgcttagcgttcttccctactttctgttattgccgcagtttattagcgggcagatcaatctgggcggactgatgaaatcgcgccaggcatttatgctggtatcgaacaatttaagctggtttatttataaatatgatgaacttgctgaactggctgcggttatcgatcgcttgtatgagttccatcaactcaccgaacagcgccctacgaataagcctaaaaattgtcaacatgcggtacaagtggctgacgcgagtattcgtactcctgataataagatcatattagagaacctgaactttcatgtttcgccaggcaaatggctattgctgaaaggttactctggtgcgggaaaaaccacactgcttaaaacattatcccactgctggccgtggtttaaaggtgatatttcttctcctgctgacagttggtatgtgtcacaaacaccgttaatcaaaaccggcttactgaaagagattatttgtaaagcacttcccctgtccgtagacgataaatcgttgagcgaagtactgcatcaggttggtctggggaaattggctgcgcgtattcatgatcacgatcgctggggagatattctttccagcggcgaaaaacaacgtatcgccctggctcgattaattttacgacgtccgaaatggatatttcttgacgaaactacctctcatcttgaggaacaagaggcaatccgcttactgcgtttagtgcgagaaaaactccccacaagcggcgtcattatggttacacatcaacccggtgtctggaacctggtcgatgatatttgtgacattagcgcggttatataa

SEQ ID NO: 5170 - DNA, 2280 bp, Escherichia coli
atgaagaaaaaaattgaatcctaccagggagctgccggtggttggggtgctgttaaatccgtagcgaatgcagtacgtaagcagatggatatacgccaggatgttattgccatgtttgacatgaataagccagagggctttgactgtccgggatgtgcatggccagatcctaagcacagtgcgtcattcgacatttgtgaaaacggcgcaaaagcaatcgcctgggaagtcacggataagcaggtaaatgcctctttctttgctgagaatacggttcaatcattacttacctggggagatcacgagcttgaggctgcgggacgtctcactcagcctttgaaatatgatgacgtcagcgactgttacaagccattaagctggcaacaagctttcgacgaaattggcgctcgccttcaaagctatagtgatcccaatcaggttgaattctatacttcggggcgcacttccaatgaagctgcctttctttatcagctttttgcccgtgaatacgggagcaataactttcccgactgctccaacatgtgccatgaaccgaccagtgtgggattggcagcgagtatcggtgtgggtaaagggaccgtgttgctggaagactttgagaaatgcgatttagtcatttgcattgggcataaccctggtacaaaccaccctcgcatgctgacttcgttgcgcgctttagtgaaacggggagcgaaaatgatcgccatcaatcctctacaggaacgtggcctggagcgatttaccgcaccgcaaaacccgtttgaaatgctgacgaactctgagactcagttggccagtgcctactataacgtgcgcattggtggcgatatggcattgctcaaggggatgatgcgcctgttaattgagcgcgatgatgctgcaagcgccgcaggtcggccctcattgctggatgacgaatttattcaaacgcataccgtcggctttgacgagctacgccgtgacgtgctcaattccgagtggaaagatatcgaacgtatttctggactaagtcagacacaaatcgccgaacttgctgatgcatatgccgctgccgaacgaaccattatctgttacggaatggggatcactcagcacgaacatggtacccagaacgtacagcaactggtcaatctgctgttgatgaaaggtaacattggcaagcctggtgcgggtatctgcccactacgaggtcactctaatgtacagggcgaccgaaccgtcggtatcaccgagaaaccgtctgcagagtttctggatcgcctgtgtgagcgctatggcttcaccccacctcatgcacctggacatgctgcaatcgccagcatgcaagctatatgtacggggcaagctcgagcattgatctgcatggggggcaactttgcactggcaatgccagatcgggaagcgagcgctgtaccgttaacgcaattagatctggcggtacacgtagccactaagcttaaccgctctcatctgctgaccgcacggcatagctatattctgccggttctgggacgtagcgagattgacatgcaaaaaagcggtgcgcaggcggtaaccgttgaagattcaatgtcgatgattcatgcctcgcgtggtgtgttaaaacccgccggtgtaatgctgaaatcagagtgtgcagtggtcgcgggaatcgcgcaagcagcactaccccagagcgtggtagcctgggagtatctggtggaagattatgatcgcattcgcaatgacattgaagctgtgctgccagagtttgccgactataaccagcgcatccgtcatcctggtggttttcacctgataaacgcagcagctgaaaggcgctggatgacgtcgtcaggtaaggctaatttcattaccagtaaagggctgttagaagatccctcttcagcgtttaacagtaagctggtcatggcgacagtacgcagtcacgatcagtacaacacgacgatttatggtatggatgatcgctatcgaggggtattcggtcaacgagatgtggtctttatgagtgctaaacaagctaaaatttgccgtgtaaaaaacggcgaaagagttaatcttattgcactcacgccagacggtaaacgtagctcacgccgcatggatagattaaaagtggtcatttaccctatggctgaccgctcactggtgacctattttccagaatcgaatcacatgctaacacttgataaccacgatccattaagtggcattcctggctataaaagtattccggttgaattagaaccatcaaattaa

SEQ ID NO: 5171 - DNA, 1230 bp, Escherichia coli
atgatatttgatgctagtttaaagaagttgaggaaattatttgtaaatccaattgggtttttccgtgactcatggttttttaattctaaaaacaaggctgaagagctactatcaccgttaaaaataaaaagtaaaaatatttttataattagtaacctggggcaattaaaaaaagctgagtcatttgtacaaaaatttagcaagagaagtaactatcttattgttttggcaactgaaaaaaatactgagatgccaaaaattattgttgaacaaataaataataaattattttcttcatacaaggtactattcattccaactttcccaaatgttttttcacttaaaaaggttatatggttttataacgtatataattatttagttttaaattcaaaagctaaagatgcttattttatgagctatgcgcaacattatgcaatcttcgtatatttgttcaaaaaaaataatataagatgttcattaattgaagaggggacagggacttataaaaccgaaaaagaaaacccagtagtaaatattaatttttattcagagattattaattcaattatcttgttccattatccagatttgaaatttgaaaatgtatacggtacatatccaattttgcttaagaaaaaatttaatgcgcaaaaatttgttgagtttaaaggtgctccatcagttaaatcatcaaccagaatagataatgttatccataaatattctataactagagatgatataatatatgcaaatcaaaagtatttgattgaacatacattatttgcggattcgttaatttctatcttacttagaatagataagcctgataatgcaagaatatttataaaacctcaccctaaagagcctaaaaaaaatattaatgcaattcaaaaggcaataaaaaaggcaaaatgtcgtgacataattcttataacagagccagactttttaatagagccggtaataaaaaaagcaaaaataaaacacttaattggattaacatcatcttctttggtatatgcacctttagtttctaaaagatgtcagtcttattcaatagcgcctcttatgataaagttgtgtgataatgataaatcccaaaaagggattaatacgctgcgtctccatttcgatattttaaagaattttgataatgttaaaatattatcggatgatataacatctccctctttgcacgataaaaggattttcttgggggagtaa

SEQ ID NO: 5172 - DNA, 1536 bp, Escherichia coli
atgttttccagattatttgtaaaaaaacatactccagctatggtggcaggtagtctgatatttctgttcattattctgctgacatttttctggaaaaaagcagagctggtgaatgacagccagatcagagttaatttcgcacttggctatatagaaaacattctcaatcagaacaacagcatcagccaggaagcagaacatttgcttctgaataactgtaacgcagatactcagcatgaattaagcaatctgctgctgaaacgcccacaacttcgtgcactgagcctggcaagacaagaggctgtattttgtagcacccaccccggtttacctgtcggtccagttgctgaaaaggaacagtggcggcacgatatgctgattcgttttcctgaagatacaggtactctgccctggatcctgttaagaacaccttacaaaaacggcacggtcattaccgccacggattattattttattcaggacatcatctctgtggttcatgcggttcctgcaatacgattccgtttgggaaacacggtcctgtcagccagcggaaaaaatgtcactctgctcccggacgacagcggtatacaaaaagaaagtcattcaaaaaaatatccgttctccctgatttatatcatcccggtgaaaatgcaacttacctacgcctggaaacaggcctggtatatgatccctgttgccatcttcggtggaatactcacagcctttctgctgtcccgccgacgtccatcttccccgctcgatatgctgaaaaatgcacttgctcacggagagttcagaccttattttcagcccatcatttccgctaaaaatcaccagctaaccggctgcgaagtactgattcgctggcatcaccccgtcagcggaattatcccaccagatcagtttatcccgctggcagagtccaccggattaattgccccgataacgcaacagttgatgtctcaggtcgaacatagccttaattctgttgcgcattttttaccgaatcaatttcatattgggatcaatatttcaccagcgcattttctgtctccgggactggaggatagctgtatgaagtttctatccaccttcccgaaagggaaagtgaaactggttctggaactgacagaacgaaaccagctatccgtcaccgcagaatcaaaagcgttatttgcgaaattacatcaacagggagtattgtttgcactggatgattttggtactggctatgcaacccacagctacctgcagtcgtttcctgtcgattacatcaaactcgataaagggtttgtacaaatggtcggcgtggatgaaatctccgggcatatagtagaaaatgttattgagctggctcgccggttaggtattgatatcattgccgaagtcattgaaaccgaatcacaggaattgttcatgacagagaaaggaagctgctatctgcagggataccgctatgcacctccactacccgctgaacagtttattgctgagtgggtatacaacagcggaaacggcaaaaaccagagataa

SEQ ID NO: 5173 - DNA, 378 bp, Escherichia coli
atgaatacattacccgacactcacgtacgggaggcatcgggctgcccgtctcccgtcaccatctggcagacactgctcacccgactgctggaccagcactatggcctcacgctgaatgacacaccgttcgctgatgaacgtgtgattgagcagcatattgaggcagggatttcactgtgtgacgcggtgaactttctcgttgaaaaatacgcgctggtacgtaccgaccagccgggattcagcgcaggagccccgtcgcagttaatcaacagcattgatattctccgggctcgcagggcaaccggcctgatgacccggaacaattacagaatggtaaataacattacccagggcaagcatccggaggcaaaacaatga

SEQ ID NO: 5174 - DNA, 258 bp, Escherichia coli
ttgcattaccttgccgaccgtgccggtatcagaggccggttcagcgacgcggatgcataccacctggaccaggcctttccgctgctgatgaaacaactggaactcatgctcaccagcggtgaactgaatccccgccatcagcataccatcacactgtatgcgaaagggctgacctgcgaagccgatacccttggcagttgtggttacgtttatctggctgtttatccgacaccggcagcgcccgcaatcaccgtataa

SEQ ID NO: 5175 - DNA, 270 bp, Escherichia coli
atgctgccgcagcatagcgatattgaaatagcctggtatgcttcgatacagcaggagccgaatggctggaagaccgtcaccacacagttctacatccaggaattcagtgagtatattgcgccactgcaggatgctgtagatctggaaatcgcaacggaggaagaaagatcgttgctggaggcatggaataaatatcgggtattgttgaatcgtgttgatacatcaactgcacctgatattgagtggcctgcaaatcctgtcagggagtaa

SEQ ID NO: 5176 - DNA, 171 bp, Escherichia coli
atggtccgtctgccccctgtggtgatgtcagcaaaatcagccactgcgcgaaccacaatagcccgggaagatgctgaagatcaccaggtaaagctatcagcgcagaaactggaagaactgctcgcatcaatggttaaggatgaggttgatcgcaatgatgggatttattga

SEQ ID NO: 5177 - DNA, 507 bp, Escherichia coli
atgaatcgtattgaacattatcatgactggttacgtgacgcccacgcaatggaaaagcaagccgaatctatgcttgagtccatggccagtcgtatagataattatcctgaactacgcgctcgtattgaacaacatcttagtgaaaccaaaaatcagattgttcaactggaaactattcttgatcgtaatgacatttcacgttcagtcattaaagattccatgagtaaaatagctgcacttgggcagtcaatcggtggtatattcccttctgatgaaatagtcaaaggctctattagcggatatgtcttcgagcaatttgaaatcgcctgttatacctcactcttagcagcagcaaaaaatgccggtgatacagcctcaattccgattatcgaagcgattttaaatgatgaaaagcacatggccgactggctaattcagcatattccgcaaacaactgagaaattcttaattcgctctgaaactgatggcgtagaagcgaagaaataa

SEQ ID NO: 5178 - DNA, 501 bp, Escherichia coli
atgaatatgaagaccattgaagatgtaattattcacctgctttcagatacctacagcgcagaaaaacaattaacccgggcactggcaaaactcgcaagagcaacatcaaacgaaaaattaagtcaggcttttcatgcgcacctcgaggaaacacatggacagattgaacgtattgatcaagttgtggaatcagaatcgaatctgaaaattaagcgcatgaaatgtgtggcaatggaaggtcttattgaagaagctaatgaggtcatcgaaaataccgagaaaaacgaagtgcgtgatgccgcactgattgccgcagcacagaaagtcgagcattatgagattgccagttacgggacattagcgacgctggctgaacaattaggttatcgtaaagcagcgaagcttctgaaagagaccctggaagaagaaaaggccaccgacatcaaattgactgatctggcccttaataacgtaaataagaaagccgaaaataaagcctga

SEQ ID NO: 5179 - DNA, 180 bp, Escherichia coli
atgaccgaacatcgtggtggttcaggaaatttcgccgaagaccgtgagaaggcatccaacgcaggccgtaaaggcggtcagcatagcggcggtaattttaaaaatgatccgcaacgcgcatccgaagcaggtaaaaaaggcggtcaacaaagcggtgataataaatcaggaaaatcctga

SEQ ID NO: 5180 - DNA, 267 bp, Escherichia coli
atgcgtaaagcccgttttactgagcatcagatcatcgccgtgattaagtcggttgaagccggacgaactgttaaagatgtctgtcgcgaggccggaatctctgaagccacctattacaactggaagtccaaatacggcggcatggaggcttctgatattaagaaaatcaaggatcttgaggacgagaaccgccgtctaaaacaaatgtttgccgacctgagtctggagaaccgggcgctgaaagacgttatcgaaaaaaagctttaa

SEQ ID NO: 5181 - DNA, 480 bp, Escherichia coli
atgcatgatgccctggtctgtggccgtcgttttcgcatgttcaatgtcgttgatgattttaaccgtgaggcattgtcgattgaaatcgatctgaatctgccagctcagcgagtggtccgtgtactcgacaggatcgcggcaaaccgtggctatccggccatgcttcgtctggataacggcccggaatttatctccctggcactggctgaatgggcagagaaacatgcaataaaactggagtttatccagccgggtaagccgacgcagaacgctttcattgagcgctttaaccggacataccgaacagaaatactcgatttttatctgttcagaacgctgaatgaagtacgggaaatcactgaaaaatggttatcaaaatataactgtgaacgcccgcatgaatcgctgaataatatgacaccggaggaataccgacagcgccattatttggccgggatctcaaaaagtgtatggaactaa

SEQ ID NO: 5182 - DNA, 399 bp, Escherichia coli
atgttaatcaacgaggagctggtagataagattgacactaaaaattatggtgatggttccaataacgtgtttgttatctggactttatcattaaaatcctctacaaaatccgagtgttttaaatttctaggcttcgtacatctacaatctgtactcgttgaaatttcttcatctccagagaagtactacaagttacgtatccatcaagaacgtgttatggaaggtatgatgcctgaagaaccaaaagccatagttatagaagatactgagtgggggtgtatccactcgcagtatcactaccaagataaagatcctgcgataataacatgtatcgtaaacgtaaataatactgacttaatagctacagagcttgtgaactcagtgttgaatacatcctga

SEQ ID NO: 5183 - DNA, 2148 bp, Escherichia coli
atgttatataatataccttgtcgaatttatatcctttccactctgtcattatgcatttctgggatagtttctactgcaaccgcaacttcttcagaaacaaaaatcagcaacgaagagacgctcgtcgtgaccacgaatcgttcggcaagcaacctttgggaaagcccggcgactatacaggttattgaccaacaaacattgcagaactccaccaatgcctccatagccgataatttgcaggacatccccggagtagagataacagacaactccttggcaggccgtaaacaaatccgcattcgtggcgaagcatcctcccgtgttttaattctcattgatggtcaggaggtaacttatcagcgcgccggagataattatggtgtgggactgttgatagatgagtctgcgctggagcgtgttgaggtagtgaaaggtccatattccgtactgtacggttcacaggcaattggcggtattgttaacttcataaccaaaaagggaggtgacaaacttgcatctggagttgtgaaagctgtttataattccgcaacagcaggctgggaagaatcaatcgcggtccaggggagcatcggtggatttgattatcgcatcaacggtagttattctgatcagggcaatcgtgatacgccggatggacgtctgccgaataccaactatcgtaacaatagtcagggtgtatggttgggttataactccggaaaccatcgttttggcctctcgcttgatcgctacagactcgcgacgcaaacttactatgaggatccagacggaagctatgaggcatttagtgtcaaaatacctaaacttgaacgagagaaagttggggtattctatgacacagacgtggacggtgactatctaaaaaaaattcatttcgacgcgtatgagcagaccatccagcgccaatttgccaacgaagtaaaaacgacacagcctgttcccagtccgatgattcaggctctgaccgttcataacaagactgacacccatgataagcaatacactcaggcggtcacattgcagagtcacttttcgctgcctgctaataatgaacttgttaccggtgcacagtacaaacaagacagggtcagccaaaggtccggtggcatgacctcaagcaaatctctgaccggcttcattaataaggaaacacgaactcgctcctattatgagtcagagcaaagtacagtctcactattcgcacaaaatgactggcgattcgccgatcactggacatggacaatgggagttcgccaatactggctttcttcaaagttgacgcgtggtgacggagtatcatataccgcaggcattataagcgatacctctcttgccagagagtctgcgagtgatcacgaaatggtaacatctacaagcctgcgctattcaggtttcgataacttggagttacgcgctgcgttcgcgcaaggctacgtatttcccacactctcccagctttttatgcagacatctgcgggcggcagtgtcacatacggaaatcctgatcttaaggctgaacactccaataactttgaattaggtgcacgatataatggtaatcagtggctgattgacagcgcagtttactactcagaagctaaagattatattgcaagtctgatctgtgatggcagtatagtttgcaatggtaacaccaactcctcccgtagtagctactattattatgacaatattgatcgggcaaaaacatggggactggaaataagcgcggaatataatggctgggttttctcgccatatatcagtggcaatttaattcgtcggcaatatgaaacttcaacattaaaaacaactaatacaggagaaccagcgataaacggacgtatagggctgaaacatactcttgtgatgggtcaggccaacataatctctgatgtttttattcgtgctgcctctagtgcaaaagatgacagtaacggtaccgaaacaaatgttccgggctgggccactctcaactttgcagtaaatacagaattcggtaacgaggatcagtaccggattaacctagcactcaataacctgacagacaaacgctaccgtacagcacatgaaactattcctgcagcaggttttaatgcagctataggttttgtatggaatttctga

SEQ ID NO: 5184 - DNA, 129 bp, Escherichia coli
atggaatttctgatgacaaaaacaatcgttatggaattctttgtcctgatctgcccgctttgcgggcaggctaacgaacgtattgtgtttgttgaaggtttttcgacgttgttttccatctgggggtga

SEQ ID NO: 5185 - DNA, 645 bp, Escherichia coli
atgggggattctgtgacacctgaggtggaagtattgagcaacatgattcgacagtacttcagtcaggaacgatctgaagaagagaccatacgagcccttaatcatctgcgcagggtgttgcatgaggtcagcccttttgcacaggagcctgtggactgtgtgttgtgggtgaaagcggatgaggtggtggccaacgattacaatcccaatgtcatgtcttccagtgaaaaaaaactgcttaaacattcactggagcaggatggattcacgcagcctgtggtggtttcggaagagaaggagcattatctggtcgtggatggttttcatcgtcagttgctgggcaggaaagcggatacgagaaaacgtctgaagggctggctgccagtgacctgtattaatccggaaagaaagggacaggcatcacgtattgccgcaaccatacggcataaccgtgccaggggaaaacaccagataacgtcaatgtctgacattgtcagggacctttcgcgtctgggctggacagatgagcgtattggcacagagttgggcatggaccaggatgaagtgctgaggctgaaacagattagcgggctgacagagctgtttcaggaagagaatttcagcccttcatggacggttcgttga

SEQ ID NO: 5186 - DNA, 1224 bp, Escherichia coli
atgggaaccatacagaagataagaacagatgttaatgtattacatgcggccattcaccgtattgagtggttgtttgagacattttcatctgtttgtttgtctttttctggaggaaaagactctactgtgctgctccatcttacggccgatgtggctcgcaggaagaaacgtcgtttctctgtattattcattgactgggaagctcagtaccagtgcacaattgcacacattctgaagatgagggagatgtatcgggatgtgacggagactttttactgggtggcactccccctgactacggtaaacggtgtctctcagtttcagccggaatggatatgctgggaaccaggtgtggagtgggttcgtcagccaccagatgacgctattacagatatgtcgtatttcccattttatcggtatgccatgacgtttgaagaatttgttccggcattttcttcctggtttgccggtaaccggtgtggagtggcaatactgactggtgttcgtgctgatgaatcgctcaatcgctttatgggactggtgtctcagcgcaaactgagatatgcagatgataaaccctggaccacagcgtcacctgaagggttttattacaccttgtatccgttgtatgactggaaagcccgtgatatatggatatataacgccagaacccgagctatctacaatcccctgtatgacctgatgtaccgtgccggcgtgccgttacgcaacatgcgggtctgtgagccttttggcccggaacagcgtaagggactgtggctttaccatgttctggagccggaaacttgggccaggatgtgtgagcgggtgtcgggtgctgccagcggggcgctttatgccaatgagagcggtgcctattttgccctgcgtaagcgtatcacgaagccgcctcatcatacctggcgtagctatgcgatgttcctgctggatgtgatgccggaaagaacggcagaacattaccgtaataaaattgctgtctacctgcgctggtatcagacgcggggcttcccggatgacatcccggatgaacaggagaatgacctggggagccgggatatcccgtcttggcgacgtatctgtaagacactcataaagaatgatttctggtgccggaccctctccttcagtccgaacaaaccccggcactatgaacgttatctgcagcgtatgaaagaaaggaggaaggaatgggggattctgtga

SEQ ID NO: 5187 - DNA, 435 bp, Escherichia coli
ttgatcttcctgcccttaacggtagctgaagatgactgggctggatggaaaatcctgcatggtgcattgggagagcagatagaattggttggcgacgatctgtttgtgaccaacgtaaagtatattcagcgcggcattgacgaaaaccttgccaattcagcattgattaaactcaaccagattggttccctgagtgaaacctttgatgcggtacaactttgccatgacaacaactggggcacctttatctcacaccgcagtggtgagacagtggacagctttatcgccgatatgacagttgcaatgcgcgcaggtcatctcaaaacgggagctccatgccggggtgagcgtattgaaaaatataaccagcttatgagaattgaggatgaactgggttcatcggcgcaatttgccggaaagtctgcctttaaatga

SEQ ID NO: 5188 - DNA, 216 bp, Escherichia coli
atgaaagctcacgtttttgttatttctatgcttactggcattgtcgtcacctatgccgtgttacttcttggttgcttgttcatcgataaaacgctccccactgtagatgttgtcattctgtcacttgtcgtgggggcttctgctcagcaattgtcgagggtattaatgtcaataaatagaaccttcccttatcttgcatgtagtcaaaggatataa

SEQ ID NO: 5189 - DNA, 381 bp, Escherichia coli
atgattaaatcactttttgccgtcattatcggcggttctgttggatgtactctgcgctggttactgtccacacgctttaacagtctttttccaaatctacctccaggtacactggtggtgaacctccttgccgggttaattattggtactgcgttggcgtactttttacgacaaccacaccttgatcctttttggaaattaatgataacaacgggactttgtggaggtctgagtactttctctacattttctgttgaagtattcgcattactccaggcgggaaattatatatgggctttgacgtctgtacttgttcacgtcattggctccctcatcatgacagctttaggcttttttatcataaccatacttttcgcatga

SEQ ID NO: 5190 - DNA, 1194 bp, Escherichia coli
atgtcatctaagatcgaagatacgccccaaaaaaccctgtcctgctggccactggcgttcagtgccggtcttctcggtatcggacagaacggtctgctggttgtactccctgttctggtcatacagacaaatctgagtctgtctgtatgggctgccctgctgatgctgggctcaatgctgtttctgccatcttccccatggtggggaaagcaaatttcccttactggcagtaagactgtggtgctgtgggctctgggaggatatggcgtaagctttaccctgcttgggctgggaagcgtgctgatggctaccggtgccgtaacaacagcggtggggttgggaatattaatcatcgcccggatcgtctacggtctgaccgtgtcagcaatggtgccagcctgtcaggtctgggcattgcagagagcgggagaagggaatcgcatggccgctctggcaaccatcagctccggcctgagctgcggcaggctattcgggccgctgtgcgcggcggcaatgttggtcattcaccctctggcgccagtgtggatgctgatggcagctccggtgtgggctgtggtgatgcttctgcggttgcccggcacaccaccacagcccacaccggagcgcaagagcgtcagcctgaagcgggattgcctgccttatctgctttgcgcaatgttactggctgcggcaatgagcatgatgcagcttggactttcgccagcccttactcgccagttcgatactgataccaccactattagccaacaggtggcgtggttgttggggctgtccgcaatagctgcgcttatcgcgcagttcgtggtactccgtccacagcgcctgactccagtggctctgctcctgagtgccggggtgttgatgagtagtggtctggctatcatgctcactgaacagctatggttgttttacctgggctgtgcagtgctgtcatttggggccgctctggcaacacccgcttatcaacttttactgaatgataagctggccgacggcgcaggcgcgggctggcttgcggccagtcacacacttggctatgggctgtgcgcattgttggtgccactggcgtcgaaaacaggtgtctcaatcgcgctgattgtgacggcattatttgccgctgtattatttaccatagtgtctgcatgtatttggcattaccgtacaatcaagtaa

SEQ ID NO: 5191 - DNA, 1725 bp, Escherichia coli
atgatcctgccctctgaaaaatccgccacagatgtggctgcgcagtgcttcctgaatgccttgattcgtgaaaccaaagactggcaactggcggaatacccgccagacgaattgattatcccgctggacgaacagaagtcgctccatttcagagtggcttatttctccccaacccagcatcaccgctttgcatttcctgctcatctggtcacggcatcaggcagttatcctgtcgactttaccactctctcccggcttattattgataagctccggcatcaactttttctgccagttcccctctgcgaaactttccaccaacgcgtgctggaaagctacgcccatacgcaacagacaattgatgcccgccatgactgggccatcctgcgtgaaaaagcgttgaattttggcgaggctgagcaggcactgctgacaggacacgctttccaccctgcacctaagtctcatgaaccgtttaaccgccaggaagctgaacgatacctgcctgacatggcacctcacttcccgctgcggtggttttcggtggataaaacgcaaatcgctggtgaaagtctgcatcttaaccttcaacagcggttgacgcgatttgccgcagaaaatgcgccccagttactcaacgaattaagtgacaatcaatggctgttcccgctgcacccgtggcagggagaatatcttttgcagcaagtgtggtgccaggcactttttgctaaaggacttatcagagacttaggcgaggccggcacgtcgtggctgccgaccacctcttcccgctccctctactgtgctaccagccgcgatatgatcaagttctccctgagcgttcggctgaccaactccgtccgtactctgtctgtgaaagaggtggagcgaggaatgcgcctggcacgtctggcgcaaaccgacggctggcagatgctacaggcccgcttccctactttccgggtaatgcaggaggacggctgggccgggctgcgcgatcttaacggcaacatcatgcaggaaagtttgttttccctgcgtgaaaacctgctgctggagcagccgcaaagccagaccaacgttctggtttccctgactcaggccgcaccggatggcggtgattcgctgctggtttcggcggtaaaacgcctgagcgatcgcctcggtatcactgtgcaacaggccgcccacgcatgggtcgatgcttactgtcagcaggtgctgaagcctctgtttacggctgaagcggattacggcctggtgctgctggcgcatcagcaaaatattcttgtgcagatgcttggggatctgccggtcggatttatttaccgtgactgccagggcagcgcgtttatgcctcacgcgacagagtggctcgataccattgacgaggcgcaggcggaaaatattttcacccgtgagcagttgctgcgctatttcccttattacctgctggttaactccacttttgccgtaactgctgcgctgggtgctgccgggctggacagcgaagcgaatctgatggctcgtgtacgaacattgctggctgaagtgcgtgaccaggtgactcataaaacctgtctcaactatgttctggaaagtccgtactggaacgtaaaaggtaactttttctgttatctgaacgatcataacgagaacaccatcgttgacccttcggtgatctattttgatttcgctaacccgctgcaggctcaggaggtctga

SEQ ID NO: 5192 - DNA, 948 bp, Escherichia coli
atgtctggggcaaacattgttcacagcggatatggactgcgctgtgaaaaactcgacaagcctctgaatcttggctgggggctggacaatagcgcggtgttgcactggcccggggagctgccaacagggtggctgtgcgacgcgctggatcagatatttatcgccgcaccacaactttcagcagtggttcttccctggtccgaatggtgtgaggagccacaggcgctgacgcttttcggacaggtacaaagcgacattatccatcgttccgctttctggcagttaccgttatggctgagttctccggcaaaccgggcctccggtgaaatggtttttgatgcagagcgtgagatttatttcccgcagcgccccccccgtccgcagggtgaagtttatcgtcgttacgatccacgcattcgcaggatgctgagtttccgcattgccgatcccgtttctgatgcagaacgtttcactcgctggatgaacgatccgcgcgttgagtatttctgggagcaaagtggctcactggaggtacagatcgcctatctggaacgccagctcaccagtaaacatgcattcccgctgattggttgtttcgacgatcggccgttcagttatttcgaaatctactgggcggcggaagaccgcattggtcgccactattcgtggcagccctttgaccgtggcctgcatctgctggttggtgaacagcaatggcgcggagcccactatgtgcaaagctggctgcgcggggtgacacattacctgctgctgaatgagccacgtacgcagcgcacagtactggagccacgcatcgataaccagcgcctgttccgccatcttgagcctgcgggataccggacaattaaagagttcgacttcccacataaacgctcgcgcatggtgatggcggatcgtcatcacttcttcacggaggtcggtctgtaa

SEQ ID NO: 5193 - DNA, 1743 bp, Escherichia coli
atgaatcacaaagactgggatttggtcaaccgccgcctggtggcaaaaatgttgtctgagctggagtatgagcaggttttccacgcggaatctcagggcgatgaccgctactgcattaacctgccgggagcacaatggcgcttcatcgctgaacgtggtatctggggctggctctggattgatgctcaaactctgcgctgcgcggacgagccagtactggctcagacgctgctgatgcagctaaagcaggtactgtcaatgagcgatgcaaccgttgctgagcatatgcaggatttgtatgccacgctgctgggcgacctgcaactactgaaagcccgtcgcgggctgagcgccagtgacctgattaatcttaatgccgaccgcctgcaatgcctgctgagcggtcatcctaaattcgtttttaataaaggtcgccgtggctggggtaaagaggcgctggaacgatatgcgccagagtatgccaacaccttcagactgcactggctggcggtaaaacgtgaacatatgatctggcgctgtgataacgagatggatattcatcagttgttgacggccgcaatggatccgcaggagtttgcccgcttcagtcaggtctggcaggaaaacggactggatcataactggctgccgctgccggtacatccgtggcagtggcagcaaaaaatcgctaccgacttcatcgctgattttgccgaaggcaggatggtgtctctcggcgagtttggcgaccagtggctcgcccagcagtcgctgcgtaccctgaccaacgccagtcgccggggcgggctggatatcaagctgccgctgaccatctacaacacctcatgctaccgggggatccctggcagatacatcgctgccggaccactggcttcacgctggctacaacaggtttttgcgaccgacgccaccctagtgcaaagcggcgcagtgatacttggtgaaccggctgcaggctatgtctcccatgaaggctatgccgcgcttgcccgggctccctatcgctaccaggaaatgcttggtgttatctggcgggagaatccgtgccgctggctgaaaccggatgaaagtccggttctgatggcaacactgatggagtgcgacgaaaacaatcagccgctggcaggcgcatatatagaccgctccgggctggacgctgaaacctggcttacgcaactgttccgggtggtcgtggttcctctgtatcacctgctttgccgctacggtgtcgcgcttattgcacatggacaaaatataactctcgccatgaaagagggggttccacagcgtgttctgctgaaagacttccagggcgatatgcgactggtgaaagaagagttccccgaaatggactctttgcctcaggaggttcgtgatgttacatcccgcctgagtgcggactacttaatccatgatttgcagacgggtcacttcgtgacagtactgcgttttatttcgccactgatggttcgtcttggcgtacctgaaaggcgattttatcaactgctggcagcagtgttgagtgattacatgaaaaaacatccacaaatgtcagagcgttttgcgcttttctcacttttcaggccacaaatcattcgcgtggtgctgaacccggtaaaactgacctggcctgatctggatggcggcagccgcatgctgccgaattaccttgaggatctgcaaaatccgctgtggctggtaactcaggaatatgaatcatga

SEQ ID NO: 5194 - DNA, 1278 bp, Escherichia coli
atgaaaaaaagtgtcgattttattggtgtagggacagggccatttaatctcagcattgctgcgttgtcacatcagatcgaagaactggactgtctcttctttgatgaacatcctcatttttcctggcatccgggtatgctggtaccggattgtcatatgcagaccgtctttctgaaagatctggtcagtgctgttgcacctacaaatccctacagttttgttaactatctggtgaagcacaaaaagttctatcgcttccttacaagcagactacgtacagtatcccgtgaagagttttctgactacctccgctgggctgctgaagatatgaataacctgtatttcagtcataccgttgaaaacattgatttcgataaaaaacgtcgattgtttctggtgcaaaccagccagggagaatattttgcccgcaatatctgccttggtacaggaaaacaaccttatttaccaccctgtgtgaagcatatgacacaatcctgtttccatgccagtgaaatgaatcttcgtcggccggaccttagtggaaaacggataaccgtggttggtggaggacagagtggtgcagacctgttccttaatgcattacgcggggaatggggagaagcggcggaaataaactgggtctcccggcgtaataattttaacgcactggatgaggctgcttttgctgatgagtattttacacctgaatatatttcaggcttctccggactggaggaagatattcgccatcagttactggatgagcagaaaatgacatcggatggcatcactgccgattctttactgaccatttatcgtgagttgtaccaccgttttgaagttctgagaaaaccaagaaatatccgtctgctacccagccgctcggtaacaactctggaaagtagtggtcctggctggaagttgctgatggagcatcatctggatcagggcagggagagcctggaaagtgatgtggtgattttcgccacaggttaccgttctgcgttgccacaaatacttccctcactgatgcccctgatcaccatgcacgataagaacacctttaaagtgcgtgatgacttcactctggaatggagtggcccgaaagagaacaacatcttcgtggtcaacgccagtatgcaaacccatggcatcgccgaaccccagctcagcctgatggcatggagatctgcacgtattcttaatcgcgtaatgggacgtgatttattcgatctcagtatgccgcccgccctgattcagtggcgcagcggcacctag

SEQ ID NO: 5195 - DNA, 2202 bp, Escherichia coli
atgatgataagcaaaaagtatacgctttgggctctcaacccactgcttcttaccatgatggcgccagcagtcgctcaacaaaccgatgatgaaacgttcgtggtgtctgccaaccgcagcaatcgcaccgtagcggagatggcgcaaaccacctgggttatcgaaaacgccgaactggaacagcagattcagggcggcaaagagcttaaagacgcactggctcagctgatccctggccttgacgtcagcagccggagccgcaccaactacggtatgaatgtgcgtggccgcccgctggtcgtgctggttgacggcgtgcgtctcaactcttcacgtaccgacagccgacaactggactctatagatccttttaatatcgaccatattgaagtgatctccggtgcgacgtccctgtacggcggcggcagtaccggtggcctgatcaacatcgtgaccaaaaaaggccagccggaaaccatgatggagtttgaggctggcaccaaaagtggctttagcagcagtaaagatcacgatgaacgcattgccggagctgtctccggcggaaatgagcatatctccggacgtctttccgtggcatatcagaaatttggcggctggtttgacggtaacggcgatgccaccttgcttgataacacccagaccggcctgcagtactccgatcggctggacatcatgggaactggtacgctgaacatcgatgaatcccggcagcttcagttgatcacacagtactataaaagccagggcgacgacgattacgggcttaatctcgggaaaggcttctctgccatcagagggaccagcacgccattcgtcagtaacgggctgaattccgaccgtattcccggcactgagcggcatttgatcagcctgcagtactctgacagcgcttttctgggacaggagctggtcggtcaggtttactaccgcgatgagtcgttgcgattctacccgttcccgacggtaaatgcgaacaaacaggtgacggctttctcttcgtcacagcaggacaccgaccagtacggcatgaaactgactctgaacagcaaaccgatggacggctggcaaatcacctgggggctggatgctgatcatgagcgctttacctccaaccagatgttcttcgacctggctcaggcaagcgcttccggagggctgaacaacaagaagatttacaccaccgggcgctatccgtcgtatgacatcaccaacctggcggccttcctgcaatcaggctatgacatcaataatctctttaccctcaacggtggcgtacgctatcagtacactgaaaacaagattgatgatttcatcggctacgcgcagcaacggcagattgccgccgggaaggctacatccgccgacgccattcctggcggctcagtcgattacgacaacttcctgttcaacgccggtctgctgatgcacatcaccgaacgccagcaggcatggctcaacttctcccagggcgtggagctgccggacccgggtaaatactatggtcgcggcatctatggtgctgcagtgaacggccatcttcctctaacaaagagtgtgaacgtcagcgacagcaagctggaaggcgtgaaagtcgattcttatgagctgggctggcgctttactggcaataatctgcgtacccaaatcgcggcctactattcgatttctgataagagcgtggtggcgaataaagatctgaccatcagcgtggtggacgacaaacgccgtatttacggcgtggaaggtgcggtggactacctgattcctgatactgactggagtaccggagtgaacttcaacgtgctgaaaactgagtcgaaagtgaacggtacctggcagaaatacgatgtgaagacagcaagcccatcaaaagcgacagcctacattggctgggcaccggacccgtggagtctgcgcgtgcagagcaccacctcctttgacgtgagcgacgcgcagggctacaaggtcgatggctataccaccgcggatctgctcggcagttatcagcttccggtgggtacactcagcttcagcattgaaaacctcttcgaccgtgactacaccactgtctgggggcagcgtgcaccactgtactacagcccgggttacggcccagcgtcactgtacgactacaaaggcaggggccgaacctttggtctgaactactctgtgctgttctga

SEQ ID NO: 5196 - DNA, 1194 bp, Escherichia coli
atggaaacaacatctgtcatcattctcaatggcttcctcggcgcagggaaaaccactctgctgaaaaacctgctcatacaggcacacgaaaaacagctttcagtctctgtcatagtcaatgacatgagcgaactggatgtggacggcgtgctgatcgccaacacagatattgtagatgcaaaagacaataatttcgtaagtatcaccgcagacagcatcagcagccccgcaggcctcaaaaagatggatctcgcaattaaccacctgcttgatcacaacaagccggatgtgatgctgattgaaacctccggaagcagtcatccgcttcctctggtcaaatacctgcgtcgccattcacgtgtacgcctgaaggcgtttttaacactcgttgatactgtcatgctccatgaagattacaatgatgggaaaaaactgatccccactcttcaggaaaatctccggcataacaaacgcggcctggagaatttgctggccgagcaaatcatgttctgcaacaggctgctgctgaccagaaatgaccgcctgccctttgacattatctccgctgtggcaaaagccatacacccacttaacccctccgtggatgtgctcgcggtatcatggggaaatattgaactgagcacattactggcgatcccggactacaattttgaccgtgttgagttactcatcagtgaactggaagcacttgtaggaaacatggatactccgtgcaacaatgaggaacttatatggcgcgtcatcagggacgacaggccattccatccgcaaagattatgggatacctgtcaccgctttatgggcatgggcgtttatcgcagtaaaggttttttttggctccccgggagagatgatcttgccctgctctggaatcagtcagcaggaagcatcagtctggcgctcattggctactggaaagctggagtactggaacatactgacaataatttaactcgtgaagaacgttcagcgctacagcgacacatcgacacagcctctgggcgatttggcgatcgctgctgtcagttgactatcattggcaatgccactgaagttaatgattttacacatgccttatccctttgcttgttgactgaagaagaaattcagtggtggatgtcgggtggagtattccctgatccatggccacagaaagttacccgcctgtcctga

SEQ ID NO: 5197 - DNA, 867 bp, Escherichia coli
atggctataaatgacgccggaatgttcaccgtgaaagaaatcaatcgcctcaaaatccttcaggatgtcatcgatcgcaatatccgtcctggacaggctgccgaaatgctgggcatcacgccacgtcattgcagccgtctgctcaaacgttatcgccagtatgggccgcttggcatgaacaaccagagtcgtggccgcactggtaaccgtctgttgccagcgtcactgacagatcaggcactcagtataatccgggagcactaccgtgattttggccccacgctagcgcgggaaaagctggaggaagttcacggtctggtccttggaaaggaaaccatccgacgtctcatgataaaggccggactctggattccccgcagacaacgcgcaccgaaaattcatcagcctcgttaccggcgtccttgtactggcgagctgatacaaattgatggctgcgaccaccactggtttgaaaaccggggtcgaccctgttctgccctggtctatgttgacgatgccaccagtcgcctgatgcacctgctgtttgtgaaatctgagtccacatttacctattttgaagctacacgtggctatatcgagaaatacggtaaaccgatgatcctctacagcgataaagccagcgtattcagagtcaataataagcacgccaccaccggccccggcgaaacccagtttgccagggccatgcgctgccttaatattactcctttgtgtgctgaaaccagccaggcaaaaggccgcgttgaacgtgctcatttgacacttcaggaccgactcgttaaggagctcaggcttaaggggatctgtacaatagaagcggccaatgcatttgcagaaggattataa

SEQ ID NO: 5198 - DNA, 942 bp, Escherichia coli
atggcaattattaatatttattctaagagacaaagaaaaattcgtggcgaagtaaatgacgtatatcaatataacaatattccacatgcactcagggtgcaaataattaaaataataactgattctatcggcttcccctcttctaatgaacgctacacatcgtatagaaatgaagctgacaaagtatatgcatatatccatgagatactttctaaggaatatggtgttttttctttgaaggaatttgcaaagaatgactttgacgctcttgtcgactttttccttaaagagagaaatacagagaaatgcctagatttcatagaaatatgcttccagatactagtgagccacgttgcgaaaaaccattatgaattcaaagacataacaagtcaaagtcctggagatgcagttattgaactaaatgaaaggtttagagaacatggggttggttatcagtttgaatctgaagagataataaggatagactctcaattgattcatgctgatgtcgtaaagccaaccctgattcttttaagtggagaacccttgtttgaaggcgccaatgatgaattccttgctgcgcatgagcattacaggcataagcgttataaagaatgtctaaatgattgtctgaaatcatttgaaagtataatgaaagcaatacatgataagaataactggaaatatagtcctaatgatacagcatcaaaactaataaatagctgtttaagtcaaaatttaattccggcatatttacaaagccagttcacaagtctgaaaacaatgctggaaacaggaattccaaccatcagaaacaaaaatgcaggtcatgggcaaggagctgatattaaagaggttccggaagaattggtaagctatatgcttcatcttactgctacaaatttactatttctcttaaaatgcgagaagaacattaagtga

SEQ ID NO: 5199 - DNA, 1308 bp, Escherichia coli
gtgctgaaaagtgactatcgcgctcccgaagtgaactatcccatcaactggaccaagggcgatgtggacggaaatacatccccgtttgactgggaagaatttaacgatcctaatctcgataactggcttcacctggtgatgacaagtaataacgacatagctatagctgcactgcggatacatcgggcgcagctggatgcggaaagaacaggtatcaccaatactcctgcactaaaggcggcactgagtatggacggaaaaaaacagctgaataactcgtccggctgggcaaaaagcggttctgccagccttggcaccagctatgagctggatctctggggaaaaattgcccgtcagcgtgatgttgctgagtgggcagtccatgccagtgaagaagattttcgctccgcgcgcctgatgctgctttcagaggccagcaataattactggcgtatcggttttgtaaatcaacaaattaccaccctccagcagagtattgactatgcaaaagagacgctgcgtctggccgaggttcgctatcgtgcaggaaatatctcgtcgctggatgtgattgacgcgcagcaaaacctgctcacgcaagagaaccagcttacagggctacaacgagaacattcacagctactcaatcagcaggccgttttgctcggcaccgtgcccggttgccagatagtcgagcccacaacgctgccaaaaggaagcctgcctaaggtcaatgcgaatattcctgccagcatactgatgcgccggcctgacataagtgctaaagagtggcagttgcgtgaggcgctagctacggttgatatcaagcgtagcgaatattaccccaccttcaacctgacaggcgctttgggtaccagcagcgcttcgctactggcattactgcataatccggtcggttccgtaggcgctaacctgacgctaccgttcctggagtggcgacagcgggacatagaggtaaaaattgcccgtaacgattacgaacagcgagtgctggagtttaaacagctactttataaggcaatgagcagtatagaggacgcgctttcatttcgtaaccagttgctgcttcaggagacaagactcagggaagaactggaacttgcacgtaagtcagagtggttaaacgaagttcgttaccggcatggtgcagtacgtatttcattctggcttgatgctcaggaaaaacgtcgtcaggcggagctgcgactggatgaaaaccgcttcaatcagttgcagaatctagcaaaaatttatcttgagtttggcggggcatcaacctttccttaa

SEQ ID NO: 5200 - DNA, 1941 bp, Escherichia coli
gtgaaaaaacttattgagttaaaaggggttagccgaacttatggcaacggagatcaaacgcggaccgtcctgaaaaatgtcgatttgacaatcgttgctggagaaatggtggcaatcattggagtctctggctcaggcaaatcaaccttaatgaacataatgggttgccttgacgtacccaatagaggtgattactacatcgacggacaaaatgccgcctgtctttcacccgatgagctggctagagtgcgccgggaacacattggctttatattccagcgctaccatttgatacctgatcttagcgcacttggtaacgtggagatcccggccatttacgccaacagcgaacgcgacagccgtcggcaacgtgcaacggcgttgctgggcagactgggactggaaggacgtgagcatcataaaccttgcgaactttcaggcggtcagcagcaacgcgtcagtattgcccgagcactgatcaacggtggaaagataattttggcggatgagccaactggtgctctggattcgcaatccgggcaagaagtgttagccattctgaatgaacttaatcgacgtggtcatactgtagtaatggtgacccacgatatgaaggtcgcccggcacgcaaagcgaatcattgagctgtgtgatggcgaaatcatcgctgatagtggaggttgcgtatctgcgacggaaacactaccaaaaaccaacagaatccggcaaagctattggaaaacactgctcgatcgaacgcgtgaatcgatgcaaatggcgctaaaagcgatgaagacgcatcgcttacgcaccacgcttaccatgatcgggattgtttttggtatcgcctccgttgtcactgttgtggcattgggtgaaggagccaggcaagaaacactggaagagattaaaagtctggggacaaacgtggtcagcatttatcccgggcaggatttgttcgatgacagcattgagagtattagaacattggtacctgctgacgcaaatgcactggcgaagcaagggtttatcgatagcgtcagcccggaagttagcgcttcagacaacattcgttttctgggtaaatctgcgatagcgtccattaacggcgttgggcgggaacatttccgggtaaaaggtattgagttgttgcaagggactacttttagagacgatcgcaacgctctacaggaagttattatcgatgagaatactcgtaaggccattttcgacaacacagggttacaggctctggggcaaatagtctttcttggttctgtaccagcacgagtggttggcatcgctaaaagtaacaaccgtagtgatgcatcaaatcgcattactgtgtggatgccttacagcacggtgatgtaccgtattgtgggtaaaccagttctgaccggtattagcgtcaggctaaaagacaatgtggataacgaggctgcaatcagcgctatctcccaactattaacccggcgtcacggcataaaagacttccagctttataactttgaacaaataagaaagtctatcgaacacacctcaatgaccttcagtattttaattcttatggtcgcatgtatctcactaatgatcggcagtatcggggtgatgaacatcatgttgatttctgtaacggaacgaactcatgaaattggcgtacgaatggcggttggcgcgagacgcagcgacattatgcaacagtttattattgaggccgtattggtttgcctgattggtggcgcactcggtattgcactgtcgtatatcacaggtgcgctctttaacgctctggcggacgggatattcgcagctatatattcgtggcaggctgctgttgctgcatttttttgctcaaccttaatcggcataatcttcgggtatctcccagcccgcaaggcagcaaggatggacccggttatttcactggccagcgaataa

SEQ ID NO: 5201 - DNA, 1182 bp, Escherichia coli
atgaaatatatttctcaccgcgccatcatttgtaccttgacactgttgatcattattatcaccgttttgttcacctttctgagaagctctgatgtgccagaatatattactgccccggtgcgcaaaggcgatatagaaaattctgttctggcgacaggccgtattgatgcaattgaacgggtaaacgtaggggcacaggtatcagggcaattaaaatcactgaaagtgaaacagggcgaccatgtgactaaagggcagttgattgccgaaattgacgacctacctcagtgtaacgatttgcgtaatgccgaagctgcactcaacgaagtgaaagcagaacttcaatccaagcaggcgctcctgaaacaggctgaactgcgttttaaacgccagctccggatgctaagagaaaatgccagctcacacgaagattttgagtctgcggaggcaatgcttgcgaccactcgcgctgaattacattctctgaatgccaaactggtccaggcacagatagaagtagataagaaaaagcttgcccttgaatatacgcgagtcgtagcgccaatggatggaattgttattgccattgtcactcagcaagggcaaaccgttaactcaaaccagagtgccccaacaattattaaactcgctcgtctggatgtcatgaccattaaagcacagatctccgaggctgatataacccgtatttctgtggggcaaaaagcccgcttctctatcttctccgaaccggacaagcactacagcgcaacactgcgtgccgttgaactggcaccagaatcggtaatgaaagatgactctctcgccagcaacacttcagcatcaggctccggaacttcaaatgcgtccgtttattacaatgctctattcgatgtgcctaacccagaaaatcgacttcgtattgccatgactgctcaggttaccctgattactgatgaagcccaaaatacactgctggtacccattcaggcagtgcacagaaatgaggggaagaagcaacaggtcctggtgctggcagcagatggcaggctggaaccccggaatgtgaaaactggtatcacgaacagcgtggatattcagatcctcgaaggtttaaatgtcggagaaaatgtcgtgctgtcgctgccggataagaaagagcccgaagaaaggattatgctgtga

SEQ ID NO: 5202 - DNA, 264 bp, Escherichia coli
gtgctccccttatttaaagcattttgttttttttgtattctattgttaggctcagtattaattcggggtaataataatcttatttcaccagtggttagacaagaattttttttatcgaaaaaaacaaccccatccttttatcagaaaattgatgcgtgctttagcaacgttaatcttgactttacatacaagtctgttgattactcagcatctaccattttgcaatacattagaagattaataagaaagctttacattaaataa

SEQ ID NO: 5203 - DNA, 150 bp, Escherichia coli
atggccaaatcctgcgattatgaagcaatcagggtctttattagcgttaatgtcggcaaatataccaataacgccattacagttaattattcagatagcgtttgtgcgacaagacattaccattcgacgaaaataaactcaggtggttga

SEQ ID NO: 5204 - DNA, 954 bp, Escherichia coli
atgtacttaaagattcttgctactgcactctcagctcctgtagcgtttgctgcactggcttctgatactgggctttcttttacaccggagaaaatcagtacggagattgattttggcactttaagtggcaaggccaaagaacgggtttatctgcctgaagaaaaagggcgcaaagccagccagctggactggaaatacagtaatgcgccaattgtcaagggggcatttaactgggatctgttacccagagtatctgtcggtgcctcagggtggacaacattagctggtcgtggaggcaatatggtggacagggactggctggatacgagcaatcccggaacctggactgatgagagtaaacatccgaatacccgtctaaattttgctaatgaattcgacctgaatattaagggatggctcctgaatcaaccagactatcagttaggtcttatggctggttaccaggaaaatcgttatagctttacagcaaaaggaggctcttatatctatagtagtgagggaggcttccgggatgaaacgggatcatttccagatggtgaaagagctataggctacaaacaacactttaaaatgccctatatagggttaaccggtaattatcggtatgatagctttgagttcggggggagtttcaaatatagcggatgggtgaaggcatcggataatgatgagcattacaaccctgagaaaaggatcacctatcgtagcgatgtaaataatcagaactattactctgtctcactacatgctggttattatattacacctgcagctaaagtttatgtcgaaggaacatggaaccgtattactaataagaaaggtgatacttctctgtactccagaaatttgaatatatctgatcacaccaaaaatggtgcaggcattgaaagctataactttatgaccacagctggtctgaagtattatttttaa

SEQ ID NO: 5205 - DNA, 1110 bp, Escherichia coli
atgaaattattattacttacaggtgcaacaggatttcttggtggcgcggtcctggataagctgctggataactgtaataatataaatttgctacttttagtacgagcacctactccacaagcgggactggaaagaattaaagaaaatatgcgtaaatttaatgtttgtgaggaaaggttgcatgcattaactaatgataacatcttgcctggggatctaaataatccggaagcctttctcatggatcctcgtcttgatgaagtcactcatgttataaactgtgcggctatagcttcttttggtaataatccttttatatggaatgtgaatgttacaggtacacttgcttttgcaagaagaatggcaaaagtggcaggactgaaacgcttccttcatgttggtactgctatgtcttgtacacctcatacggggtcgctagttaaggaagagtctgcttcatcagaaacaggtgaacatttagtggagtatacgcattcaaaagcaacaatagaatatctgatgcgtaagcagtgtcctgatttacctttgttggttgcccgaccatcaattattgttggccacagtcgtttagggtgcttaccttcaaccagtattttctgggtattcagaatggggttaatgttgcaaaaatttatgtgctctctggatgataaaatagatgttatccctgtagattattgtgctgatgcattgctaatgttgcttgaaagctcgttaattaatggtgagattgttcatatatcagcaggtaaagaaagtagtgtgacgttctctgctattgacgaagctgtagcccgtgctttgaactgtgatcctgttggagacagatatactaaagtcagttatgacatactggcaatgagccgtcatgattttaaaaatatttttggtccctgtaacgaacgccttatgttaaaagccattcgtttatatggagcgttcagtatgctcaatgtttgtttcagtaacgacaagctactgagtatcggaatgcctaaaccgccaaagtttactgattatattaaatactgtatagaaacgacaaaacacctttcaattcaacaacaaatggaagttgattttaaataa

SEQ ID NO: 5206 - DNA, 903 bp, Escherichia coli
ttgtcaattaaaaatataaagcgcattattacggcctggaaaccatctacattcgaaacgtacaaaaaaacttttgaaaaatacggtggtagtgtaaacatgcatccggatgttgtttcatactttatgatacatcatgactggaagtttgatttttttcactatgaaaaagatggtgatatcaaaggctcatattttctgtgcaatggaaaacaaattgggataatggcaagaaggtcttatcctctttcatctgatgaggtattaattcctttttccccacatgcaagatgtttttttccggataaaactaataaattatcaattataaataaacaaaatattatcaatgcaacatggaaaatagccagaaaaaaacaaaattgtattataaaggaatctttttcacctaaatttgaaaaaactcgccgaaatgaaatccagcgatttatcaggaatggcggagagattaagtgtataagccagttatccgataaagaaatatccagctcttatatatcactttttcattcccggtttggaggtaccctaccttgctacgaatatgataatctgttaatgtttatttctcacttacgagaacttatgtttggccatgtgctattctgggataataaaccgtgtgctattgatatagtactgaaatctgaaagctcatgtaatgtttattatgacgttccaaatggtgcagttctgaatgatgagaattgcatgaaactaagtccgggaagtgtccttatgtggctgaatatagataaagcgcgaaggtattgtcaggataataataaaaagatgatatattctatcggtgcattcagacctgaatggaaatataaactactatggtctgttccctgtaaggttggtaaatgcttatgttag

SEQ ID NO: 5207 - DNA, 741 bp, Escherichia coli
atgaacaatgtcattcccctgcagaattcaccagaacgcgtctccctgttacccattgcgccgggggtggattttgcaacagcgctctccctgagaagaatggccacttccacgggggccacaccggcctacctgctggccccggaagtgagtgcccttcttttctatatgccggatcagcgtcaccatatgctgttcgccaccctctggaataccggaatgcgtattggcgaagcccggatgctgacgccggaatcatttgacctgaatggagtaagaccgtttgtgcggatcctgtccgaaaaagtgcgtgcgcgacgcggacgcccgccaaaagatgaagtgcgcctggttccgctgacagatataagctatgtcaggcagatggaaagctggatgatcaccacccggccccgtcgtcgtgaaccattatgggccgtgaccgacgaaaccatgcgcaactggctgaagcaggctgtcagacgggccgaagctgacggagtacacttttcgattccggtcacaccacacaccttccggcacagctatatcatgcacatgctctatcaccgccagccccggaaagtcatccaggcactggctggtcacagggatccacgttcgatggaggtttataccagagtgtttgcactggatatggctgccacgctggcagtgcctttcacaggtgacgggggggatgctgcggagatcctgcgtacactgcctcccctgaggtga

SEQ ID NO: 5208 - DNA, 978 bp, Escherichia coli
gtggataagtcctccggtgagctggtgacactgacaccaaacaataacaacaccgtacaacctgtggcgctgatgcgtctgggcgtttttgtaccgacccttaaatcactgaagaacagtaaaaaaaatacactgtcacgtactgatgccacggaagagctgacacgtctttccctggcccgtgctgagggattcgataaggttgagatcaccggcccccgcctggatatggataatgatttcaagacctgggtggggatcattcattcctttgcccgccataacgtgattggtgacaaagttgaactgccttttgttgagtttgcaaaactgtgtggtataccttcaagccagtcatcccgcaggctgcgtgagcgcatcagcccttccctgaagcgcattgccggtaccgtgatttcgttttcccgtaccgatgagaagcacacccgggaatatatcacccatctggtacagtcagcttactacgatactgagcgggatattgtgcagttacaggccgatccccgcctgtttgaactgtaccagtttgacagaaaagtccttctccagcttaaggcgattaatgccctgaagcgacgggagtccgcccaggcactctacacctttatagagagcctgccccgggatccggcaccgatatcgctggcgcggctgcgtgcacgcctcaatctgaagtctcctgtattttcccagaaccagacggtcagacgggcaatggagcagttgcgcgagattggatatcttgattacacggagatccagcgggggcggacaaaattcttctgtattcactaccggcgtccccggttaaaagcgccgaatgacgagagtaaggaaaatccgttgcaaccttcacctgcggaaaaagtcagtccggagatggcggagaagcttgccctgcttgagaaactgggcatcacgctggatgacctggaaaaactcttcaaatcccgctga

SEQ ID NO: 5209 - DNA, 297 bp, Escherichia coli
atgttgggtggagcggacaatccaaatggtgaattaccgtcttatatcactggcgctgacacctgtagtttgtatacacaatccctggcattgaaacacacatatgaagtgtacttcggatatgaccgtacgctcaggaagtacggcagattccgtcaaaaattacctgtaaagacagacatcagaaaaaacagtgctcgccgcagaccggtgaccgggcgaagcccgcgaaccggcgaggaagcgcaatgtatctgtagttacagggagcaggtacgccctgaagccctttcataa

SEQ ID NO: 5210 - DNA, 357 bp, Escherichia coli
atgctgagcagagaggacttttacatgataaagcaaatgcgccagcagggcgcgtacattgtcgatattgcggctcagattggttgctctgaacggacggtcagacgctacctcaaataccctgaaccgccagccagaaagacccgccacaaaatggttaagctgaaaccgtttatggattacatcgacatgcgcctggcagagaatgtctggaatagcgaggttatcttcgcggagattaaggcaatgggttatacgggcggacgttccatgctgcgttactacatccagcccaaacgtaaaatgcgtccgtcaaaaagaacaaggagagagttaccggttaaaagagaaacgtaa

SEQ ID NO: 5211 - DNA, 252 bp, Escherichia coli
atgaaggcaggagtcatgctggctgatttcacaccatcgggtatagcgcagccgggattatttgatgaaatccagccccgtaaaaacagtgaaaagttaatgaaaacactcgatgaactgaaccagtcgggaaaagggaaagtgtggtttgcggggcgaggaaccgcccctgaatggcaaatgaaacgggaaatgttgagtcagtgttatacaactaaatggcgagatattcccctggccaggctgggttag

SEQ ID NO: 5212 - DNA, 216 bp, Escherichia coli
atgaaatccatggataagttaacaacgggtgtcgcctatggtacctcagcaggtagtgccgggtactggtttttacagttgctcgataaagtcacgccctcacagtgggcggcaataggtgtgctgggtagcctggtatttggcctgctgacgtacctgacaaacctttatttcaagattaaagaagataagcgcaaggctgcgagaggtgaataa

SEQ ID NO: 5213 - DNA, 498 bp, Escherichia coli
atgcctccatcattacgaaaagccgttgctgctgctattggtggcggagcaattgctatagcatcagtgttaatcactggcccaagtggtaacgatggtctggaaggtgtcagctacataccatacaaagatattgttggtgtatggactgtatgtcacgggcatacaggaaaagacatcatgctcggtaaaacgtataccaaagcagaatgcaaagccctcctgaataaagaccttgccacggtcgccagacaaattaacccgtacatcaaagtcgatataccggaaacaatgcgcggcgctctttactcattcgtttacaacgtgggtgctggcaatttcagaacatcgacgcttcttcgcaaaataaaccagggcgatatcaaaggcgcatgtgatcagctacgtcgctggacatatgctggcggtaagcaatggaaaggtctcatgactcgtcgtgagattgagcgtgaaatctgtttgtggggtcagcaatga

SEQ ID NO: 5214 - DNA, 462 bp, Escherichia coli
atgaacagagtaaccgcgattatctccgctctggttatctgcatcatcgtctgcctgtcatgggctgttaatcattaccgtgataacgccattacctacaaagcccagcgcgacaaaaatgccagagaactgacgctggcgaacgcggtaattactgacatacagatgcgtcagcgtgatgttgctgcgctcgatgcaaaatacacgaaggagttagctgatgcgaaagctgaaaatgatgctctgcgtgatgatgttgccgctggtcgtcgtcggttgcacatcaaagcagtctgtcagtcagtgcgtgaagccaccaccgcctccggcgtggataatgcagcctccccccgactggcagacaccgctgaacgggattatttcaccctcagagagaggctgatcactatgcaaaaacaactggaaggaacccagaagtatattaatgagcagtgcagatag

SEQ ID NO: 5215 - DNA, 294 bp, Escherichia coli
atgaaaaaaatgttgttttctgccgctctggcaatgcttattacaggatgtgctcaacagacgtttactgttggaaacaaacctacagcagtaacaccaaaggaaaccatcacccatcatttcttcgtttcgggaattgggcagaagaaaactgtcgatgcagcaaaaatttgtggtggtgcagaaaatgttgttaaaacagaaacccagcaaacattcgtaaatggattgctcggttttattactttaggcatttatactccgctggaagcgcgtgtgtattgctcacaataa

SEQ ID NO: 5216 - DNA, 327 bp, Escherichia coli
atgaaaagacgccttttactactttttctgttatctgtcctggcagtgggatgctcgcagcaaaaagctgatgagccccggcaattagtgacggtgtatccacgatatccggaatatgctgcagcaaattatatcaaggggctggttgaggttaagttcgatattggtgctgatgggactgtgacacggatcgtttttctccgctcagagcctcataatttgtttcgtgatgaagtggtgaaggccatggcgaaatggcgatttgaaaagaatcgcccctgtcagggagtgaagagacaatttatctttacgccgtcacgtccttga

SEQ ID NO: 5217 - DNA, 354 bp, Escherichia coli
atgccccacacagtacattacccggaacaaccatcacagggacatgtgacgcctcccccgtcccgggatgcacctgtccgttttgtactatgctgcgtagccaaaaccgataacatccgcatttacctggtattccatgatgagttcacgcagcgactgatagaggaaggaaagatggttagtaaaagcaaggcgcattgccgccgcatgctgcaggcattgcaacagacgagagcaggtatttttgaccagttggaaaactgccagcatactttgcccgagtatatcgccatctcatcggaaaccagtgcaactcttattcatcgggttccaccagagaaaaagaagaaatga

SEQ ID NO: 5218 - DNA, 1158 bp, Escherichia coli
atgagaataattgatctttttagtgggtgtggggggttatccctaggctttttgaagggggggtttgatgttgtaggtgcttatgatttctgggatcctgctattgaatgttacagagataattttagccatccgataaaaaaactagatttgagcaatgttgatgatgtggtgagggagcttaaagatatagacttcgatatgattattggagggcctccttgccaagacttcagtcatgcaggtttaagaattgaaggtgctagagctaacttaactcgctcattttcagaaattataaaaagaataaagccaaagtggtttgtgatggaaaatgtagatcgggcattaagaagtggtgcctatttagaagctcgaggaatctttaaagaatcagggtatgggttaacagaaattgttttggatgccagtaagtgtggtgttccgcaaaaaagaaaaagattatttgtaattggaaagcttgacgtgagggatggttttatccttaacgaagtgatgtgcgggatatcgaaagatagtatgacagttagaaattatcttggtgattcattggggattgagtattattacagacatccgagaaattataacagaagggctattttctctattgatgaacctgcgccaacagtaagaggggttaatagaccgatacctgatggatatttagggcatgcaggcgatcctgtcagtatttctgagaatgtaaggccattaacaacctttgaaagagcaagattgcaaacatttcctgaagactttaaatttaaaggtgcaaaaacaaatttggagcaaatgataggtaatgctgttccggttgagttagcaaaatatgttgcggtgacaatcatggagtatgaaaaaaaacaagtaaaaggtatttatgataaagaaggctttagggcgtggttgctgaatgaaaagaaactaacaaaaagaacctctagcgatattatatctagatgttgcagaggtgtttcattttttgattcagagggggtggatttttataactgtgaaatagatgaaattattatgaaactggaaaggcttgaatcgtttgtcaggcttggggttagcctgaagtctcagttaagaagggcttttaaattatattacgaatattgtcgaaggtaa

SEQ ID NO: 5219 - DNA, 1062 bp, Escherichia coli
gtgagcaaaatagaatctctttatggtttaaaaaacaccaacaggaaagagagcgatctgtggggaaagaaccaatttaacagttcttttcccacctctctagcatgttatatgagagacaacaaaatgaatccgatttatctttatttagataaggatttaaaagtgcatgccaaagaagtatcttttgacttcgtttttaacacaacattaaaaaatagtgatcttgaatttcaatttgagaaaaaatatgaaccataccaacagtatgcttatgatgacataaaaggaatagatctagttataaaaggaaacaatagttttttaaaagcactagaaataaaattaaccgtactcccagatagcacgacatataaagaaaacgagagcgaatggagttcagagattgtaataagacctgcaagcacttcttattgtgcccttggcataatgcactcttgcagcgataaattccatgaaataagaaaaatatttgaatccacatgcgaaagcatacagcactgggggaatgaaactgaagttctttcaaagaaagaaaatatattaaattgcctaaacactttccaagaaaattttcttgattaccagaaaccttttttaatgcaaccattatggaaaacaaaaggcaagagcccaatattagatcaaaatgcctttgacatattcatctggagtgattttgctttgtgtcgaacctttattgatagatcctcatataacaattcatctgccagcagactaatgagatcatcagccagactcgccagaatggtgtatgaaattgcgagcaaaaacaagacaaacatcaatagaatttatactgagatgaactttggatatcaaagtgataaagagttctcgctaaacggaaaaataacaaaagcttatatggatcacccaagaagaacaaaacccatcctcccaccatcagtattaaaagaaataattttaaatggcgggcaaaataaattaagcccagagagacgctttgatcaaagcgtttattatactgcatctcacctgtttgatgaaataaagtaa

SEQ ID NO: 5220 - DNA, 384 bp, Escherichia coli
gtgtcaaacattgttcatctatctgataaaaaacaaaaaaacaaaccagttgatatttcttttgatgattacacagacaatctcagcaaagggttcgtcaaaaatctcagcaataaacaaaaaaaagaattaattagtaaaatcaaagcgatacttaaatcgaggaatgtagcgttccgttcgacgccgccctctgattggaaagagaaaagtagaacctttgcaattttctttcctgaaaaaaaggttgtttttacattaggagtagtgaacaaattaaagatagaggacggttggataaatcataaaatcagcgacacagaagatgccgtcttatctgttggaaaaataatcaaccttatagaggattcacagcatggctaa

SEQ ID NO: 5221 - DNA, 207 bp, Escherichia coli
atggctaaattacctcaagaaaagccgaaagaagtcatccaagccggatttgatgatgttaaaaaggcctataaaaaaggcgctaagactgtaaacgatacctatgctgagcaagcaggtcgtgacttacaatcaggcgatggtgaactaatggctacctatcggcgcaataaaaaagcgatagacaagttagatgctgaaggttga

SEQ ID NO: 5222 - DNA, 198 bp, Escherichia coli
atgagttatccctggagcgtgagcgccagctggaaatacaggaacggacactggatggcccttcgctgggatggtaatcagagacaggctaaaatgttgtcagcgcgtttccggtgcattttttgggataatggttggttcgggggcaccgggaacgcgcttcagtcagaccttgctgaaaacacaggaacgcgttaa

SEQ ID NO: 5223 - DNA, 234 bp, Escherichia coli
gtgacggagctggaaagacatttgctgaacgccttagagcaactgcaacaggactatatgcagcggctgaacgaatgggagagcgccttcgtggaattgcagaaaatgttttcgcttacgcaacaggacaacgcgatgctgaacgagcaggtcatgcagttgagtcagcaggtgcagcacttgagcgagcggacagaacgcttgagccagttatacagcgagaacaggagataa

SEQ ID NO: 5224 - DNA, 519 bp, Escherichia coli
atgagcaatcttttacagacgggcgcggagttcgagaaaaagctgaaagagagagccgaatctacagagacaatgctgaacgacgagttcagcaagctcgaaaaatctgtaagcaaggctgtgacatcaaacgagacgaaaatcaaagacgctatagccctgttcacagcttcgacagaggaatcactgaaaaaacaccgggaaggggtgaaagaggcgatgatgcagcacaggaaggacgtgttaaagctggcagggaatacgggcatgatgttactggggatggtcattttcctgtttaccgtgagtggcgggacgctctggtatcttggcgggatgatacaggcgaacctggaagaaatcaggatacaggaagaaacattgcagaaactgaacgcgaagacatggggcgtggagtttgtgcaggacgggagaaggaaatttctggtcatcccgcaggggaaatcggcaacggtgattccctatcaggggaaggactgggtacaactgacggagtga

SEQ ID NO: 5225 - DNA, 339 bp, Escherichia coli
atgaaacgcgagaggatgctcacgatacgggttactgatgatgaacatgcacggttacttgaacgctgtgagggtaaacaactggcggtatggatgcggcgggtctgcctgggggagccggttgcccgttccgggaagctgccgacactggcaccgccgttactgcgtcagctggccgccatcgggaataacctgaatcagacggcgaggaaggtgaacagcgagcagtggtcttccggtgaccgggttcaggtggtggccgcactgatggccatcgagagagagttgcgcagcttacggcaggtcgtcagggaacatggagcgcgggatgatagttaa

SEQ ID NO: 5226 - DNA, 192 bp, Escherichia coli
gtgactaaacaggaaaaaacagcccttaacatggcgcgctttatcagaagccagacattaacgctgctggaaaagctcaacgaactggacgcggatgaacaggcagacatctgtgaatcgcttcacgaccacgccgatgagctttaccgcagctgcctcgcacgcttcggggatgacggtgaaaacctctga

SEQ ID NO: 5227 - DNA, 225 bp, Escherichia coli
atgttccgaccgtccgataaccatttggcttacttccgtacatttccttgcgtagatgtacagaattgtacgatttcggacaccaaaactgctgttgtcccggtgcatgaagctactttccgggttggtggtactgactttggtgttcttaacgacgacgttttcaactctgaaaatcgcctctctgcacggggatttttacccccccatagagccgtcatataa

SEQ ID NO: 5228 - DNA, 237 bp, Escherichia coli
atgaaaaatatttggtctgataacaatgctcctgaattaacacctgcaggctatgttaaagttgccctcacacacaatctacctgttttctcgtgtgtgtcacaggcgcaatacataaatagtctggccattaagttcgtaacggatttcgtactcgccagcaaaaatccgtctgacatccctggtttcaaactgaaacaactgttcatcccatacgtggatgagttaacagaatga

SEQ ID NO: 5229 - DNA, 282 bp, Escherichia coli
atgaattacgatgaaataacgaaaatcactgcagaacgtattagcgactacatgactgaagcggttaatacagactctaaatctgttgcggaaatgtttcataacgctgcatggggagtgctatcattgtggtttgaactcgtcacaaaaatagatctggatatacataaaaagaacaggtatgcaagttatgattttagaagaaaaatcgaaatgcagcatgaagagtttcagaaaatgacagagcgtgagcaagtgcctttattgaaattgcctgaataa

SEQ ID NO: 5230 - DNA, 354 bp, Escherichia coli
atgatggacaagcgcagaaccattgccttcaaactaaatccagatgtaaatcaaacagataaaattgtttgtgatacactggacagtatcccgcaaggggaacgaagccgccttaaccgggccgcactgacggcaggtctggccttatacagacaagatccccggacccctttccttttatgtgagctgctgacgaaagaaaccacattttcagatatcgtgaatatattgagatcgctatttccaaaagagatggccgattttaattcttcaatagtcactcaatcctcttcacaacaagagcaaaaaagtgatgaagagaccaaaaaaaatgcgatgaagctaataaattaa

SEQ ID NO: 5231 - DNA, 963 bp, Escherichia coli
atgttggtattcattgatgacggttcaacaaacatcaaactacagtggcaggaaagcgacggaacaattaaacagcacattagcccgaacagcttcaaacgcgagtgggcagtctcttttggtgataaaaaggtctttaactacacactgaacggcgaacagtattcatttgatccaatcagcccggatgctgtagtcacaaccaatatcgcatggcaatacagcgacgttaatgtcgttgcagtgcatcacgccttactgaccagtggtctgccggtaagcgaagtggatattgtttgcacacttcctctgacagagtattacgacagaaataaccaacccaatacggaaaatattgagcgtaagaaagcaaacttccggaaaaaaattacattaaatggcggggatacattcacaataaaagatgtaaaagtcatgcctgaatctataccggcaggttatgaagttctacaagaactggatgagttagattctttattaattatagatctcgggggcaccacattagatatttctcaggtaatggggaaattatcggggatcagtaaaatatacggagactcatctcttggtgtctctctggttacatctgcagtaaaagatgccctttctcttgcgagaacaaaaggaagtagctatcttgctgacgatataatcattcacagaaaagataataactatctgaagcaacgaattaatgatgagaacaaaatatcaatagtcaccgaagcaatgaatgaagcacttcgtaaacttgagcaacgtgtattaaatacgctcaatgaattttctggttatactcatgttatggttataggcggtggcgcagaattaatatgcgatgcagtaaaaaaacacacacagattcgtgatgaacgttttttcaaaaccaataactctcaatatgatttagttaacggtatgtatctcataggtaattaa

SEQ ID NO: 5232 - DNA, 684 bp, Escherichia coli
atgtcccgttttatcctgggtgactgcgtgcgtgttatggccacgtttccgggcaatgctgtcgatttcatcctcaccgacccgccgtatctcgtcggtttccgtgaccgttccgggcgcaccatcgccggcgataaaaccgatgaatggctgcaaccagcctgtaatgaaatgtaccgcgtactcaaaaaagacgcgttaatggtgagcttctatggctggaaccgcgtcgatcgctttatggccgcctggaaaaatgcgggattcagcgttgttggtcacctggtcttcaccaaaaactacacatcgaaggccgcatatgtgggctatcgccacgaatgtgcctacatcctggcaaaaggccgtccacgtctgccacaaaacccgctgccggacgtgctgggctggaaatattcgggcaatcgccatcacccgacggaaaagcccgttaccagcctgcaaccgctgattgagagcttcacacacccgaacgcaattgtgctggacccgtttgcaggcagcggctcaacctgcgtcgccgccctccagtccggacgccggtatatcggtatcgagctgcttgagcagtatcaccgtgccgggcagcaacgccttgccgccgtgcaacgggccatgcagcagggggccgcgaatgatgactggtttatgccggaggctgcgtaa

SEQ ID NO: 5233 - DNA, 222 bp, Escherichia coli
atgaactatgcaggacacgaaaaacttcgcgccgacgtggcggaggtggccaacaccatgtgtgaccttcgggccaggctgaacgatatggagcatcgctgtcgctttgattccgatgtgcttgttgaacgcctgacacgccagacgctgtatcgcgccaatcgcctgttcatggaggcgtataccgaaattctggaactggattcctgcttcaaagattga

SEQ ID NO: 5234 - DNA, 435 bp, Escherichia coli
atgtacggaacatgcgaaatactctgccgggagctggcagcaaagtatccgggagacacgccgctgatgctggttatctggtctccggaagagattcaggcccttgctgacggaatggatatttccctgtccgatcatgaaatcaggaccgtcctggcacgcctggaggacatcccggaagaccagcggattgagtccggtatttcttccgctgcggtgatggagattatccgcaacgagagcgaaaaccgcctggtgaccgtccctgctgaactgctggcgtccctgattcagaccgctgaacaggcattgtggaaacgtgaatgggccgcccgggatcatggcctcgccgtcccggaatgcgtcacccgccgtcaggaggtggttaatcaggcccgcaccctgctgaaaaacaacacacacgaaaacgactga

SEQ ID NO: 5235 - DNA, 828 bp, Escherichia coli
atgttatcgccgcctgccctgcgggcggcgatacagggagaacgcttaatcatgaacgaaaacagcacgctgaacgcactgatttgtcgtcacgcccgcaacctgctgctggcgcagggctggccggaagagacggatgttgaccagcgtaacccgaagtatccgggctggatcagcatttatgttctgctggatgcgccccggctggcgacgttacttatcaaccgtcacggcggcgtactgccgccgctcctggcctccgccattcagaaactgaccggaaccggggcggaactggtactgtccggcagtcagtggcagtcgctgccggtacttccggcagacggaacgcaggtgtctttcccgtatgccggagaatggctgaccgaagacgaaatcagggctgtacttgcggcggtgcgcgatgcggtacgcagtgtcagttgccgggtggcagaagatgcgcggcgtatccgggcggcgctgaccaccaccggtcagacgttgctgactcgccagacgcgccgctttcgtctggttgtgaaggaaagcgatcacccctgctggctcgatgaagatgacgaaaacctgcccgtggtgctcgatgccatcgtgaaccggggagcacgtttttcgtcggtggaaatgtacctggtcagcgattgtattgagcatatcctgtccagtgggctggcctgcgatgtgctgcgtataccggatgaaccgccccgccgctggtttgaccgtggtgttctgcgggaggtggtccgggaagcccgggccgaaatccgcagcatggcggatgccctggcaaaaatccggaaatga

SEQ ID NO: 5236 - DNA, 678 bp, Escherichia coli; identical to SEQ ID NO: 4274

SEQ ID NO: 5237 - DNA, 1167 bp, Escherichia coli
atgagactcatggaaacacttaaccagtgcataaacgctggtcatgaaatgacgaaggctatcgccattgcacagtttaatgatgacagcccggaagcgaggaaaatcacccgacgctggagaataggtgaagcagcggatttagttggagtatcttctcaggctatcagggatgccgagaaagcaggccggctaccgcacccggatatggaaatacgaggacgggttgagcaacgtgttggttatacaattgaacaaattaatcatatgcgtgacgtgtttggtacgagactacgacgtgctgaagacgtatttccgccggtgattggagttgctgctcataaagggggcgtttacaaaacctctgtttctgttcatcttgctcaggatctggctctgaagggattacgtgttctgctcgtggaaggtaacgacccccagggaacagcatcgatgtatcacggctgggtgccagatcttcatattcatgcagaggatactctccttcccttctatcttggggaaaaggacgatgtcacttatgcaataaagcctacttgctggcctgggcttgacattattccttcctgtttggctctgcaccgcattgaaactgagctaatgggcaaatttgatgaaggtaaattgcccaccgatccacacctgatgctccgactggccattgaaaccgtcgctcatgactatgatgtcattgtcattgacagcgcgcctaacctaggtatcggcacgattaatgttgtatgtgctgctgatgtgttgattgtccccacgcctgctgagttgttcgactacacttccgctctgcagtttttcgatatgcttcgtgatctgctcaaaaacgtagatcttaaaggattcgagcctgatgtacgtattttgcttaccaaatacagtaatagtaatggttctcagtccccgtggatggaggagcaaattcgggacgcctggggaagcatggtcctaaaaaatgttgtgcgtgaaacggatgaagttggtaaaggtcagatccggatgagaactgtttttgaacaggctattgatcaacgctcttcaacaggtgcctggagaaatgccctttctatttgggaacctgtctgcaatgaaattttcgatcgtttgattaaaccacgctgggagattagataa

SEQ ID NO: 5238 - DNA, 972 bp, Escherichia coli
atgaagcgtgcgcctgtcattccaaaacatacgattaagactcaaccgcttgaagatactccgtcatcggcaccagctgcaccgatggtggattcgttaattgcgcgcgtaggagctatggctcgtggcaatgctattactttgcctgtatgtggtagggacgtgaaatttacccttgaggtgctccggggagatagtgttgagaagacctctcgggtatggtcaggtaatgaacgtgaccaggaactgcttaccgaagacgccctggatgatcttatcccttcttttctactgacaggtcagcagacaccagcattcggtcgaagagtgtctggggtcatagaaattgccgatgggagccgccgtcgtaaagctgctgcacttacagaaagtgattatcgagttctggttggtgagctggatgatgagcagatggctgcattgtccagattgggtaacgattataggccaacaagtgcttatgaacgtggtcagcgttatgcaagccgattgcagaatgaatttgctggaaatatttctgcgctggctgatgcagaaaatatttcacgtaagattattacccgctgtatcaacacagctaaactgcctaaatcagttgttgctcttttttctcatcccggtgaactatctgcccggtcaggtgatgcacttcaaagagcttttacagataaagaagaattacttaagcagcaggcatctaaccttcacgagcagaaaaaagcaggagtgatatttgaagctgaagaagtcatcactcttttaacgtctgtgcttaaaacgtcatctgcctcaagaactagcttaagctcacgacatcagtttgctcctggagcgacagtgttgtacaagggcgataaaatggtgttaaacctagatagatctcgtattccaactgagtgtatagagagaattgaagccattcttaaggaacttgaaaaagcggcactttga

SEQ ID NO: 5239 - DNA, 339 bp, Escherichia coli
atggcggggaaaatccccgcctttttcctgccggtccccggacagagcacaaaggaagtcgccgccggctccgctttacccggccatgcggagcatggccttgtgggggttcagttatgtggacgtcgagtcgtgtgcgggctgtgccgtgcctccatcttagccgggctggcgttgatgcaagcaactgtcttaatgggaggcggttatctgaaaaaagtacgggataatattatggaatcgcccatctcaagcaaaaaactgactcgcttcgatactacgctgacaggctgttttgagcgagatatctctcgtgtcgggcatcgacattttaaatga

SEQ ID NO: 5240 - DNA, 576 bp, Escherichia coli
atggatgaagagaaaactcgtgctgaagtggcacacatagaatttatttcatatggtacgtctcgaatttttgataggcgtatgagatccttagactggaagcgtaaggttgtcaccttccttggggtctttgttccactgatgataggttgtgcagttttatcattcggacttgaagctccatttctgccgctttgcatcacaattgccggtgtggcaagtatcatgcaattggggttctcgctgtggtctttggtttccggatgggatcgctcatatagtgattgcatggcttccgttaaggaaaatacagccatttataacctagctggtagtgttcgcaagaaaataggtaagcttgacgaagccaaattggaaattttgatagacgatttgacggaaaaatttgagcgaagggagcaggaagacttaactttgtgtgtgagtgataaagaacttcgttatgcaaaccgtatgtcctgtttctacttcaaaaaaaaatgccatatttgtaatgtcgttcccctaactttgaaaccgggaaaatgtgtttgtgatggttgtgggaaattttaa

SEQ ID NO: 5241 - DNA, 213 bp, Escherichia coli
atgagtagtgcaaaaattcttaacgcttacttcgaggcttctgaagaagatcgaaaggagttcctacgggttcttagtcatttttataaggataaccgaagagtacctctgcaagagggcatggagagctttgccgtcaatgaaagcatccgtaaatcgcagtcaattaactttgcccctatgcaaggtgggtgtccactctgcggcaagtaa

SEQ ID NO: 5242 - DNA, 972 bp, Escherichia coli
atgagtcaaccaaatctgcaatgcatgggtattgatgttgccaaactatcgctggacatcgccaccaccgacacgattgagccattcactgtgggtaacgatgaggatggtttcgctgttatcacagataaactgaagcacaccaaaattaacctgattctcatggaagctaccggtggccttgaagcagccattgcctgtaagcttcagtcagaaggatacgatgtggttgtgatcaacccacgacaggctagggattttgcccgttcaatgggatatctggctaaaacagataaacttgacgccgccatgctagcacaactggccctggtcattgatcgccatccggaccgcagtcgttatatacggcatctgccagatgaggcacgagcagtacttgccgcaatggtcgtccgtcgtcgtcagttgaaccatatgctggtcgctgagcgtaatcgtctctatccttctcatccccaaagcaggaagagtatcgataacattattgatgcgcttcaaaacgagctcgaccggatcaatgagcaaatgaaacaacacatgacagcattcttccaggagcaggccagactgataggcagcgtgaaaggcgtcggcgatatcaccgtcgcgtcgctgattgccgaactaccggaacaggggaaactcaatcgacgggagattagtgctctaactggcgtcgctcctctaaacagagactccgggaaaatgcgagggaaacggaccacgtttggtggcagagccggagtgagagcaacgttgaacatggcagctctggtggctacgcagtttaatcctgccataaagctgttctaccagcgtttgcttgccgccggaaaacccaaaaaacttgctctggtcgcctgcatgcgcaaactcatcaccattctgaataccatgctcagaaaaggggaagagtggaacgcctcatttcaatcacaggtaatctcatga

SEQ ID NO: 5243 - DNA, 549 bp, Escherichia coli
atgaaggttaataaaaagaggcttgccgaaatttttaacgtggacccgcggacgattgaacgctggcagtctcaggggctcccttgcgtctccaaaggcagtaagggcattgaatctgtatttgatactgccatggcaattcagtggtatgcgcagagggaaactgatatcgaaaacgaaaagctccgcaaagaactggacgatttgcgtgcggcagcggagtcagatttacaacccggcaccattgactatgaacgctaccggctcacaaaagcgcaggcagatgcgcaggaactgaaaaatgcccgtgaagacggagtggtgctggaaactgaactgtttaccttcattctgcaacgtgtggcacaggagatttcggggatacttgtgcgtgtgccgttgacattacagcgtaaatatccggacatttcaccatcacaccttgatgtggtgaaaactgaaatcgcgaaagcctccaatgttgcagctaaggccggtgaaaacgtgggcgggtggatcgatgatttcagacgcacagaaggcagctaa

SEQ ID NO: 5244 - DNA, 1929 bp, Escherichia coli
atgatttcagacgcacagaaggcagctaatgcagccggtgcgatagctacagggcttttatctctcattattcctgttccactgacgacagttcagtgggccaataaacattattaccttcctaaagagtcgtcttataccccggggcgatgggaaacactgccgtttcaggttggcatcatgaactgtatgggcaacgatctgattcgcacggttaacctgattaaatctgcccgtgttggttatacaaagatgttgctgggagtggaggcttattttattgagcataaatcacgcaacagccttctttttcagcccacggactcagctgctgaagattttatgaaatctcatgttgagccaacgataagggatgttcctgcattgctggagctggctccatggttcggaagaaaacaccgcgataatacgctcaccctgaagcgtttttcctccggtgtgggtttctggtgtctggggggagcggcagcaaaaaactaccgtgaaaaatccgtggatgtggtttgttatgacgagctttcctcgttcgaaccggatgttgaaaaagagggttcgccaaccctgctgggggataaacgtattgagggctctgtatggccaaaatccattcgcggctcgacgcctaaaatcaaaggctcctgccagatcgaaaaagccgctaacgagtcggcacacttcatgcgtttttatgtgccctgtccgcactgtggggaggagcagtatctgaaatttggcgatgatgcctcgcctttcggtcttaagtgggagaagaataagccagaaagtgttttctacctttgtgagcatcatggctgtgtgatccatcagtctgagcttgaccagagtaacgggcggtggatctgtgaaaacacgggcatgtggactcgtgacggtctgacatttttcagcgccgcggataatgaaattccgccgccgcgctccatcacattccatatctggacggcgtacagtccgttcaccacctgggtacagattgtctatgactggctggatgcactgaaagatcccaacggcctgaaaacctttgtgaacaccacgctgggcgagacctgggaagaggccgtgggcgaaaaactcgatcaccaggtgctgatggataaggttgtgcgttacacggcggcggtgcctgcccgggtggtttatctgacggcgggcattgactcgcagcgaaaccgttttgagatgtatgtctggggatgggctccgggagaggaagcctttctggtggataaaatcatcattatggggcgtcccgatgaggaagagacgctgttacgtgtggatgcggcgatcaacaaaaaataccgccatgcagacggaaccgaaatgaccatttcccgtgtctgctgggacaccggggggatcgatggcgaaattgtctatcagaggtcaaaaaaacacggtgttttccgggtgctgccggtaaaaggtgcatctgtttatggcaagccggtgatcaccatgccaaaaacccgcaatcagcggggcgtgtatctgtgcgaagtggggacggacaccgcaaaagaaattctctatgcccgtatgaaagccgatcccacgcctgcggatgaagccacgtcgtatgccatccgttttcctgatgatccggagattttttcgcagacagaggcgcagcaactggtggcggaagagcttgtggagaagtgggaaaaaggaaagatgcgtctgctgtgggataacaaaaagcggcgtaacgaagcgctggactgcctggtgtatgcctacgcggcattacgtgtgtccgtgcaacgctggcagcttgatctggctgtactggcaaaatcccgggaagaagagacgacccggccaacccttaaagaactggcagcgaagctgtccggaggagtgaatggttacagtcgctga

SEQ ID NO: 5245 - DNA, 207 bp, Escherichia coli
atggttacagtcgctgaactgcaggcgctgcgtcaggcgcgccttgatttattaaccggtaaacgggtggtgtctgtccagaaagatggtcgcagaattgaatatacggcagcttctctggatgagcttaaccgggcgatcaatgatgcggagtcggtactggggacaacccggtgtcgccgtcgtccgctgggagtgaggttatga

SEQ ID NO: 5246 - DNA, 1308 bp, Escherichia coli
atgcgggagaccgcagcaaaaagctttgtcgatgaggtggaggcggcctggtcggaatacgccgaagggatgtttggcgagatcgacgtggaaggaaaacgcacgttcacggaatttatccgtgaaggtgtgggcgttcatgcgtttaacggcgaaatctttgtgcagccggtctgggatacggagagtacgcaactgtttcgtacgcgttttaaagccgtgagtccgaaacgggtggacacgcctggacacggtatggggaaccgttttctgcgggccggtgtggaggtcgatcgatatggccgtgccgtcgcgtaccatatctgtgaggatgattttccgttctctggtagtggacgatgggaacggatcccgcgtgaactacccaccgggcgtccggccatgctgcatattttcgagccggtggaggacgggcagacccgtggggctaatcagttttacagcgtcatggaacggctgaagatgctcgattccctgcaggcaacacagcttcagtcggccatagtgaaggcgatgtatgcagcgacgattgaaagtgaacttgataccgaaaaggcctttgaatatatcgccggcgcgccacaggagcagaaggataatccgcttattaatattctggataagttctccacctggtatgacacgaatagcgtgacgctgggcggtgtcaaaattccgcaccttttccccggtgatgatctgaaacttcagactgcgcaggattcagacaatggattttcggcgcttgaacaggcgctgctgcggtatatcgccgccggtcttggcgtttcctacgaacagttgtcccgtgattactcgaaggtcagttactcaagtgcccgcgcatccgccaatgagtcgtggcgctattttatggggcggcgaaaatttattgcggcccggctggccacgcagatgttttcctgctggctggaagaggcacttcttcgggggattattcgtccgccacgggcacgttttgatttttatcaggcgcgatcagcctggtcacgggcagagtggattggtgccggaagaatggccattgacgggctcaaggaagtccaggaatcagtgatgcgcattgaggccggactgagcacgtatgagaaagagctggcgctgatgggcgaggattatcaggacattttccgccagcaggtcagggaatctgcagagcgggaaaaagccggactctcacgtccggtgtggatagcgcaggcgtatcagcagcagatagcggagagtcgtaggccggaagaggagacaacaccacgtgagacgtaa

SEQ ID NO: 5247 - DNA, 576 bp, Escherichia coli
atgaccggcatagctgacatggctcatcatcacgccaatggagccgatacgggatgtctgggtaaccagccgtcgggagcaggccgacgccagcagcatggctgcagaacaggccgtgtcattgcacagtgcccagaccggcttctgctgacggaggcggtaaatcatgtcagcgcagtcaaacgcgccggcggcctgcccgcccggactgtcaatgtccagcagtatgccccgcacctggctatctgccattgcctgctgaagacaggcgacaatgccgtcatagccagtcattccggaaaatggccgcatcccccccagccggtgcaccagcgtgccggtcaccggcagtacagcaataccgttcaccacccggtaaacacgggccggtcgtttacctccggccatgtactcgtccgtttcagccagcattccgggagcatcaaactgtacctgctgttgtggtaccgaaagacttgctgcccccatctcgcgcccgagcgcgcaaaagaaaacccgcgcataggcgggctccagaagcagcggttcattgaatgctgcggcaataatgtgtga

SEQ ID NO: 5248 - DNA, 438 bp, Escherichia coli
atgggacactgtaactttatggcatggcacacactccgggacgcactgaaaatgactggaagatcgcgttcacagttttaccgtgatatgcgctcaggtcttgtcagttaccgtaccagccaggacggacgacgggagtttgaaaccagtgaactgatccgggcatacggcgaattaaagcggaatgagacaccagaaaggcacactcaaggacactcagaaaaacctcatgatcagcagacagaacgcattctccgggaactgaatgagctgaaacaatgcctgacgctgatgcttgaggataaacaagcccaggatacggagcgccggcgccaggaagcagaacggaaacagctacagaatgagatagcccagctcaggcaggctctggagcaggaaaagaaacggggattctggtccaggctgttcggtcactga

SEQ ID NO: 5249 - DNA, 420 bp, Escherichia coli
atgagacgtaccggaaacaaactttgtcttatcgccatgataacagcaacagtagttctcacagcctgtaccccaaagggcagcgtggaacaacatacccggcattacgtatatgcttctgatgacggttttgatcccaacttttccacccaaaaagccgacacaacacgaatgatggtgcctttttttcggcagttctgggatatgggagctaaagataaagcgacaggaaaatcacggagtgatgtgcaacaacgcattcaacagtttcacagccaggaatttttaaactcactccggggcacaactcaatttgcgggtactgattaccgcagcaaagaccttaccccgaaaaaatccaggctgctggctgacacgatttctgcggtttatctcgatggctacgagggcagacagtaa

SEQ ID NO: 5250 - DNA, 324 bp, Escherichia coli
atgacaaaacgaagtggaagtaatacgcgcaggcgggctatcagtcgccctgttcgtctgacggcagaagaagaccaggaaatcagaaaaagggctgctgaatgcggcaagaccgtttccggttttttacgggcggcagctctcggtaagaaagttaactcactgactgatgatcgggtactgaaagaagttatgagactgggggcgttacagaaaaaactctttatcgacggcaagcgtgtcggggacagggagtatgcggaggtgctgatcgctattacggagtatcaccgtgccctgttatccaggcttatggcagattag

SEQ ID NO: 5251 - DNA, 195 bp, Escherichia coli
atgaacaagcagcagcaagccgtactcaacatggcaggattcataaaaagccaaagcctgacgctgctcgaaaagctggacgcactcgatgctgacgaacaggctaccatgtgtgagaagctgcacgaactcgcagaagaactccagaacagcatccagacacgctttgaagtagaaaatagcacagagagataa

SEQ ID NO: 5252 - DNA, 978 bp, Escherichia coli
atgggggatacccctgtcgatctctcaaacacggtaaaagctatcgacaatcagattgccgtgttaagccgcccgggcaaatctcaggatagagccgcggtaaaagtcttgcagcaatttaaagacgatatcaccagcggacccaatgacctgcgtctggcgagagaaaacagaactgaccttcgaaagcggttcatgaattcaaacgagactgttgataaagacacgctccagaaagccagcgatattgtctacaaggcatatacagcggatatgaaaaaagcagtatcccaaaaactaggctcagaagaagctgccaatatgtctagggttgatcgctcatgggctagattcaatgacatgatgggaagaacgcgcgttcaaaaggcaatagccagcggcaaggctacacctgaggatgtaacaaaactcgtttttagccaaaacccatcagaacgttctcagctttacaggcttctggatgacaatggtaggcaaaacgcacgagcagccatagttcagaatgctgtagataaggcgactgatccgtctggaaatattagtgttgaaaagtttattaatgcgttacaccggaacaggaagcaatcagcaactttctttaaaggcgtacatggaaaggaactggacggcgttattaaatacctcaacgatacaagacacgcggcaaaagcgaacgttcaaaacttaaatggtcagcagctttatggattgttagttggtggtggcatcataaacgcagcagtattagcggggatgctaaaaacggctgcgtttgttgttcctgctgctggtgtcgtaggaggagctgcgaaggcatacgaaagccctgttatacgaaatgccttgttacgtctggcaaatacgccaaaaggtagcacagcatatgacagagcgatcagtacggtcacacaatcgctcaccagagtcgcacaggcatcacaaaaagaagctcaataa

SEQ ID NO: 5253 - DNA, 351 bp, Escherichia coli
gtgaatgctcagtctgtcatcatggttttccttgggctgattgtcgcaaaactatatccagactggtggaaaggggcattagctactgtcgccatctatttgcttttatccatcgttaagcgatcactcgctgagaccgtaaatcaagcaaaacgtttctcatttaagagtttaataaactatgttactgggcttattttttgcctttcaattctgatcgcttcggcttttttgcccgtatcaatagctaatttttttggcgcaccatatgaggtaggttatctattctctgtttcctgtcttgccattgctcttctttacctgtggacgagatcaaagaataaaaattag

SEQ ID NO: 5254 - DNA, 567 bp, Escherichia coli
atgagcaatgagactaatgggattgatgaaatgtttagcttgaacgctgccaaagctggagtcgcaataggtttgctattacagcaagcttctgcgttcagttgtgaggtggttgttactgataacgttcagcacgcttaccatcaatcctcattcagcagtgaacgggctaatgatgagcttcatgaggcggtgtcttcgattaaagaattgtctcgaatgctgaaatacgcttatcgtgttcttgcaaacgctaccgatgagaatgtagacaatgtgttgtctatcattgaaccagaaaagtctcgattgatagagcatcaattgagaggacttgaaggggcaatgaaatcggtattcaaagaagcttctgctgattttaaagagatcgcaagagatatctatatcgttgttgctgatgccagatctgccgtaaccaacctgaatagtcttattaaacaacgctcatgtgttccggttgtttttgatagttccgtagatatggctggtttgcgtgcgcttgctgagcacgggactcgtgtgtttcactctggtaacttccactga

SEQ ID NO: 5255 - DNA, 450 bp, Escherichia coli
atgcaagtaaccgtggaatataatcaggatagttttgactattttttctccccggtttttgttgagtttcctgatttaaaacaaacacttgtagatgattttatcatctacaagtctacgggaacgttgcccagctattttggcagagacacctcttatcatcgacctcctgatattgaagatgcaggccttatgcaccttcatttagcaattggtgaaaataaatttgagccaataaaaaatggcacagatatcagcacaccgcaaaagttgcagtggcataaaacatccaataccgctctcgtttatgcacaaaatctttttgatgagaacaggtattcattgattgctctttttcatcctgtagctcacatgtctgctaacaatcataatagaatgagagtgttagcagggtatgcgagagactttagaaacactatgtttgactaa

SEQ ID NO: 5256 - DNA, 537 bp, Escherichia coli
atgctgcacacaattcatttcttatgccctgttaacactgccactgttgggcaacttcagaaccactgtctcaccgcattatctcaaggcgcaactgaattaaatatccatatatcaagtcagggaggggaaactgctgctggctttactgcgtataactttcttaagtcactccctgttaccgttagaactcacaacataagcaatgttgaatccatagctaatatcgttttcctggctggctcagaacgtttcgcaaacccattatcaagattcctgttacatcctctattatggtgctttgcctccccagccgccgaccatgccagattgagagagtacgggaaatgcctcgataacgatcttgatcgcttcgttgagacgttcaatatcgacatcggaacccatattaggtgggcatccctgatagcagactcgaccattttggatgctaacaaggctcttgagcatggcataattaattccataaaaactgcaaggctggcatccaatcaggcaaactggtgggttgtttga

SEQ ID NO: 5257 - DNA, 249 bp, Escherichia coli
atggcaaagggtgtgtcaatttctccaactacggtaagaatccctgaatctttacgcgaggctcttgctgtcagagcatcaaaaaatggtcgctctgttaactccgagatcgtcatgattttgcaagccgcgattgatgaagataggtcgccaaagtcagttgagtcatttgctcagcaagaagctgataaattcaaagaggcgctacttgagacgctaaagaccatgtatgctaaggatgaaaaataa

SEQ ID NO: 5258 - DNA, 153 bp, Escherichia coli
atggagaaagaaataagtaagattttggtaaggatgccgcagtcgttaaaggatgctatcggtagcagggcaaaggaagagtgcaggtcgtttaactcagaggttatcaagcgcctgatagacagcctgaagagagagggggtaacggtgtga

SEQ ID NO: 5259 - DNA, 174 bp, Escherichia coli
gtgattcgcttggatgcagtagtcaaagagattgcgattaccattttaagaccaaattttgttcatggcgaatcatttggcacgaacgaaaaattgagaagagaaagagtattcagtggcaagcgcacgttttcagaagtgatgcttgatgcggcaaagaaatcaaaacagtga

SEQ ID NO: 5260 - DNA, 510 bp, Escherichia coli
atgaatagtatagcaattttagaagcagtgaacacctcttacgtgccattcaacggtcagcaaattatcaccgccatggctgccggagttgcatatgttgcgatgaagccaatcgttgaaaacctcggaatgagctggtcaacgcagcaaacaaaactcatgaagcagattagcaaattcaactgtgttcatatgaacatggttgccgctgatggtaagcttcgtaagctactctgccttcctttgaagaagttaaatggatggctgttcagcatcaaccctgagaaagttcgtgctgacatccgcgataaactgattcagtaccaggaagaatgctttactgtgctgcatgactactggacaaagggagaggcagcaaatgcacggaagaaaacatctgttgatgacaggactccgcttcgtgatgctgtaaatatgctagtcagcaaaaagcatctaatgtacccagatgaaccgccccgggtttcctggagagtgttttatctgtga

SEQ ID NO: 5261 - DNA, 288 bp, Escherichia coli
atgagtacccgaaatatccacgttaacatcgcgtcgtacacgcttcttgttgccgggaagaaaaaatacaccggggaagagtgggacgtcctggaattcagcagcctgactgagctgaaaaaatatcgcaaaagccacccggaaaagatggccttcagctatagctatgcgctcagccggggtgtggatacgcagttccgccatatcaacattgcggaagccgatcacttcaaacagttcctgcgtcagattaagcgtaccggcctcgatatccgggctatctgctga

SEQ ID NO: 5262 - DNA, 216 bp, Escherichia coli
atgtctgatcaacaacagtatggcctcttaccgtgcttaatgcaaggaggagtaaaccatgaaactaccgggaaacgcccttatctggtgcgtattaatcgtgtgctgcacgttgttaatattcacactcctgacccggaatcgtctgtgcgaagtccggctgaaggacggatacagggaggttacggcaagtttggcttacgaatccagcggtaa

SEQ ID NO: 5263 - DNA, 312 bp, Escherichia coli
atgtcgggagacgagaataaacttaagaaatatcgtttcccggaaacactgaccaaccagagccgctggtttggcctgccactggatgaactgatccccgcagcaatctgtattggctggggtatcacaacatcgaaatatctgttcggtattggtgcagcggttctggtttatttcgggattaaaaaactgaaaaaagggcggggcagttcctggttacgtgacctgatttactggtatatgccaacagccctgctgcgcggtatttttcataatgttcccgattcgtgtttccggcagtggattaaatag

SEQ ID NO: 5264 - DNA, 396 bp, Escherichia coli
ttgaaaagatttggtacacgttctgcaacaggtaagatggtaaaactaaaattacctgtagatgtggaaagtctattaattgaggcaagtaacagaagcggaagaagtcgatcgtttgaggcagtaataagacttaaagatcatcttcaccgctatccaaagtttaacagggcagggaatatctatggtaagtcgctggttaagtatctgacaatgcgtctggatgatgaaactaaccagctacttattgcagccaaaaatcgtagtggatggtgtaaaacagatgaggctgcagacagagttattgatcatttgatcaagtttcctgatttttataactcggagatattcagggaggcagataaagaggaagatataacatttaatacactctag

SEQ ID NO: 5265 - DNA, 690 bp, Escherichia coli
atgtatccgatggatcgtattcaacaaaaacatgctcgtcaaatagatctgctggaaaatctgacggcagttattcaggattatccaaatccagcctgtatcagggacgaaactggaaaatttattttttgcaatacgctgtttcatgagtcatttcttacacaagatcaaagtgctgaaaaatggcttctgtcgcagagagatttttgtgaattgatctctgtcacagagatggaagcatataggaatgagcatacgcatcttaatcttgtagaggatgtttttattcagaacagattctggacaatatctgtccagtcatttcttaatggacacagaaatattattctgtggcaattttatgatgctgctcatgttcgtcataaagacagttataatcaaaaaacgattgtcagtgatgatatcagaaatataatcagaagaatgagtgatgattcttctgtatcatcatatgtaaatgatgtcttttacttatatagcaccggaatcagtcataatgctatagcaagaatattaaatatatccatctccacatcaaagaaacacgcatctctgatatgcgactacttctctgtttctaataaagatgagttaattatcttactctacaataaaaagtttatttattatttatacgagaaagctatgtgtatcataaatacgcgttaa

SEQ ID NO: 5266 - DNA, 384 bp, Escherichia coli
atggctaaggtgaacctgtatatcagcaatgatgcctatgaaaaaataaatgcgattattgagaagcgtcgacaggaaggggcaagggaaaaagatgtcagtttttcagcaacagcttcaatgcttcttgaactggggcttcgtgtacatgaggctcagatggagcgtaaagagtctgcatttaatcagactgagtttaataaattgcttcttgaatgcgttgtaaaaacacaatcatcagtagcgaaaattttgggtattgagtctctcagtcctcatgtctccggaaatccaaagtttgaatatgccaatatggttgaagatatcagggagaaggtatcatctgagatggaacgattttttccaaaaaatgatgatgaataa

SEQ ID NO: 5267 - DNA, 510 bp, Escherichia coli
atgaaaaaatggatgttagccatctgcctgatgtttataaatgagatctgtctggccactgattgctttgatcttgcaggcagggattacaaaatagatcctgatttactgagagcaatatcatggcaagaatcccgttaccgggttaatgccatcggtattaatccggtaacgggatatggcagcggactgatgcaggtagattcccagcattttaacgaactggcccgctacggaattaagccggaacatatgacaacagatccctgcatgaacatttataccggtgcttattatctggcaatagcatttaaaaaatggggcgtcacctgggaggccgttggtgcatacaatgccggattcaggaaaaccgaacgccagaaccagaggcgtcttgcctacgcatcagatgtttaccggatttataccgggataaaaagcagtaaaggtatccgggttccgaccacgaagaaatcactttcccaaatgaacagtgtgcagaacaattaa

SEQ ID NO: 5268 - DNA, 840 bp, Escherichia coli
ttgcttacactgttcatcttttttgttttattaatagctgcatgtttcttttgttttgctccaccacgaagaggatatgacagaaatgagatcattccatacaaaataaaactatcaataaataaatatcgcctttacatatactcatcgggaaaggtaagacaataccttttatttttagttattttatcactgtactactccatagcggaaccatttaagtctgagttaataaaaaacatatcatattcactgatggctgcatttatttttgatacagggcttaattttagcaaggagaatataactaaaggagtgatttcaacaaggtggcataatgacctatattcatcatttgagagaatgaaagcaattaataaaatttactacccatccaacaaagagataaacacagaaggtctatccaaagccatcacatcatctcttttcaatgatgacgcgaactcgttcgcaaagagagattttcgcttgatgtgggacttatcttctgaaaaatatctttcctataaagaaataataataagaaaaggcgataagcttgacgctgtatgcttgagatttataaatgatgactacaagtttttagttaatttcaacagagatgaagaggttttcaaatactttccatctataatgcaaccttcactcaaaacatatagagcgttatcaagactagtaaactcaatcaaagatccttctagatttaagttcacgacagagtcattagaaatggagttactagaatacttagagttaagaaatgaattattcaatgacatagaagaagtaatgggtagctatgctcagagggcaccatag

SEQ ID NO: 5269 - DNA, 234 bp, Escherichia coli
atgacggaactggaagggcatttgctgaacgccttagagcatttgcaacaggactatatgcggcggctgaacgagtgggagagcgccttcgcagaattgcagaagatgcacgcggttacgcaacagaacaacgcgatactgaacgagcgtgtcgtgaacttgagtcagcaggtgcagctattagccggacaagtcgaccgcttgagtcggttatttatcacgaacaacagataa

SEQ ID NO: 5270 - DNA, 561 bp, Escherichia coli
atgagcaatcttttacaaatgggaacggacttcgagaagaaactgaaagagcgagccgcttctaccgagaacatgctgaacagcgagttcaggaagctagaagagtctgtagacaaggcactaagcttaaacaggcagaaaatcagagacgctatcagcgaacatacaacatccgtgaaacagcaactggatacgctgagcaccaccgtgagcacgcagctcagcaccacagaggccgaactgtcccggcagcagaaaaacctgctctggcaggtgatcaaagggcgggtactgtttccggcgctgaccgcgctcagcgtcacgggcggcattttcctggggtgctgggggctgattcagtggcaggaaagcaggattgcgaaaaatatcttgaccatcagagagcaggaaaacacgctggcgaaactcgaggcaaaaacctggggggtgacgttcgtcaatggcgagaacgggaaatttctggtgctgccggacggggtgaaaggggaaaacacctggacggtgggcgacaagaacgccgtgaggctggtcagggagtaa

SEQ ID NO: 5271 - DNA, 339 bp, Escherichia coli
atgaaacgcgagaagatgctcacgatacgggttagcgatgaggagcacgcccggttactggaacgctgcgagggtaaacgactggcagaatggatgcggcgggtctgtctgggggagccggttgcgcgcacaggaaaactgccgacactatcgccgccattgctgcggcatctggctgccatcgggaacaatctgaaccagacagcccggaaggtgaacagcggccactggtcttcgattgaccgggttcatgtggtggccgctctgatggccatcgagggtgaattgcgccagttgcggcaggctgtcagggaacaggggggacgggatgatagttaa

SEQ ID NO: 5272 - DNA, 192 bp, Escherichia coli
atgaccaaacaggaaaaaacagcccttaacatggcccgctttatcagaagccagacgctgaccctgctggaaaaactcaacgagctggacgcggacgaacaggcagacatctgcgaatcacttcacgaccacgccgacgaactctaccgtagttgcctcgcacgcttcggcgatgacggtgaaagcaactga

SEQ ID NO: 5273 - DNA, 255 bp, Escherichia coli
atgagcagaacactcgaacagaagattgctgatgctgaggccagattacagcgcctgaaggcgaagagcaggagtctggacacagcgcagaaggtcattgtgggtgcagcattgctggcaaaggtcagaaagccggaggaggtgcagttgcgtgcctggttactccagttcctgaaggcagaggtgacacgacaggctgatgtgacgcgcatactgccgctgattaacgagctggaagcgctgccaggacagtga

SEQ ID NO: 5274 - DNA, 702 bp, Escherichia coli
atgtcggatctaattgcctataaatccaatgcgctggttgaagccagttataaattgaccctacaggaacagcgatttttgttactttgcatcggtcgattgaagtctggggctgatgcagaatctccaaaattgcaaaagacaatgaccattacagctgcggaatatttcgattcattccctgacatggggcggaaaaatgccgaggttcagttacaggaagcaattgatcgtttgtgggacaggtcaatcattctcaaggatgacgagaaacgtgaggagttccgctggatccagtatcgggcacagtacgctaaaggcgaggccagagcacaaataacattttctgacgcagtaatgccttatttgacacaactacaagggcaatttactagagttgtaatcaagaatatatctagattatcaagaagttacagtataaggatatacgaactcctccagcagttccgcagtactggcgaacgtattatcgctctcgatgattttcgctcaatgcttgatatagagcataaatatcaaacatataaatcacttaaccagcaattattaagaccctgcattgacgaactgaacaaaaaaagcgacctggctgtaacggttgagacgatcaaaaaggggcgcacggttgtagccctgcattttcgcttcaaggaagacaaacaaatcaagatgacgatctaa

SEQ ID NO: 5275 - DNA, 1407 bp, Escherichia coli
gtggctgaccttctgaatatcgtgcttcctgacaacgcaacttcgtacacactacgtgacatcatcgaagcgttgccgaaggacagtaatgcggcatggaaactcaccagtaatgccatgtcgatgatggcagatatgcaggcgacgcgcagacgctgggaagagctgaacaccgaacgaaaggaagcgatgagccatgctgccagcctgaaaaaatcatcgccgttttcgtccggtttttcccgtattcccctgatgcaatgggcggcaccggaataccgtagcgaacagggaaaaatccagtcgctgagccagcaaatggaaaaattgcgacagcattaccggaaggtggagaaacaggacattcccgcgagtcagacggcatttgaaaaacagtggcagcagtggggggcatccggccttgcagctctcagagtccagttgcttaaacgtgaagaggaattgcgccggaaggagcaggaggatacagaacgtagtcgcgcggagcgacgagcggaacagctcaggaaaaatgacaatgccgttatggattcaggggtactgagcgcagtcgttacggggtatggcgaggcccccatgcctggtaacggggaaatgacctgttaccttctgcttcacaaccggaacggagaatacacgctctgggggaacgagctggagaaataccgcaccagaatctttgagcgtgttgatttaatgcgtgacaggagtggttatatctgtgaccgaagcgaaatcggtcaacatccaccactgcaacgtgtttattcctctgcgacctttgagcaacttctgacgcaggtttgccagacatggccgcaatatacccgcaatctccgccagccgaagacatggccggagtctttctgtcttggagaagaccgccagccagccatgccatcactggcagcaaggaaggtggattttacgcagggacgtctgctaccgacgctgatgccggtaatgagttctgtcgaccgggaaacccgccagcttcagcttttgctggtcatgggcgtggatgactctctgggcggtgttgtccggcttaatggtacgctgtatcccgcgtttgccgttccctcagccgataacagccagctggtcatcagtgcactgaccgataaggggttacggtatgcagggtatggtgttgccgtaaatcacgatgcagacagccacatatcacctgcgccggaacttatggagtttcatctgaaaacccgtgaggcaccgctttttgctgccgtcaacacaccagaaaaacagccggatcatctgttccgctcgctgggttttaatcgtacctgggacgaatggcggcgcgaggaagatgcacgaacacacgccaccgagaggagacatgatcgcggttggtcacagtga

SEQ ID NO: 5276 - DNA, 864 bp, Escherichia coli
atgataatacaagataaccatactatagaaatatttaaaaatcaattacctgtaaagccttactgctccaacaacttgcaatcaggcttgagtatcaggaacaaaaatagagcacttgagatgctttaccttcaagcaaatcagccagctatacagacgtgcttactgttcgatctcgatgaggacaacgctttctacaagttcgatgaggtagggcttccggttcctacgttcatcaccaaatcgccggatagtggtaggtgtcattatggctatatgcttaaagccggtgtctgcaaaactcaacacgcaaagctgaagccattgaagtatgcagcagccgtagaagctggcattgctggtaagttagcttctgatcgtgggtatgccggactgattaccaaaaacccactgcatagccattggtcgccttattggtcaggtgctgatctgtatgagctggattatttagctgattttgttgagctggagacaccaaagaaggccaaaaaatcagagaactacgggcttgggcgtaatgttaacctgtttgaagatttaaggacttatgcttatagacgagttcttaaatttaaaaaggactcaacttatgaagcgtgggaacgtgatgttttaaatgtagctgaaggactcaatactcattgtaatgctttaaatccgctacaatataatgagataaaagcaactgcgagatctgttagtcgctggacttggaagcattttgatagtgctactttttcagatatacaatcaaacagaggtaaaagaaacttaggcaaaacaaaaagaaccagtgctaaaaatgaaatgttagaaatattaatgagcaagggggcgttatga

SEQ ID NO: 5277 - DNA, 300 bp, Escherichia coli
atgcagaaatcaaagcgtaagctcggctttttacgtggtaaaggctctatccctgaccaaaagcagctcgaagagatggatcaggaagtcagcagccagtttttccgtgacctgatggaatcagcacaggaagctgtcgaaatccatcaaggtaaacgctctgcagctcgtagaacgctgtacaaggtaaacccagtcaccaaatcagttatagaacgctcagaagccggtacagacgtttttacagctactgatgcccctgatctcttcaaaaagctaaagctcgatagggacgactga

SEQ ID NO: 5278 - DNA, 306 bp, Escherichia coli
atggaaaaaatagaagatagggtttcatatcatcaaaaacagcttgctcaactaaaagcaaagaaaaaagaagagttgagcaaagaaaaaaaggcagaaaaagcaaaaagagcaagtaaaaatattttgtttggtgcttctatctgtaaagtgttaggtattgattacactaaaatagatgaatatttgccttctgttattggatatttagatttaaaaaaacagaacttaagaaatagtgtgtatgccgatagaggtaatgaacttttagagagctggaaaaatggcggcgacagaaacgagtaa

SEQ ID NO: 5279 - DNA, 177 bp, Escherichia coli
atgtttattattggtgcattaatgatgtgtttctttatggtgtttattttttgggttggtgcttcatgcatggaaaagaaaaaccatagtgatgatataaaaatagctgggcgtcatttcgataaaatgacaaaacaggctattgctaatgctagaaagaaaggttttaaagtatga

SEQ ID NO: 5280 - DNA, 1356 bp, Escherichia coli
atggctatatatagttttcaatgtaagattgtagcaagaacaaaacgtttaaataatgctgttgctcatgcggcatatattaatcgtattgatcttgataacaatcgagacggcacaaagtggcgttatggtcatagtcatgatgatgtatataaatctgctgttttgcttccagataatgccgacaaaaagttttctgacccagcttatttgtggaatgaagtcgagtcaaaagaaaatcgatctaatagtcgtttagctcgcagttttattattgctttaccaaatgagttaacaccagaacaaaacaagaacttgattgaagattatattaaaaatcacatgacatcgaaaggtatgattgtaaactatgctattcatatagatgatacaaacaactttcatgctcatttgatgagcactacaagagaactggataaatcaggtttagagttcgcaaaaaagaatgttatcggcagaacatggaatgatgacgagtttttggaaggtctacgcaaaggctgggcagataccgcaaacacacaccttgcaagacttgatcatcaggtcaggattgaccacagaacgctgtcagctcaacgtgatgaagcccttgagcagttcgatatggctaccactgcagaggctaaagctgaagctctggctaaggctgtaagccttgataggccagcaatcaaaaggatttggcgtagtaagctgaacacggaagagggcagggctttacgtgaagcacagcaagacagaagagatctgcagctcgttgttgcagaagagactaaaaagagcgttttatctttaccacaagagatagttttaaataactttgctcctaaaaaaataaaatcaaaatccaaaacaaaaactactattgaaaaaacacgccccgccccagaagcagttttaaaaactgctgatacagggggagagataaaagatctcaaatatagttcttttagtaagttaatgttaaacattcaaataatgtataatgagcataagaaaaaatctattggtaaaaaactaaacaaaagaataaagaaaatagagaaggcggataaaataggcggtggtaaaggtggctattttgctagacatttagataatgattattcagttgaagataatattaaacctataccagaagaacgcaaagaagatgaatatacaaagctacagaagttttttgatgatgtaaataaaagaggcatagagctaaaaaacaaaaaagaagccatgcttaaagctgagcaagaaaataaaaagatgctatcacaacaacctaaacataacccaaaaaatgaagatcagaacgatagacacattaaatacaaataa

SEQ ID NO: 5281 - DNA, 816 bp, Escherichia coli
atgtgggctgtgaagctgcagcagatgcaggacggacgcctttatatcgcgggtattggtgccggtgttgagaatactcctgacggtatgcagagtcaggtgctgctggcggcggacaggattgcgatgattaatcctgcgaatggcaacacaaagccgatgtttgttgggcagggcgatcagatattcatgaacgaagtgttcctgaaatatctgacggctcccaccattaccagcggtggcaatcccccaacgttttcactgacacctgatggtcgactttctgcgaaaaatgcggatatcagcggtaacgtgaacgcgaactccgggacgctcaacaacgtcacgattaatcagaactgtcggattctgggaaaactgtcagctaaccagattgaaggtgatattgtcaaaacggtgggaaaagcctttccgagaaatggcagttatgccagcggtacaataacggtcactgtgtacgatgaccaggcttttgaccgtcagatagtagtcccccccgttctgtttcgtgggggtaagcatgaaaacttcaacagcaacaaccaacagtcatactggtattcaacctgtaagctgcaggtactgaagaacggacaggaaatctttcagcaacccgcgacggatgtcagcagggtattttcatcagtcattgatatgcctgccggacacggccatgtcaccctgactttcaatgtttcttcatatggtgctaataactggacgccaacgaccagtatcagcgaccttcttgttgttgtgatgaagaaatctacagccggtatcagtatcagttga

SEQ ID NO: 5282 - DNA, 915 bp, Escherichia coli
atgccaaatacaattcattaccctcatgtaataccatttatatcccaaggaaaaataaatgctataaaaagcacgtttggtaataacctgtctgatagggagtgctacgggatatatatatggagccagaaagcctcatctgccatatatccattactgcaacaactcgaagttactttgagaaactcgattgataaagaagcgacaaaactaataggccaaaaatggtgggataatgtatacaccgacacatcaaaaagcaaacacggtgacttcatacataatataaacaaagcaaaaaaaagatatgagaatgaattcaagaaaaaaaacccatcaatggcaaataccaaaataattgcacctcatgatgacatcattgcacacacagatttttacacatggcaagcggttttgagcgatgcttttcatacacaatcaagatctgaagcatcaagagccttatggcccaggctcacctacagagtactgaagggattagatagaagcaaagatgaaggcacagccagaattgatttcttaaacgagctgaatgagatcagaaactacagaaataggttatcgcataatgattgcatatggataaaaatacactctaaaaatttgcaatctgcagtagaaacaataagagaaaaaataaacaaaatagaaggactgataaaaacgataaacccacaggtacatctatcattaacgaagtggggttccttttatcacgccaaaagaatatgttctcaaaaagaggccgaattgcatctaggcaaaggaataatcaatagcacaacagatgagatgaacacaattctagatcaactatacgcactaactgctgacggaaagctaacgggtgttgtaaaacgaaataccaacaatatcgcatttcacaagttttag

SEQ ID NO: 5283 - DNA, 594 bp, Escherichia coli
atgagcggtagaaaatttggcaggcttccaaactggtgggcccgaagctcatggcttgtaaacaatgttcgttcaaatgagatagggggcggcattgcatcaatgaaatgcttgttagctctatccgtcttgattgatttccattcaagaacagcctcagtatcatttaccggaatggaaagactgactggactaagccgccccatgatagtgaaaggagtagccaaacttgagaaagatggtcttataaagatagatagagagatgtttgttaactcctatgaattaacagtacagccaaatgatgataggtgggcaaaagtaccagtagatactatcaggaaaaaactaaacaccatatcgaacagggggatggccccatttgtggcattaaaactatatttaacaattataagccttcgttatcagtcaaataatactgttaaggtgacacatgaaacactgagaagctatacaggtgtccagccaaaccagattaggttcggcttagatgtactgtactgtagtcgcctgatacatctgcaaccaaaagaagatagagagtcaaacatctatgaaataatcggcctatga

SEQ ID NO: 5284 - DNA, 195 bp, Escherichia coli
gtgaacaaacaacaacaaactgcgctgaatatggcgcgatttatcaaaagccagagcctgacactgcttgaaaaactggatgctctggatgccgacgaacaggcggccatgtgcgaacgactgcacgaactcgcggaagaactccagaacagcatccaggttcgctttgagaccgaaagtgaaacaggaacataa

SEQ ID NO: 5285 - DNA, 633 bp, Escherichia coli
atgagatgccgggggctgattgccctgctgatatgggggcagagtgtggccgccgccgatcttggcacctggggcgatctgtggccggtaaaggagccggacatgctgacggtgatcatgcagcgcctgacggcactggagcagtccggtgagatgggccggaaaatggatgcctttaaggagcgggtgatccgcaacagtctgcggccccctgccgtgcccggtatcggacgcacggagaaatacagcagccggttgtttgacccgtccgtcagactggctgcggatatccgggataacgaagggcgggtgtttgcccgtcagggtgaagtgatgaatccgctgcagtatgtgccttttaaccagacgctgtatttcatcaatggcgatgatccggcgcaggtggcctggatgaaacgccagacgccgcccacactggagagcaaaattatcctcgtgcagggcagtatcccggagatgcagaagtctctggacagccgtgtttactttgaccagaacggtgtgctctgccagcgcctcggcattgatcaggtcccggcacgggtgagcgccgttcccggcgatcgcttcctgaaggtggaatttattccggcagaggagggcagaaaatga

SEQ ID NO: 5286 - DNA, 387 bp, Escherichia coli
atgaccacaacgcaaaaaacgacggatgttacagccccccgacgcagccactggtggtggacggtgccgggatgcctggcaatggtgttactgaacgcagccgtcagttacggcattgtcagactgaacgcaccggtgactgccgccttcaacatgaaacagaccgtggatgcgttttttgacagcgccagtcagaaacaactgtcagaagcacagtcaaaagccctttcagcgcgttttaacacggcactggaagccagcctgcaggcgtggcagcagaaacaccacgcggtcatcctggtgtcgcctgccgtggtacagggggctccggatatcacccgggaaatccagcaggatattgcccggcgaatgagagcggaaccatga

SEQ ID NO: 5287 - DNA, 279 bp, Escherichia coli
atgattggtaagtttggtgcggccaaagaccagtggttcagttccttcctgctgcaggtggaaaaccattcctcctggcaccgcctgtttgtggacccgttaagccgcgccatgtacagctctgacggcccggattttgagtttgtgcagcagaaacgtaaagaggggctgagtattcatgaggcggtgtggcagctggcgtggaagaagtcagggccggagatggcttcgctggaagcctggctggaagaacatgagaaatacaggagtgttgcatga

SEQ ID NO: 5288 - DNA, 738 bp, Escherichia coli
gtggcgctgccctttgctgctgacgcctgtctggtcgcctcatcttttgaagcagacgcagatgatgccgatgacgccgccgaactggcggacgatgcggcagccgtttttgaggattctgcgctggtttccgacgctttcgcgttcgtcttggatgtcttcgctgcggaagcagacctcgctgctgcgctggcctgtacagcggcttcgccagccttcgttgtggctgttgaagcagacgatgcagcactttctgccgattttccggcggcggtggcactggctgaggcctgcccggcacttgttgacgcggcactggcagataatgcagccgctgtttttgagtctgccgcagctgaggcgctctgtcccgctgccgtttcagaagacctggcgttcgtctcggacgtttttgccgccttcgcagaatttgctgccgccgttgccgaggaagctgcgctgctggcgctcgaggctgcgttcgtttctgatgattttgccgcctcttttgaagccgacgcatcccgtgctgaagtggctgcttctgacgctttcgtggtcgcggtggatgcagaagtggctgctgattgttgtgacgctgcggcattcgtttctgacgttttcgcggcactggcgctggtagctgccgcgctttttgatgactctgcagcagcagcactttttgctgcttcacgggcctttgtcgatgccgttcctgcgctggaagacgctgactga

SEQ ID NO: 5289 - DNA, 1611 bp, Escherichia coli
gtggcgcttgaggatgcgagcacgacgaaaaaggggatagtacagctcagcagtgcgactaacagcacttccgagtcactggcggcaacgccaaaagccgttaaggccgcgtatgagctggctaacgggaaatacaccgcacaggatgcaacgacagcacagaaagggatagttcagcttagcaacgcgaccaacagcacatctgaaatgctggcggcaacgccaaagtcggtaaaggcagcctatgaccttgctaacgggaaatatactgctcaggacgctacgacagcacaaaaaggaattgtccagctcagtagtgcaaccaacagcgcatctgaaacgcttgccgcgacaccgaaagcagtgaaagcagctaataataatgcgaatggtcgggtaccttctgcccgtaaggtgaatggtaaggcgctttcagcggatataacactgacgccgaaagatattggtacgcttaactcaacaacaatgtcattcagcggtggtgctggttggttcaaattagcaacggtaaccatgccacaggcgagttctgttgtttcaattacgttgattggtggtgcgggatttaacgtggggtcacctcaacaggcaggtatatctgaacttgttttgcgtgcaggtaatggtaatccgaaggggattactggtgctttatggcagcgcacatcgacagggtttacaaattttgcctgggtcaatacatctggtgatacttacgatatttacgttgcaatcggaaattatgcgactggtgtaaatattcaatgggattataccagtaatgccagcgtgacgattcatacgtcaccagcatattctgctaataagccggaagggttaacggacggtacagtttattcactctatacgccatcagagcagttttatccgcctggcgcaccaatcccgtggccatcagataccgttccgtctggctatgccctgatgcaggggcagacttttgacaaatctgcatacccgaaacttgcagccgcttatccgtcaggcgtgatccctgatatgcgtggctggacgattaagggcaaacccgccagtggtcgtgccgtattgtctcaggaacaggacggcattaaatcgcacacccacagcgccagcgcatccagtacggatttggggacgaaaaacacatcgtcgtttgattacggaaccaaatccacgaataacaccggggcgcatacgcacagtctgagtggctctacggggtctgccggtgatcatactcatggtaatggtattcgttggccgggaggcggcggttctgcgttagcattttatgatggcggtgggttcacttatgtccaggattcacagtatcaagtaagcccggggacttcttcccgtagatcgtattatcaacgtattcagacacagtcagcaggtgctcatacccactcgctgtctggtactgcagcaagttctggcgcacatgcacatactgtaggtattggtgcgcatacgcactccgttgcgattggttcacatggacacaccatcaccgttaacgctgctggtaacgcggaaaacaccgtcaaaaacatcgcatttaactatattgtgaggcttgcataa

SEQ ID NO: 5290 - DNA, 585 bp, Escherichia coli
atggcattcagaatgagtgaacaagcacggaccataaaaatttataatctgctggccggaactaatgaatttattggtgaaggtgacgcatatattccgcctcatacaggtctgccagcaaacagtaccgatattgcaccaccagatattcctgctggctttgtggctgttttcaacagtgatgaggcatcgtggcatctcgttgaagaccatcggggtaaaacggtttatgacgtagcgtcaggggacgagttatttatttctgaactcggtccgttaccggaaaatgttacctggttatcgccggaaggggagtttcagaagtggaacggcacagcctgggtgaaggatacggaagcagaaaaaatgttccggatccgggaggcggaagaaacaaaaaacaacctgatgcaggtagccagtgagcatattgcgccgcttcaggatgctgcagatctggaaattgcaacggaggaagaaacctcattgctggaagcctggaaaaagtatcgggtgttgctgaaccgtgttgatacatcaactgcacctgatattgagtggcctacgaaccctgtcagggagtaa

SEQ ID NO: 5291 - DNA, 360 bp, Escherichia coli
atgaatactgttttaagtgttcagggtgcttctgcgcccgttgaaaagaaatcgtttttttctaaattcactcgtctgaatatgcttcgcctggttcgtgcagtgatcccggttgctgttctgatgatgttgttccctgagttagctatggctgctggtaaaggcgacctgatggctaaaggtaacgatacggttaaggcgaccttcggtaaggactccagtatcgttaaatgggttgttctggctgaggtgctggtcggtgcggtcatgtacatgatgaccaaaaacgtcaagttcctggtcggctttgccatcatctctgtatttattgctgtgggtatgagcgtcgttggcctctga

SEQ ID NO: 5292 - DNA, 672 bp, Escherichia coli
atgtatccgacggatcctagacaacttaatactgaacgtcaaatatatttggataaacagttttttgtcgatgttttttcaatccctgcttgtgttcgaaatactaatggagattttatcggctacaatgaaaaattctctaaagaatttataggtagtcttgatatcaaagagtggttttactcccttcctgtacaagtagctacatcgttcttaagagaagaactggatgctatgtctttgccttcgtccatgaataaaatacagagcgtggctataggtgataaactctggctggtacaatttataccattaatatatggggaggtggttaatgttttatggctttttttctgcaaaaattctaatgtgatagtggattattgtagaggattacgtacaaatataacaaatgacagaatgcttgaatttaaaaacaaatcaacggaaatccaatggaaagtttttattctttattcatttggtttttgtcatgaatcgatagcatctcttttgtctattactaatggttcttcccggaatgcaatttcagaagtgtataagtttttcggtatacattcaaaacatgatttgttaatgatttttcatacaagcaggatgcatagtttattctttgatgaattgttttttattttaaaatgtgctgaatag

SEQ ID NO: 5293 - DNA, 384 bp, Escherichia coli
atggccagagtaattttgtatatcagtaatgatgtctatgataaagtaaatgcgatagttgaacagcgtcgtcaggagggggcaagagataaagatataagtgtttcgggaacagcttcaatgcttcttgaactggggcttcgtgtatatgaggctcagatggagcgtaaagagtctgcgtttaatcagacagagtttaataaacttcttcttgaatgtgttgtaaaaacacagtcatcagtagcgaaaattttgggtattgagtctctaagtccccatgtctccgggaatccaaagtttgaatatgccaatatggttgaagatattcgtgagaaggtgtcatctgagatggaacgattttttccaaaaaatgatgaggaataa

SEQ ID NO: 5294 - DNA, 510 bp, Escherichia coli
atgaaaaaatggatgttagcaatctgcctgatgtttataaatgggatctgcgaagccgccgattgctttgatcttgcaggtcgggattacaaaatagacccggatttactgagagcgatatcatggaaagaatcccgttaccgggttaatgccatcggtattaatccggtaacgggatatggcagcggactgatgcaggtagattcccagcattttaacgaactggcccgctatggaattaagccggaacatctgacaacagatccctgtatgaacatttataccggtgcttattatctggcaatagcctttaaaaaatggggcgtctcctgggaggccgttggtgcatacaatgccggattcaggaagaccgaacgccagaaccagagacgtcttgcctacgcatcagaggtttaccggatttatacctggataaagagcagtaaaggcatccgggttccgaccacgaagaaatcactttcccaaattaacagtgtgcagaaaaattaa

SEQ ID NO: 5295 - DNA, 345 bp, Escherichia coli
atgcagccatctcgtatgcaaaccgcttgcctgcgcctgttgataatcaaagctgaacagcaaaaaatcccgccattttacgctaataacaagtgtaaccagtccggcaataatcaccgtctggattatatcgccgatggttatcccgagcatgtcgccgaaaagaatatgatcaagatgtacgtctggtttgactgcaatatacaagatcagacctgcggcaaacatgccagaaaaaacaatccccatcactgtatcttgcttgattcggctgttgtctttcaggtatcccgtcgccaccgcacagaatactccggcgacgaatgcccctgtagccagaggtaa

SEQ ID NO: 5296 - DNA, 1521 bp, Escherichia coli
atgaacaagccgaaagacattctttcaccggatgcaccgtttatccagaccggcagggatgtggtgaaccgggctgacagcattgtgggaaacaccgggcagcagtgcagtgcgcaggagattagccggagtgaatacacgaattacacctgtgagcgggatttacaggtggagcagtactgcacacgaactgcccgtatggagctgcaggggagtaccacatgggaaacccggacgctggagtatgaaatgagtcagctacctgcacgtgaagtgaatggtcagtatgttgtctccattacctctcccgttaccggtgaaattgtcaatgcgcattacagctggagtcgtacttacctgcagaagagtgtacctatgacaattacagtactgggaaccccactgagctggaatgccaaatactcagcagatgcctcatttacaccagtacagaaaacactgactgccggtgttgcttttacgtcatctcaccccgtccgggtcgggaatacaaaattcaaacgtcatacggcaatgaagctgcgtctggttgtcagggtaaaaaaagcctcgtacaccccgtatgttgtctggtctgaaagctgcccgttcagcaaggagctggggaaactgacaaaaacagaatgtacggaggctggcgggaacaggacgctggtgaaagacggtcagtcatacagcatgtaccagagctgctgggcataccgggacacgtatgtcacacagtcagcagacaagggaacctgtcagacctacgccgacaatcctgcctgtaccctggtgtcacaccagtgcaccttttactccgaagaaggtgcctgtctgcatgaatatgccacgtactcctgtgagtcaaaaacatccgggaaagtgatggtctgtgggggagacgtcttctgtctcgatggcgaatgcgataaggctcagagcgggaagagtaatgattttgccgaagccgtttctcagctggcggcactggccgcagcaggtaaggatgttgcggcgctgaacggggtggatgtccgtgctttcaccggtcaggcgaaattttgtaagaaggctgcagccggatacagcaactgctgtaaggacagcggctggggacaggatatcgggctggccaaatgcagcagtgatgaaaaagccctggctaaagcaaaatcaaacaaactgaccgtcagtgtcggagagttctgttcgaagaaagtgctgggtgtctgcctggagaaaaaacgcagttactgtcagtttgattcgaagctggcgcagatagtccagcagcaggggcgcaacggacagctgcgtatcagttttggcagtgcgaagcatcctgactgtcgggggattacggttgatgagctgcagaaaattcagttcgacagactggatttcactaacttctacgaagacctgatgaataaccagaaaatcccggacagtggtgttctgacgcagaaagtgaaagagcagattgctgaccagctgaaacaggcaggacagtaa

SEQ ID NO: 5297 - DNA, 348 bp, Escherichia coli
atgagtgaagattgtttgaaaatgtttacaggtgttgttctgttaatatttgtcattattgccggttatttcttttctgagcgtaatgacaggaaaatgtttctcctgagctcactggttttccttgttattaatatcgcgtgtttatatgtgctgactgccagtctctggtttctgtgtggtgcaattatgaatcagggcgcagcaatggttgttccaatggttattggctcattaccgaacgttacgagcttcgacgggttcagaagaatatttatctgtattatgttgtcatcagtatggtccggagtgatgtggttttttataagggggcttatgacaggctaa

SEQ ID NO: 5298 - DNA, 435 bp, Escherichia coli
gtgttcgacggtgagctgagttttgccctgaaactggcgcgagagatggggcgacctgactggcgcgccatgcttgccgggatgtcatccacggagtatgccgactggcaccgcttttacagtacccattattttcatgatgttctgctggatatgcacttttccgggctgacgtacactgtgctcagcctgtttttcagcgatccggatatgcatccgctggatttcagtttgctgaaccggcgtgaggatgacgaagagcctgaagatgatgtgctgatgcagaaagcggcagggcttaccggaggcgtccgctttgacccggacggaaatgaagttatccccgcttccccggatatggcgggcatgacggaggatgacgtaatgctgatgacagtatcagaagggatcgcaggaggagtccggtatggctga

SEQ ID NO: 5299 - DNA, 423 bp, Escherichia coli
atgttcctgaaaaccgaatcatttgaacataacggcgtgaccgtcacgctttctgaactgtcagccctgcagcgtattgagcatctcgccctgatgaaacagcaggcagaacaggcggagtcagacagcaaccggcaggttactgtggaagacgccatcagaaccggtgcttttgtggtggcgatgtccctgtggcataaccatccgcagaagacaaagcagccttccatgaatgaagccgttaaacagattgagcaggaagtgcttaccacctggcccgcggaggcaatttctcatgctgaaaacgtggtgtaccggctgtccggtatgtatgggtttgtggtgaatgatgcccctgaccaggcagaggactccgggcctgcagagcctgtttctgcgggaaagtgttcgacggtgagctga

SEQ ID NO: 5300 - DNA, 780 bp, Escherichia coli
atgccaacaccaaatcctctggcaccggtgaaaggggccgggaccacactgtgggtttataacgggagcggcgacccttatgcaaacccgctttcagacaatgactggtcgcgtctggcaaaaattaaagacctgacgcccggcgaactgaccgctgagtcctatgacgacagttatctcgatgatgaagatgcggactggaccgcgaccgggcaggggcagaaatccgccggagataccagcttcacgctggcgtggatgcccggagagcaggggcagcaggcgctgctggcgtggatgcccggagagcaggggcagcaggcgctgctggcgtggtttaatgaaggtgatacccgtgcctataaaatccgcttcccgaacggcacggtcgatgtgttccgtggctgggtcagcagtatcggtaaggcggtgacggcgaaggaagtgatcacccgtacggtgaaggtcaccaatgtgggccgtccgtcaatggcagaagatcgcagtacggtgacggcggcaaccggtatgaccgtgacgcctgccagctcctcggtggtgaaagggcagagcaccacgctgaccgtggccttccagccggagggcgcaactgacaagagcttccgtgcggtgtcagcggataaaacaaaagccaccgtgtcggtcagtggtatgaccatcaccgtgaacggcgttgctgcaggcaaggtcaacattccggttgtatccggtaatggtgaacttgctgcggttgcagaaatcactgtcaccgacagttaa

SEQ ID NO: 5301 - DNA, 396 bp, Escherichia coli
atgaaacatactgaactccgtgcagccgtactggatgcactggagaagcatgacaccggggcgacgctttttgatggtcgccctgctgtttttgatgaggaagattttccggcaattgccgtttatctcaccggcgctgaatacacgggcgaagagctggacagcgatacctggcaggcggagctgcatattgaagttttcctgcctgctcaggtgccggattcagagctggattcgtggatggagtcccggatttatccggtgatgagcgatatcccggcactgtcagatttgatcaccagtatggtggccagtggctatgactaccggcgcgacgatgatgcgggcctgtggagttcagccgatctgacttatgtcattacctatgaaatgtga

SEQ ID NO: 5302 - DNA, 414 bp, Escherichia coli
atggggagacccgactggcgcgccatgcttgccgggatgacatccaccgaatatgccgactggcaccgtttttaccgcacgcattattttcaggatacccagctggatatgcatttttccgggctgacgtacgctgtactcagcctgtttttttgcgatccggatatgcatccctctgatttcagtctgcttgtcccccggcatgaggaagagcaggtggagaggccggatgaggacaaaatgctgatgcagaaagcggcaggacttgccggaggcgtccggttcggtggggacggagggcgcgatattttatcgtctgcggatgtggcggatgtcatggtggatgatgccgcattaatgatggcttcagcggggattccgggaggtgtgagatatgtcccagccggttggtga

SEQ ID NO: 5303 - DNA, 432 bp, Escherichia coli
atgtttctgaaaacagaacaatttgaatataacggtgtgtctgtcacgctttccgaattgtctgcgctgcagcgtatcgagcatcttgccctcctgaaacggcgtgcagaacaggcagaatcctgcggcaacctgcaggtaagcgtggaagatctcgtcagaaccggcgcgtttctggtggcgatgtccctgtggcataaccatccacagaaaacgcagtcaccgtcaatgaatgaggccgtgatgaagatagagcaggaagtgctcaccacctggcctgccgatgccattgcccgggcggaagacgtggtgttgtgcctgtccgggatgatcgaagctgttcgtccggatactgatattactgaagtggcgaaaaataacacgctgactgatgatgatttttctgcgggaaagtcttcgacggcgagctga

SEQ ID NO: 5304 - DNA, 753 bp, Escherichia coli
atggcaacaccaaatccccttgagccggtaaaaggtgccggtaccactctgtgggtttacaacggcaagggtgatgcttatgcaaacccgttgtcagacgatgactggcagcgactggctaaggtgaaggatctgacgccgggcgagatgacggcagaatcctacgatgataactacctggatgatgaagacgcggactggaccgcgaccgggcaggggcagaaatctgcaggtgataccagttttacgctggcctggaaaccgggagaggaaggccagaaagggcttataggctggtttgaaagcggcgatgtccgggcctataaaatccgttttccgaatggcacggtggatgtgtttcgtggctgggtcagcagtatcggtaaggccgtgacggcgaaagaagtgatcacccgcacggtgaaagtcactaacgtgggtaaaccttctgtagcggaagaacgcagcaaaattacgccggtcagtgcgattaaggtgacgccgacatccggtacggtggcaaaagggaaaacaaccaccctgacggtttcttttgagccggaaagtgcaaccgacaagacgttcagagcggtttccgccgatccgtcgaaagccaccattagtgtgaaagatatgacaattacggtaaacggcgtggcgacaggtaaggtgcagatccctgtggtgagcggaaatggtcagttcgccgcagtggctgaagtcaccgttactgaagcgggcgctgcagggtaa

SEQ ID NO: 5305 - DNA, 396 bp, Escherichia coli
atgaaacacactgacattcgtgccgcagtgctggatgcactcgagcagcatgaacacggggcgacgctgtttgatggtcgccccgttgtttttgacgaagaggattttcctgcgatcgcggtttatctgacggatgcagagtataccggtgaagagctggatgcagatacctggcgggccacgctgcatattgaggtgtttttaccggcacaggtaccggattcagagcttgatcagtggatggaaagccggatttacccggcgatgaccgcgatcccggcactggcaggactgattaccacgatggttacgcagggctatgagtatcgtcgtgatgacgatatggcgttatggagttctgcagatctgacttattccattacatacgagatgtga

SEQ ID NO: 5306 - DNA, 360 bp, Escherichia coli
gtgaaccgccccgtgtttcctgtttatcattttctggtcagtgccgcgattctggtattcgtggtgattttctggcggacacaccatcgcgaccaccgtaactggctggctctacggctattcgtattatgctctgtaaaccgttggccattgcggatggttaaaggaacagttgtggggacaactgacacattacgtgaaatgcagcgttatgaacaactgagtagcacggggctgacaactggaaaatccagccgggagcaccgttatatgatacgattgttattgtcactggtgagagtgtgcgcagggattatatgtcagtgtatgactatcccgtaccaaccacaccgtggctga

SEQ ID NO: 5307 - DNA, 633 bp, Escherichia coli
atggcagttcgtggcattaacaaggtcattctcgtaggacgcctgggaaaagatccggaagtccgttacatccccaacgggggcgcagtggcaaacctgcaggtggccacatcagaaagctggcgtgacaaacagacgggggagatgcgggagcagacagaatggcatcgtgtggtgctgttcggcaagctcgcggaagtggcaggtgaatatctgcgcaagggcgcgcaggtctacatcgaaggtcagcttcgcacccgtagctgggaggataacggtatcacccgttacgtcaccgaaattcttgttaagaccacgggcaccatgcagatgctgggacgtgtcgcaggtgctcagactcagccggaagaggggcaacagttcagcggtcagtctcagccggaaccacaggcggaggccggtacgaaaaaaggaggcgcaaaaacgaaaggccgtggacgtaaggccacgcagccggagtcgcagccgcaaccgccggagagtgacgattacgggttttcagatgatacccgttctgaacgactgactgtgacaaccgctccgtcctgtgcggggcatcaccggagagatgaggatgagcgaatatttcagaatacttcagggactgcctga

SEQ ID NO: 5308 - DNA, 564 bp, Escherichia coli
atgtacagtcagttaagagaacgtatccggctgatgcgcgcaaggctggataacgccgcgccggttgctgaaatccgggctgaatctcagctttttgtgactcctgccccggtctgtgatcgcctggtgacgctggcggggatcagcaaccgtgatcacattctggaaccctctgccggcaccggggccatactgcgggcgattagggataccgcgccggtagccatgtgtgatgcggtggaaatcaacagcgggctggtccggtatctgcgggaaaattttaacggtgtcagggttcagtgtggcgacttcatggaatggcagccggtgcagtattacagccgggttatcatgaatccgccgttcagccacgggcaggatatccggcatatcctgcgggccttttccctgttgcgtccgggtggcgtgctggtcgccgtctgtctcaacgggccacgccagcaggagaagctgttaccgttttctgacgtccgcgaggagctgccgcgcggcacatttgcttataccgatgtcccgacgatgattattcgtctgcgtgcctga

SEQ ID NO: 5309 - DNA, 294 bp, Escherichia coli
atgaaagtgacgcccgatcgcattacggactacaaagcaccatcggcagaagaggctgccgtcgccagtcaggccgctaagcgtccgcctgttgtcaactatccgggagaaggtttccgggaaatgacaaaggcacagtgggctgccctgccccgggactgtaaggccgtgcgcagtgtggcagaggcagaagaccacggggcatatcgttaccgccgcacaatggacaataatttccgcctggtgaatgtgtatatcaccgacatgaagattacggaaatcccacagaaataa

SEQ ID NO: 5310 - DNA, 501 bp, Escherichia coli
atgtggactattccagccgaacgcgaacctctgccaggcgtaaaattttcataccggggctccaagatgcgaacaccacatcttgtgccactcagccaacaggctgtagccatactggcagaacttcagacatgggcaggtgaaaatggtctgatctttacgggagcacacgacccacgtaaaccaatcagtgaaaataccgtaaataaggccctcagagtgatggggtatgacacaaccaaggaagtctgtggccatggattccgggcgatggcgtgcagtgcattgattgaatccggcttatggtcaagagatgcggttgaacgtcagatgagtcatcaggagcgcaacggagtacgtgccgcgtatattcataaagcagaacatctggaagaacgtcggcttatgctgcaatggtgggcagattttctggatgcaaacagggaggagtgtatcagtccgtttgaatatgcaaaagttaacaatccactgaaaaggtga

SEQ ID NO: 5311 - DNA, 1044 bp, Escherichia coli
atgactggcaaattacgctttgaagtgaacgataaccagggctgtttcatatttccggaaacctggtttggctcgttgctggatgagtttgaagaactgattgatgcatacgatgcggatgaaatcagcgaaacaagttacatcaacaaactcaggcgccttgcccgacaggagaatgactttattgatgtacacgctcacttggcatacgtatttctggagcagaatgccccgcgtaaggcgctgaatgctgcccttaaagggctggcagttggcaatcgtcttatccctgaaggtttcagtggcagaatcatctggatacatcctgacaaccgaccttttcttcgtgccctctatgcggcaatcctggcaaatgcacatttacggcgtcatcaggatgccatcatgctcattgaaaaaatactggattacaatcccgaagataatcatggtgcacgctggctactgggaccggaactgttacgcactggcgctcatgaacaggcacgccatatactgcaggaacatgcagatgaattttcaccttactggtatgaactcggccttctgcattttcttaatggggaactggtaaaagctgcaactgcatttcgtcgcggctttgcggcaaatacttacatcgcagaaatactgtgcggaaatctgcatccatttccacttgctgtatggcataacttttcaggcggtccggatactgccgaagattattatgccacataccacccgttatgggggcaatatccggaagcattgctgtttgtaaactggctctataatcattcctctgtgctgcatgaacgggcagaaatcattaaatgcgccgaaatgctgatgcaggaagatgatttcgaaatatgcgaaagtattttaagacagcaggagaagttgcgtgaaagaattgatgagacgctttctgagaaaattgtacagaaatgcagaaatatgaatggtgaatatgtctggccctggatattgccgttttcagcggcaggcatgaaacatactggcatacagtatcagtag

SEQ ID NO: 5312 - DNA, 501 bp, Escherichia coli
atgaataacacagacacattagaaaaaataatcagacaccaaaaaaacaaagaccccgcatatccctttcgggaacatttgttgatgcagctctgtattcgcacaaataaaagaatgcaggataatatatctgaatttctgggggcgtatggaataaatcactcagcatatatggttctcaccacattattcgcagcggagaaccattgtctgtcaccttcagagataagccagaaacttcagtttaccagaactaatattacccgcattacagattttttagaaaaagccggatatgtaaaaaggacggatagcagggaggatcgccgtgctaaaaaaatcagtctgacatctgaaggtatgttttttattcagaggctcactcttgcacaaagcatgtatctgaaagaaatctgggattatctgactcatgatgaacaggaactgtttgaagtcattaataaaaaattactggcacatttttctgatgccagctcataa

SEQ ID NO: 5313 - DNA, 729 bp, Escherichia coli
atgagaaaaaataatacggcaataatattcggcggcctgtttttttcctgcagcgtgatggccgcaaacggtacgctggcccccactgtggtgccaatggtgaacggtggtcaggccagtattgccatcagcaataccagcccgaatctgtttaccgttcccggtgaccggattatcgccgtgaacagtctggatggtgccctgaccaataatgagcagaccgcctccggcggtgtggtggtggccaccgtcaacaaaaagccctttacgttcattctggaaacagagcgtggtctgaacctttccattcaggctgttccccgtgaaggcgcggggcgtaccattcagctggtcagtgacctgcgcggaaccggagaagaagccggagcgtgggaaacgtccacgccttacgaatccctgcttgtgaccatcagccaggctgtccgtggcggaaaattacctgcaggctggtatcaggttcctgtgacaaaggaaaccctgcaggccccggcggggctgtcttcagtggcagattccgtatggacggggaatcacctgaagatggtccgctttgtcgtggaaaataaaacgctgtctgccctgaatatccgggaaagtgatttctggcagccgggaacccgtgccgtgatgttcagccagcctgccagccagttactggcaggtgcgcgcatggatgtgtatgtcatccgtgacggggagggcaactga

SEQ ID NO: 5314 - DNA, 861 bp, Escherichia coli
atgagtattcaacattttcgtgtcgcccttattcccttttttgcggcattttgccttcctgtttttgctcacccagaaacgctggtgaaagtaaaagatgctgaagatcagttgggtgcacgagtgggttacatcgaactggatctcaacagcggtaagatccttgagagttttcgccccgaagaacgttttccaatgatgagcacttttaaagttctgctatgtggtgcggtattatcccgtgttgacgccgggcaagagcaactcggtcgccgcatacactattctcagaatgacttggttgagtactcaccagtcacagaaaagcatcttacggatggcatgacagtaagagaattatgcagtgctgccataaccatgagtgataacactgctgccaacttacttctgacaacgatcggaggaccgaaggagctaaccgcttttttgcacaacatgggggatcatgtaactcgccttgatcgttgggaaccggagctgaatgaagccataccaaacgacgagcgtgacaccacgatgcctgcagcaatggcaacaacgttgcgcaaactattaactggcgaactacttactctagcttcccggcaacaattaatagactggatggaggcggataaagttgcaggaccacttctgcgctcggcccttccggctggctggtttattgctgataaatctggagccggtgagcgtgggtctcgcggtatcattgcagcactggggccagatggtaagccctcccgtatcgtagttatctacacgacggggagtcaggcaactatggatgaacgaaatagacagatcgctgagataggtgcctcactgattaagcattggtaa

SEQ ID NO: 5315 - DNA, 333 bp, Escherichia coli
atgatccaactgataaaggaatttgacgctcagggcgtggcagtccggttcattgatgacgggatcagtaccgacggtgatatggggcaaatggtggtcaccatcctgtcggctgtggcacaggctgaacgccggaggatcctagaacgcacgaatgagggccgacaggaagcaaagctgaaaggaatcaaatttggccgcaggcgtaccgtggacaggaacgtcgtgctgacgcttcatcagaagggcactggtgcaacggaaattgctcatcagctcagtattgcccgctccacggtttataaaattcttgaagacgaaagggcctcgtga

SEQ ID NO: 5316 - DNA, 576 bp, Escherichia coli
gtgtttggcagcggagcgtacagtaaaccagcacaaatcagcctggaatgtaaacattattcgctgaccagcgatgcgccatcggggaaggacggtgccgcattcctggcgctgatggcagaaaaagcccgtcttgcagccctgttaccggagggatggtcacgggatatgacgacattcctgtcactcagccaggaggtactgttatccctgctcagtttctgcaccgcgtgcagcatccacggcgttcagacccgcgagcatggtcacacgtcacgcagtccgctggactcgctggagagcgctatcggattccacatgcgcgactggtggcagccgacgaaagcaaacttcttcggacacctgcaaaagccgcagattatcgatgccctgaatgatgccggactgtccggtgctgcgcgggacgcggagaaaatgaagaaaggcgatgccgctgaacatgcagagttccacatgaaagacaaccgctgggtgcctggctggatgtgtacaccacgtccacaggcagagacggaaaccacggagtaccgtgacgaccaggcagaagccgcctga

SEQ ID NO: 5317 - DNA, 423 bp, Escherichia coli
atgtactgtactgttaaagaaattatccgcgaagtgctgaacacagacgtgccggacagtgaatgcgtttttgccgtggtgctgacccgtggggatgtgcgtcacatagcccaggactggagtctgacagacgatgagctggaaaccgtcatgcagcgactggacgatgcctttgcgcatggtgcggatgtcagcattgttcacgacgttgttcgtgagctgatggaagaaaagcgcgccagccgtcaggtgacagttccggcggtgatgctggaaaaagtgatggcgctggcaggcagtgaaatgaagcgcctgtatgccgtcgggagcgagaacgggggcgacggtgacgcattcgtcagggaagaacgcgaagcaatggacgttgtgttacaggcgctggacggggagcacatgtcatga

SEQ ID NO: 5318 - DNA, 192 bp, Escherichia coli
atgaatatcagcacagaaacccgcgaaattctgcgcaattacaaagccgtgattaatgcgcggcgtcgtgaaatggggcagaaaccgctcaccactgcgcagattgttgatgaaatctgcgattttgtggcgaatcagcaggctgtattcctcggcggtcactacatccttcagggcagcataaacaggtga

SEQ ID NO: 5319 - DNA, 297 bp, Escherichia coli
atgagcgcattttcttttaacaccacttatcagccaacaggcgatcagcagaaagacgcaatcgcacaaatcgggatcatgcagaatcgtgctgttcaggcaaatcttgcatatcagagctgccgggattctggtgcactctttaaggtgctccaccaggtcaataatgagctgcatgacttactggatagcctggagaatcatactcctcttgtcagaaaaaacgctgatgagttgatcgcgctgttactgcttttcactcggcaggttggtcagtcccgaactgacctgatttga

SEQ ID NO: 5320 - DNA, 198 bp, Escherichia coli
atgcatggtggagaaaaatgccacgctatccaaaaatccagactgggtgaatggttcagctgtgtactgaatcagtggggcgcactctgttattacagtgttgacggtcaggcggaggcagacataatgccgcggaaaaagccctttgtgccatctgtctcggaaataaaaactcttatgacctttgtcaaatattaa

SEQ ID NO: 5321 - DNA, 693 bp, Escherichia coli
atggacttattgccttttttactggacgcgaacctcagcgcgacaaacccacccgctattccgcactggtggaagtgtcaaccgcttattcccacccttctgtcacaggaactgaaaaactatctgaagcttaatgttaaagagaaaaatgttcagattgcagaccaggtgattattgatgaaagtgccggtgaggttgttatcggcgcgaatacccgtatttgccacggtgccgttattcagggtccggtagtgattggcgcaaactgcctaataggtaattatgcgtttattcgtcctggcacaataatcagcaatggcgtaagaattggttttgccaccgaaattaaaaatgcggttattgaagcggaagccacgattggtccgcaatgctttattgccgactcggtagttgcaaaccaggcatatttgggcgcacaagtacgaaccagtaatcatcgtctggatgaacagcccgtgtctgttcgaactccagatggaattatcgctaccggatgcgataaattaggttgttatatcgggcagcgttcacgccttggcgtacaagttattattttgcctgggcgaattatttccccgaacacgcaacttggcccgcgcgtgattgtagaacgtaatttacctaccggaacttattcactccgacaagaacttatccgtacaggagattaa

SEQ ID NO: 5322 - DNA, 462 bp, Escherichia coli
atggcagaaaaagcccgtcttgcagccctgttaccggagggatggtcacgggatatgacgacattcctgtcactcagccaggaggtactgttatccctgctcagtttctgcaccgcgtgcagcatccacggcgttcagacccgcgagcatggtcacacgtcacgcagtccgctggactcgctggagagcgctatcggattccacatgcgcgactggtggcagccgacgaaagcaaacttcttcggacacctgcaaaagccgcagattatcgatgccctgaatgatgccggactgtccggtgctgcgcgggacgcggagaaaatgaagaaaggcgatgccgctgaacatgcagagttccacatgaaagacaaccgctgggtgcctggctggatgtgtacaccacgtccacaggcagagacggaaaccacggagtaccgtgacgaccaggcagaagccgcctga

SEQ ID NO: 5323 - DNA, 435 bp, Escherichia coli
atgaaaactgaactgaccctgaatgtattacagaccatgagcgcacaggaatatgaagatatccgggctgccggaagtgatgaacgtcgtgaactcacacatgccgtgatgcgggagctggatgcgccggataactggacgatgaacggcgagtatggcagcgagttcggcggctttttccccgtccaggtccgtttcacgcctgcccacgaacgttttcacctggcgttatgttcaccgggcgatgtctctcaggtctgggtgctggttctggtgaatgccggtggtgagccgtttgcggtggttcaggtacagcggcggtttgcaccggaagccgtcagccattcactggcactggcggcgtcactggacgcgcaggggtacagcgtcagtgacatcatccatatcctgatggcggaaggaggtcaggcatga

SEQ ID NO: 5324 - DNA, 516 bp, Escherichia coli
atgctctgccacccggtcactccagcgtgcatgccagcttccgactgtttccggcgaatggaatgccagttcgatttcagcctgagcgaccagcgcctggtacgcacgggctttctgctctgcctccctcgcctgctggcggctgtacttttgcatgaccagtgcggatttgtggcgactgcgctccctgacacggaaccgcaccgacgggaacagccgctctgctgcatcgccgggaaggggaagaaggcagacctcgccctgagtttcaatcagcacatcgacggcatacagccactgagaacggttgccgcgcagttcttctgcggtcagggacggcatgaaaaatcgcaggtcagacagcgatatcctgcggcttccgttcagacagcggaaaaacgcccccgcatacggatattccgccagcgtgtttccctggtggcggcgtttttctgtctccgccaccgcccgccatgcggcctgttgctctgcgctgaggggaaccagtgcctgtga

SEQ ID NO: 5325 - DNA, 255 bp, Escherichia coli
atggaaggtaattcattaaaaaatattgatgaattgtcaggctgcatatccagacaatgggctggtaatggaacacctataacatcccttcctattgagaatggggtaagccttttagttccacaggctatggggggatatgatgttgtgcttgatatcaaaaaagcaggaaatggcagtagttttactctttatgaacgtgtaccagcattaacgccaaaaatttttgctgatagtgttaatgcatgtaaataa

SEQ ID NO: 5326 - DNA, 477 bp, Escherichia coli
atgtttattgattcagaaaaacgactgaaacaactttcagatgaggcaaagaaaaacaccgaggatctcgaagaagcaaagaaaaattcaaggtttacacaggtatccccaaaaggttgggaacgtgttcgagagctgctgaaggatagccaaggcatatcagcactgaagctgtactcatttttagcggagcatatcgatcctacgtgtggcgctgtcgttgcggatcagcaattcctagctgaaaaacttggagttagcagaagcacaattattcggtggctcaattacttagaatcaaaaaatgcattagttagaatccccgttgctggtaaggtttgtgcgtatgccctcgatccacatgaagtctggaagggatacaacactacgaaaaaccatgcagcgtttgtcactaaaacactggtcaacaaagacggtgatattcagcgccgaatcatggccatgttttcaaattga

SEQ ID NO: 5327 - DNA, 219 bp, Escherichia coli
atgcatacctttatttttcttgtgctgataaaaaatattaacggtggcggaagctggaatattacacccatgccaaatacggacgtatgcgtgcaggttcttcggacaatcgaagcacatggcggcaggggctttggaaatacaggggagtgtattgaagttaaaacaaatgaacctttgaacagcgtgatggaaacactaaatggtggtgggcaatga

SEQ ID NO: 5328 - DNA, 348 bp, Escherichia coli
atgaagtcgatatatttaaaatctgttctggcttttatatttgttggcgttatggctatgattgtatgtattcctttttacatcgtttaccttgcgcaacaacctgcaacaccagaacaactgacagagattttacaggaaactccctgtgcagcagaagcatttcaggagacacttaattatcagtctgaacctttaacacttggtaaggcaaataaaatcgcatcagaatgcagaaaaagaaacgaaatggcagaggtgaaacgtgtaagagaaaatgagcgcaataagattcgcgaaaaacaaattcaggcattaaatgatgctcattcagtaaaggaacgttaa

SEQ ID NO: 5329 - DNA, 234 bp, Escherichia coli
gtgaccgtggtgttccaggacggcttccagctgaaaaccgtggaagagatggcgctggaacgcacgcagagcagagcggaagaagacaatccggaaagtccggttcctgttccgccatcggctgaaagtcatcttaacggctttaatactgaccagatgctgaagcagctgggcaacctgaatccgcagcagtttatgtccggcagccagggagggggcaacgatggcaaataa

SEQ ID NO: 5330 - DNA, 198 bp, Escherichia coli
atgaacatgcgtaatattaatgttattacagccctctctgtgccgggtaaaaccgtgtcagatgattttatgcatgctgttctcagtaactgcgccacaagaatcgtacttcctgcaccggagaaattcggttctgagtcattgccggacaattttaatatgactgctgtcggtgtgatgaagaattcagaaatataa

SEQ ID NO: 5331 - DNA, 252 bp, Escherichia coli
atgaataagctggtttctgatggcagcgtcaaaaaaataaattatccggtgctgtatgagtccggaataacacctccgttatgtgaagtcagtgcaccagaacctgatgcgggtgggaaacgcattgtggcatatgtttataaatcatcacggagtacggtttttgaaaatcctgacattgtaaaaacctgtacggtcagggatttgaagaaggattttgtgaactgcgatgagaaaggtgagggacaatga

SEQ ID NO: 5332 - DNA, 303 bp, Escherichia coli
atgacggtcagatattatatcagttctgctgatttaaccgcagagaagttcgccacagcaatccgaaaccactggcacgtggagaataagctgcactggcgtctggacgtggtaatgaatgaagacgactgcaaaataagaagaggaaacgccgcagaattattttcagggatacggcacatcgctattaatattttaacgaatgataaggtattcaaggcagggttaagacgtaagatgcgaaaagcagccatggacagaaactatctcgcgtcagtccttgcggggagcgggctttcgtaa

SEQ ID NO: 5333 - DNA, 528 bp, Escherichia coli
atggcagttcgtggcattaacaaggtcattcttgtcggtcgtctgggaaaagatccggaagtccgttacatccccaacgggggcgcagtggcaaacctgcaggtggccacgtcagaaacctggcgcgacaaacagacgggggaaatgaaggagcagacggaatggcaccgcgtggtgctgttcggcaagctcgcggaagtggcaggtgaatatctgcgtaagggggcgcaggtctacattgaaggccagcttcgcacccgtagctgggaagataacggtattacccgttacgtcaccgaaatccttgttaaaaccacgggcaccatgcagatgctggggagtgcaccacagcagaacgctcaggtgcaaccgcagcctcagcagaatggtcagtcacagagtgctgacgcgacgaaaaaagggagcgcgaaaacgaaaggccgtggacgtaaggctgcgcagccggagcctcagccgcaaccaccggagggggaggattacgggttttcagacgatatcccgttctga

SEQ ID NO: 5334 - DNA, 465 bp, Escherichia coli
atggtcatgactgctgatgagttttgccatattcagatccagcgattcagcccgccacatcgtcagatatttctgcgactgtgcgatggtcttttcagccttgcgcaaatcagcttcgatttttttgatacgacgccagcgaacgtccgggcgttctttatacttcgcgtgaagcagtgccgaccgcgcccgttcttcccagtattccgcacgttcaaagagcatcacggcacgtttcatgccgttttcaatacgctgcgcatcacgacgggcgcggcgttcgctgtgatgccccacaagaatgggctgaccgggcgggatcatcgcggccagtctttccacttcatcaagtgcctgtgcggattcactggcccgctttccgctgtatccggtaaaccgctccgcccgtgcttcctgacgttcagcgagcgtgctgtcttcatcctcaatctctccggcaagtga

SEQ ID NO: 5335 - DNA, 375 bp, Escherichia coli
atggcaacgaaagagcaaaatctgaaacggcttgatgaactggccctgattctggggcgtgagccggatatatccgggagtgccgcagagatagcgcagcgggtggcagaatgggaagaggaaatgcagtcatccggcgatgatgtacaggttatgaatatggatatccgggagcgggaaaccgcggctcatgatgttcgtgaggaaacatccggcgcgttaacgcgcatcagagttctgacctgcctccatctctgtggcgttgatggtgaaacgggggaatccgttgagcttgcggatgttggtcgggtgattctgattatgtcctcagatgcaaaaacacacgttgatggtggaatggctgtttatgcgtga

SEQ ID NO: 5336 - DNA, 354 bp, Escherichia coli
atgcgtgattttcagaatgcctttgatgccgcccttgccggggtggacagtacgattgttgaagtgatgggcatcagtgcgcagttcacctccggtgcacagcgtggcggcgaggttcatggcgtttttgacgatccggagtcgctgggttttgccagtagtgggatccgtattgaaggaagtaacccgtcattatttgtgcttacggatacggtttgtgctgtacggcgtggtgacacgctgaccattaacggcgagatgttctgggtggaccgtgtttctccggatgacggagggagttgttatctctggctcaaccgggggcaaccacctgccgccagccgtcgccgctga

SEQ ID NO: 5337 - DNA, 384 bp, Escherichia coli
atggcaacaaaagaagaaaatctgaatcgtcttcgtcaactggctgacctgctggggcgcgaggcggatatgtcggggagtgctgcggatattgctcaacgtgtgtctgagtgggaagaggagcttgctgtttccccggagggcattatgcactctgatgagagcggggctgatcaaaatcacacagacgatggtgagcagttgaacaacacggatgctccggatgatgttaaagccgtccgggtacggaagtgcctgcaagtaatggggtattgcccggagacaggtcgtcccgttgagctggcgttacggggtatgcgtgttctggtgccatcatcactggcaacggccatgatacagcacggaacggctgaatatgcgtga

SEQ ID NO: 5338 - DNA, 354 bp, Escherichia coli
atgcgtgattttcagaatgcctttgatgctgccctcgccggggtagacagtacgatcgttgaagtgatggggctctgtgcgcagttcacctcgggggcacagtgtggcagcgaagttcagggggtttttgatgatccggagtcgctggggtttgccggtggcggggtccgtattgaaggaagcagcccgtcattatttgtgcggacggatacggttcgtgccgtgcggcgtggtgacacgctgaccattaatggtgagatattctgggtggatcgtgtttctccggatgacgggggcagctgttatctctggctcaaccgtggtcaaccacccgcagttaaccggcgacgataa

SEQ ID NO: 5339 - DNA, 366 bp, Escherichia coli
atgattgatgtcttaggaccggagaaacgcagacggcgtaccacacaggaaaagatcgcaattgttcagcagagctttgaaccagggatgacggtctccctcgttgcccggcaacatggtgtagcagccagccagttatttctctggcgtaagcaataccaggaaggaagtcttactgctgtcgccgccggagaacaggttgttcctgcctctgaacttgctgccgccatgaagcagattaaagaactccagcgcctgctcggcaagaaaacgatggaaaatgaactcctcaaagaagccgttgaatatggacgggcaaaaaagtggatagcgcacgcgcccttattgcccggggatggggagtaa

SEQ ID NO: 5340 - DNA, 258 bp, Escherichia coli
atgctggcgttttaccgtggtcaatgcaccagccatatccagagccgggttatatctgatgatgccagactgtacggcataacgcattacagcagatattctttgctgcagacgactggcgatttcataaatttgtttaacttctgcagcacgaacagggataagcagatccggggtactgagtgttgtgatatcccggttgccgataaaggggaaaacgtgagtctcgaggcttttgagtactttatcgctgtgtga

SEQ ID NO: 5341 - DNA, 324 bp, Escherichia coli
gtggaaaaagcccgcccgatcctggctgcttcaccgcaggcggatgccggaccatcactccgtgatcagatcatggcactggatgaggcaaaaggggctgaggcgcaggctgaacagctggctgcctgcccgggaatgacagtggagagcgcccgggctgtgctggctgcgggatcaggtaaggcagaaccggtctctgcatccacaaccgccatgtttgaacatttcatggcgaaccattcaccggcagcggtacagggtggcgtggcacagacgtcagcagacggtgatgcggacgtgaaaatgctcatggccatgccatga

SEQ ID NO: 5342 - DNA, 348 bp, Escherichia coli
atggtgacgaaaaccatcactgaacagcgtgcggaagtacgtatttttgccggtaatgatccggctcataccgccacaggcagcagcgggatttcctcgccaacaccggcactgacgcccctgatgctggatgaagccaccgggaaactggtggtctgggacggacagaaagccggtagtgcggttggcatactggtactgccgcttgaaggcacagagacggcgctgacgtattacaagtcgggaacctttgcgacggaggcaatccactggcctgaaagtgtggatgaacacaaaaaggccaacgcctttgctggcagtgccctgagtcacgcggcgctgccgtaa

SEQ ID NO: 5343 - DNA, 654 bp, Escherichia coli
atgttgaattctacaacatcttcgggaaaaagaaccggcattttagcaattggtgcccatcctgatgatatagaattaggatgtggtgcatctctttcatattattctaatgaaaaagtatatattatatctgttgtcatgacacctggttgctgtggcgcagagtatattgatcgtcacaaggaatcacaagaagcattaaatatgttaggatgcaataaactaatccctctaaattttgaagataccagattatatttgcaaataaaagagatgatatcatctctggaatacataattgagaatgaaacgccccaggatgtggaaattactcgagtttacaccatgaataatactgacaggcatcaggatcacattgctgtttatcaggcatcaatggttgcctgtcgttatattcctcaaatactaggatacgaaacaccaagtacatgtctgtcatttttacctcaagtttttgaatctgtagatgaggtccattttaataaaaaaatattagcattacaaaagcataaaagccagatccatcgaagatacatacagccagaatacataattgctcaagccaaattccgaggacaacaggttagtcattctatgtgtgaaggttttgttgtccataagatggtgttgtaa

SEQ ID NO: 5344 - DNA, 372 bp, Escherichia coli
gtgccggacagtgaatgcgtttttgccgtggtgctgacccgtgggaatgtgcgccatatggctcaggactggaacctgtcagacgatgagctggaaaccgtcatgcagcggctggacgatgcttttgtatatggcgcatgtgacagagttgtttccgatattgtcaatgaactgatggaggaaaagcgcgtaaaccgccttgtaacagtccctgcggtgctgctggaaaaagtgatggtgatggctggtagtgaaatttatcgcctccatgctgtcgggagcgagaacgggggcgacggtgacgcatttgtcagggaagaacgtgagattatgcgggtgatgcgtcaggcgctggacggggagaacgggtaa

SEQ ID NO: 5345 - DNA, 183 bp, Escherichia coli
atgaatatcagcacggaaacccgcgaaattctgcgtaattacaaaaccgtgattaatgcgcggcgtcgtgagatggggcagaaaccgctcaccaccgcgcagattgttgatgaaatctgcgattttgtgacgaatcagcaggcggttttcctcggtggtcactatatccttcagggcagctga

SEQ ID NO: 5346 - DNA, 468 bp, Escherichia coli
ttgttctataagttgctcagcaagctcattttcgctgttcttcatcgtgccgaaggctgcagccgtcagcagatggctggtcagttccatctggcagaccattttgacctgcgggtagagcgccgggttcccggcatgtgtctggcgggggaaggctgcatcgttctctggtgtatccggtgtgcgccagaacacaccatcgatggccagcagggtcaggccgcaccagtgcggatgcggcgtggcgttatgccagagctgcgctgttttcgtgaacacgcggcggacagcctcaattcccagacgctggcgggtctgaataacggcactgggggcaacgaaggggcgattgcccggcagcatgatgtccaggcgattcacaatctggtgaagaggttctttacgctcaagcgccatgccaacaatacaccagaccatcatttcgaggggaagacggcgcttgcgtag

SEQ ID NO: 5347 - DNA, 462 bp, Escherichia coli
gtgctggaaaacccccttcagcgttcagataaccattttctggatgagctggttcgtaaacagcaggcttcgcaggacgggaaaccccggcagggtgccctgtattttgtgtcgttttccattcccgaagaggggctgaaacggatgctgggcgaaacccggcactacggtatacccgccacactgcggggcatggtgaacaatgacctgaagaccaccgctgaagccgtgctgtccctggtgaaagacggcgcgactgatggtgttcagatcgacccgacgctgttttcacagtacggcattcgcagtgtaccggcactggtggtgttctgcagtcagggatacgacatcatccggggaaacctgcgggtcggccaggcgctggagaaagtggccgccacgggtgactgccggcaggtggctcatgatttactggcagggaaaggagattccgggaaatga

SEQ ID NO: 5348 - DNA, 705 bp, Escherichia coli
atgaacccattcaaaggccggcattttcagcgtgacatcattctgtgggccgtacgctggtactgcaaatacggcatcagttaccgtgagctgcaggagatgctggctgaacgcggagtgaatgtcgatcactccacgatttaccgctgggttcagcgttatgcgcctgaaatggaaaaacggctgcgctggtactggcgtaacccttccgatctttgcccgtggcacatggatgaaacctacgtgaaggtcaatggccgctgggcgtatctgtaccgggccgtcgacagccggggccgcactgtcgatttttatctctcctcccgtcgtaacagcaaagctgcataccggtttctgggtaaaatcctcaacaacgtgaagaagtggcagatcccacgattcatcaacacggataaagcgcccgcctatggtcgcgcgcttgctctgctcaaacgcgaaggccggtgcccgtctgacgttgaacaccgacagattaagtaccggaacaacgtgattgaatgcgatcatggcaaactgaaacggataatcaacgccacgctgggatttaaatccatgaagacggcttacgccaccatcaaaggtattgaggtgatgcgtgcactacgcaaaggccaggcctcagcattttattatggtgatcccctgggcgaaatgcgcctggtaagcagagtttttgaaatgtaa

SEQ ID NO: 5349 - DNA, 261 bp, Escherichia coli
gtggggaatctctatcggctgatgcgcggctatgccaccggtggttatgtcggtacaccgggcagtctggctgacagccggtcgcaggcgtccgggacgtttgagcagaataaccatgtggtgattaacaacgacggcacgaacgggcagataggtccggctgctctgaaggcggtgtatgacatggcccgcaagggtgcccgtgatgaaattcagacacagatgcgtgatggtggactgttctccggaggtggacgatga

SEQ ID NO: 5350 - DNA, 330 bp, Escherichia coli
atgaaaaccttccgctggaaagtgaaacccgggatggatgtgacatcggctccttccgtcagggaggtgcgctttggtgatggctattcccagcgtgcgcctgccgggctgaacgctgacctgaaaacgtacagcgtgacgctgtctgtctcccgtgaggaggccacggcgctggagtcgtttctggctgagcacgggggctggaaggcctttctgtggacgccgccttatggttacaggcagataaaggtgacctgcgcaaaatggtcgtcgcaggtcagtatgttgcgtgttgggttcagcgcagagtttaaacaggtggtgaactga

SEQ ID NO: 5351 - DNA, 261 bp, Escherichia coli
gtgggaaatctctaccggctgatgcgcggctatgccaccggcggttatgtcggtggcaccggaagtccggcgcaaatgcggcgttcagagggtatcaggtttgagcagaacaacaacgtggtgattcagaacgacggtacgaatggtctgccaggtccacagatgatgaaggcggtgtatgacatggcccgcaagggtgcccgtgatgaaatccaggcacagatgcgcgatggtggtctgttctccggaggtggacgatga

SEQ ID NO: 5352 - DNA, 408 bp, Escherichia coli
atgacgatggagcaggccaatgagaaggccaaaaaactggagcagtcctcagaagcaaagccggttgcggcatcactgccgcgcctggctgaagggaacttccggacaatgccggtgcagaccgtcaccgcgaccactccgtccggcagcagacctgcggtgacagcacatccggagcagaaactgctggcaccacgcccgctgtttaccgctgcccgggaagtgaaaacggttgttccggtcagttcagttacgccggtaacacctcctcgtccgctaagaacgggtgagcagacggcagcattatggatagcgccttatattgataaccaggatgtttatcatcagccatccagcgtgttttttgttattaaaccgtctgcgtggggaaaaccacgtattaattaa

SEQ ID NO: 5353 - DNA, 246 bp, Escherichia coli
atgcaactggtcaccgcattctgggcaacgctggcactgatgtatatgtcgtttgcggcaggcaccgggaaatatccggtgctgcccggaaaaatgaaatgtatccgggtggtaaccgcagatgaatatctgaaggacgtttatacggaagacgcttccctgccgggaaaaatcaggaaatgccatgtttatttccctgatgaccgaacaaacagaagcaacggagataaaaatgaacatgcgtaa

SEQ ID NO: 5354 - DNA, 369 bp, Escherichia coli
atgtttatttccctgatgaccgaacaaacagaagcaacggagataaaaatgaacatgcgtaatattaatgttattacagcccgcgttgtgccggataaaaacgtatcagatgattttatgcatgctgttctcagtaactgcaccacaaaaatagttcttcctgctccgaaggtgttcagttctgaatcattgccgcacaattttaatatggctgctgtcggtgtgatgaagaagggaatgtcgatgagcttattttcttctccgggaaatacagtggtctccggacatccctgtgcagggaaaacaaatctgacagcagagttaatttctgctgttgtggggagtaataaaaaaggagaagggcaatga

SEQ ID NO: 5355 - DNA, 426 bp, Escherichia coli
atgcagtatgcgaaacctgtcactctgaatgttgaagagtgcgaccgtctgtcttttctgccttacctgtttggcaacgattttctgtatgccgaagcatatgtgtacgcgctggcgcaaaaaatgatgccggaatatcagggaggcttctggcacttcatccgcctgccggacggtggcggttacatgatgccggatggcgaccgttttcatctggttaacggtgaaaactggtttgaccgcacggtcagtgccgatgccgcaggcatcattctgacttcccttgtgattaaccgccagttgtggctgtaccacgacagcggtaacgcagggctgacacacctgtaccggatgcgtgatgcgcagttgtggagccacatcgaatttcaccccgaatgtaacgcgatttacgcggcgctggactga

SEQ ID NO: 5356 - DNA, 306 bp, Escherichia coli
atggcaacaatggacagtaaatatattcagcacctcaggaaaataagtgctgtactgctcaggctgataagcagaacattaaaattatttccttttggtcttgtaatagtgcccgttatattattttattttgcacctgacagttttctcgctgaaattattcatgaatggaagaacgcagatatatcagaacaagtgacacttgtcagattatatctgaaggtgacatttacatgtgcgtttgtggctgtttttctcaattatcttttttctgatgagttcatgcctgtaaatagcagaaagtga

SEQ ID NO: 5357 - DNA, 504 bp, Escherichia coli
atgccgggcaactgcccgcattatgggcgttggcctcaacacgattttacgtcacttaaaaaactcaggccgcagtcggtaacctcgcgcatacagccgggcagtgacgtcatcgtctgcgcggaaatgggcgaacagtggggctatgtcggggctaaatcgcgccagcgctggctgttttacgcgtatgacagtctccggaagacggttgttgcgcacgtattcggtgaacgcactatggcgacgctggggcgtcttatgagcctgctgtcaccctttgacgtggtgatatggatgacggatggctggccgctgtatgaatcccgcctgaagggaaagctgcacgtaatcagcaagcgatatacgcagcgaattgagcggcataacctgaatctgaggcagcacctggcacggctgggacggaagtcgctgtcgttctcaaaatcggtggagctgcatgacaaagtcatcgggcattatctgaacataaaacactatcaataa

SEQ ID NO: 5358 - DNA, 213 bp, Escherichia coli
atgtctagtccacatcaggatagcctcttaccgcgctttgcgcaaggagaagaaggccatgaaactaccacgaagttcccttgtctggtgtgtgttgatcgtgtgtctcacactgttgatattcacttatctgacacgaaaatcgctgtgcgagattcgttacagagacggacacagggaggtggcggctttcatggcttacgaatccggtaa

SEQ ID NO: 5359 - DNA, 294 bp, Escherichia coli
atgaaagtgacgcccgatcgcatcacggactacaaagcaccatcggcagaagaggctgccgtcgccagtcaggccgcgaagcgtccgccggtagtcaactatccgggggaaggtttccgggaaatgacaaaggcgcagtgggccgccctgccccgggactgtaaggccgtgcgcagtgtggaagaagcagaagaccacggggcataccgctaccgccgcacaatggacaataatttccgtctggtgaatgtgtatatcaccgacatgaaaatcacggaaatcccacagaaataa

SEQ ID NO: 5360 - DNA, 171 bp, Escherichia coli
gtgctgaccggaagtgatgacggtcgccacagcaacacctctctggcgtggggggctggcgtgcagtttaacccgaccgaatccgtggccattgatattgcttatgaaggctccggcagtggcgactggcgcactgacggtttcatcgtgggtgtcggttataagttctga

SEQ ID NO: 5361 - DNA, 258 bp, Escherichia coli
gtgaccgtggtgttccaggacggcttccagctgaaaaccgtggaggaaatggcactggagcagtcacagagtacagcggaagagggtaacccggaaagcccggtgccgaatcctccctcggcagaaagccacctgaacggttttaacaccgaccagatgctgaaacagctgggcaatctgaatccgcagcagtttatgtccggagacaagaacccgctgggcggggatgccggcaaggagggcggaaatggcgggtga

SEQ ID NO: 5362 - DNA, 141 bp, Escherichia coli
atgctgaaaggcgggatttccggtcgcagtgccagaggaaaacgtatccatacccgggccattcacagcatcgataccgacattaagctcaaccgggcgttgtgggtgatggcagaaacgctgctggagagcctgcgctga

SEQ ID NO: 5363 - DNA, 336 bp, Escherichia coli
gtgaaagatctgggcgcagtggtgtccttcaaggggtattacggcgatctggccattgtggtggcgaaaacgtcttatgtggcagaggacggtaccgaaaaacgttatctgccggagggcatgctggtgttggggaatacggcggcagaggggattcgttgctatggtgccattaaggatgcacaggcgttgtctgaaggagtggtggcttcttcccgttacccgaaacactggctgaccgtgggcgatccgtcctgtgaattcaccatgacgcagtccgctccgctgatggtgctgccggatccggatgagtttgtggtggtacaggtgaaataa

SEQ ID NO: 5364 - DNA, 177 bp, Escherichia coli
atgacggcgggcggtacggtaacctttctcaataaactcaccgaccttgcgatttttgaagtccagcagacgccagccttcatcaataacgttcagtttcttgaggttacgcggcgtgcggtacatcctgttctcgatgtagataatcagggagaacatcaccgcaaccagcagtga

SEQ ID NO: 5365 - DNA, 129 bp, Escherichia coli
atggttgcccagggcaatgttctgccggttctgtacggtgaaatgcgcgtggggtcacgcgtggtttctcaggagatcagcacggcagacgaaggggatggtggtcaggttgtggtgattggtcgctga

SEQ ID NO: 5366 - DNA, 1602 bp, Escherichia coli
gtggataacggggcgcactttgacggcgaccagagcggcacggtgaatggtgtcacgccgccagcggtgcagcacctgaccgccgaagtcaccgcagacagcggggaatatcaggtgctggcgcgatgggacacgccgaaggtggtgaagggcgtgagcttcctgcttcgccttaccgtggcagcggacgacggcagtgagcggctggtcagcatggcccggacgacggaaaccacataccgcttcaggcaactggcgctggggcgttacacgctgacggtccgggcggtaaatgcgtgggggcagcagggcgatccggcatcggtatcgttccggattgcggcaccggcagcgcctgtcactattgaactgataccagggtattttcagataacagcggtcccgaaactggctgtatatgacccgacggtgcagtttgagttctggttctcggaaaagcggattatcgatatcaggcaggttgaaaccagcgcgcgttatcttggtacggcgctgtactggatagccgccagtagcaatattaagccgggttatgattattacttttatatccgcagcgtgaacaccgttggtaaatcggcatttgtggaggccgttggtcgggcgagcgatgatgcggaaggttatctgaatttttataaagggttgatcaataaaacgcatctcggcaaggaactgctggaaaactttgagctgacggaagataacgccagcaaactggaggagttttcgaaagagtggaaggacgccaacgataaatggaatgccatgtggggcgtcaaaattgagcagaccaaagacggcaaacattatgtcgcggggcttggcctcagcatggaggatacggaggaaggcaaactgagccagttcctggttgccgctaaccgtatcgcgtttattgacccggcaaacgggaatgaaacgccgatgtttgtggcgcagggcaaccagatattcatgaacgacgtgttcctgaagcgcctgacggcccccaccattaccagcggcggtaatcctccggcattttccctgacaccggacgggcggctgacggcgaaaaatgccgatatcagcggtaacgtgaatgcgaactccgggacgctcaacaacgtcacgattaacgagaactgccgggttctgggaaaactgtccgcgaaccagattgaaggcgatctcgttaaaacagtgggcaaagctttcccccgtgactcccgggcaccggagcggtggccatcagggaccattaccgtcagggtttatgacgatcagccgtttgaccggcaaattgttattccggctgtggcattcagtggcgctaagcatgagagagagcatactgatatttactcctcatgccgtctgatagtgcggaaaaacggtgctgaaatttataaccgtaccgcgctggataatacgctgatttacagtggcgttattgatatgcctgccggtcacggtcacatgacactggagttttcggtgtcagcatggctggtaaatggctggtatcccacagcaagtatcagcgatttgctggttgttgtgatgaagaaagccactgcaggcatcacgattagctga

SEQ ID NO: 5367 - DNA, 600 bp, Escherichia coli
atgcgtaaattatgtgctgttattctgtccgcagtagtctggctggttgccgctggtacgccagcgagcgcagcagagcatcagtccacactaagcgccgggtatcttcagacccatactgatatgccaggcagtgatgacctgaagggcattaacgtgaaataccgttatgaatttacggacacgctggggctggtgacgtcattcagttatgccaatgccaaagatgagcaaaaaacgcattacagcgatacccgctggcatgaagattcagtgcgtaaccgctggttcagcatgatggcggggccatctgtacgcgtgaatgaatggttcagtgcttatgcgatggcaggtgtggcttacagccgtgtttcgacgttctccggggattatctccgcgtaactgacaacaaggggaaaacgcacgatgtgctgaccggaagtgatgacgatcgccacagcaacacgtctctggcgtggggagctggcgtgcagtttaacccgaccgaatccgtggccattgatattgcttatgaaggctccggcagtggcgactggcgcactgacggtttcatcgtgggtgtcggttataagttctga

SEQ ID NO: 5368 - DNA, 2400 bp, Escherichia coli
atggcagcagtaaaaatctcaggtgtgctgaaagatggtgcgggaaaaccaatacagaactgcactattcaactgaaggcaaagcgtaacagcaccacggtactggtgaacacggtggcttctgaaaatccggatgaagccggacgttacagcatggatgttgagtatggccagtacagcgtcaccctgctggttgaaggttttccgccttcacatgccgggaccattaccgtctatgaaggctccagaccaggtacgctgaatgattttctcggtgccatgacggaagatgatgtcatgccggaggcattgcgtcgttttgaggcaatggtggaagaagtggcacgcaacgccgaagccgcctctcagagcgcagcggcggcaaagaaatccgaaactgcagcggcatcatcaaagaacgcggcgaaaacctcagaaacgaatgcagctaatagtgcacaggcggcagcgacctcgcagactgcatcggcaaactccgcgacagcagccaaaaaatcagaaaccaacgcgaaaaatagcgagacagccgcaaagacgagcgaaaccaacgcaaagtccagccagacggcagcgaaaaccagcgaaacgaatgccaaagccagtgaaactgcggcaaaaaacagccaggttgcagcagcccaaagcgagagcgcggcagccggttctgcgacttcagcagctggatcagcaactgctgcggctaacagccagaaagctgcgaagacgagtgaaactaacgcaaagtccagccagacggcagcgaagaccagcgaaacgaatgccaaagccagcgaaactgcggcgaaaagcagtcaggatgcagcagctgaaagcgagagtgccgcagctggttctgcaagtgcggcggcttcttctgccactgcatcagccaacagtcaaaaagctgcaaaaaccagtgaaaccaacgcaaaggcgagcgagactgcggcgactaactcggcgaaagcatccgctgcaagccagatggctgcaaaagcaagtgaagacgcagccagagagtatgcaagccaggcagcagaaccgtataaatatgtcttacagccactgcctgatgtgtggataccgtttaacgattcactggatatgattacgggcttttcgccgtcatataaaaaaattgttattggtgatgatgaaataacgatgcctggcgacaaggttgttaagtttaaacgcgcatcaactgccacatatatcaataaatcaggcgtatttagtgttgctaaaattgatgagccacgatttgaaaaagaaggtttattgattgaaggacagcgcactaactattttgttaaatccaatactcccgctgaatggacgagtaccagcaatatcgataaaactaataatggtgttgatgaatttggtttttcatatgccaaaatgcgaacaaaagataatatgacaggacaatcatctgcacttagtctgcatacatgcagtgcatcccgggggattgatgttagtggcgataataagtattgcactgtttcatgcagggttaaagctcctgatggtcttcgttgtcgtttgcgttttgaaaaatacgatgggtcggtttatacatttttaggagatgcttatttaactttcggaactctgataatagaaaaaactggcggagcagccaatagaatagcagctactgcaactaaagatccggttacagggtggattttctatgaggcaactatagaagctgttgaaggtgaaaccttaattggcgcaatgattcagtatgcgccgaaaaaaggtggtataactgaagcgggagattatatttaccttgcaacaccacaatttgaaaacggcggatgtgcttcatcttttgttattacgacaactgcacccgcaacccgctccagtgatatggtgacgatcccaactgaaaataatatctataatagaccgcttacgtgtcttgtcgaggttaatagaaattggggcgatattcctcctaatgtagcaccgcgtatttttgatttttctggtgtgccacctattgagtcaattacatacgcttttaacacaactgagaaatattacggtcagctttatatgcaaacttataaagcgtcgacaagtacttacgtttctagtgtgtttgctggtcgagctgatgttcgaaaattcattggtggttttaatatttattctgatggtactaaacgagtagtttctaacggtgaggctactaaaactatgaaaacggagtggacgggcgtaaaaacacggacctttattcgaattggaggtcaagccacatcgggaactcgtcatctattcggccatttgagaaatcttcgtctctggcataaagaattaactgatgcgcaaatgggggagagtattaaatga

SEQ ID NO: 5369 - DNA, 282 bp, Escherichia coli
atgaaagatttaacactcaaatttgcagacagggccgacttttcggcctttatggagagcattggctattatgatgacgagtcgatgcaggatgatattcttattgacgtgataggtaatgtgtacaaagaaaccggagaactgactgaagatggcgagccggtatgtgttaaggaggacggatattttgtaaatgtgcgcatcattaatgattcgcaaatatcgtcattattcgatgaacacgcggttgctgttgagcatcaactccgtagctggatgtga

SEQ ID NO: 5370 - DNA, 705 bp, Escherichia coli
atggctacatcgacagtaattcctgatgacatcaaaacgctaaagggagatgtcagtaaggcaaaggaagatatttcctcaattaacgtaaaagtatcaacgcttcagactgatatggacagtgcaaagcaggatatcagtaccagatacacaaaaacagaagtggataataagctgaaaaacaaagtggaagtgaacgatctggaaagtggtcgttatggcggagatttttacccgctgactggccgtgaagcgttttatttatggggattgggcacaactacagcggcggcaaatctttatcttaatcctgaccctgcaatttcgtctgtgctgcggtcaacatcgtctatccgctataaacattcagtagagacgatagattcagagcacgccgatctcattttcaggatgcgccctgtgtggtacaggtcgcaatgcgaaaatgacaggcgtgactggggattctatggattgattgccgaggaagtaggagaaattgcccctcagtttgttcactggcgaccagccaacgaagatgatgcaccggaaaccatttccagcaatggccttgttgccgaaggtgtaatgtacgaacgtctggttgttccactgattcaccatatccagaagctgactgaaagagttgatgaacttgagtcagaattaaagttgttatccgtttcccgaagcgatatcggataa

SEQ ID NO: 5371 - DNA, 288 bp, Escherichia coli
atggatataacacctttccttcatgcactttgtgctgtggctgcgcaggtactggttggtctttttaccggaaactgggcttacggagcgatagccggttgtacgttcttcattgcgcgtgaacatacccaggcagaatatcgctggattgaaatgttcgggcatggcaagcgaatgaatatgccgtggtggggcggttttgatccgcgcgcgtgggatgtggcaagcctgatggattttgctgtgccggtggtggcgtgtctgctgatctggatgttgatccgttaa

SEQ ID NO: 5372 - DNA, 270 bp, Escherichia coli
atgaggcgcttcgcaggcgcatgtcgtttcgttttcaatcgtgctctggcgcttcagaatgagaatcatgaggccggtaataaatacatcccttacgggaaaatggcttcctggttggttgggtggaaaaatgccactgaaacgcaatggcttaaagattcgccctcacagccattgcaacagtcactgaaagaccttgagcgggcttacaaaaacttcttccggcttcgtcaccgcgctcaaacggtgtgctacctatcgcggctataa

SEQ ID NO: 5373 - DNA, 174 bp, Escherichia coli; identical to SEQ ID NO: 4526

SEQ ID NO: 5374 - DNA, 1323 bp, Escherichia coli
gtgcaacagatagcccgctctgtcgccctggcgtttaataatttaccgcgaccacaccgcgttatgttggggtcgctcaccgttcttactctggccgtcgctgtctggcggccctatgtttatcaccgtgatgccacgccaattgtcaaaaccattgagctggaacagaacgaaattcgttcgctcttacctgaagccagtgagccgattgatcaagctgcacaagaagatgaagccattccccaggacgaactggatgacaaaatcgccggtgaagcgggcgtgcatgaatatgttgtttccactggcgatacgctaagcagcattctcaatcagtatggtattgatatgggtgatatcacccaactggctgctgccgacaaagaattgcgtaacctgaaaatcggtcaacaactctcctggacattaaccgcggacggcgaactgcagcgcctcacctgggaagtgtctcgtcgtgaaacccgaacctatgaccgtactgccgctaacggttttaaaatgaccagcgaaatgcagcaaggagagtgggtcaacaatctgctgaaaggtaccgtcgggggaagctttgttgccagcgccagaaacgccggtttaaccagcgccgaagtgagcgcagtgattaaagccatgcagtggcaaatggatttccgcaaactgaaaaaaggcgatgaatttgcggtgttaatgtcacgagaaatgcttgatggtaaacgtgagcaaagccagctgctgggcgtacgtttgcgttcagaaggtaaagattattatgcaatccgcgctgaagatggcaaattctatgatcgtaacggtactggtctggcgaaaggattcttgcgattcccgacggcgaaacagttccgtatctcatctaactttaacccgcgtcgtactaatccggtgaccggtcgcgttgcgccacacagaggtgttgattttgccatgccacaaggtacgccagtgctttcagtgggtgacggtgaagtggtggttgccaaacgtagtggcgcagcaggttattatgtggctattcgtcatggtcgcagctacaccacgcgttatatgcacttgcgcaagatcctggtgaaaccgggacagaaggtgaaacgtggcgaccgtatcgcgctttccggtaataccggacgttcaaccgggccgcatctgcactatgaagtatggataaaccagcaggccgtaaacccgctgacggcaaaactgccgcgtaccgaagggctgaccggctccgatcgtcgcgaattcctggcacaggccaaagagattgtgccgcagctacggtttgattaa

SEQ ID NO: 5375 - DNA, 948 bp, Escherichia coli
atggataatctcgacgttatttgtataggtgccgctattgttgatattccattgcaaccggtcagtaaaaatatctttgatgtggattcttatcctcttgaaagaatcgcaatgaccaccgggggtgatgcaataaatgaagcaacaattatttctcgtctgggccatcgcacagcattaatgagtcgtattggtaaagatgccgcagggcaatttattctcgaccattgccgcaaagagaatattgatattcaaagcctgaagcaggacgtcagcatagatacctctattaacgttggactggtgacggaggatggcgagcggacctttgtcacaaaccgtaacggcagtctgtggaaattgaatattgacgatgttgattttgcgcggttttctcaggcgaaattattatcactggccagtattttcaacagtcctctattggatggtagagcgctaacagaaatttttacgcaagctaaagcccggcagatgattatctgtgccgatatgatcaaaccgcggttgaatgaaacgctgaatgatatttgcgaagcattgagttatgtcgattatctgtttcctaattttgccgaggcaaaattactcaccgggaaagagacactggatgaaattgctgactgctttcttgcgtgcggcgtaaaaacggtggtgattaaaacgggtaaagacggctgctttatcaagcgtggtgacatgacgatgaaggtgccggcggtcgcaggaataaccgctatcgacaccattggtgcgggcgataactttgcttcaggttttattgcagcactgttagaaggcaaaaatctgcgagaatgcgcacgctttgccaatgcaacggcggctatctcggttctaagcatcggcgccaccaccggtgtaaaaaacagaaagctggtcgaacaattgctggaagaatacgaaggataa

SEQ ID NO: 5376 - DNA, 981 bp, Escherichia coli
atgaaaaagatacctttaggcacagcggatataacgctttcgcgaatggggttggggacatgggctattggcggcggtcctgcatggaatggcgatctcgatcgacaaatatgcattgatacgattcttgaagcccatcgttgcggcattaacctgattgatactgcgccaggatataactttggcaatagtgaagttatcgtcggtcaggcgttaaaaaaactgccccgtgaacaggttgtagtagaaaccaaatgcggcattgtctgggaacgaaaagggagtttattcaacaaagttggcgatcggcagttgtataaaaacctttctccgaaatctatccgcgaagaggtagaagccagcttgcaacgtctgggtattgattacatcgatatctacatgacgcactggcagtcggtgccgccattttttacgccgatagctgaaactgtcgcagtgcttaatgcgttaaaggccgaagggaaaattcgcgctataggcgctgctaacgtcgatgctgaccatatccgcgagtatctgcaacatggtgaactggatattattcaggcgaaatacagtatcctcgaccgggcaatggaaaacgaactgctgccgctatgtcgtgataatggcattgtggtacaggtctactctccgctagagcagggattgttgaccgggaccatcacgcgtgattacgttccgggcggcgctcgggcaaataaagtctggttccagcgtgaaaacatgctgaaagtgattgatatgcttgaacagtggcagccactctgtgctcgttatcagtgcacaattcccactctggcactggcgtggatattaaaacagagtgatttaatctccattcttagtggggctactgcgccggaacaggtacgtgaaaatgtcgcggcactgaatatcaacttatcggatgcagacgcaacattgatgagggaaatggcagaggccctggagcgttaa

SEQ ID NO: 5377 - DNA, 711 bp, Escherichia coli
gtgaataaggccccctctttaattgccgctatcgtcctcggactggggattagcgcctgtggttattttgttggcgatggtgttaaacatttaaaaaccaataaccgttatgtaaatgtgcgtgggctttctgaaaaagaagttcgcgcagatacggcagaattaacaattgcgattaactttaagggtaatattcccggcgaactgttcccgaaactggaagacgcgcagaaaaaaattgttgccgaactcaatgctcaggggattaacgagaaagagataaccctgggccaatggacaagcaagcgaacagattccttttatctgaaagatgatcccacaatgccacgctataacgcagacgggtcagtgacgataaaaacccataatgttgctgctgtcgaaaaagtcgtcgcgaaattaaacgaactgcaagtcgctacggagggcgctatcgctgagagcaaagtcgcctatcgctttaatggtattggcgcactgcgcgctgagatgattgccgccgccaccaaagatgcacgcaacgcagcattacaatttgcaacggactcaggtagccaggtggggtcaattagcgatgcctcacaaggcgtgttccagatcttcgccagtggcagtgatgaagatgatcctacggcgattaataaaacggtacgcgtagtcaccaccgtaacctatgcgttgcaggattaa

SEQ ID NO: 5378 - DNA, 735 bp, Escherichia coli
atgtcggctgaaatcagtcgtagaagtctgatgaaaacctccgcacttggcagtctcgcgctggcaagcagtgctttcactttgccgttttcccaaatggtccgagcggcacaggcaccggtagaagagaaagcggtctggagttcctgcaccgttaactgcgggagccgctgtctgttacgtttgcatgtgaaagatgacaccgtgtactgggtggagtctgatacgacaggtgacgacgtttacggtaatcatcaggttcgggcatgtttacgcgggcgctctatccgccgacggatgaatcatcctgacaggttgaaatatcccatgaagcgcgtcggcaagcgcggtgaaggtaaatttgaacggataagttgggacgaagccctggataccatcagtgataatcttcggcggatcctaaaagattacggcaatgaggctgtacatgttctctatggaacaggcgtagatggcggaaacatcaccaactcaaacgtcccgtaccgtctgatgaactcttgcggtggttttctcagtcgctatggcagctacagtaccgcacagatcagtgccgcaatgagttatatgttcggtgccaatgatggcaacagcccggatgatatcgccaatacgaaactggtcgttatgttcggaaataacccggcagaaacgcggatgagcggctttccgtctttacatggacagatgccatcgaccatggtacggaaatga

SEQ ID NO: 5379 - DNA, 2427 bp, Escherichia coli
atgtccaaaaatgaacaaatggtgggcatcagccgcagaacactcgttaaatctactgcgataggttctctggcgctggctgcaggcggtttttctttgccgtttaccctgcgcagtgcagcagcagcggtacaacaggccagcgaaaaagtggtctggggtgcctgttccgtcaactgtggtagccgctgtgcacttcgtctgcatgttaaagataatgaagtgacctgggtggaaactgacaacaccggcagcgacaagtatggcaaccatcaggtacgcgcctgtttgcgcggtcgctccatccgtcggcgtattaatcatcccgatcgcctgaattacccaatgaaacgcgtgggcaaacgcggcgaaggcaaattcgaacggattagctgggatgaagccctggatactatcgccagtagcctgaaaaaaaccgtcgaacaatatggcaatgaggctgtatatattcagtactcttcggggattgttggcggcaatatgacccgctcttctccatcagcctcggcggtcaaacgcctgatgaactgctacggcggttcactaaaccagtatggctcctacagcactgcgcaaatttcctgtgccatgccctacacctacggcagtaatgatggcaacagcaccacggatattgaaaacagcaagctggtcgtgatgtttggtaacaacccggctgaaacccgcatgagcggcggtggcatcacttatcttcttgaaaaagcgcgcgagaaatcgaacgcaaaaatgattgttatcgatccgcgatataccgatacggctgctggtcgtgaagatgaatggcttcctattcgcccgggcaccgatgccgcgctggttgcgggtattgcctgggtattgattaacgaaaatctcgttgatcaaccttttctcgataaatactgcgtcggctatgacgaaaaaaccttacccgcagatgcacccaaaaatggtcactataaagcctatattcttggtgaaggtgatgataaaacagcgaaaacgccgcagtgggcttcgcaaattacaggtatcccggtagaccgtatcatcaaactggcgcgtgaaattggcacagcaaaacccgcttatatctgccagggctgggggccgcaacggcaggcaaacggcgagctgacggcacgcgctattgctatgttgcctattttgacgggcaatgtcggcatcagcggcggaaatagtggtgcgcgtgaatcgacctacaccattaccatcgaacgcctgccggtgctggataatccggtcaaaacgtcaatctcctgcttcagttggacagatgctatcgatcatggcccgcaaatgacggcaatccgcgacggcgtccggggcaaagataaactagatgtgcccattaagttcatctggaactacgcgggaaataccctggttaatcagcattctgacatcaacaaaacgcatgaaattctgcaggacgaatcgaaatgcgaaatgattgtggtcatcgaaaactttatgacctcatcggcaaaatatgccgacattctgctgccagacctaatgaccgttgagcaggaagatattattcctaacgactacgccggtaacatgggatatctcattttcctccagcctgtcaccagcgaaaaattcgaacgcaaaccaatttactggatcctgagtgaagtcgcgaaacgtcttggacctgacgtctatcaaaagttcactgaaggtcgcacgcaagaacaatggttacaacatctgtacgccaaaatgcttgccaaagatccggcgttaccgtcttacgacgaattaaaaaaaatgggtatctataagcgtaaagatcccaatggtcattttgtcgcctacaaagcatttcgtgacgaccccgaggcaaatccacttaaaacgccttccggtaagattgaaatttattccagcaagctggcggaaattgcccgtacctgggaactggaaaaagatgaagtgataagcccactgccggtttatgcctcaacctttgaagggtgggactcccctgaacgtagtaccttcccactgcaactgtttggtttccattacaaatcccgtacgcactcgacctacggcaacattgatgtcctgaaggcagcctgccgtcaggaagtgtggatcaaccctatagatgcacagaaacgtgggattgccaacggcgatatggtgcgggtgtttaaccatcgtggcgaagttcggctaccagccaaagtgacaccacgcattctccctggagttagtgctatgggccagggagcctggcacgaggccaatatgtctggcgataaaatcgaccacggcggctgtgtgaatacgctaaccactctgcgcccttcaccactggcgaagggaaacccgcagcacactaatctggtcgagatcgaaaaaatataa

SEQ ID NO: 5380 - DNA, 1368 bp, Escherichia coli
atgacaatagaaaaacacgaaagaagcactaaggatttggtgaaagcagcagtatcgggatggctgggcactgcgcttgaatttatggatttccagttatattcgctcggcgcagcgttagtgtttcatgaaatattttttcctgaatcatcaacggcaatggcgttaattctggcaatgggaacctatggtgcaggttatgtggcacgtattgtcggagcatttattttcggcaaaatgggcgacagaatagggcgtaaaaaagtgctctttattaccatcaccatgatggggatctgtaccaccttaattggtgtgttaccgacttatgcacaaattggtgtttttgcccccatcttgctggtgacgctgcgtattattcaggggttgggtgcaggtgcggaaatttccggtgccggtacgatgctggcggaatatgcgccaaaaggtaagcgcggaattatctcctcatttgtggctatgggaactaactgcggaaccttgagcgcaacggcaatctgggcctttatgttcttcattctcagtaaagaggaactgctggcgtggggatggcgtatacctttcctggcgagcgttgtcgtgatggtctttgctatctggttgcgtatgaatctgaaagaaagcccggtctttgagaaggttaacgacagcaaccaaccgacagcaaaacctgcacctgctggtagcatgttccagagcaaatccttctggctggcaacagggctgcgttttggtcaggctggtaactcaggtttaattcagactttccttgcaggctatttagtgcagacgttattgtttaacaaagcaattccaacagatgcattgatgatcagttcgattctcggctttatgaccattccgttccttggttggttatccgataaaattggtcgccggatcccgtatattattatgaatacctctgcgattgtgctggcatggccaatgctttctatcatcgtagataaaagctatgccccgagcaccattatggttgcactgattgtgattcataactgtgcggtgcttggattatttgctctggaaaacattaccatggcagaaatgttcggctgtaaaaaccgctttacccgaatggctatttctaaagaaattggtggtcttatcgcttccggttttggtcctatcctggcggggattttctgcaccatgacggaatcctggtatccgatcgccattatgatcatggcatattctgtgattggtttaatctctgcgctgaaaatgccagaagtgaaagaccgtgatttaagtgcgctgcaagacgccgcagaagatcaaccacatgttgtaagagctgcgcaaccgtccagaagtctgtaa

SEQ ID NO: 5381 - DNA, 1461 bp, Escherichia coli
atgggaaatcatttgttatcagcaaaagcgacgctccctgtttatgatcgtaataacctggccccaagaattgttcatttaggctttggtgcatttcaccgtgcgcatcagggcgtgtatgccgatattcttgctacggaacatttcagtgactggggatattatgaggtcaacttaatcggcggcgaacagcaaattgccgatttacaacagcaagataatctttataccgttgcggaaatgtcggctgatgcgtggacggctcgcgtcgttggcgtcgttaaaaaagccttacacgtacaaatagacggcttagaaaccgtgttggctgcgatgtgtgaaccgcaaatcgcgattgtctctctgacaatcaccgaaaaagggtatttccactctccggcgaccggacagttaatgctcgatcacccgatggtcgttgccgacgtgcaaaatccccaccagccgaaaactgcaacaggggtgattgttgaggcgctggctcgccgtaaagcggcaggacttcccgcatttaccgtcatgtcatgtgacaacatgccagaaaacggtcatgttatgcgtgacgttgtcacttcctatgcgcaagccattgatgtaaaactggcacaatggatcgaagataacgtgactttcccatcaacaatggtggaccgtattgtgcccgcagtgacagaggatacgctggcgaaaatcgaacaacttaccggtgtgcgcgatccggcaggcgttgcctgtgaacctttccgccagtgggtaatagaagataactttgttgccggacgtccggaatgggaaaaagcgggagtcgaactggttagtgatgtgctgccttatgaagagatgaagttgcgcatgctcaatggcagtcattcattcctggcgtatctgggctatcttgccggatatcagcacattaatgactgcatggaggatgaacattatcgtcatgcggcgtataccttaatgttgcaggaacaagcgccgacgctgaaagtgcagggcgttgatttgcaagattacgctaaccgattaattgaacgctatagcaacccggcgttacgtcatcgaacctggcagattgcgatggatggcagccagaaattgccacagcggatgttggattctgttcgctggcatctggcgcatgacagcaagttcgatctgctggcgctgggcgtcgcgggttggatgcgttatgtcggtggtgttgatgaacagggaaatccgatagaaatcagtgacccactgttacctgttattcagaaggcagtacaaagtagtgctgaagggacagcgcgcgtgcagtcattgttggcgattaaggcgatatttggtgatgatttgccagataatagcttgtttacgactaaagtgacggaagcgtacttgtctttattagcgcatggcgcgaaagcgacagtggcgaaatattccgtgaagtaa

SEQ ID NO: 5382 - DNA, 747 bp, Escherichia coli
atgatcgttttagtaactggagcaacggcaggttttggtgaatgcattactcgtcgttttattcaacaagggcataaagttatcgccactggtcgtcgccaggagcggttgcaggagttaaaagacgaactgggagataatctgtatatcgcccaactggacgttcgcaaccgcgccgctattgaagagatgctggcatcgctccctgccgagtggagcaatattgatatcctggtaaacaatgccggcctggcgttgggcatggagcctgctcataaagccagcattgaagactgggaaacgatgattgataccaacaacaaaggcctggtatatatgacgcgcgccgtcttaccgggtatggttgaacgtaatcatggtcatattattaacattggctcaacggcaggtagctggccgtatgccggtggtaacgtttacggtgcgacgaaagcgtttgttcgtcaatttagcctgaatctgcgtacggacctgcatggtacggcggtgcgcgtcaccgacatcgaaccgggtctggtgggtggcaccgagttttccaatgtccgctttaaaggcgatgacggtaaagcggaaaaaacctatcaaaataccgttgcattgacgccagaagatgtcagcgaagccgtctggtgggtgtcaacgctgcctgctcacgtcaatatcaatacactggaaatgatgccggttacccaaagctatgccggactgaatgtccaccgtcagtaa

SEQ ID NO: 5383 - DNA, 2046 bp, Escherichia coli
atgacaacaatgaatcctttccttgtgcaaagcacactgccgtatctggctccccattttgatcaaattgccaatcatcactatcgcccggcattcgatgagggaatgcagcaaaagcgggcagaaattgctgccatcgcgcttaacccgcaaacacctgatttcaacaatactattctggcactggaacaaagcggagaattacttacccgcgttaccagcgtcttttttgcgatgactgcggcgcataccaatgatgaattacagcgtcttgatgaacagttttccgctgaactggcggaacttgcgaatgatatctatctgaacggggaattattcgcgcgggtagatgctgtctggcaacgccgtgaatccctggggcttgatagtgaatccatccgcctggtggaggtgattcatcaacgttttgtccttgccggagccaaacttgagcaagctgataaagcaaaattaaaagtactgaatacagaagctgcgaccctgaccagccagtttaaccagcggttactggcagcaaataaatccggcggtctggttgtgaacgatatcgcgcagctggcaggaatgagtgaacaagagattgcgctggcggcagaggcggctcgcgagaaaggtctggataacaactggctgattccgctgctgaataccacccagcaaccagcgcttgctgaactgcgcgatcgcgcgacgcgtgaaaaactgtttactgcgggctggaggcgagcggaaaaaaatgatgccaatgatacccgcgctatcattcaacgtctggtggagatccgcgcgcagcaggcgaaactgcttggttttcctcattatgccgcatggaaaatcgccgatcagatggcaaaaacgccagaagcagcgctcaactttatgcgggaaattgttccagcggcgcgtcaacgtgcgagcgatgaattagcctccatacaggcggttatcgataagcagcagggcgggtttagcgcgcagccgtgggactgggcattttatgccgagcaggtaagacgtgagaaattcgatctcgatgaagcgcagctcaagccatattttgaattaaacacggtgttgaatgaaggcgtattctggactgcgaatcagctcttcggtattaagtttgtcgaacgttttgatattcctgtctaccatcctgacgttcgtgtgtgggaaatttttgatcataatggcgtggggctggcgttattttacggtgatttcttcgcccgtgattcaaaaagcggcggcgcatggatgggcaattttgttgagcaatcaacgctgaatgaaacgcacccggtaatttataacgtctgcaattatcagaaacccgctgccggtgagcctgcgttgttactctgggatgatgtaataaccttattccatgaatttggtcatacgctgcacggcctttttgcccgccagcgttatgccacgctttccggcaccaacacgccgcgtgattttgtcgaatttccgtcgcaaatcaacgaacactgggcaacacatccgcaggtattcgctcgctacgcccggcattatcagagcgggaccgcaatgcctgacgaacttcaacagaaaatgcgtaatgccagcctgttcaataaagggtatgagatgagcgaactgcttagcgccgcacttctcgatatgcgctggcattgcctggaagaaaacgaagcaatgcaggatgtcgatgatttcgaattgcgggcgctggtggcggaaaatatggatcttcctgctataccgccacgctatcgcagcagttatttcgcccatatttttggtggcggatatgccgcaggttattacgcttatctgtggacgcaaatgttggccgatgatggttaccagtggtttgttgagcagggcggattaacgcgtgaaaatgggcggcgttttcgcgaggcgattctttccagaggtaacagcgaagatctggaacgcctgtaccgacaatggcgcggtaaggcacctcagattatgccgatgttgcaacatcgtggattgaacgtataa

SEQ ID NO: 5384 - DNA, 891 bp, Escherichia coli
atgatcaagaagacaacggaaattgatgccatcttgttaaatctcaataaggctatcgatgcccactaccagtggctggtaagtatgtttcacagcgtggtcgcgagagatgccagtaagccagaaataacggataaccattcttatggactgtgccagtttggtcggtggattgatcatctggggccactcgataacgatgaattaccttacgttcggctaatggattctgcccatcaacatatgcataactgtggtcgggaattaatgctggctattgttgaaaatcactggcaggacgcgcatttcgacgcttttcaggaagggttgctttcttttactgcggcattaaccgattacaaaatttatttgcttacggtccgtagcaatatggatgttctgacgggattgccgggtcgtcgggttcttgatgaatccttcgatcatcagttacgcaatgctgaacctctgaatctttatttaatgttgttggatatagaccgatttaaattggttaatgatacctacgggcatttaatcggcgatgtagtattacgcaccctcgcaacttacttagccagttggacgcgcgattacgaaacggtttatcgctacgggggcgaagaatttatcattattgtcaaagcgactaatgatgaagaagcatgtcgtgcaggtgtcagaatttgccagttagtcgataaccatgccatcacacattctgaagggcatatcaacattaccgtgactgctggtgtgagtcgtgcatttcctgaagagcctctggatgtggtcattggaagagcggacagggcaatgtatgagggtaagcaaaccggaaggaatcgctgcatgtttattgacgaacaaaatgtgattaaccgagtttaa

SEQ ID NO: 5385 - DNA, 900 bp, Escherichia coli
atgtcgcgaaaagatggggtgttggcgctactggtagtggttgtatgggggctaaattttgtggtcatcaaagtggggcttcataacatgccaccgctgatgctggccggtttgcgctttatgctggttgctttcccggccatcttttttgtcgcacgaccgaaagtaccactgaatttgctgctggggtatggattaaccatcagttttgcgcagtttgcttttctgttctgcgccattaactttggtatgcctgctggactggcttcgctggtgttacaggcacaggcgttttttactatcgtgcttggcgcgtttactttcggtgagcgactgcatggcaaacaattgacggggatcgccttagcgatttttggcgtactggtgttaatcgaagatagtctgaacggtcagcatgtggcgatgctcggctttatgttgaccctggcggcagcatttagttgggcgtgtggcaacatcttcaataaaaagatcatgtcgcacgcaacgcgtccggcggtgatgtcgctggtaatctggagcgcattaatcccaatcattcccttctttgctgcctcgctgattctcgatggttccgcaaccatgattcacagtctggttactatcgatatgaccaccatcttgtctctgatgtatctggcatttgtagcgacaattgttggttatgggatctggggaacactgcttggacgctatgaaacctggcgggttgcaccgttatcgttactggtgcctgtagttggactggcaagtgcggcactattgctggatgaacgcttaacgggtctgcaatttttcggtgcggtgctcattatgaccgggctgtatatcaatgtatttggcttgcggtggcgtaaagcggtaaaagtgggaagttaa

SEQ ID NO: 5386 - DNA, 1191 bp, Escherichia coli
atgacaacaaacactgtttcccgcaaagtagcgtggctacgggtcgttacgctggcagtcgccgcctttatcttcaataccaccgaatttgtccctgttggcctgctctctgacattgcgcatagttttcacatgcaaaccgctcaggtcggcatcatgttgacaatttatgcatgggtagtggcgctaatgtcattgccttttatgttaatgaccagccaggttgaacgccgcaaattactgatctgcctgtttgtggtgtttattgccagccacgtactgtcgtttttatcgtggagttttaccgttctggtgatcagtcgcattggtgtggcttttgcacatgcgattttctggtcgattacggcgtctctggcgatccgtatggctccggccgggaagcgagcacaggcattgagtttaattgccaccggtacagcactggcaatggtattaggtttacctctcgggcgcattgtggggcagtattttggctggcgaatgaccttcttcgcgattggtatcggggcgcttcttacccttttgtgcctgattaagttacttcccttgctgcccagtgagcattccggttcattgaaaagcctcccgctattgttccgccgcccggcattgatgagcatttatttgttaactgtggtggttgtcaccgcccattacacggcatacagctatatcgagccttttgtacaaaacattgcgggattcagcgccaactttgccacggcattactgttattactcggtggtgcgggcattattggcagcgtgattttcggtaaactgggtaatcagtatgcgtctgcgttggtgagtacagcgattgcgctattgctggtgtgcctggcactgctgctacctgcggcgaacagtgaaatacacctcggggtgctgagtattttctgggggatcgcgatgatgatcatcgggcttggtatgcaggttaaagtgctggcgctggcaccagatgccaccgacgtcgcgatggcgctattctccgggatatttaatattggaatcggcgcgggtgcgttggtaggtaatcaggtgagtctgcactggtcaatgtcgatgattggttatgtgggcgcggtgcctgcttttgctgcgttaatatggtcaatcatcatttttcgccgctggccagtgacactcgaagaacagacgcaatag

SEQ ID NO: 5387 - DNA, 564 bp, Escherichia coli
atgaaactcaaacatgtcggtattattgtcgtttctgtgttggcgatgtcgtctgctgcggtaagcgcagccgagggtgatgaatcagtaacgaccactgttaatggcggtgtaattcattttaaaggtgaagtggtaaatgccgcttgtgcgattgattcagaatcaatgaaccaaacggttgagctgggtcaggttcgttcttctcgcctggctaaagcgggtgacctcagctccgccgttggcttcaatatcaagctgaatgattgtgataccaatgtttccagtaatgcagctgttgcattcctgggtactactgtcaccagtaatgacgatacattagcgctgcagagttcagcggcaggctctgcccaaaatgtcggtatccaaattttggaccgtacaggggaggtattagtacttgatggtgctacttttagcgctaaaactgacttgattgatggcacgaatatactgccgttccaggctcgttatattgctctcgggcagtcagtagctggtactgcaaatgctgatgcgaccttcaaagttcaatatttataa

SEQ ID NO: 5388 - DNA, 711 bp, Escherichia coli
atgcaaactacgcgtaccccctactctgtttcctttatggcgacagtgttacttttatttctctttgcttgccatagcaccattgccaacgcagctgtcgcacttggtgcgacgcgggtaatttatccggcaaaccagaaacaggttttattgcctgtcacgaataatgatcctgccagtgtctatctcattcagtcatggatagaaaatgcgggtgaccagaaagatacccagtttgtcattaccccaccgcttttttccatgcaaggtaaaaaagagaatacgcttcggataatcaacgccactaatcatcagttaccaggcgaccgtgaaagcctgttctgggttaatgttaaagctatccctgctatggaaaaagaccagaagaatgagaatacattacagctggcaattattagccgcataaaaatgttttatcgccccacgcatctggcaatggcacctgaagaagcgcctgcaatgcttcggtttcgtcgcagcggtagcatactcactcttattaatccaacgccctacttcattaccgtaacaaatatgaaagcaggaaatagcaatctcccaaacaccatggtgccgccaaaaggtgaagtatcggtggatatcccgcatgctgtaaccggggatatcagttttcagacaatcaatgattacggtgcattaactccgcgtattaaggcaaccatgcagtaa

SEQ ID NO: 5389 - DNA, 2280 bp, Escherichia coli
atgaagaaaaaaattgaatcctaccagggagctgccggtggttggggtgctgttaaatccgtagcgaatgcagtacgtaagcagatggatatacgccaggatgttattgccatgtttgacatgaataagccagagggctttgactgtccgggatgtgcatggccagatcctaagcacagtgcgtcattcgacatttgtgaaaacggcgcaaaagcaatcgcctgggaagtcacggataagcaggtaaatgcctctttctttgctgagaatacggttcaatcattacttacctggggagatcacgagcttgaggctgcgggacgtctcactcagcctttgaaatatgatgacgtcagcgactgttacaagccattaagctggcaacaagctttcgacgaaattggcgctcgccttcaaagctatagtgatcccaatcaggttgaattctatacttcggggcgcacttccaatgaagctgcctttctttatcagctttttgcccgtgaatacgggagcaataactttcccgactgctccaacatgtgccatgaaccgaccagtgtgggattggcagcgagtatcggtgtgggtaaagggaccgtgttgctggaagactttgagaaatgcgatttagtcatttgcattgggcataaccctggtacaaaccaccctcgcatgctgacttcgttgcgcgctttagtgaaacggggagcgaaaatgatcgctatcaaccctctacaggaacgtggcctggagcgatttaccgcaccgcaaaacccgtttgaaatgctgacgaactctgagactcagttagccagtgcctactataacgtgcgcattggtggcgatatggcgttgctcaaggggatgatgcgcctgttaattgagcgcgatgatgctgcaagcgccgcaggtcggccctcattgctggatgacgaatttattcaaacgcataccgtcggctttgacgagctacgccgtgacgtgctcaattccgagtggaaagatatcgaacgtatttctggactaagtcagacacaaatcgccgaacttgctgatgcatatgccgctgccgaacgaaccattatctgttacggaatggggatcactcagcacgaacatggtacccagaacgtacagcaactggtcaatctgctgttgatgaaaggtaacattggcaagcctggtgcgggtatctgcccactacgaggtcactctaatgtacagggcgaccgaaccgtcggtatcaccgagaaaccgtctgcagagtttctggctcgcctgggtgagcgctatggcttcaccccacctcatgcacctggacatgctgcaatagccagcatgcaagctatatgtacggggcaagctcgagcattgatctgcatggggggcaactttgcactggcaatgccagatcgggaagcgagcgctgtaccgttaacgcaattagatctggcggtacacgtagccactaagcttaaccgctctcatctgctgaccgcacggcatagctatattctgccggttctgggacgtagcgagattgacatgcaaaaaagcggtgcgcaggcggtaaccgttgaggattcaatgtcgatggttcatgcctcgcgtggtgtgttaaaacccgccggtgtaatgctgaaatcagagtgtgcagtggtcgcgggaatcgcgcaggcagcactaccccagagcgtggtagcctgggagtatctggtggaagattatgatcgcattcgcaatgacattgaagctgtgctgccagagtttgccgactataaccagcgcatccgtcatcctggtggttttcacctgataaacgcagctgctgaaaggcgctggatgacgccgtcaggtaaggctaatttcattaccagcaaagggctgttagaagatccttcttcagcgtttaacagtaagctggtcatggcgacagtacgcagccacgatcagtacaacacgacgatttatggtatggatgatcgctatcgaggtgtattcggtcaacgagatgtggtctttatgagtgctaaacaagctaaaatttgccgtgtaaaaaacggcgaaagagttaatcttattgcactcacgccagacggtaaacgtagctcacgccgcatggatagattaaaagtggtcatttaccctatggctgaccgctcactggtgacctatttcccagaatcgaatcacatgctaacacttgataaccacgatccattaagtggcattcctggctataaaagtattccggttgaattagaaccatcaaattaa

SEQ ID NO: 5390 - DNA, 795 bp, Escherichia coli
atggtatatataataatcgtttcccacggacatgaagactacatcaaaaaattactcgaaaatcttaatgctgacgatgagcactacaagattatcgtacgcgacaacaaagactctctattattgaaacaaatatgccagcattatgcaggcctggactatattagtggaggtgtatacggctttggtcataataataatattgcggtggcgtatgtaaaggaaaaatatagacccgcagatgatgattacattttgtttttgaatcccgatatcatcatgaagcatgatgatttgctgacatatattaaatatgtcgaaagtaagcgttatgcttttagtacattatgcctgttccgagatgaagcgaaatctttacatgattattccgtaagaaaatttcctgtgctttctgattttattgtgtcatttatgttagggattaataaaacaaaaattcctaaagaaagtatctattctgatacggttgttgattggtgcgcaggatcatttatgctggtacgtttttcagattttgtgcgtgtaaatggcttcgatcaaggttactttatgtactgtgaagatattgacctgtgcttgaggcttagcctggctggtgtcagacttcattatgttcccgcttttcatgcgatacattatgctcatcatgacaatcgaagttttttttcaaaagccttcagatggcacttaaaaagtacttttagatatttagccagaaaacgtattttatcaaatcgcaactttgatcgaatttcatcagtttttcacccgtaa

SEQ ID NO: 5391 - DNA, 1119 bp, Escherichia coli
atgggaaaaagcatagtcgttgtttctgcggtcaattttaccactggcggtccatttaccattttgaaaaaatttttggcagcaactaataataaagaaaatgtcagttttatcgcattagtccattctgctaaagagttaaaagaaagttatccatgggttaaattcattgagtttcctgaggttaaagggtcgtggctaaaacgtttgcactttgaatatgtagtttgtaaaaaactttcaaaagagctgaatgctacgcattggatttgtctgcatgatattacggccaatgtcgtcactaaaaaaagatatgtgtattgtcataaccctgcccctttttataaaggaattttattccgtgaaattcttatggagcctagctttttcttatttaaaatgctatacgggctgatatataaaataaacattaaaaaaaatactgcagtgtttgttcaacaattctggatgaaagaaaaatttatcaagaaatattctataaataacatcattgtcagtcggccagaaattaaattatctgataaaagccaacttactgatgatgattctcaatttaagaataacccttctgagttgacaatattttaccctgctgttccacgagtatttaaaaattacgagcttattattagtgcagcaaggaaattgaaagaacaatccaatattaaatttctgcttactatcagtggtacagaaaatgcgtatgcaaaatatattatcagtcttgcagaaggactggataatgttcatttcctcgggtacttggataaagaaaaaatcgatcattgttataatatttcagatatagtttgttttccctctaggttagaaacatggggattgccgttgtctgaggctaaagagcgaggtaagtgggtattagcatcagatttcccatttactagagaaactcttggtagttatgaaaagaaagctttttttgattctaataacgatgacatgttagttaaacttattattgacttcaaaaaaggtaacctcaaaaaagatatctctgatgcaaatttcatttatcgtaatgaaaatgtattagttgggtttgatgaactagttaattttattactgaagaacattga

SEQ ID NO: 5392 - DNA, 591 bp, Escherichia coli
atgatcttaaaactcgctaaacgatatggtctctgtggttttattcggcttgttagagatgtcttattgactcgtgtattttaccggaactgtagaattattcgatttccctgctatattcgcaatgatggtagcattaattttggtgaaaatttcacaagtggagtcggtctcaggctggatgcatttggacgtggcgtgatttttttttccgataatgtgcaagttaacgactatgttcatatcgcctcaattgagagcgttacgataggtcgggatacgcttattgcaagtaaagtatttattaccgatcataatcacggttcctttaagcactctgatccaatgagttcgccaaatatacctccagacatgcgcacgttggaatcttcagctgttgtaattggccagagggtttggttgggtgagaatgtgacggttttgcctggaacaattattggtaatggagtcgtagtcggcgccaattctgttgttagaggttctattcccgaaaatactgtcattgcgggagtaccagcaaaaatcataaagaaatacaatcatgagaccaaattatgggaaaaagcatag

SEQ ID NO: 5393 - DNA, 993 bp, Escherichia coli
atgtattttttgaatgatttaaatttctctagacgcgatgctggatttaaagcaagaaaagatgcactggacattgcttcagattatgaaaacatttctgttgttaacattcctctatggggtggagtagtccagagaattattagttctgttaagcttagtacatttctctgcggtcttgaaaataaagatgttttaattttcaatttcccgatggccaaaccattttggcatatattgtcattctttcaccgccttctaaaatttagaatagtacctctgattcatgatattgatgaattaagaggaggagggggtagtgattctgtgcggcttgctacctgtgatatggtcataagtcacaatccacaaatgacaaagtaccttagtaaatatatgtctcaggataaaatcaaagacataaaaatatttgattacctcgtctcatctgatgtggagcatcgagatgttacggataagcaacgaggggtcatatatgctggcaacctttctaggcataaatgttctttcatatatactgaaggatgcgattttactctctttggtgtcaactatgaaaataaagataatcctaaatatcttggaagttttgatgctcaatctccggaaaagattaacctcccaggcatgcaatttggactcatttgggatggagattctgtcgaaacctgtagtggtgcctttggcgactatttaaagtttaataaccctcataagacatctctttatctttcaatggaacttccagtatttatatgggataaagccgcccttgcggatttcattgtagataatagaataggatatgcagtgggatcaatcaaagaaatgcaagagattgttgactccatgacaatagaaacttataagcaaattagtgagaatacaaaaattatttctcagaaaattcgaacaggaagttacttcagggatgttcttgaagaggtgatcgatgatcttaaaactcgctaa

SEQ ID NO: 5394 - DNA, 1167 bp, Escherichia coli
atgatctatcttgtaattagtgtctttctcattacagcatttatctgtttatatcttaagaaggatatattttatccagccgtatgcgttaatatcatcttcgcactggtcttattgggatatgaaataacgtcagatatatatgcttttcagttaaatgacgctacgttgatttttctactttgcaatgttttgacatttaccctgtcatgtttattgacggaaagtgtattagatctaaatatcagaaaagtcaataatgctatttatagcataccatcgaagaaagtgcataatgtaggcttgttagttatttctttttcgatgatatatatatgcatgaggttaagtaactaccagttcgggactagcttacttagctatatgaatttgataagagatgctgatgttgaagacacatcaagaaatttctcagcatacatgcagccaatcattctaactacttttgctttatttatttggtctaaaaaatttactaatacaaaggtaagtaaaacatttactttacttgtttttattgtattcatctttgcaattatactgaatactggtaagcaaattgtctttatggttatcatctcttatgcattcatcgtaggtgttaatagagtaaaacattatgtttatcttattacagctgtaggtgttctattctccttgtatatgctctttttacgtggactgcctggggggatggcatattatctatccatgtatttggtcagccctataatcgcgtttcaggagttttattttcagcaagtatctaactctgccagttctcatgtcttttggttttttgaaaggctgatggggctattaacaggtggagtctctatgtcgttgcataaagaatttgtgtgggtgggtttgccaacaaatgtttatactgctttttcggattatgtttatatttccgcggagctaagctatttgatgatggttattcatggctgtatttcaggtgttttatggagattgtctcgaaattacatatctgtgaaaatattttattcatattttatttataccttttctttcattttttatcatgaaagcttcatgactaatattagcagttggatacaaataactctttgtatcatagtattctctcaatttcttaaggcccagaaaataaagtga

SEQ ID NO: 5395 - DNA, 1104 bp, Escherichia coli
atgtacgattatatcattgttggttctggtttgtttggtgccgtttgtgcgaatgagttaaaaaagctaaacaaaaaagttttagtgattgagaaaagaaatcatatcggtggaaatgcgtacacagaggactgtgagggtatccagattcataaatatggtgcacatatttttcataccaatgataaatatatatgggattacgttaatgatttagtagaatttaatcgttttactaattctccactggcgatttataaagacaaattattcaaccttccttttaatatgaatactttccaccaaatgtggggagttaaagatcctcaagaagctcaaaatatcattaatgctcagaaaaaaaagtatggtgacaaggtacctgaaaatttggaggagcaggcgatttcattagttggggaggacttataccaagcattgataaagggttatacggagaagcagtggggaagaagtgcaaaagaattgcctgcatttattattaagcgaatcccagtgagatttacgtttgataacaattatttttccgatcgctatcaaggtattccggtgggaggctacactaagcttattgaaaaaatgcttgaaggtgtggacgtaaaattaggcattgattttttgaaagacaaagattctctagcgagtaaagcccatagaatcatctacactggacccattgatcagtacttcgactataggtttggagcgttagaatatcgctctttaaaatttgagacggaacgccatgaatttccaaacttccaagggaatgcagtaataaatttcactgatgctaatgtaccatataccagaataattgagcataaacattttgactatgttgagacaaagcatacggttgttacaaaagaatatccattagagtggaaagttggcgacgaaccctactatccagttaatgataataaaaacatggagctttttaagaaatatagagagttagctagcagagaagacaaggttatatttggcgggcgtttggccgagtataaatattatgatatgcatcaagtgatatctgccgctctttatcaagtgaaaaatataatgagtacggattaa

SEQ ID NO: 5396 - DNA, 1248 bp, Escherichia coli
atgaatacgaataaattatctttaagaagaaacgttatatatctggctgtcgttcaaggtagcaattatcttttaccattgcttacatttccatatcttgtaagaacacttggtcctgaaaatttcggtatattcggtttttgccaagcgactatgctatatatgataatgtttgttgaatatggtttcaatctcacagcaactcagagtattgccaaagcagcagatagtaaagataaagtaacgtctattttttgggcggtgatattttcaaaaatagttcttatcgtcattacattgattttcttaacgtcgatgaccttgcttgttcctgaatataacaagcatgccgtaattatatggtcgtttgttcctgcattagtcgggaatttaatctaccctatctggctgtttcagggaaaagaaaaaatgaaatggctgactttaagtagtattttatcccgcttggctattatccctctaacatttatttttgtgaacacaaagtcagatatagcaattgccggttttattcagtcaagtgcaaatctggttgctggaattattgcactagctatcgttgttcatgaaggttggattggtaaagttacgctatcattacataatgtgcgtcgatctttagcagacggttttcatgtttttatttccacatctgctattagtttatattctacgggaatagttattatcctgggatttatatctggaccaacgtccgtagggaattttaatgcggccaatactataagaaacgcgcttcaagggctattaaatcctatcacccaagcaatatacccaagaatatcaagtacgcttgttcttaatcgtgtgaagggtgtgattttaattaaaaaatcattgacctgcttgagtttgattggtggtgctttttcattaattctgctcttgggtgcatctatactagtaaaaataagtatagggccgggatatgataatgcagtgattgtgctaatgattatatcgcctctgccttttcttatttcattaagtaatgtctatggcattcaagttatgctgacccataattataagaaagaattcagtaagattttaatcgctgcgggtttgttgagtttgttgttgatttttccgctaacaactctttttaaagagattggtgcagcaataacattgcttgcaacagagtgcttagttacgtcactcatgctgatgttcgtaagaaataataaattactggtttgctga

SEQ ID NO: 5397 - DNA, 558 bp, Escherichia coli
atgaatgtgattagaactgaaattgaagatgtgctaattctggagccaagagtatttggtgatgatagaggtttcttttatgagagctttaatcaatcagcatttgaacatattctaggctatccggtcagctttgttcaagacaatcactcacgttcatcaaaaaatgtactcagaggccttcactttcaacgcggcgagtacgcacaagataaacttgtacgctgcactcatggagcagtttttgatgttgctgttgatattcgacccaattcggtatcctttggtaaatgggttggtgttctgctttcagctgataataagcagcagttgtggataccaaaagggtttgctcatggctttttggttctgtctgatatcgctgaatttcaatataaaactacaaactattatcatcctgaaagcgattgtggaatatgttggaatgatgaacgcattgcaattgattggccccaaacatcagggttaatcctttcgccaaaagatgaaaggctctttacgttagatgagcttatcagattaaaattaattgcatga

SEQ ID NO: 5398 - DNA, 3078 bp, Escherichia coli
gtgaagttttttgccctcttcatttaccgcccggtggcgacgattttactgtcggtcgccattaccctgtgcggcatactgggtttccgtatgctgccagtcgccccgctgccgcaggtcgattttccggtgatcatggtcagcgcctcgctgcccggtgcgtcaccagaaacaatggcgtcttccgttgccacgccgctggagcgctcacttgggcgcattgccggagtcagcgaaatgacctccagcagttcgctcggcagcacgcgcattattttgcagtttgattttgaccgggatatcaacggcgcagcgcgcgatgtgcaggcggcgatcaacgccgcgcaaagtctgctacccagcgggatgcccagccgtccgacctatcgcaaagcgaacccatcggatgcgccaattatgatcctcacgctgacatccgatacttattcgcagggtgaactgtacgatttcgcctcgacacagctggctccgacgatttcgcaaatcgacggtgtcggtgatgtcgatgttggcggcagctcgctgcccgccgtacgcgtcgggctgaatccgcaggcgctgtttaatcagggcgtctcgctggacgacgtacgcaccgccatcagcaatgccaacgtgcgtaaaccgcagggggcgctggaagatggtactcaccgctggcagatccagactaacgatgaactgaaaaccgccgctgaatatcagccgctgattattcattacaacaacggcggagcggttcgtctgggcgatgtggcgacggtgaccgactcagtacaggatgtgcgcaacgccgggatgaccaacgccaaaccggctattttgctgatgatccgcaagctgccggaagccaatattatccagacggtagacagcatccgcgcccgtctgccggaattacaatccaccatcccggcagcaattgatctgcaaattgcccaagatcgctcccctactatccgcgcgtcgctggaagaggttgagcagacgctggtaatctcagttgcactggtgattctggtggtgtttttgttcctgcgttcgggtcgcgccaccattattcccgccgttgcggtgccggtttcgctgattggtacgtttgcggcgatgtacctgtgtggtttcagtctcaataatctttcgttaatggcgctcactatcgccactggctttgtggtggatgacgccatcgtggtgctggaaaacattgcccgtcatctggaagcggggatgaaaccgctacaggccgcgctacaaggtactcgcgaagtcggctttacggtgctgtcgatgagtctgtcactggtggcggtgttcctgccgctgctgttgatgggcggattgccgggtcgcctgttacgcgagtttgccgtgacgctttctgtcgccattggtatttcgctgctggtttccctgacgttaacgccgatgatgtgcggctggatgctaaaagccagcaagccgcgcgagcaaaagcgactgcgtggctttggtcgcatgttggtagccctgcaacaaggctatggcaagtcgctgaaatgggtgctcaatcatacccgtctggtgggcgtggtgctgcttggcaccattgcgctgaatatctggctgtatatctcgatcccgaaaaccttcttcccggagcaggacaccggcgtactgatgggtgggatacaggctgaccagagtatttcgtttcaggcgatgcgcggtaagttgcaggacttcatgaaaattatccgtgacgatccggcggtggataatgtcaccggctttaccggcggttcacgggtgaacagtggaatgatgtttatcacccttaaaccacgcggcgagcggagcgaaacggcccaacagattatcgatcgcttgcgtaaaaaactggctaaagaaccgggagcgaatctgttcctgatggcggtacaggatattcgcgttggcggacgtcaggctaacgccagttaccagtacacgttgttatccgacgacctggcggcactgcgcgaatgggagccgaaaatccgcaaaaaactggcgacattgccagagctggctgatgttaactccgatcaggaagataatggcgcggagatgaaccttatttacgatcgcgacaccatggcgcgattgggaattgacgtgcaagccgccaacagcctgttaaataacgccttcggtcagcggcaaatctcgaccatttaccagccgatgaaccagtacaaagtggtgatggaagtggatccgcgctatacccaggacatcagtgcactggaaaaaatgttcgttatcaataacgaaggaaaagcgatcccgctgtcgtatttcgctaaatggcaaccggcgaacgctccactgtcggtgaatcatcagggattatcggcggcctcgaccatttcgttcaacctgccgaccgggaaatcgctctcggacgccagtgcggcgatcgatcgcgcaatgacccagcttggtgtgccttcgacggtgcgcggcagttttgccggaacagcgcaggtgttccaggagacgatgaactcacaggtgatcctgattatcgccgccatcgccacggtatatatcgtactgggtatcctttacgagagttatgtgcatccactgacgattctctccaccctaccttcggcgggcgtcggagcgctgttggcgctggagctgttcaatgccccgttcagcctaattgcgctgatagggatcatgttattaatcggcatcgtgaagaaaaacgccattatgatggtcgattttgcgcttgaagcccaacggcacggtaacctgacgccgcaggaagctattttccaggcctgtctgctgcgttttcgcccgattatgatgactaccctggcggcgctgtttggtgcgctgccgctggtattgtcgggcggtgacggctcggagttgcggcaaccattggggatcaccattgtcggcggtctggtcatgagccagcttctgacgctgtataccacgccggtggtgtatctctttttcgaccgtctgcggatgcgtttttcgcgtaaacctaaacaagcggtaaccgagtaa

SEQ ID NO: 5399 - DNA, 2034 bp, Escherichia coli
atgactcaagtcgcgaagaaaattctggtgacgtgcgcactgccgtacgctaacggctcaatccacctcggccatatgctggagcacatccaggctgatgtctgggtccgttaccagcgaatgcgcggccacgaggtcaacttcatctgcgccgacgatgcccacggcacgccgatcatgcttaaagctcagcagcttggtatcaccccggagcagatgattggcgaaatgagtcaggaacatcagactgatttcgcaggctttaacatcagctatgacaactatcactcgacgcacagcgaagagaatcgccagttgtcagaacttatctactctcgtctgaaagaaaacggttttattaaaaaccgcaccatctctcagctgtacgatccggaaaaaggcatgttcctgccggaccgttttgtaaaaggcacctgcccgaaatgtaaatccccggatcaatacggcgataactgcgaagtctgcggcgcgacctacagcccgactgaactgatcgagccgaaatcggtggtttctggtgctaccccggtaatgcgtgattctgaacacttcttctttgatctgccctctttcagcgaaatgctgcaggcatggacccgcagcggtgcgttgcaggagcaggtggcaaataaaatgcaggagtggtttgaatctggcctgcaacagtgggatatctcccgcgacgcgccttatttcggttttgaaattccgaacgcgccgggcaaatatttctatgtctggctggacgcaccgattggctatatgggctctttcaagaatctgtgtgacaagcgcggcgacagcgtaagcttcgatgaatactggaagaaagattccactgccgagctgtatcacttcatcggtaaagatatcgtttacttccacagcctgttctggcctgccatgctggaaggcagcaacttccgcaagccgaccaacctgtttgttcacggctatgtgacggtgaacggcgcgaaaatgtccaagtctcgcggcacctttattaaagccagcacctggctgaatcattttgacgccgacagcctgcgctactactacaccgccaaactgtcatcgcgcattgatgatatcgatctcaacctggaagatttcgttcagcgcgtgaatgccgatatcgtgaacaaagtggttaacctggcgtcccgtaacgctggctttatcaataagcgttttgacggtgtgctggcaagcgagctggctgacccgcagttgtacaaaaccttcactgatgccgctgaagtgattggcgaagcgtgggaaagccgtgaatttggtaaagctatccgtgaaatcatggcgctggctgacctggctaaccgctatgtcgatgaacaggctccgtgggtggtggcgaagcaggaaggtcgcgatgccgatctgcaggcgatttgctcaatgggcatcaacctgttccgcgtgctgatgacttacctgaaaccggtactgccgaaactgaccgagcgcgcagaagcattcctcaatacagaactgacctgggatggtatccagcaaccgctgttgggccataaagtgaatccattcaaggcgctgtataaccgcatcgatatgaaacaggttgaagcactggtggaagcatccaaagaggaagtaaaagccgctgccgcgccagtaactggcccactggcagatgatccgattcaggaaaccatcacctttgacgactttgctaaagttgacctgcgcgtggcgctgattgaaaacgcagagtttgttgaaggttctgacaaactgctgcgcctgacgctggatctcggcggtgaaaaacgcaatgtcttctccggcattcgttctgcttacccggatccgcaagcactaattggtcgtcacaccattatggtggctaacctggcaccacgtaaaatgcgcttcggtatctccgaaggcatggtaatggctgctggtcctggtgggaaagatatcttcctgctaagcccggatgccggtgctaaaccgggtcatcaggtgaaataa

SEQ ID NO: 5400 - DNA, 3801 bp, Escherichia coli
atgagacactttatctatcaggacgaaaaatcacataaattctgggcggtggagcagcaaggcaacgagttacatgtcagttggggcaaagtcggcactaacgggcaaaaccaggtaaaaagctttgctgatgctgcggcggcggaaaaagcaaagcttaagctgatcgcagagaaaacgaaaaaaggctatgtggaaaatgcttctgcaaacgtgcatatcacccccatcaccaaagccactcctgaagttgaaacttctcctgagagtaaaaaccaacgcccctggctggctgatgatgcggtcattcggctaactgacgatattaatcgatttgcttttcctcatcgctctcgccccagagagatcaattatctgcacaaagatagtcaaatatggcagcgcatcgcgaataacaccagggcatatgatcccgccaacaattaccgttcttatccagaaaactggcagcaggcttttgctgagttacaaaggcgaattctggataatcaacagacagggagtgcgcaatctgatgcggcattgctctggagtttctggaattcttactctgcagatgaactagtcgatgacttaatcattcgctgtggtatggaaagtgccgttgaaattgcccttctcgctcttcaactgagatataaaccagtaaaaggcgcagtaaccaccatcattccacctaatcacgaagcagaatcgctaccgagttggcatcaacgcctatgtcatcatctttcactcgcttcagaagatgagtggcaacgctgtgtagataaagtactcgcggctattacgacgctatccccagcacggcaaccttttgcggcgttactgctccctgaacgcccggatattgccaatgctatggctctacgctatgcagatcaaaacgttccggcgatgacctggttaagactggtagtaaccgatgaagccgctctgactgcagccgaaaaatacgactttccaccgttatatcgtgattttcgcgcttatctggcaatgttgctggcaaataatggggtgagcggtgtaagccggatacttactgagtttgtggaagagcattctgacaatcccacttatctcttcgagcgcatcagcgagactgaagatcttgtcaaatggttatggaaaacgaatcacccggatgcgattcaaattctgatcctcggtgtaattggcaagaaaaagcacctggaatacttaagcaaagcatgtcaaaaacatcccgctgcggctattgccgcttatgcaactttgctggcaatacatgaagataaagagtggcataaagcgcttgtcaaattgattaccatcacgccagagttagtatgcgacgtcattccctgggttagtgctaaagcggcaggcatcttatctgaatgtcgtcctcagtcagtagctgaagaatgtgagtatgccactgcggatatgttgccagagctgtttgtttcgccgccctggatgactaaagagaaaaagaaaaattcgccggtgtttgatcttcctgtactgccagttccttctgtttctgacgtcactccagagattgccaaaaaactaacccgtacataccttgtcacccgcttccagcaaatagcccaacagcaggcaacaaaacaaatattgtttaccgacctgccgccgatggaaaaagcaagctgggagagacacttagtccccctcacaccagaacagcaaattctgtggtgtctgggttttgacaaatggcgggagagcggagaaaaaatatacgaaaaaattccggcgccacaaagtgccgttgatgccctgctacgcttcgattttccagcactcaatgctgaatttgcgcaataccataacaatgcttacaaaagctggaatctcattgccctctgttatctacctggtcaacaggccatttcttttcttaaccagatagtcaaagaagataactactctggtgagggatatattctggccatttttggtagcgccgccattcctgcatttatgacctgcctgcaacgtgagccacaacggttgtggtttttcaccttcttccttggtgtcaatgaactggcattgccaatggcgcaacgacttcagaaaaaaatgtcgtatgaagatgcacgaaactggctaacggattacccacgccatgccgccgccgggctacttcctgtggcactgggcaaacaaggaaaagatcgtgattgtgcccgccaggcgctccgtctgctggtgaatttaaaccagcgagaaacgattgaggaaatcgcccaaggatacaaccaacctgatgttttagctgcgctggcaacattatttgatagcgagccgctggaagaatatcccgctaaaatcgccccactgcccggcttttatcagttcaccttatggcgcagaccacggcttaaaagtaacaaccagcctctgccagatgacgctatgcgccacctcggcataatgctgagctttccacgcgacattaccccctacgcagggcttgcgatcatcaaagaaaccttcacccgcgaatcactggctgaatttggctgggatctgtataccgcctggacagaagctggcgcacccgcaaaagaaaactgggcatttacctcgctggggattttaggcaatgacgacaccgcgcgtaaattaaccccgctcatccgcacctggccgggtgaatcccagcataaacgcgcggtttacgggctggatgtgttagccagtatcggtagcgacattgcgctaatgttgcttaatggcattgcgaaaaagattaaattcgttgcattacaggaacatgcctgcgacaaaatcaacatggtcgctgaaaatcgcgggctgactatggctgaactggaagaccgcctggcaccggatttaggacttgatagcagtggctcgttgacactggatttcggcccacgtcaatttaccgttggttttgacgaaactttaaaacccgtggttcgcgacgcaaacggcaaagttctgaaagatttacccaaaccaaatcagagcgatgataaaacgctggcaactgacgcggttaatctcttcaaacagttgaaaaaagatgtacgcgccatagccagccagcagattgatcgtctggagcaggctatgtgccagcgcagacgctggacggcagagcagttccgcctgttcctggtggagcatccgctggtacgtcacttaacccgacggttgttatggggggtatatactgaggaaaacacgctgattgcctgcttccgggtcgcagaagacagcacttacagcgatgcgcaggatgagctatttacgttgccagcaggaaacatcggtattccgcatgtgctggaaatatctcctgaatccgccgctgcatttgggcaaatttatactgattacgaacagcttcctccgttccgccaactcgatcgtggttattaccaccttgctgataatgaacgtgattcccatgaattgatacgctggcaaggacgtctttgccaggccgggcgcattgtcgggctggaacgccgaggctggcaacgtctggaagaaagcggcagcgtttacgcgatgcgcaaatctactccttatggcgatctcgaacttgaaacagaacctttttcattaatttatggtgaaacggggtatggcgaccagctaccggttgaaagcgtaaaaatcacctcgcctgataatcgctacggtaaacaatcctcactcactttttccgcgctcgacgacatcaccgccagcgaactcattaacgacattgaatcactgtttgattaa

SEQ ID NO: 5401 - DNA, 3762 bp, Escherichia coli
atgaaaacctatatttatcaggacgaaaaatcacataaattctgggcagtagagcagcaggaaaatgaactgcatatcagttggggcaaagtcggcactaacgggcaaagccagataaaaagctttgctgatgcggcggcggcggaaaaagcggagctgaagttgattgcggagaaaacgaaaaagggctacgcagaagaagtatccgtgacgacaccgacatctgcccccgtccaggttatcgcatgctctgaaaaagcccctttgccgcaagacaaaccaccatttgctgaagaccaccttccctggctggcagacgacgcccaaatcattttaccgacagaggtcgcaccaaccacactaagtcatcgacgctggcctggcgattctgtgccacaggagaatgaattaactctgctacgctccgtcgccgcgcatactcaccggcgttttaaaaaggtgatcaccttcgattacagcacctgttcactggactggcagcaggcgattacacaagcagtgggccttatcgactcaccgattagcaccgcactaccaccgatggttctggcggtactggttgcgctggaacaaggcttcaatcgcaacgatcacgaagagttaatggatcaaattgtccaggagggtggtctggaatatgccactgaggttgtcattgcattgcaagccatccgctttgactggaattatgatgcccacctcattacgtttaccccggataacaagcagcctggctatctgtcacgctttgcctcggttgaaatgcgtctgcgtaaacatctctcactagcaaatgacgatgtatggcagcgctgcgccgacaaactgattgcagctctcggaaacatacccgcctggcatcagccgctggttgcgttattgttgccggaaaaacaagatgtgagccatgagattgccagacgtctttgcggacaaaaagggttatatgcgctggaatggctaaaactaacggccgccgacgagcaggtattggcagaactggggaaatactatccaggacagccagggcaggtatttgatgattattacggcggtaaaatctggtgcgcaacgatactcaaggagcaaggtgtcggtgcgctggcccgttttgctccttacgctgctggtgacacatgtggtgaagtgttgatgcatatcaaccacccgcaggcacttacactacttatccatgcaagcgagcagggaaagcgttgccacgatcgcatgacaaagactttcgttcgctttccacatgcagcgctggcggcattagcagaacttctggcacaaaaagatcaaaagcgttggcgcatgatgctaatgacaatgcttatctcacaaccaacattagcagagcgagtaatcccctggctctcaacacccgcagttgccgtactgaaatcatgccagcaacaactgacacagccctcaaaccatgccagcgctgatatgctgcctgccgtattagtctcaccgccctggctttcgaaaaagaaaaaatctgtaatgccggtattggatttaacgccattaccgctggagtcatgctgcacattgaccgagacggcagaaaaagagattcatgcaaggcatcgctggcacgcacatcaaatagacatcggccaaaaagaggatattcagaactacctgacacgtctgggtttcaatcgctggaataatggccagtatatgaaagcgtctgatgctgttgtagaactctggcagaggggagattattctgcgctaatcagcgaatttaaaaccttctggcactcctatcaacgggaatggcagctttacatgttagccgccctgcctatcgaaaaaacagcgcaggcgtggaatgtcctcagtaaagagccacacgtcggtgtcgagtttgtcatgacgcacctgcaactcgctgggttacagggttttattcactccttttcacgctatccacaagaagctctgcctgtagcacaatattttgcggctatcgaattagcgccactgatcgcccgcgccttcaacaaactcaaaacattacgacaagacgcccgtatctggctgctgaaatacccggaacacgccattaccggcctgctgcctgcagcgctcggcaaaaccggtgaagcacaggacaacgcccgtgctgccttgcgtatgcttaccgaaaacggtcatcagccattgctgcaagaaatcgcccggcgttataaccagccggaagtaaccgatgcggtgaacgctctacttgcgctcgatcccttagataatcacccgacaaaaatccccactcttccgaccttttatcagccatcgctctggacgcgcccgttattaaaagcaaacgcccaatcactgcctgatagcgcactcctccacctcggtgaaatgctccgcttccctcaggaagaggcactgtatccaggattattgcaggtgaaagatgcctgtaccaccgactcactggctgaatttgcctgggatctgtttaccgcctggcagaccgctggcgcgccgtcgaaagagagttgggcgttcactgcgttaggcgttctcggtaacgatgacaccgcccgcaaactgacgccattaatccgtgcctggcctggcgaatcccagcataaacgtgccaccgttgggttggatatcctcgccgctatcggtagtgatatcgccctgatgcagcttaacggcatcgcccagaaactgaaattcaaagcattacaggagcgggcaaaagaaaaaatagccaacattgccgagagccgcgaactcacggtggcggagcttgaagatcggttagcaccggatctcggtctggatgataacggttcgttgctgctggatttcggcccacgccagttcaccgtcagctttgatgaaaccttaaaaccgtttgtgcgtgacgcttccggcagtcgtctgaaagacctgcccaaaccaaacaaaagcgatgatgaatcacaggcgaacaatgctgttaaccgctacaaattgctgaaaaaagatgcgcgtaccgtcgccgcccagcaggtagcaaggctggaatccgccatgtgcctgcgtcgccgctggtcaccggaaaactttcagctcttcctggttgagcatccgctggtccgccacttaacccgccgtctgatttggggcgtttatagcgccgaaaaccagctactggcttgctttcgcgtagcggaagataacagctacagcaccgctgacgatgatcttttcaccctgccggaaggcgatatctctattggtattcctcacgttctggaaatatcaccgacggatgctgccgccttcgggcagctttttgccgactacgaactgttaccaccgttccgccagcttgatcgtaacagttacgcgctgacagaagccgagcgcaatgccagcgaactgacacgctgggcaggcagaaaatgcccgagtggtcgggtaatggggctggcaaataaaggctggatgcgtggtgaaccgcaggacggtggctggatcggctggatgatcaaacctctgggccgctggtcgttaatcatggaaatcgatgaaggttttgcggtcggcatgtcgccagccgaactcagtgccgagcaactcttaagcaagctgtggctatgggaaggcaaagcggaaagctatggctgggggagtaattcaacacaggaagcgcagttctccgtactcgatgccatcaccgccagcgagctaattaacgatattgaagccctgtttgaataa

SEQ ID NO: 5402 - DNA, 783 bp, Escherichia coli
atgaagaagtcgattctcgctctgtctttgttagtcggtctctccgcagcggcttccagctatgcggcgctaccggagacggtacgtatcggaaccgataccacctacgcaccgttctcatcgaaagatgccaaaggtgactttgttggctttgatatcgatctcggtaacgagatgtgcaaacggatgcaggtgaaatgtacctgggttgccagcgactttgacgcgctgatcccctcactgaaagcgaaaaaaatcgacgccattatttcgtcgctctccattaccgataaacgtcagcaggagattgctttctccgacaagctgtacgccgcagattctcgtttgattgccgccaaaggttcaccgattcagccaacgctggattcactgaaaggtaaacatgttggtgtgctgcagggatcaacccaggaagcttacgctaacgagacctggcgtagcaaaggcgtggatgtggtggcctatgccaaccaggatttagtctattccgatctggctgcaggacgtctggatgctgcgttacaagatgaagttgctgccagcgaaggtttccttaagcaacccgccggtaaagatttcgcctttgcaggcccatcagtgaaagacaaaaaatacttcggtgacggcaccggtgtagggctacgtaaagatgatgcggaactgacggctgcgtttaataaggcgcttggcgagctgcgtcaggacggcacctacgacaagatggcgaaaaagtattttgactttaatgtctacggtgactga

SEQ ID NO: 5403 - DNA, 1005 bp, Escherichia coli
atgtcgattaagaagctcgaagatggtcgttatttgctggacatcaggccgaacggacgcaagggaaagcgcgtgcgtaaggtatttgacaaaaaatcggtagcggtggccactgaacgctacatcatggcgaacgctgaaaagcgggaatatatacagggctaccgtgatcgtcgaacgctaaatgatttgcttgagttgtggtggatgtatcacggccagcacaggcgtaaggcggaagaagaccgaaaacaactgcgcaacataatcaatgagcttggcgctgatatgcaggctgtggatcttgataagctgaaaattatcgcgtggcgttctcaaaagatagctgaaggattgaaaccgtcatctgctaacaggtacatgaatcggttatccggaatgtttaccgtgctgaaaaaaataggtctttgggatgcagaacatccagtaaggggaatttctattctttatgtatctccacgagaaatggcgttcctgtcacagaaggaagtggcgctattgctcgatacactggagggcgactactggcgtgttgcgcttttgtgtttaagcacaggggcgcgctggagtgaagcttgtaagcttcgtggtgaacagatagttcataaccgtgtaacgtttcttgaaaccaaaaatggccggaagagaacagtgccaatttcgcaggcagtttgtgaggcgatcaaaaccagagaaacaggcggcttgtttgaggtgaagtaccgggaattctgcctggcgctgaaaagagttaagcccgatttaccaaaaggccaggctgcacatgtgctgcggcatacgttcgccagccattttgtgatgaacggaggaaacattattgcgcttcagaagattcttggtcacgcaaccattcagcaaacaatggcatatgcgcattttgcaccggattacctgcaggatgcggtggcccttaatccgctgaaaggtggcgtaagtgtccacgcagtgtccacgggggattaa

SEQ ID NO: 5404 - DNA, 321 bp, Escherichia coli
atggcatctttgtcaagcatgggtgaaaaatttcgcctgattcgtgaagcagaaggtatgacccgccaggagtttgcggattgtgttgggctgccttatgggacggtaactaactatgaggtgagggggaagcaagtaacagagggtgccttacttaaggttacgaaacaccctaaatttaagaagtatgcttattggttatcaacagatgaaacgatgccggaggtcgggcaaatttctccggctctctctcttgatggttcctgcaattcggagggagatcgcgtttcaaccgaaacaatccaaaaattatcccgctga

SEQ ID NO: 5405 - DNA, 288 bp, Escherichia coli
atgagcgaatcagagcttggggggttcattcaggtagcaccatatccacttgaagcggtgccatatcaactattcgccaagatgatcggccgcaaggaatccacagtcagaaccatgattgacgcagcaaagctaccgacaattgactttgtgaaaccaggttcagtaaagacgcgtgcatcagaaaactgggtatatctgccagcatttaacgaaggcatgcgcaaagcgttttttgagcaaccgaaagaacgccgcgacgcatggttgttgtggctgggactttag

SEQ ID NO: 5406 - DNA, 207 bp, Escherichia coli
atgaccagccatatcatcagcgccattctgacccttgtttttattgagataggcgtaatagagatctatttgtttcgcaagttaacgggacatgaagaacgctttattgaactcagcattgaatatatcgccgcttataccaaaggacttttcccggcagctattggggcgatgtttatagcgtttgttatctggtttatcgggtga

SEQ ID NO: 5407 - DNA, 342 bp, Escherichia coli
atgaaacagcaacgtaattcacgctttcgcaatggtgcagaacgccacgctaaccgttttgctaccagtgcatcacgcagcaacatccgctacagcctgagtgatacacacgcaacgccggatggctacccagtaaaacaaatcggcgagcatgcctggctgattgagaaagctggaatcgtgatccacaaatgcccacgcaatccgtttaccggaaaccgcatttttgctctaagcagtggcgacaatcagttcgggcaggatttcacattatacgaagcacttcgcacggttgatcgtctgcttcgcgggcaaagttttattaaacaggctgatttataa

SEQ ID NO: 5408 - DNA, 288 bp, Escherichia coli
atgaccaaagaccatgcacaaggtgtatttatccgttttattgattttcgcggtgaactgttattacgtgcatccgctattgacggagtaactccggcgggtaaaaacggagccgacgaagccacttacgtttatctgaacggtacgcgactgcttttggaacttccgtaccagaccgtacgagaaatcattagcgaagctgaaaaggcacgccaggttaatggcgatgaaccctatatcgaaattatttgtatggattcagaagctgaaatacagaaagcagattaa

SEQ ID NO: 5409 - DNA, 243 bp, Escherichia coli
atgggcaaagaatataaaactctcattaacaaagcacttgagcgtttttattttcgcttaagtgcatcaggcgctcatgctgaacgtgcggcccgtgactcattgaccagagcaatccgaagtctgtatgacgtggctttttacgctgatgatctggatgcacttaacgaactttccgagctgatctgtgccgcagagtgcggggaacatattgaaccgtataagctggggaatatcgcatga

SEQ ID NO: 5410 - DNA, 204 bp, Escherichia coli
atggcaattaagcattttcctgtcgttcgttttacctccagagggcgtgaatacgaagtcgacgaacgcctgattaccacaatcgacaaacaccgttcagaaaaggatgcacatcacatctatctcactgacggcacttacttctgcgccacgaatgtggtgcgggtgaaccttatccgacaggtacaggagtcacgcagatga

SEQ ID NO: 5411 - DNA, 246 bp, Escherichia coli
atgaccattctggactatatcgccgccaatccggggtgtagcggtggagaaatcgccgcagcactgaataccccaaccacagccattaatgtggagttacgccgactctggcgcagcggttcagtcataagaaaagagcgcaaaacaggcggtcgcttttcttaccagataaacccgatgccgttcgggtgcggcaatccacttaccaacatgtttaaccagctactgaaggaagccagagcatga

SEQ ID NO: 5412 - DNA, 300 bp, Escherichia coli
atgagcgccatcaaccaccaggaattacgcgaactggcgactgacctgcaacgaatggcaacgcctcaaaaattactggcgtttcgcgcaatgctctcgccgtctgctgtgctggcgctgctggatgagctggagcacgccagaaccacacctctcgccattcgcctgacgctccgtcatgaaatcgaggatttctgcgcgacgttggaggcgccaggcgaaccggaaacgccggaagcaatacagcaagagctgctgcaacgcattgacaaggtttttgatttttttctgaaccactaa

SEQ ID NO: 5413 - DNA, 231 bp, Escherichia coli
atggcaaaccgcaaaccacaccgcgctatcgcggagcgtcgtcacatccagactgaaatcaaccgcagactttcccgcgcatcacgcgtcgcgcaaatcatgcacatcaatatgctgcatgagcgcagccacgcactatcaaacatttattccgcctctgttttcagctatctggcggatgatctgcacgagcttcaacagctcatccagcagcaaaacaaactccattaa

SEQ ID NO: 5414 - DNA, 366 bp, Escherichia coli
atgattctcgccaacgactttcttgaatacctgctcaacacagaacgtgatcttgccgctcgcgtgcgtgatcgttatgacatgtacctgaaatccctgcctgtaccgcagctcgctgacggaaagattgttattgatggtcgctacatgattgacagccacgagggaaattacaggctttaccgcattgaaggtggcaccccgtccgttattggcatttaccagcgcccatccactgcaatcgtcgatgtgattgccgacagcatccgcatcacacatcgccatgccgacacagaagacaccgtgctggaaattcagcggctggctacagtctgccgcgacaccctgaatggcatgacgaagtaa

SEQ ID NO: 5415 - DNA, 2823 bp, Escherichia coli
atgacggcagagtacatcagggactggcaacaaccgcgccacgcagtggggcgtgaaggaacggggatccccgctcctgaatccgcgctttcctcctggctggatgcctaccgggtagagaacgagcaccgccaggaaatggctgatgcggcgttctccgcaacgctgctgggcaacctgattaataaaagcctggacgcacaggaaaaacaggacaaaaccatcacactggccagagaagccagaaaacaggcacgtggcgcggtggatgaagccatggcctcgctgcgcctgctgccgtcctatctgcgcgatccgcttattcgccacctctccttcctgcgcaaaaaacaggaagccgatcgccggaaaggcaaaaagagctggcaggcggaacgctatgcacgcggaaccctgcgcaaaatattcgaacgtctggatcgcactgacggacactggctgacaccgggttatcgctcccttgccggacgcgaacgcctggacgatttgctttacctgccgcagctcaacaaacaccagatacagtcgctggccaccatgacggcggcgatgttcagcagcaccttcgaaaaactctgtgatggctttggtgccagagatggcgagctgaccatggatgtaacgctgaaggcgtatcagatgctggcccgcatggcgttacacctgcacatcatgcctccacattatgacgcactgacaacagataaagaccggaggaacgaaccggacacggagctgctgccgggcgcagtccttcgcctgacctgtgcggaatggtggaaacgcaaactgtggctgttacgttgcgagtggagagaagaacaactccgcgccgcctgtctggtttccagaaaaacatcaccctatctgagccaggacgcgttaagcgagtttcgcgcacagcgcgagaaaacacgcgatttcctgaaaagtttcatgctggaaaacgaagacgggttcacgattgatctcgagacagtgtattacgcgggagtaagtaacccggttcaccgtaaggcagaaatgatggccaccatgaaggggctggaacttctggccgaagcccgtggcgacaaagcggtgtttctgactgtcacctgcccgtcaaaataccacgccacaacagagaacggtcatccgaatcccaaatggaacggggccaccatgcgcgactccagcgattacctggttaacacgttttttgcggcggtccgcaaaaaactgaaccgcgacggtcttcgctggtatggcatccgcacggtggagcctcaccatgacggcaccgtgcactggcatatgatggtctttgctcatccggaagaaatcgacagcatcgtggccatcacccgcgatattgccattcaggaagaccgccacgagctgggcaatgatattactccgcgctttaaggcggagtatgtcgacggctcaaaaggcacaccaaccagctatatcgcgacctacatcggaaagaacctggacagccgcgccgtggatggcatcgacccgaaaacgggcaagccacgcgttgaccacgaaaccggaaaatcaatggccgagagtgtggagcgcgccatcggctgggcgcgccttcatcgggtccgccagttccagttctttggcatcccctcccgtcaggtgtggcgtgaactgcgccgccttgccagccagatggcacgcaacccggaaggcccgcaacgactgaaagatgacgcaatggatgcggtactcgctgccgccgatgccgggtgttttgccacctacattgaaaaacagggcggcgtacttgttccacgcaaagactacctgattcgcaccgcctacgacctcgcagatgagctgaatgattacggcgaacagagcgtacagatttacgggatctggtcaccactcatcggggaatcctcccgtgtgtgcacgcatccggataactggaaactggtaagacgtaaaccggaaacggaagacagcgcccgcgaaaatggttttgaccttcagggcggccctgccgccccttggactcgtggcaataactgtccccgtgtacaggaaacggacaacaacgggacagaacagccggaagaacggccagcaccgtggccgcagctccctgacggcgttgaagtgaacgaatggatgcgctcactgaaacggcacgaacgccgggcgctgatgcgttcgcttcgtgacaaacaggcaaaaaacagcagtgatgaaatgcagagctggacacagagccgcaaacagcagcggcctttgcctgataaccacgaattactcgctaaagaatggcgggagtctgctgaatctctcggcctgcatatcggtgaacagcagatgcagcacctgttacggggcggcagtctgtacgttgacggcagcatcattgcaccgcagggatttgaaattgtacgcaaaccggatacccgaccggacagccggatcacgcagctctggcagcgcctgagccgtaaccacggcgtaagcagcacggagatccgccataacccggtcgccagctatctggaacagctgggggcatcagaccccgaagccgccgcacgcctggcatccacacttcagcaagaccagaacaccatgaaaacacccgttaccgtgctttctgacatgctgcgcgccatccgcgacgcagagcacgcacagagaatcagtgaaaccactgaacgcgcccgccgcaaagcagacctgctgcgaggtggcctgaccagtggaaacaaaaaacagacagaaacgggattcacaaatcccgtaaatgagcaaaaaacgcgccgcgatatatga

SEQ ID NO: 5416 - DNA, 402 bp, Escherichia coli
atgaaaatttgtatcgatgacggctccaccaacatcaagctggcatggactgagaacggcgaacgccgcaacgccatcagcccgaacagcttcaagtcggaatggtctgcgccgttcggtggcacgcagcccgcgaactacatgcttgatggcgtgcgctatggttttgatccggtcagcgatcgctttgtccagacaactgacacgcaataccagtacagcgatgtgaatgtcattgccattcatcacgcgctggtcaaatcaggcatcacgccacaggaggtggatgtggttgtcaccctgccactgagcgagtatttcgacacaaacgcacagccggacatagccaacatcaaccgcaaaaaaagcccaggattcccggggcggttcagaggagagtga

SEQ ID NO: 5417 - DNA, 264 bp, Escherichia coli
atggcaactttgacaaaaaaagaacaagcatggttgagcgaattacaggacgttcttgatcgctgtccatcaccgaaaaaaattggtttttacaccattggcgataaaagcatttacctgtatgacctacgccgcatggatgaaatcatggaggctcttgataatcgttcgtcaatggattggtgtgttgctgtccatgatatgaatgcagggtttgatgaaaagattttgttcccctcatcagttgaaagcacagcaggataa

SEQ ID NO: 5418 - DNA, 1047 bp, Escherichia coli
atgagcagaaaaaataaaaaagtgcgcatgagttcacgcattgatctcgctgatgcgctcaggaaagaatcatcgctcagtgcattcacatttgatggtccttatcgcctgaccgggcatgacctgctggacaatatgtactgtgctgataacgggcggtggtatgaaaccccggtggactggtacggtctggcaagagctgcccggcaaacgtcctggcatcagtctgcgctttactttaagcgcaatgtattactcggttgctacatcccgcacccgttgctttcccggcaggatttctcggcgctggcgctggactggtttgtgttcggtaacgcattccttgagcttcgaagcaatatgctcggcgaaccgcttaaattacggcacgccctggcgaaatacatgcgacgcggaagcgatcttgaatcatggtggtatgtgcaggatggcaaggacgcgtttcagtttcgccctggcaaagtgtgccacctgatgaatcctgacattaaccaggaaatctacggcatgccggaatatctcggcgcattactctcggccagcctgtctcattcggcggacatgttcagaaaactgtattacgacaatggatcccacgccgggtgcatcatctacatcggtgcagcgcaggtaaaccgcgaaagcatggactccctgaaagaaacgctacagggggcacgtggtggtggtgcgtttaaaaacgtgctcattcatgcgcctaacgggggcaaagagggggtgcaaattttgccgttccagcagatcaccgcaaaggatgagttcatgaatgttaaggcggcatcccgtgatgatgtgctggctgcgcaccgcgttccgccgcaactgatgggggcgatgccgggcgaaaaaagtgcgtttggtgatgtggagaaggccgcgcgggtttacgcaattaacgagctgatgcccgtcatggaggccatgaagcacatcaatgactggcttggcgaagaggtgatccgctttaacccttacgcactgttagacacccagcccacatcctga

SEQ ID NO: 5419 - DNA, 1752 bp, Escherichia coli
atgattcaggacgcttttgtgcgccagcgtgcgcggcaactttactggcagggttatccgcccgcagaaatatcacgtctgatgggaataaacccgaacacgatttatgcgtggaaaaaacgcgaccagtgggatgaaacgccacccgtgcagcgtgtcacgcagtccatcgatgcgcgcctcatccagctcactgaaaaacagaataaaacaggtggtgacttcaaggaaatagacctgctgacccggcagcttaaaaaactgcatgatggccagccggatgcgacggccacaggaaagaaaggccgggcgaaaaagcttaaaaatcatttcacgccggaacagattgccgcactgcgggaaaaaatcatcagcaggctggagtggcatcagcggggctggtttgactccctgaccctttgcagggaagcagggatacgtaacaggatgatcctgaaatcccgacagattggggcgacctggtattttgcacaggaagcgctgctgatggcgctgcgtgacgatgtggcgcaaccttaccagcgtaaccagatttttttgtctgcgtcgcgtcgtcaggcgttccagtttaaaagcattattcagaaggccgcggctgaagttgatgtggagctgaaagggggcgataaaatcatcctctccaacggcgcagagctgcattttctcggcacttctgctgcgtcggcacagtcctatacgggcaatttttattttgatgaatttttctgggtcagtcgctttgctgaactgcgcaaagtggctggcgctatggcaaccctcagcggactgcggcgcacctacttctccacgccatccaccgaaacgcacgaggcatacgcctactggaacggcgaccgctggaacgagaaaaaggccacgcataaacgccagcgtttttctgtggactggaaaacgctgcataacgggcttatctgccctgaccggacgtggcggcaaattgtcacgctggaagatgtggttaatcacggctgggaacacaccgatatcgacgaaattcgtgatgaaaacaccgaagacgagttcctcaatctctatatgtgtgagtttgtccgcgaaggggaatcggcatttaacctgaatatcctgattggctgcggtgttgacggatacgacgactggaaagactggaaaccttttgctccccgcccgatgggaaatcgtccggtatggattggatatgacgcaaacggcagcagtggcaacggcgacagcggcgctgtatccgtggtggttcctccggctgttcctggtggccgttttcgaacggtggagacgcgacgcgttcaggggctggagtttgaagaacaggccagagtcattgaagagttcacgtgtcgctacaacgtggaacacatcggcattgatgtgacgggcgggaacggggaggctgtttatcagatagtgaaacggtttttccctgccgctattccgtacaccttcacgctgtcatcaaaacggtcgctggtactgaaaatgctgcaaataatgcgtgccgggcggtgggaatacgatcgcgccgaacgcgagctggtcgcggcctttaacgccgtgcgtaaggtgaaaacaccgggcggctttatcacttacgaaacggaccgtgcgagggggatcagccacggcgaccttgcgtgggcaaccatgcttgctgtcattaacgaaccgattggcggcgaaggagaaaacgagcgtttcacggttatggagttctga

SEQ ID NO: 5420 - DNA, 837 bp, Escherichia coli
atggctaatgaaaaaaagacatcccgcaaaaagtttcgcgtggctgtctccggtgtaacggcagacgggcgcgaaatcaacggcgacatgctgaaagctgccgccaccagttataacccgtccgtttatggtgcacgtgtgaatattgagcacatcctgtcaccactccccggtagcgagttttccgctatgggcgatgttgtggggttgagcaccgaagacataaccgatggcccgctggcaggccgcacggcactgtatgccgaaattgagccgaccgctcgcatgatgtccctgcttaacgatggtaaaaaaatttactccagtattgagctggaaccacagtcaaccatcacgggaggcccttacctgcgcgggctggcaatgaccgacacccctgccagcctgggcacggaacgtctggcctttgcggcacaacaacgtatgcaactgatgacattcaactgtcagcagggagacgtggcgatgtttaccgccgctatggagtcagaacttatcgaactcaccgaacaacgtcaggaagaaggcacccagtggtttaaccgcgttatggggattattggccgtggccgcaaagcggatgacgccagtttctcccgtattcaggaagcggtggaaggtgtcgcaacgtcacaggccgacattatcgaccgttttaatgtgctggaaacccgccatcagcaggacagccagaaaatcactttactgaccacagagctggcagcactgaaggaaaaactgcgcacgcaggacggcgatccgcagaaccggttcaccgcaacaggtgcagcctccgaccagctggctgacttctga

SEQ ID NO: 5421 - DNA, 1053 bp, Escherichia coli
atgaatctggtgatgtcagatattacccgcaacaagctgggttgctatatggcgcagcaggcgtcgcttaacaatatcccggtttctgcactggtatcgcgatttaccgtggaacccgcggtgcagcagcgttttgaaaacgcctcaaaggaaagtaccgaatttacgaaaagaattaacgtgatcggcgtgaccgaccagaaaggcgaaaaaatcctcctggataccacaggaccgattgcgcgcacgaataccagttatgacggcacaaaacgccgtaacccgaataacgtggttgatctgaaaaaccgcaaataccagtgcgaacaggtgaactacgacacgtttatttcgtatccgcagcttgatgcctggtcggcacaccctgattttcagtcccgcatcagcgcacagattgcccgacaggtggcacttgaccgcatcatgatcggtttcaacggcacgtctcacgcggatgagtccaacttcagcaccaacaagttgcttcaggacgttaacgtggggtggctggagcacatcagaaccgacgccagcgaacgcgttatgaatgacgtgacgctgacctcccgtaacatggacaacaccgtggcgcacgcgggtaagtatgcgaacgctgatgcactggtacaggacgcgcgctcatccctgctggatgaatggcacaaggaagctgacgacctcgtggtgattatggggcgcaacctgtttaactcgctgcgtctgcccgtgctaaacagcatcagcggccagaatcccaatgcggaattacttgccgggcagctcattctgtcatcgcgcaccattggcgggctgggcgtgttccttgcgccgttcttcccggattcaacgatgctgatcacctcgttcaacaacctgtcgatttactggcagaaaggttcaatgcgtcgtctgatgaaagatgaaccggaatacaaccgcatcgccacctaccagtccatcaatgacgcttatgtcgttgaagactatggcaagtgcgcgatggtcactggcctgaagttcgccgacagctaa

SEQ ID NO: 5422 - DNA, 801 bp, Escherichia coli
atgattactcctgcacagcaacactggcagaacgtgatggcacagcgcgcaggccgggcgaatgaaggcgtggaccacgccgcgcgtaccgcgcatgaagaggtgctgtatcgtctgcgtctggcacaggcccggcttaagggcgtacaggccagaagtgccaaagccgccatcaaaaaagagttgttgccggacttttccggctggattgagggaacgctggaggctgacggcgggcagcaggatgaagtgattgccacgctgatggtgtgggcgattgactgcggcgatcttccgctggcgctgcgtattggtgcgtatgtggtccgtcacaacctcatcatgccggataactttggccgtactgctgccacggtactgaccgaagaaatctgcaacccggtactgacgcaggccggggcggatgccgacgcggatttgtccacctttatcgaaccactggacacactttgggaaattgtcgccaaccaggatatgccggacgaagtgcgcgccaaattatgcaaggcgtgcgcctttgcccgccgtggcctgagcgatgcggacagcatggcctcatcactgaagctgctgcgcgaagcgatgcacctgaacccgaacgcaggtgtgaaacgcgagattgcaaccctttcccgcgccctgaaaaaagctgattccgcagccgcaccagaagatgccagcacaccgcagacgcaggacgaaagcagcaaaagtaaaaagacaacgcggaagcctgcaacacgaaaaaccaccgcgacgcagaaggcgaagcgcggttaa

SEQ ID NO: 5423 - DNA, 495 bp, Escherichia coli
atgagtatggttgccagaactgaacccggacccgcagaggacgacatcaccgataccgatgatggtgatacccgtatttcagcgggcgcattctggccggatattgtgctgcgtgagctgcgtctggcgatacgactgccgggccgtgtgaccacctcccgcctgctgcataccgccaccggggccgtggcacacgttacccgcgaactggaagcgtggcagcaggaacagcaggcggctggccatcagacgctggccgatgttccggcacccgtaattaacggagaaagcgtcaatctctggcactggcgcaatgccgtttataccgccacacgcgccctgattctggagcgttaccgcgatgcggacacaacggacaagggcgaccgccgggcggacgcactggatatacagacatcggatttgtggcgcgatgtgagctgggccatctctgacattctgcgccgcccgcgaatttttgcggagctgtgctga

SEQ ID NO: 5424 - DNA, 201 bp, Escherichia coli
atgaaagtgaaggcactggaaggcgacaccgtggattcgctctgtttccggtactacggcacgacgcagggcgtcaccgaaaaggtgctggatgccaaccccggactctgtcagcaggtatttctggacgccgggcaggacgtggagatgccggagccggagaagaagaaacgagaaatgattcagttgtggggggagtag

SEQ ID NO: 5425 - DNA, 324 bp, Escherichia coli
gtgaacaccattcaaacagggatcacagagcaggttattgcatggctctttgaccacctgccaacggtgtatgcagtaggcgcggcggtcagcatttccgcgctgatgagtctttatgacggacgaacactggttcagaccgtaacgggatcgctggcgtgcggcgttcttgccatggccgtggccgggtcgttgcgcttcttcggttttcctgaagatgccgtgacgtttatcggcgcatcaatcggttttatgggggcagagaaagcacgcgacaaggttattgcggcctttaatcgcagggtgaaggagaaggacgaatga

SEQ ID NO: 5426 - DNA, 393 bp, Escherichia coli
atgagcaacacatttaaattcagcagccggagcgaaaagaatttgcagggcgtaaatcctgatctggtgaaagtgacccgacgggcactggaaatctcggaagtggattttggtatcaccgaagggttgcgcagccgttaccgccagaagcaactggtggccacgggtaagagccagaccatgaacagccgccaccttacgggtcatgccgtggatgttgtggcttatatcggcagccaggtgtcatgggaatggccgctgtacgaaaaaatcgcaaccgcattcagacaggccagccgggaactgaatattccggtggaatggggcggcgactggaagaccctgaaagacggaccgcattttcagttaccacacggagcctatccggcatga

SEQ ID NO: 5427 - DNA, 408 bp, Escherichia coli
atgaagctctggcccacgcttggcgtcgctttccttctgattgccggatggggaacatccatgcgtctgtcgtggtcgctgggccgggagaacgccagaaacgaagcgcaggccagcaccctgaaaagtaccgccgacaccctgaatatcatcagcgccggggtacaggatatgcagcaggtgctggcgcaactccgcgtggaaaatcagcaacgcaatcaggacggagaggtaagacgtgaacagctacgcaacgatattgcaaaagatgaatgcgcccacgctttgcctgacgctcgttttactgacaggctgcgcaggcacgcagaacgcgccactgccagcgccgtcagtccggcttataccgcagacgctgaccataccggtaacgcctccccccttccctga

SEQ ID NO: 5428 - DNA, 468 bp, Escherichia coli
atgctgaaaactgattccctgcgtgaagccatgacccgttcatgccgatggtgtcaggctaacccggaaaaattcaccattttcgtggagagcggcaacattgaaacgaccggagaaacgccctcgtttgtttaccgctatcagatggtgatgtttgtcatggattacgccggagagctggacgacctcacgctgccgctgctggcgtggttatccgaaaatcagccacagttgttgctcaatccggagcgtaatcaggacatcaaattctccgccgttatcaatgacgatgacagcgccgatctcctgtttacgctccccctgcgggaacgcgttcgcatcacgcgcagcagtcagggcacaccgcaggcagaacacctgccggagccaaaaccccgcctgccatcttccgaaggcgactggtcgcatgtattccaggatgtgacgtggggtgaaagcgatggataa

SEQ ID NO: 5429 - DNA, 645 bp, Escherichia coli
gtgaaagcgatggataaggcattcacccgcgtggatgaaacctttgaggccatccgcgacagcctgaatcagcaggccatcaataacatcgccagaaagctggcacaggatttacgccgcgcccagcaggcacgtatccggtcacagaaagcgccggacgggaccgcatggacaccacgcagacgccgcgtaacccggatacaggagcgcattcgctttatctggaataacgaagcacgcacgctgaaaaactggcatcacgacacggggaaatacgggcgaaccattaccgggtgggatgaggataaaaacaatatccgcacgttttaccgggatgacatcgaccgttttctggaaatacgcacccggcgcatcaaccaggacagcacaaagcgcgtccccatgttcgtaaaactgcgcaccacccgctacctgaaagcacgagcggatgcttccggtgtgacggtgggttacagcggtgtggctgcacgtattgcacgcgttcatcagttcggtgagcgcgatcaggttgcgccaggcattttcaccgattacccggtacgtgagctgttgggcatcagtcaggcagatgaacgcctgatttataacacggtgctgggccggattgcggaggctgtacggtga

SEQ ID NO: 5430 - DNA, 582 bp, Escherichia coli
gtgagcgcagaactcatgcgactgctgagcaacatcatccgcaccgggatcatctctgaagttgatgagaagtcctggcgcgtgcgcgttcgcagcggcgaactggaaacaggctggttgcgatggaacaccacgcgcgcgggagccttcaatgtgtggctgccgccatcacccggcgaacaggtggtaattgcctgcattggcggcaacccggaaaccgccatgataattggcagcctgtggagtgatgccaatccggcccccggcaaaagcctgaaagaaatcgtggtcacagcgcctgacggcgcggtgttccgctacgatgcggacgcaggtgcactgagcgccaccggaatcagaaccgccaccattcaggccggaacgggcgtgacgctggacacccccaccgtcacctgcacaaatcatctgaagacggcaacgtttgaggtgacagaaggcggaaccctgagcggcaatatctcgcacagcggcggtgatttcacctccaacggtgtgacgctgcacacgcacaaacacagtggcgtgaagagcggcggcgacaccacaggaggcccgcagtga

SEQ ID NO: 5431 - DNA, 366 bp, Escherichia coli
gtgagtgcacgttttctggggatgaaccccgaagccaccggcacgctcagcgacacggaccatctgtggaacagcgtgagggatattctgctgacaccgctcgccagccgggtgatgcgccgggaatacggcagcctgctgccggatttgctggatgcaccgatgaatgccaccacccgccttcagtgcatgagtgccgtggtaattgccctgacgcagtgggagccgcgcatcgccctgaatgccgttgatattcagtgggaggcgggcggaaaagccgttatcactctcaccggcacgctgacagaaagcctggaaaccgtacagaacacactgacactcaggagcgacaatgccagccgttga

SEQ ID NO: 5432 - DNA, 897 bp, Escherichia coli
atgccagccgttgacctgtcggaactgccgacaccacagattattgaaacgccggattttgaagtcatcctggcggaggtgaaagaaagcatgattacggcattcccgcagacacaacaggctgccgtccggtcagccatggcgctggagtccgaaccgctcacggtcatcgctcaggcatttgcactgcgtgagttgctacttcgccagcgaattaatgaaggggcagcggcctgtatgctgagccattccacaggtgacgacctggataacctcgccgccaacatgaacaccgcgcgactggtcatcacaccggccacggacaccgcggaggccgtcatggaaagcgacacagccctgcggctgcgtgcacagtctgcgtttgatggcctcagcgtggccggtcccaccggggcgtatgaatattttgcccgcagtgccagcggtcaggtggcggacgcacgcgctaccagccccgcaccggcggaagtggtggtggcggtgctgtccacggaaggcgacggtacggcgaccgaagcactcctgacgacggtcagaaatgcgctgaatgccgaagacgttcgcccggtcggtgaccgtctgacggtgcagagcgcagaaatcatccggtatcagattgatgcccggctttacttttatccggggccggagtcggaacctatcctgaatgccgccagaaacaatctggaaacctggcttgccgaacagggcaaaatcggtcgcgatgtggcgctttccgccatcatggccgcgctgcatgttcagggcgttcagcgcgtggaactgaccagccccgcacagaatattgttatcagtgatgtgcagtcagcgtactgcacatcgttttcggtcagcgcagggggaaccaatgagtga

SEQ ID NO: 5433 - DNA, 540 bp, Escherichia coli
atgagtgaaccgtcacttctccccccttcagccagcgatttcatgcgctgcgtggagcggggggctacccggttgtcagcattacctgtcagccttaatcagctctgggatcctgacacctgcccggtggccctgctgccttatctggcgtgggcgctgtccgtggacaggtgggatcgtgactggacggaagaaacaaagcgccaggtgatccgtgatgcctgggcaatccaccgccataagggaaccatcagcgccatcaggcgtgtggttgaaccctttggctatgtcattaacgtgacggaatggtgggaaaccggcgatccgcgagggactttccggctggacatcggtgtactggataccggtatctccgctgcgacctataccgagctggagcgcctcatcgatgatgcccgcccggtgagtcgccatcttaccggattaaatattgtgcaggacatttacggggatgtgtacgccggcggggcggtattttgcggcgacactattgaggtttatccgggagaggttgtctga

SEQ ID NO: 5434 - DNA, 2847 bp, Escherichia coli
atgaaatatggtgccattatcacagcggctggcgctgccaggcttgctgcagccacaacagcaacaggccagaagctgaacatcactcacatggccgtgggagatggtaatggaaatctcccggaaccatcggcctcacagaccgccctgaacaatgaagtctggcgcgggacgctgaataaaattacacagaacagcaaagcgccaaatcaggtgattgcggaactggttattcctccggaagttggcggcttctggatgcgggagctggggttgtatgacgacagcggaaccctgattgccgtcgccaatatggcagaaagctacaagccgttactcgccgaaggttcggggcgctcaatggtctgccgcatgttcatcatcatcagcgatatgaacgcggtgaatctgtcagtggacagcagcgtcattgccgcaacacaggaatatgttaacgaagccatctccggcctgcaccgcgccatcattgatgatgtggttcttcagcataaagttgtccacgatattgactacaccgggatttttgacggcgcggataagatgagccaggggttctgtatctgtgatacgccgcagggaacccgaatgtttctgcatcagcctgtatcgggtggcgtaaggattgttgaaacgatatttaaccctgacggagaaaacgaaaacccgacggtcatttcgttttctcccgttttcgctgatattggtcaccagagtatcggggctgtatgtgaagacgatcgcgtgatgctgtataccccgaccgctgacggcaagggtgtgaatatcatcaactggaatggggctgacaccagtctgacagatgtcacccgtacggagattttcacctctgacttttttaccggggatgaaattataacggtggcattgtcggcagacggaagcctgttaattgttcagtcaggtgatgaggccgtccatcttcattacaacagggatgatcgccgcacagtttatgttttcgatcgcgcctctctgacgtttaaacaccggatttatctgtccacccagccaatggtgtcgcaggcatttcaggggatggccagcgatggtcattatctttttgcttattacggttatacaggcgtatttctgactcaccgcattgttgtatataacctgtcaacgggcgaagttgtcagacagttcaatgtggatggcgttcgtgccaggtatggtcgccagaaaatgctggggaatgcagagctggggtatcccgttttgcaggaagccgaagggctggctctccataacggaaaactgtatctgctcgatatggatttctggtgtcagacagccgatgtggtttcttttgagggggcatactttgcagcacgtgcaacaaatttttctggccgttccccggtgaatccatcttactggacgcctacagcatatggaacggcggctgcaacgaaatatgatgccacgaagtcttatacgtgtggtgtggcgacaaaacgcagcaaagctgtggtttccgtggaggcttacgacggcacaggctatctggtggactccggcgtggcgtttcctgatagccatgccagcctttttctgagtcccaatgctgtaaatatagccctgtcacccaatgaagacttccaggtggcagcctatgagcagaatctgcgctcgcatcgcccgttatttgaggtcagaaaggaggctccggatacagacacttctgctgctgtttttcgtttgttcggggatgcgttccgaaccggagaatacacaggccgcttcgttcagtggaaacaccgcctgaacgacgtgcacgattgtctggaaatacgcgctgacgtggatttgttgagcggtggcgggattaacctttactcaatgaacgatactcagtcggcgggacgcacaaggctttattgcaccgatggcagtgaaacctggtctgtattattgagtccggtctcgccgtcatttcatcccgaccaggacaaggcaatgaatctggggtcatcgccaaatcgctggaatgtggcatacctgcagggcgtgaatattaaatcggatgacgaaacccagaagcgcatggccatcagcaccacgctgaaggcgggagctttccaggtatcaacagccgggaatctgggtatttatgacgattctgctgacgcttatgtaattgcagcccgtagtgacggcactgcattcatgcagatggatacagatattaacggtgcattccggccatcggttaacaataccagcgacctgggtgcgcccaacaaagcattccggagcgtgtatctctgcaactcgccgaccattgtgtcggatgcgacgttaaaggatacaccgcgcgatgcgacggcagccgaaaacgcggcatttgcagaaatagcacggcttccgggcgtgtggcgctggttacagagaattgaggaggagggcgaggacgcgcgtctgcacgccgggccgacagtccaggccgcgatagccgtgatggagaaacacggtctggactggcggaaatacagcgcattttgtctggattcgtgggaagcggaggaggcacagtacgaagatataccggaagagtatgaagatattccggttcagccagcgatttattcggatgaaggggagctgttgagcgggacaacccgtgtgcttacccgacaggcggaaagggttcttgttcgtcctgcaaccgaagcaggaagccgttatcgcttccggaaagaggagcttctctggtggtgtctgcgtgctgttgtcagccaggtggatgcgctgacagagagtatcagcgcacttacccgccgtgttgatttactggaggaataa

SEQ ID NO: 5435 - DNA, 285 bp, Escherichia coli
atggacttaacaccggtgttccatgcactttgtgcggtggccactcagtttctggtgggtctttttaccggaaactgggcttacggagcgatagccggttgcacgttcttcattgcgcgtgaacacacccaggcagaatatcgctggattgaaatgttcgggcatggcaggcgtatgaatatgccgtggtggggcggttttgacccacgagcgtgggatatggcaagtctgatggattttgcagtgccggtggtggcatgtctgctggtctggctggtcgtatga

SEQ ID NO: 5436 - DNA, 459 bp, Escherichia coli
atgatgatgatctacggcatgtttgtttttgagctgcgcacgctgccgcatcagcagatccagcagagcaaaacatggcgacatgtgaaaaatgagcgcattaaccgctctgcagcctggcagtatatcggtgcaggtgatgaccagatcacgctgtccggtttgctgtacccggaaattaccggcggtgaggtgtcgctgacactactgaacacccaggcctacacaggatgtccctggccactgattgatggcacggggcagatttacggaatgtacgtgattacgggattacagaccacccgctccgaactggatcgttacggaaaggcaaaaaagattgagttctccatcagctttcagcggtgtgatgaggatatgagggagaggtttcagtctgcttctgcgggcgaattactgaacacgcttaaagacaaaatggcgacagcggcattctga

SEQ ID NO: 5437 - DNA, 2805 bp, Escherichia coli
atgaagactcttgatatccgggtcgctttcagcgccgttgacaggctgacccggcctgccgaaaacgcccgccgcctgatggggcagtttggtgactccatccagcgaacgcagggggcgatcaaaaatctcgagcgtcaggcgcgttcatttgagcgcgcccgcgacgctgtcagtaaagcggatgcgggtatcgtgaaagcacgacgccagcttaacgcccttaatcagttacaacgcacgggtacagtgctcagcgaaaaacaacaaaagctgatgcagcagttaagcacccggcttgaacgcctgaatgaatcgcgcacacgggaaattcagaaaatgcgggaacttggcggagagctgaaacgccacggcatttccctgacaggcagcgataacaccatccagcaggccatcagacgcaccgaacagtacaacaaccagcttgaacgcgaacggcaggcgcttgcgcgtgtaacgcgggcgcgtgagcggtattcgcgcgcgcaggaaaccgcgggaaaactgaaaacaggtggtgcgctggcaattggtgcggcagcggcgggcggctatgctgtcgggcgttttttgcagcctgcgatcgggttcggcaaagagatgtcccgcgttcaggcactgacgcgaatcgacaaaaacagcccgcagtttaaggcgctgcgtgagcaggcgttaaaacttggctctgaaacacagtttactgcgagtgatgccgccagtgggcagagctttctggcaatggctggttttactccgcaggccattcaggccgcattgcccggtgttcttaatatggcgctggcaggtggcgtcgaactcggcgagacggctgatataggctccaatatcctcacacagttcaacctgacagccgatcaaatggaccgggtgggtgatacgctgacagcagcatttacccggaccaatactgatttacgcgcgctgggcgaaaccatgaagtataccggtccggttgctgcaaaacttggtatcagtcttgaagaagcggcggccatggccgggatgcttgccaataatggtcttcgcggaagcgatgctggtacggccatgcgcgcaagtctgtcccgccttgcatcaccgccaaaagctgcggctgatgcactgaaagagctgggggtgtcagttgctgacgccagaggcaaaatgcgcccgatggaggatgtgctgcttgatctctataaggcgacacaaaaatacggacaggtggaccaggtctccttctttaaggacatcgccggagaagaggcgttcgttggtttgcagacgcttgttgcggcggctggttcaggagaactgcaaaaactgaccagagaattgcagggggcaaggggagaggccgatcgcgttgcaaaagtaatggccgataatcttgatggggacctgaaaaatctcgacagcgcatgggaaggtcttcgtattcgcatcagtgatctggttgacggtccgctgcgttctgtcacgcagtggctcacgcgggtgcttgaaaaaatcacctcgctggcgcaggcccatccggtactgacgcgccagctactgatagcaggcggtgcgttgctggcaatgacagcaacgattggctcgttgtcgctggttattggggggctttacgggaagctggccaccctgcgtcttggtttcgacattcttacccggtcaatgaatgtcatcagggtgttgcctgcgctgtggggaatggtgacgggttctgtttctttgctgggaggcgctatcggggcgttgttcagtccggttggtcttatcgtggctgcgcttgccggagctgccgttcttatctggaaatactgggatcccatcagggcattttttgccggggtgttcagcgggattatggaaaggctgaccccgttgcgcgaaacctttgaacggtttggtcctgtttttgacgcaatcgggagcgggatcagccaggtgtttaactggtttaaatcgctgctgtcaccgatggagtccagcaaggaaacgctggataaatgtaccagtgctggcgagatattcggtaacgttcttggcggtgcgttacagcttgttctgacacctgcaaaaatgctgctggatacgctggcgtggatacttgaaaaacttggcgtccttccggatgaagcggaaagggcgcgcaagaaaatcgaagacgcacagcgtgcggccattcttcaggacaaggttgccttgcttcagggggacctggcgaaaatcaatccgccgaagcctgtggaaaatggcaatggcaccggaggtgataaccccaaagacaataaaccgctcacagacagcaataccggtacgctgcgcagactcagcaaaattgctgataacacaggtaagctggttgatgagacgaaaaaacgcattggccccggcgatattgtctttaagaacctgccccgcgcacttgctgttcgtggggagtggcaggagcggaagattgcgcaggtcagtaagccccccgcaattaatatcacacccgcggtcccggctccgctgcctccggcgctggtccctgttgttgcggccagctcccgcccggtggcggaggccatacgatctccagtggcatcagttcctgtaacttcccgtaaccgggagcctgttgcctccggatttggtggtgaaattcatgttcatctgcataacgttgttacgcagaatccccgcgaactggcgaaactggtcggtgaaatggtcagggcagaaatggaacggcgcgcccgtgccgggcgtggcagtttttacgataaagattga

SEQ ID NO: 5438 - DNA, 375 bp, Escherichia coli
atgaaagacatcgatactgaaacccggaataacaccgtggcggatgatgtgacggcaggtgaggttatggctgtcgaacgtggcgtaaaactgacccgaccaattgagcgtggtggcgaaaaaatcacgtatgtggagatcaccggggctattgaacaggctggatccctgcgtggtctgtcgctgtctgatgtgctgaatctgaaagcggataccatgttcacgctgttgcctcgcgtgacctcgccacgactggatgaagtgatgattaaaaaaatgtcgtcacgcgattttattcagttgtgcgctgtggctgtaaattttatgagcgagccagactctggcgcgaagagcgtgcaggagacggcagcgtaa

SEQ ID NO: 5439 - DNA, 513 bp, Escherichia coli
atggctgtaccaaaacatcttcgcttttttacgttgtttgtggatggtgaaaacgaagtgggtaaagtgacatccgtcacgccgcccaaactgacgcgcaaaaccgacagctatcgtggtggtggcatgatgggggcagtaagtattgatctcggtctggacgactccgcacttgatgcgagttttgtcatggggggagctgttcgtgcgctgttccttaaatatggcggcacgattgacggcacgctgctgcgttttgcgggtgaatactacaccgatgcagaaagcgatctgtatgaaatcgagatgcgcgggcgtgtgacggaaattgatatgggggaagccaaacagggcgaagccacatcacacacttacgctgtcaaaaacacctactacaagctgagcgttaacgatcgcccgctgtgggaaatcgacctgttgaaccacatctaccggaaggacggcaaggacattgtgcctgaccgcatccgttccgcgcttgggcttggctga

SEQ ID NO: 5440 - DNA, 1185 bp, Escherichia coli
atgagtgaaactcgttttcatggtgtccgtgttacggaaagtaccgacctggtaacagcgattaatgatgttgattccagtgttatcggtatcgtggcaacggcggatgatgcggacgcggagctgttcccgctgaacaagcccacactgctgacccgcgtcaatgacatgctgggaaaatgcggaacaacggggacgctttatcgtgcgcttaaggccatcgcagaccaggtgagcacaaaggtgatcgtcgttcgcgtggctgaacacaaagaagaagacggaaaaacgcaggatcaactggttatcggtggttctgaatctgacggcagctatacggggatgtatgcgctgcttgttgcagagcaggatgaaagcatcggataccgtccgcgtattctggccgcgccggagctggacacggaggcggtaacaaaatccctgtgcgtgattgcaggtaaactgcgcgcgtttgtctatgcctcatgtcatggctgtgacacgatggctgatgcgattacctaccgccagaaattcaacgaacgtgaggtgatgctcttatggccggacttcatcgcctacaacccgaaaagtggcaaaaacgaaacgttccccgcgcctgcctatgcgtgcggccttcgtgcgtacattgaccatgagcagggctggcacaaatcgctgtccaacgttccggttaaaaatgtgctggggatgtccaggcatgtgttctggtcgttgcaggccgaagacagtgatgccaacagcctcaacaacaaagaaatcacgaccattattcgtcgcaacgggttccgcttctggggtaaccgcacaccggaaacgaacgcctacatctttgaggtgtatacccgaaccgcacaggtgctggctgattcaattgcggaagcgcagtttgaaaccatcgacagtccactgacgcctgcgaacgtgaaggatgttatcagtgccatcagggcaaaactggattcgctggttactgccgggaaactgattggcgcggagtgctggtatgacgtggtggataacggcaccacgaatttacgtcagggacgtgtgcgtattcgctacaaatatacgcccgttccgccactggaagacatggagctttaccagtcgtttactgatgaattctttggtcccgcatttgcggtgctgggaggtgcctga

SEQ ID NO: 5441 - DNA, 1110 bp, Escherichia coli
atgaccgacaccaccatgcaattgctcagtcagggcacagaccccgtgaaaatgccggattttgatattctcgcggagggtaaaacgctgtcaggcgtggcagagcgcctgatgagcctgtcactgaccgacaaccggggatttgaagcggaccagctcaccatcacgctggatgatgcggatggtcagttgcagctaccgccacggggcgcgcgcctgacggttctcattggctggaaaggagaaccgctgacagaaaaaggcacttacattgttgatgaaatcgcacacgaaggaccgccggacaggctgactgtttcagccagaagcgcagattttcgggatgaatttaacgttaaacgtgaggtgtcctggcatgatgtgaccgttgagcgcgtggtatccgccatcgctcatcggtacggtctgaaaccacaaatcagcgaaatgctgatggatattgaaatcgaccacgccgaccagaccgaagaaagcgacatgtccttccttacgcgcatggcggaaatgctgggcgcaatcactacggtaaaaagcggtaatctgttattcatcatgccaggcggtggcgtgaacgcacaaggccagccgttgccctcgttcgccatcacgcgcagcagtggcgatcgccatcagttccgcattgctgaccgcgaagcgtatacgggggtacgcgcttactggcttgatcttaattacgggaaaaagaaaaaagtcagcgtgaaacgccgcaaaccgccaaaacccaaaaaggagaaaagcagcagccgtgaaggtgattatatggaaggcgcggaaggcaatgtgtttgtgttacgcaagacttatcagaacgagcaggcagcaagacgcgcagcggcggcaaagtggcagcagctacaacgcggagccgcatcattttccatcacgctggcgcgtggacgtgcagaactctaccccgaaatgcatggcacggtaacaggatttaaaagcgagattgataatcaggactggattattgcgaaagccgagcacaccattgataacagcggctttaccacgcagcttgagcttgaagcaaaaatcccggaatggatagcagaaacagagtga

SEQ ID NO: 5442 - DNA, 261 bp, Escherichia coli
atgttccgttgtccgctttgtggcgcatctgcccgtatccgcaccagtcgttcggaaaatgattcaaacaccgtacggaaaaaatattaccagtgtaacaacctggaatgcggcataagtttctcaacactggaagctttccataaattcacatcgaaacacgcccccggcgttcactcttcagaaggtatcccgtggcatgagttgccagcttcacacaggggaaacaatcagatgagtttgcctttacctcagaattaa

SEQ ID NO: 5443 - DNA, 141 bp, Escherichia coli
atgtcgcaaaaatcgcttacggccatcacgttctgcgtgacggcaatcctcatcatctggatgctgcacggttcgctgtgcgaaatacggatgagcttctggggagcggagtttgcggcgttcttacagtgtaagcagtaa

SEQ ID NO: 5444 - DNA, 828 bp, Escherichia coli
atgaataataagctaaaggtaattgagttaaatagtcttgatctgtttcgtaaagaattactaactactataaagccagagaaagtagagaaattacttagatggtatcttcaatcatatggcggtgttaatttcaagttcggttatgacagaccaatttttagagcgcgaaagtgcccaaatgaatgcggatataataacatcagtgagatatatccccctccaccagaaaaatgtaaaataggccgaatgaatgatgatggacaagctatcttctatggcgcttatagtatcggaacagctttagccgaaattaatgcaaaagaaggggattatgttcacatagctcactttaagatgccggaaaattcagagtctggaatgcgatgttttgctatcggtgaggtctttaatgtgtatcacggtgtaaatacaatttcaattgaagtgtttaatgaaattcgcgacatcattagcagaattggtaaggacgacatccgagctttgctatcatatttgtatatggatgccctttctgctgagttgcttaatagtatcaatgcccatgaggtaaattatatttactcaagaattttttgccgtcttcttcttgataaataccctgatgttgatggtcttatttatcctagcgctaaaataaaaggggcctcaaatatcgctttgcgcacagaaacagttaaatcgagaatgcatttagttgctaatcttgtgtttaaagtaaataaaatttatccatatggaatagtagatttcagtatagtaaaacaagccaaaggacatacatcagatgggcgcatcgtttggtga

SEQ ID NO: 5445 - DNA, 333 bp, Escherichia coli
atggcattaatcaaatgtcctgaatgccagaaagaggtcagcgattcagcattatgttgccctgcttgtggtaaacaactgaaaaaacttaagcgttcattttttggaaaactcattaaatgggcttttatattttttaatatttttatgatctatacacttttagttggactaggaggcgctgatgaaataataaacaataccacatccgatgccgaaaaagctggggcagttattggtacgggcttaggtttaattgccattggaggcttatgggttattggcgatataattatcggaattttagtgtttcttactaaaccaaagggataa

SEQ ID NO: 5446 - DNA, 894 bp, Escherichia coli
atgaaaaatatgattttttctataggtgcattatttatatcaattagtgtactgcctgttcacgcagcaactgaacataagaatttcaatgcagtgctccagtgccgagcgatagaaaacaataaagacagactttcttgttacgataagtcaatacaaccgactcgaacgaaagttgctgaaaaatttgaaagcagggatcaatgccctgatgagaaagatgatgacaaacgtttatcttgttatgatcgttttttttctccaacatttactccatctgtaaactcaaaatctaaaacggaaaagctagtaacaacagaggctcagcaaccaaatctttctgaaatatctaaatgccgagcagaaaatgataaagaagccagactaaactgctacgataaactattcccacagaatgaagctgttcaatctgaatcacaattagagaaagccacagatgcaggaaaatggcacacgtccattactacatcgccaattgatgattcgaaaaatgtaattttatcgttagaaagtgatgattatatcagaactccatttggagaagctgttactcccactctgtttatagcttgccgagaaaagaaaaccgaagtatttcttagttgggatgtatatttaggccttgaacaaaccagcatgctgtatcgtcttgataaacagaaagcagttgaaagaaactggctaatatctacagatacaaaggctgttttttataaaggtaatgatattgatttcataagaaaacttgccaactcacataaaatgtacacaaaaataaccccctataatgaaagccctgtaagtgcaactttcaatttaagcggcctgtcaaatgcactaaaaccgcttcaagatgcttgtaactggaaatag

SEQ ID NO: 5447 - DNA, 1179 bp, Escherichia coli
atgactgctgtaagccaaaccgaaacacgatcttctgccaatttttcgctcttccgcatcgcttttgcggtttttctcacctacatgaccgtagggctgccgttgccggttatcccgctgtttgttcatcatgaactgggctatggcaacaccatggtcggtattgccgtcggcattcagtttctggctacggtgctgacgcgtggttacgccgggcgactggccgatcaatatggcgcaaaacgttcggcgcttcaggggatgttagcttgtggtctggctggcggcgcgctgctgttggcggcgattttgcccgtctccgcaccgttcaaatttgccctgttggtcgtcgggcgtttgattcttggctttggtgaaagccagttactgacgggcgctctgacctggggattaggcatcgttgggccaaaacattccggcaaagtgatgtcatggaacggaatggcgatttacggtgccctcgctgttggtgcgccgcttggcctgttgattcatagccattacggttttgccgcactggcgctcaccacaatggcattacccttactggcgtgggcctgtaacggcacagtgcgcaaagtaccggccctggcgggagaacgtccatcgctgtggagcgttgtcgggcttatctggaaaccagggttaggtctggcactacaaggcgttggttttgcggttatcgggactttcgtttcgctctactttgccagtaaaggatgggcgatggcgggctttactcttaccgcgtttggcggcgcatttgtcgtgatgcgcgtcatgtttggctggatgccggaccgttttggcggcgtgaaagtggcgatcgtctctctgcttgtagaaacggtgggcttgttgctgctctggcaagcccctggtgcgtgggtcgcattagcgggcgcggcgttaaccggagccggatgttcgcttatctttcctgcgctgggcgtggaggtggttaaacgcgtcccctcacaagttcgcggcaccgcactgggcggttacgccgcgtttcaggatatcgccctcggcgtctccgggccgctggcgggaatgctggcgaccacgtttggttactcttcggtatttcttgccggggcgatctctgcggtgctgggaattattgtcacgatactgtcatttcgtcggggctaa

SEQ ID NO: 5448 - DNA, 825 bp, Escherichia coli
atgaaaaaaatgagcggactgttttttttactgctgaccgggctactgagtgcaaccgcctgggcggacgtcacattcagggatgtgaagacttataccggattttggggtaacggggctacaacaaaagttgtctttcgtatcgatgtcttgacgccggaaggggtctattatggcgaatatgcacaggatggatatacgttgtggttggggaatatccctaacacggtttggacgggaccgggatcagcaccaacgatgaacatcactcatcagagtaatactgtggataactccaattgcccagggattacggatggatggtcatgtgttgatctgggggtcgatatcatcgtgcatggtgaaactcacgggtgcccgtggttggtcagtaccaacacggtgagtactgctgcgagaggttatacttacattggtccatcagcaaaacaaacccggtgcccaacggagccggttggcccctatgatatctcctggaatgagaactacgtcctccataacaagatgctaacgctgcaatcgacggggggagtcataacacaaacgctctcgacttacctgatgcgcgacgggcgggtgtgtgatggaagccgaatggacgatcgtggcgcttattgtcgctttatgtcgtatatgatcacattcagcacgtcggggtgtgacgacagcaaagtcacagtaacgccggtagcacatccaattaccgataagcaactgcatgatatgcaaatacggatcgacaccagcagtcagcagccaatcgatgccacctgtcgtttccagtacattttgaatgagttgtag

SEQ ID NO: 5449 - DNA, 480 bp, Escherichia coli
atgaaacgatttgcgctctgcttattcggttgttattgcggtattgcacaggcggccgatagcgatatcacatttcatggcacattggtttcgccgcccgcctgtgccatcagtgacgggaaaaccgttgaagttgagtttcgtgacgtcattatcgacaacatcaacggcaataacttccgccagaatgtgccctataccattacatgcgatcccgacgtgcgcgacgatgcctgggagatgacgctgagctggacgggcagccagaccagctacgataacgcggctattgagacaaacgtcaccgggctggggattgagctgcaacaaaatggccagccgttcacgttgggtacgccgctgaaaatcaacccgtcaacgccgccaacgctgcaagctgtaccggtgaaagccagtgatgcttcactcagcgaaggaaccttttctgcctgggcaacattacaggtggattaccaatga

SEQ ID NO: 5450 - DNA, 492 bp, Escherichia coli
atgaaaggagttttattacccgtcgctggcatggtgttactggcctgcggctccgcctgggccgatagtaaaacggtcaacttaacgcttcgtatactggtggatgcaccgccgccctgtacggtaaaaggcagcgcggtggagtttggcaatgtcattattaaaaacatcgacggcagcaactatcggcagcctgttggttacaccctgaactgttcgaacagcgtcagcgatgacctacagatgcagttacaggggaccaccaccaccattaacggtgaaacggtcctcagtacgggcatcaatggttttggcattcgcatacaggatgcgtccagccatgcgccggttgcgttggcgggtaataactggctgccgtttaacgttaattcgcgcccgggtttcgaagccgtgccggtgaaacaaagcggcacacagcttacggcatcagagtttagcgcaaccatgacaatggtggtggagtatcaatga

SEQ ID NO: 5451 - DNA, 198 bp, Escherichia coli
atgatgcgtaaagcgcttcgcgctaaattcgaacaacatgcagaactgcgtacactcttgctggcaaccgcgtccgcaaaactggttgagcatacgcaaaatgatgcttactggggagatggcggtaatggtcagggcaagaatcgcctggggtaccttttaatggcgttgcgcggacaattggctgcggagaagtaa

SEQ ID NO: 5452 - DNA, 1539 bp, Escherichia coli
atggcaagagctgtacaccgtagtgggttagtggcgctgggcattgcgacagcgttgatggcatcttgtgcattcgctgccaaagaggtggtggtggcggtgggatcgaacttcaccacgctcgatccgtatgacgcaaatgacacgttatctcaggccgtagcgaaatcgttttaccaggggctgttcggtctggataaagagatgaaactgaaaaacgtgctggcggagagttacaccgtttccgatgacggccttacttacaccgtgaaattgcgggaaggcattaaattccaggatggcaccgatttcaacgcagcggcggtgaaagcgaatctggatcgggccagcgatccggcgaatcatcttaaacgctataacctgtataagaatatcgccaaaacggaagcgatcgatccgacaacggtaaagattaccctcaaacagccattctcagcgtttattaatattcttgcccatccggcgaccgcgatgatatcaccggcagcgctggaaaaatatggcaaggagattggttttcatccggtgggaaccgggccgtatgaactggatacctggaatcagaccgattttgtgaaggtgaaaaaattcgcgggttactggcagccaggattgcccaaactggacagcataacctggcgtccggtggcggataacaacacccgcgcggcaatgctgcaaaccggtgaagcgcagtttgctttccccattccctacgagcaggccgcactgctggagaaaaacaaaaatatcgagttgatggccagtccgtcaattatgcagcgttatatcagtatgaacgtgacgcaaaagccgttcgataacccgaaggtccgtgaggcgctgaattacgccattaaccgcccggcgctggtgaaagtggccttcgcgggctatgcaacgccagctactggtgtggtaccgccgagtatcgcctacgcgcaaagttataaaccgtggccttacgatccggcgaaagcgcgcgaattactgaaagaggcgggatatcccaacggtttcagtaccacgctgtggtcgtcacataaccacagcactgcgcagaaagtgctgcaatttacccagcagcagttagcgcaggtcgggattaaagcccaggtgactgcgatggatgccggacaacgggcggcagaagttgaaggtaaagggcaaaaagagagcggcgtgcggatgttctacactggctggtcggcttcaaccggcgaagccgactgggctctatcgccgctgtttgccttgcagaactggccaccaacgctgtttaataccgcgttttacagcaataaacaggtggatgacttcctggctcaggcactgaaaactaatgatccggcggaaaagacccgcttgtataaggcggcgcaggatatcatctggcaagagtcgccgtggatcccgctggtggtagaaaaactggtgtcggcacacagtaaaaacctgaccggtttttggatcatgccagacaccggcttcagctttgaagacgcggatttgcaataa

SEQ ID NO: 5453 - DNA, 894 bp, Escherichia coli
ttgcagggggaaaacgcctggagttacgcagaaaagctgaaactggcgatttccagtatccgcaaccatatgttctcagagtttattttctgtgatgatgcgaaactcaacgaaatagaagagaatatctggattgcgcgtaatattcgccatgcaatggaaattggcgaactattcctggtctatcaaccgattgttgatattaacacccgcaccattttgggcgcggaggcgttgtgccgttgggtgtctgcggagcgggggattatttcaccgctgaagttcattaccattgctgaagatatcgggtttatcaatgagctgggctatcaaattattaaaaccgcgatgggtgaattcagacattttagtcagcgtgcgtcgctgaaggatgatttcttactgcatattaatgtttcgccctggcagttaaacgaaccacactttcatgagcgttttactaccatcatgaaagaaaatggcctgaagacgaacagcctttgtgttgagatcactgaaaccgtgatcgagcgaattaatgaacatttctatctcaatattgaacaactgcgtaaacaaggggtacgggtatcgattgatgactttggcaccggtttgtcaaacctgaaacgtttttatgaaattaatccagacagtataaaggtggattcgcaatttaccggcgatattttcggtactgcgggaaaaattgtgcgcattattttcgatctggcacgctataaccggatcccggtgattgcggaaggcgtagagagcgaagacgttgcgcgtgaattaatcaaattaggatgtgttcaggctcaggggtatctgtaccagaaacccatgccattctccgcctgggataaaagtggaaaattagtaaaagagtag

SEQ ID NO: 5454 - DNA, 2277 bp, Escherichia coli
atgctcaatcaagaactggaactcagtttaaatatggctttcgccagagcgcgcgagcaccgtcatgagtttatgaccgtcgagcacttgttactggcgctgctcagtaacccatctgcccgggaggcgctggaagcgtgttctgtagatttggttgcgctccgtcaggaactggaagcctttattgaacaaaccacacccgttctgcctgccagtgaagaggagcgcgacacacagccgacgttgagttttcagcgtgtactgcaacgtgcggtcttccatgtccagtcctccggtcgcaatgaggttaccggtgcaaacgttctggtcgctatctttagcgaacaggagtcgcaggcggcatatctgttgcgcaaacatgaagtcagccgtctcgatgtggtgaactttatctctcatggcacgcgtaaagacgagccgacacagtcttctgatcctggcagccagccaaacagcgaagaacaagctggtggggaggaacgtatggagaatttcacgacgaacctgaatcagcttgcgcgagtgggcggaatcgacccactaattggtcgtgagaaggagctggagcgtgctattcaggttctctgccgtcgccgtaaaaacaacccgctgctggtgggggagtctggtgtcggtaaaaccgcgattgcggaggggcttgcatggcgaattgttcagggcgatgtgccggaagtgatggctgactgtacgatttactctctcgatatcggttccctgttagcgggcacaaaatatcgcggcgactttgaaaaacgttttaaagcgttgctcaagcagctggagcaggacactaacagcatcctgtttattgatgagatccacaccattatcggtgcgggtgcagcgtctggtggccaggtcgatgcggctaacctgattaaaccgttgctctccagcggtaaaatccgcgtaattggttcgacaacctatcaggagttcagcaacattttcgagaaagaccgtgctctggcgcgtcgcttccagaaaattgatattactgaaccgtcaatcgaagaaactgttcaaatcatcaatggcctgaaaccgaagtatgaagcgcaccacgacgtgcgttataccgcaaaagcggtgcgtgcggcggtagagctggcggtgaaatacattaacgatcgtcatctgccggataaagcgattgatgttatcgacgaagcgggcgctcgcgcacgtctgatgccggtaagcaaacgcaagaaaaccgttaatgtggcggatattgaatccgtggtggcccgtattgcacgcattccagagaagagtgtttctcagagtgaccgcgataccctgaaaaacctcggcgatcgcctgaaaatgctggtcttcggtcaggataaagccattgaggcgctgactgaagccattaagatggcgcgtgcaggtttaggtcacgaacataaaccggtcggttcgttcctgtttgccggccctactggggtcgggaaaacagaggtgacggtacagctttcgaaagcgttgggcattgagcttctgcgctttgatatgtccgagtatatggaacgccataccgtcagccgtctgattggtgcgcctccgggatacgttggttttgatcagggcggtttgctgactgatgcggtcatcaagcatccacatgcggtgctgctgctggacgaaatcgagaaagcgcacccggacgtgttcaatattctgttgcaggtgatggataacggtacgctgaccgataacaacggacgcaaagcggacttccgtaacgtggtgctggtgatgaccactaatgccggggtacgggaaactgagcgcaaatccattggtcttatccaccaggataacagcaccgatgcgatggaagagatcaagaagatctttacaccggaattccgtaaccgtctcgacaacattatctggttcgatcatctgtcaaccgacgtgatccatcaggtggtggataaattcatcgtcgagttgcaggttcagttggatcagaaaggtgtttctctggaagtgagccaggaagcgcgtaactggctggccgagaaaggttacgaccgggcaatgggcgcacgtccgatggcgcgtgtcatccaggacaacctgaaaaaaccgctcgccaacgaactgctgtttggttcgctggtggacggcggtcaggtcaccgtcgcgctggataaagagaaaaatgagctgacttacggattccagagtgcacaaaagcacaaggcggaagcagcgcattaa

SEQ ID NO: 5455 - DNA, 1119 bp, Escherichia coli
atgtcaccgaggccacgaaaaaacagcactgacgtagccggtctttacgaaaagtttgatcgcagaactggcagagtttactaccagtataaaaatcctgtgactggaaaatttcacggactcggaacagacaaaggtaaggcagaaaaaatcgcttccacagccaatcagcgaatagctgcagcagaagctgaatatttcatgcgcaaaattgatgaaagtccgtcagcaacaaaacgtcggggtatcagattaaaggcatgggttgatcgatatctgaaaatacaggacacgcgactgaaaaatggagatattgcagctacaactcacaaagaaaaaactcgaatggctgcatacctggtttcccgtctgggaaaccacccattgaaagaactggaagtaagagactttgcattaatactggatgagtggctggataaagacatggtcagcacagcgagagtaaatcgtggattatgggttgatatttataaagaagcacagcatgcaggggaagttcctcctggatggaatcctccggaggctacccgtaaaccgatccctaaagtaaccagagccaggctcaccatggaagactggcaaaaagtttacaatgcaacgcctgaaaaacactttatccgtaacgcaatgcttcttgcgattgttactggtcagcgccgtgatgacatttgccacatgcgtttttcagatgtgtggaacgaacacttgcatatcacccagggaaaaaccggaatgcgtctggcgttaccgcttacactacgctgtgatgccattgggataacgttaaaagaagttattgatgggtgccgagacagaatattaagtccatatctaatccatagtcggcaccagaaacaaccgaagccgatgagtaaagacaacctgagcgactactttgccaaagcacgggatctggctgggataattccaccagcaggaaaaactccgccaacatttcatgaacaacgctctctatcagaacggctgtaccgtgcacagggtatcgatacaaaaacattactaggacataaagtccaggcaaccaccgatcgctataacgatactcgaggtcaggaatgggttaagttggttatttga

SEQ ID NO: 5456 - DNA, 270 bp, Escherichia coli
atgagcgaacagtacctgataacgctcgacgagtggaaaccaaaacggttcagtctcccaataacaaacactaccctggtgaaatacggaaaactaggatacatcgttccaagaccacaaaaaattcgtgggcgttggctgatagatcgccgagcagtatttgttgggcctggtgaaacgggaattgcgccggaaattcatactggcgatgatgatgcactgaaggagattttaactcatgtcaccgaggccacgaaaaaacagcactga

SEQ ID NO: 5457 - DNA, 396 bp, Escherichia coli
atgactacaaaagaccgtattcagtcccgactgaaccgttcaaaacgttatgtgttcacccgggatgatttcagggatatcgctggctatgatcaggttggcagagctcttcgtacactggtaaacgaaggtaagttgatgaaagtgggctatggtgtttacaccaaagcccgtcgtaacatcatcactgggaaaatcatgcccgcagcgcctgggggctctgctgcagtaattacagaggccctggagcgcctgaatatcagataccgtctggcaggagcaacggaatgctacaataaaggtcagtccacacaaattcctgtatctctggggataaaaacaccttctcgatttaaaagagtgttaatagtagggaaaagtaaaatcaatgcctga

SEQ ID NO: 5458 - DNA, 918 bp, Escherichia coli
atgcctgaattaacatcattatttcctgacgttgccgatgcactggatattgaatctgtcgctatcgtcgaaaaagattattttgtggttgatcttttaagattattaaaagaaataaaaccagaaacacatactctcgtgtttgcaggaggtaccgcattatcaaaagcaggtatctcgctaaacagaatgtcagaagatattgatataaagctcgtgccaacagagaactttatgcaaaatggcagagacaagagaagaaaaattcgcaaggaaatcgtgcaaataatcacggatgttattcataattctgacattttcagcttggataatgaaaacgcccgtataacacgtgatgagtatcgttataacgaaatctcggtacgttatccccagacatttgcacaagtcccctgtcttcgtccatttattaagctggagttgatggaaagcactctgctggaacatccggaaagcagagatatttattcccttgtcacggagttaacgggtaaaggtacacctgtaacagcattcccctgtgccaccattttatccactcaggctgaaaagctcatctccatgatgcgaagaacagcagcacatcttcgtaatcccgaacaacaggatgatgagtttctggtacgtcacatttacgacaactactgcattgtcagggaaaaaggtgtgaatgttcctgtattgaaaaattttgttcagatatatattcacgctatggtaaccagtacccacaattttgtagctcaccagttgatgaacttaagaaagggctggatgcactccgggattatcctgtacacaaattgcgctttcaacgatttgttaaaccgatggtatttggtaatacacagattaactgggaagaagcctattccagtttcagacaaacagcgctaa

SEQ ID NO: 5459 - DNA, 156 bp, Escherichia coli
atggcagcgcttgtggtaacctggtttaatccggtgaaagaggcgttttacatgcatctgccagcacccggaaaaaccaaaaaagtggcgctggttgactgtatgcgtaaattgctgaccatcctgaacgcaatgctcagaaagaacgaagagtga

SEQ ID NO: 5460 - DNA, 1500 bp, Escherichia coli
gtgacgctcaatacttctcaggtcagttactatatgactcagcgtaagaaaggtataactcagcatatctcggccatgaaggctggtatctcagtccgttctggtcgtcggatcgaaaaaggagagtgggcaaaaaacagtgttcggcactggcgcacacgcaaagatcctctggaagctgtgtgggacagcatgcttgttcctctgttgaaagagaggccggctctgacaccaacaactctgctggagatgctacaggataaatatcccggccagtaccccaacagccttcgaagaacaatgcaacggcgggtccgcgaatggaagctacagtatggtgcagagcaggaggtcatgttccgccagcgacatcagcccggtctgcgaggtctgtcggactttactgaactgaaaggtgtagttgtcaccatcgccggtaagttgttggcgcataagttgtatcacttccgtctggaatggagccactggagctggatgcgggttgtgctgggtggtgagagcttctctgctctggctgaaggtctgcaggaagccctcggacaactgggcggagtgccggtagaacataaaacggacagcctgagggcagcatggaaacaacagggcgaagatggacgccgcgagctgactgagcgttatgctgctctctgtcagcactacggaatgcagggcgtacacaataatgccggtcggggccacgaaaatggctcggttgaaagtgcccacggacatctgaaaaggcgtatctgtcaggcgctgatactgcggggcagtaacgacttcagcactatagaagaatatcaggccttcatcactcagcaggttatgcggcacaaccgtaacaatcaggatctggtcaaggaagaacgtcttcatctgaaaccgctgccgcttcgtcgcagtgctgactatgatgagctgactgtgagggttagccgcagcagtaccatcaatgtgaagcacgtcgtctacagcgtaccttcccggcttgtaggtcaactgttacgggtccggttatgggacgatcgtctgagctgttacgttggcagcagcgaggtcatgagctgcccacgtgtcagaccagaaaaagggaagacgcgggcccgtcgtatcgacttccgacatgtgatcgacagtctggcaaaaaagcccggtgcgttctgccatgcaacgctgagaaatgacatcctgccagacgatgaatggcggaggctgtggcgtcgcttatgtaatcatctggaacccgacatggcaggcaggctgatggtacatgctctgaaactggctgcaggatacgacgatatctcagtcgtggcaaaaggtatggagcagatgctgaataccccgggaaacgtggatctgcaccggctgatgcgcttcctgggtataaaggaaaaggcgttgccggtagtcaatgtgatacagcataacctgagcagttatgagcaactactgcgtggcaagggaggttcgcagtga

SEQ ID NO: 5461 - DNA, 561 bp, Escherichia coli
ttgccagttgccaaaacgctaagcgaatacgacttcagtcaggtgccggaactgaatggagctcagttccggcaactctgtgaaacgacagactgggttgatgctggagaaaacgttctgctgttcggggccagcgggttggggaaaagccatctggcggcagcgatcgtggatggcgtagtaggccagggctaccgggcccggttctacagcgcaggagagctgttgcaggaactacgtaaagccagagctcagttgaaactgaatgagctgctactgaaactggatcgctaccgggtgatagtggtggatgatcttggctatgtcaaacgcgacagcgccgaaacgggtgtgctgttcgagttaatagcgcatcgctatgaacgtgggagcctggtgataaccagtaaccatccgttcagcatgtggggcagcatcttcgtggatgagactatggcggtggcggcagcagaccgactgatccatcacggatatatgttcgaactgaaaggggaaagctacaggaaaaagacagcgaaggcggtaacaagcgtgacttga

SEQ ID NO: 5462 - DNA, 984 bp, Escherichia coli
atgtctgaaagacatttacctgatgaccagagcagtactatcgatccatatctaattacctctgttcgccagactctggcagaacaaagcgcagcattacaaaacttgtctaaacaactggattccgggcagtaccagcgtgtccttaatttgataatgaactgtaaagggcacgttattctttcgggaatgggtaaatcagggcatgtcggtcgtaaaatgtcagcgacgctggcctctacgggtacgcctagtttctttattcatcctgcagaagctttccatggcgatctgggcatgattacgccttacgatcttctgatccttatttctgccagcggtgaaacggatgaaatcctcaagctagttccttcactgaaaaatttcggcaaccgaattatcgccattaccaataatggaaattccacgctggcgaaaaatgctgatgccgtgttggaactccacatggcgaatgaaacctgtccgaataatcttgcaccaacaacgtctaccacgctgacgatggcgatcggcgatgcgctggcgattgccatgatccaccaacgcaaatttatgccgaatgattttgcgcgctatcacccgggcggttcattaggtcgtcgcctgctgacccgcgttgctgatgtcatgcagcatgatgttcctgcggtacagctggatgcgtcatttaaaaccgtgattcaacgtatcaccagcggatgccagggaatggtgatggtagaagacgcagaaggtgggctagcgggcattatcaccgacggtgacctgcgtcgttttatggaaaaagaggattctctgacatccgctacggctgcgcagatgatgacacgtgaaccgctgacgctaccggaagacaccatgatcattgaagcagaagaaaaaatgcaaaagcaccgcgtctcaacgttattggtgaccaacaaggcaaataaagtcactggccttgtgcgcattttcgactaa

SEQ ID NO: 5463 - DNA, 1677 bp, Escherichia coli
atgaaattatttaaatcaattttactgattgccgcctgtcacgcggcgcaggccagcgcggccattgatattaacgctgacccaaaacttacaggagccgcgccgcttaccggtattctgaacgggcaacagtcggatacgcaaaacatgagcggcttcgacaataccccgccgcccacaccgccggtggtaatgagccgtatgtttggtgctcaacttttcaacggcaccagcgcggatagcggtgcgacggtaggattcaaccctgactatattctgaatccgggtgatagcattcaggttcgcttgtggggtgcgttcacctttgatggtgcgttacaggttgatcccaaaggtaatattttcctgccgaacgttggtccggtgaaagttgctggcgtcagtaatagtcagctaaatgccctggtcacatccaaagtgaaggaagtataccagtccaacgtcaacgtctacgcctccttattacaggcgcagccagtaaaagtgtacgtgaccggatttgtgcgtaatcctggtctgtatggcggtgtgacgtctgattcgttactcaattatctgatcaaggctggcggcgttgatccagagcgcggaagttacgttgatattgtggtcaagcgcggtaaccgcgtgcgctccaacgtcaacctgtacgacttcctgctgaacggcaaactggggctttcgcagttcgccgatggtgacaccatcatcgtcgggccgcgtcagcatactttcagcgttcagggcgatgtctttaacagctacgactttgagttccgcgaaagcagcattcccgtaacggaagcgttgagctgggcgcgccctaagcctggcgcgactcacattacgattatgcgtaaacaggggctgcaaaaacgcagcgaatactatccgatcagttctgcgccaggccgtatgttgcaaaatggcgataccttaatcgtgagcactgaccgctatgccggcaccattcaggtgcgggttgaaggcgcacactccggtgaacatgccatggtactgccttatggttccactatgcgtgcggttctggaaaaagtccgcccgaacagcatgtcgcagatgaacgcagttcagctttatcgcccatcagtggctcagcgtcagaaagagatgctgaatctctcgctgcaaaagctggaggaagcatcactttctgcccagtcctccaccaaagaagaagccagcctgcgaatgcaggaagcacaactgatcagccgctttgtggcgaaagcacgcaccgttgttccgaaaggtgaagtgatcctcaacgaatccaatattgattctgttctgcttgaagatggcgacgtcatcaatattccggagaaaacatcgctggttatggttcatggcgaagtgctgttcccgaacgcggtgagctggcagaagggtatgaccaccgaggattacatcgagaaatgtggtggcctgacgcagaaatcgggtaacgccagaattatcgtcattcgtcagaacggtgcagccgtcaacgcagaagatgtggattcactcaaaccgggcgatgagattatggttctgccgaaatatgaatcgaaaaacattgaagttacccgtggtatttccaccatcctctatcagctggcggtgggtgcaaaagtgattctgtctttgtaa

SEQ ID NO: 5464 - DNA, 1137 bp, Escherichia coli
gtgtctgttaataacctatactacttatatattgatacagaaattgaaggagctttggaacagttaattcgttattttcaggcacaagtattcaatgtggaagattgcataagtgtgtattgtaagtactataaagaaatagaaaaaaaattcactgagaagtttaataaacataatatatcatttaaatttattaagaaaaattcagacttggtttttaataatggtaaaattgttttctatttattcaacgctcaatcaaattgtcgtattgtggcaaatagaaacctgattcacgtttttgttacacatggtgaaagccataaacttgcttctgtaaaaccgattataagaatttatgattacgtagttacttctggagatgtaggtattgatagatatcttaagtccggaatttttacaccattcgatatcagaaatgggaaagtaattaaactaggaaatactttcattgggcataattattttcagtttgatgtaaattctcgttctgctgtatatgctccaacatgggaggggggaatcccagaagaaaattatagttcgataaataatgaaaccacacataagataataaaattttgtaaaatcaaaaaaataaatattctttatatacaagcacatccaaacataggtcatcgagatcataaatacaaagccattcttaatgagagtattaggcttttcacgaaagctggtttaattgtttataaaataacaaatggattcattgaaggaactcgattccccctaattaaattacgaagaaagataactaataatataaaagtatcatatgcattaacagatatatcagcaatggaagttcagtttcactctcgtaaaataccatgcggcgtaatagtcaatggtaattgtaaagaaaatgtttttattcctaaaaagctattatcttattataaacataatttatttcacattagtgatgacatattaaatattgagtcttgtcctgaatatattcaaaaataccttttgtcatattcatttgcatcgcttgaaaatatgagttttaagcaacgtgttagctggctgtgtgagtatttaaaggaagatgcaaaaattaaaaaagataagttagagagtttgtattaa

SEQ ID NO: 5465 - DNA, 1374 bp, Escherichia coli
atgaaaaatattgctgttattctatcgggtggtatggggtcaagatttggcggtacacttccgaaacaatttacaaaattagcaggtaaggctgtaattgagtacactgtagaagcttttgaaaaatcattgaatattgatgaaattattatcgtatctcacccaagttatgtggacctaatttggaaatttgtaaaaaaaaatcaatgggaaaaagttacaaaagtttttaatggtgggaaagagcgatttgattcaacctattcagcattacaaggtcttgagggagaagataacaattccaatattctacttcatgatgcagtaagaccattaattaatgaatcaattattaataattgcattgatgctttaagaaattttgaggctgtagatgttgtaattccatccgctgatacgctcgtcgaagtgtatgacgatggatgtatttctaatattccaaacagggctataatgcgccggggtcagacccctcaggcatttaaattagggacgctgaaacaggcctatcaacgtgccatcaatgctcagcgatttagttttacttgtgattgtggtgttgtacgctcaatggtacctggtgtacgtgtagcaactgtggttggtgctgaatcaaacatgaaagttacacacccaattgatctttttattgctgagaagcttcttcaggaagcaaataaaatttcatttaacactggtgataatctcgattatatcaaagataaaaatataattatatttggtggaaacagcgggattggtcttgagataaagaaagcagctattttattaggcgcgaatgttgaaattgctagccgtagcttcaataatgttgatattgttgatattgagtgtgtaaaaaactatcttgctcaaatggagaaaaaattaggttgcatcgattatatcattaatactgctggagttttgataaaaaaacctattgatatgttaacaaatgaagaagttcatactctaataaatataaattttattggggctgtaaatatagcgatggcatccaagcaatatttgaagaaatcttcagggatgctacttaattttacttcaagctcatacactcgtggccgttcatattatgctctttattcctcatcaaaagctgctattgtcaactttacacaagcaatagctgaggaatggtcatctgaaaatattaaagtaaactgtattaaccctgaacgaactgcaactccaatgcgtaccatcaactttggcattgaacctgcagagttattattagatcctagagatgttgccctgacaagcctcaaagtattaggagctgatagcacaggtcttattatagatgttagaaaagatgggcgataa

SEQ ID NO: 5466 - DNA, 3324 bp, Escherichia coli
atgcaagatattaactatgtaattaataattatactaaagataacatctggttgtttaatagtgctggtctatttacagggaatgtgaaatatttgtttgtatatatttcaaactatcgacctgatatttttgcttgttatatcagtggtgatcagaaaaatgttgactatattaaatcgttaggtttcaatgcatgccattttaaatcaaaagaaggtgtgcaattattaaatgctgcaggtgtttatgtaaatgagcattgtaaggagcattatcctaatgaattattaaatactaaaattttaaatttataccatggggtgggattaaaacaaattgaaagaaagtcagataatgattatttgttaaagcgacttgcgaaaaaatatattacatataatgagcatttttcgaataatatgtgctttttagtgacgtctccatttatggagaagcattttaaagagcagcttgatttaactgatgatcaaatgattaggggggggtatccacgttgcatttaccaatcattgtataatccaatagttacatatgaccatgatataatatctaatctggggttgccagaggagacaaaaatagcattatatgcgccaacatatcgtgaaaaaaatcctaaaaactttctttacttagcgattaaagatataaatgcattatcccaggcgttagaacgtaataaattatgccttattataaagttacatcctgaaatctcaaatgatttctattttaaaacattgcaaaatttaactatccaatataggaatataatcttttgggataacagaaatgatatttacgaaattttaaataaagtggagttagcgatagttgattactcatctatatattatgatcttgtctctgctggcgtgaaaaaattcattcgttatatttttgattatgatgatgaacaacacatcatggcttatgattataaatcttatactactggagaaatatgttatagctttgaagagttaattaatgctatagataattaccagtcatcgaatgataatgaaatcgcaaaaataaacgaagttttttggtcatactctgatttaaatacctttaataatataatcgaacaaactaaaaaatttaaaataggcaataaaggtatattaccttctttttatagttttgatgtgtttgatactttaatagcgagaaggtgtctaatacccaaaggtattttttataaggtgatggaaaatataaaaagttcagatgaaaatttccctgatatatttcatcatgattatgtaacaattcgaatgcaggcagagtcgaattgcagagaattactgaataaaactattggacaatatgaaattactttcgatgatatttttttaagaatcaaagcagtatatgatttaaatgacagtcagataaaaaaacttattgagtgggaaatacaagctgaatatgagaatattatacctgtaaggaatatggttgaaaaagcagaacaattagttcatgagaatgaaacagtcgtgctgatttctgatatgtatcttcccaaagaaattataacaaatatgatatctttaattagccctagactggctgcattacctttatacctctcatctgacaaaggtgtacaaaaggtaagtcaacaattatatttaaaagtctataaagattattctccatggaaatttaaaaagtggattcattatggtgataatgcaagttctgatggcgttaaagccaaagagttagggattaattcccatgtacatgcaatccctaagctaaatgcatatgaaacaggtttaataaacaaaatacgtaactatgatgcgtatcttcttagcggattatttgctcgaatgcgtattgatagtgttaatgaaaaagactatttttgttatgcgcatgtgtcggggtatatgattccctatgtcgcttggtgtgtgagaaatgcattagagaaaggtataaatactttatattttatttcacgtgatggtcattttcttaaggaaatcgctgatgcatatattaatatgcatcaattaagtataaaaacaaaatatttttatggctctagacaggcatggcgtattccggcaatgatagataatatagatgatgagtttttctctaattttggaaatttagtaggagtagataattatgaaaaattattatctgctttagatataagccataacttatttcaaaaatattttcatgaattaggccttaataaaacatctcatattaatgcaactgacttagtatctcttagaaacttttttagtaaatctgagaagtatcgcggctacttacttgaaagagctaaatgcaaaagagaaattgtaattgattatattaaacaagagattaatcctgatgaaaaatatgcgtttgtggaatattgggcaagaggctatactcaaacttgtttaagcaaattactagaatgtgcatttaaaaaatcatcagaatgtattttttattattatagaagcatattaccatcaaatgaaaataatattagacttaattatagtacgaataatatatcactaattcctgttgaggctattttcgcaaattgtccgcatgaaaccgttactggttataaatatgaaaaagggaaagttttaccaattatctcaagggctaggtttgatgcagaactatattggtctcttggcaaatacttgaaattatttgtcaaagatttttatagtttaccatttgttagcaatatagaaacaattgaacgcaatttctctattttttcttttgaatggtatagagatcatcaggatgatcctgtggttgtaaaatcgatggcccatttattatactctgaatcatatcttggagcattaagggaatttgcaccggcaatcacttcagaatctttagccttattaaaacaaggaaaaccagttggtgcttttacaaggtctattaaaatgagtttagcaagatcaacaccttcgataaaaaaagaatatcaagaatatcttaaaaaccctaaagccttatctgctaaacctagtaacgccaagcaaaaagtactaccaactaatacttcaaaagtaaagataaaagaaccggctaaaattaatcaacatttagcagcacaaagttctgacagcagaaagataagacttctcaataagcttgaacgaaatcctgaaatgttcttctctgattcaaataaaaaaattgttagacttgctggcaaaacggcatttaacccaatattaaagccagtgctgggcaatgtaataattaagctatctaagaagattattcattaa

SEQ ID NO: 5467 - DNA, 987 bp, Escherichia coli
gtgaacagacgtaattttattaaagcagcctcctgcggggcattgctgacgggcgcgctgccgtctgtcagtcatgcggctgctgaaaaccgcccgccaattccgggatcgctggggatgttgtacgactcgaccttgtgcgtaggctgccaggcttgcgtcaccaagtgtcaggatatcaacttccctgaacgtaacccgcaaggggaacagacctggtcgaacaacgacaaactgtcgccgtataccaataacatcattcaggtgtggaccagcggcacaggggtcaacaaagaccaggaggagaacggctacgcgtacattaagaaacagtgtatgcactgcgtcgatccgaactgtgtctctgtgtgcccggtctctgcactgaaaaaagatccgaaaaccggcattgtccattacgacaaagacgtgtgcaccggctgccgttactgcatggtcgcctgtccgtacaacgtgccgaagtacgactacaacaacccgtttggtgcgctgcataagtgcgagctgtgcaaccagaaaggtgtggaacgtctcgataaaggcggtctgcctggctgcgtagaagtgtgcccggcgggcgcggtgattttcggtacgcgtgaagagctgatggcggaggcgaaaaaacgtctggcgctgaagcctggcagcgaataccactatccgcgtcagacgctgaaatctggcgacacttacctgcatacggtgccgaaatattatccgcatctgtacggcgagaaagagggcggcggtactcaggttctggtactgacgggtgtgccttatgaaaatctcgacctgccgaaactggacgatctttctaccggtgcgcgttccgaaaatattcaacacaccctgtataaaggcatgatgctaccactggctgtgctggcgggcttaaccgtgctggttcgtcgcaacaccaaaaacgaccatcacgacggaggagacgatcatgagtcatga

SEQ ID NO: 5468 - DNA, 144 bp, Escherichia coli
atgccgcgtttaaccgccaaagatttcccacaagagttgctggattactatgactattacgctcacgggaaaatctcgaaacgtgagttcctcaaccttgcggcgaagtgcggtaggcgggatgacggcattagcgttgtttga

SEQ ID NO: 5469 - DNA, 1050 bp, Escherichia coli
atgattacgcttttccgtttactggcgattctttgccttttttataacgtttcagtttatgctgtaaattgctatcaggatcaaagaggtggtaatacacaaatacgtggtactttaccttccttcagaattccagaaaacgcccagccgggacaaaaaatttgggaaagcgatgacgttaatgttacggtatattgtgataacgcgacaggatggagagctgatgatcccgcagaaaatatttatgcctggattaaaatgccggctataaatagtgcagacattttgaataacccatacctgacattcggtgtaacctataatggtgtggactatgaagatagcgatgtaggaattgatactttcgcctgtctggataagtatgaacagtattatggtggtatttatcatgatccagtttgtaatggcagcaccctacaaaaaaatgtcacgtttaatgcccgttttcgcgcatatgtgaaatttaaagcacgtccagcagtggatcaaacctgggattttggcgtggtaaatgttctgcaatttgatggtgaaggtggtgctaacttagcagcagataataaaaatctacgttatattattgatggattaaataatattttatttcttgattgtagtgtcgatgtccgtatttttccagaaagccagatcgttaatttcgggcaaatctctgcaaactctattgctacttatcgacccaaagctgcatttagcgtatctactataaaagatgttgctgccgactgtaccgagcaatttgatgttgtcaccagtttttatacgacagatacgttacatgatgatacgcatctggaaatgggtaatggtttgttaatgcgtattactgatcaaaaaacacaagaagacattaagtttaataagtacaaacgcttcaccacatatattccaggtcagactggagcgatggttacccgtgattaccaggctgaactttcacaaaaaccgggggagactctcgtttatgggcctttcaaaaaagatctcatcgtaaaaataaactataactga

SEQ ID NO: 5470 - DNA, 315 bp, Escherichia coli
atgcacctgataactcaaaaagcattgaaagatgctgcggaaaaatacccgcaacataaaacggagttggtggctctggggaacacgattgctaagggatatttcaaaaaacctgagtcattaaaagcagtattcccttctctggataacttcaaatatctggataagcattatgttttcaatgtcgggggcaatgaattacgtgttgtagcaatggtcttttttgaatcgcaaaagtgctacatacgtgaagttatgacgcataaagaatacgatttctttaccgccgttcatcgtactaaggggaaaaaatga

SEQ ID NO: 5471 - DNA, 987 bp, Escherichia coli
atgatacgtttcgctgtgattggtacgaactggatcactcgccagttcgtcgaggccgcccatgagagcggtaaatacaagttaaccgccgtctattcccgcagccttgaacaggcccagcacttcgccaatgatttttctgtcgagcatctgtttacgtcgctggaagcgatggcagaaagcgatgccattgacgcggtgtatattgccagcccaaattccctgcacttttcccagacacaacttttccttagtcacaaaattcatgtgatttgcgagaagccactggcgtcgaatcaggcggaagtggatgccgccattgcctgtgcgcgggaaaatcaggtggtgctgtttgaggcatttaaaacggcctacctgccgaactttcatctgttacgccaggcgctgccgaaagtcggcaaactgcgtaaagtctttttcaactattgccagtattcctcgcggtatcagcgttacctggacggagagaatcccaacaccttcaatccggcattctccaacggttcgattatggatatcggcttttactgcctggcgtcggcggtggcattattcggtgaaccgaaaagcgtgcaggcaaccgccagtttgctggcaagcggtgtggatgcccacggcgtggtggtgatggattacggtgatttcagcgttacgttgcagcactcaaaagtgagcgattctgtcctggcaagcgagattcagggcgaagcgggatcgctggtgattgaaaaactctctgaatgccagaaagtctgctttgtaccgcgtggcagccagatgcaggatctcacccagccacagcatattaataccatgctctacgaagcagagctgttcgctaccctggtggatgagcatctggtgaatcatccagggctggcggtcagtcgtatcaccgccaaactgctgactgagatccgccgccagactggggtgatttttccggcagataacgtaaaactataa

SEQ ID NO: 5472 - DNA, 1155 bp, Escherichia coli
atgacgaaacatgccaggtttttcctcctgccctcctttattctgatctccgcggctttaatcgccggttgtaacgataagggagaagagaaagctcacgtcggtgaaccgcaggttaccgttcatattgtgaaaacggccccgttagaagttaagactgaattaccaggccgcaccaatgcttaccgtatagccgaagttcgcccacaggttagcgggatcgtactgaatcgcaatttcactgaaggcagcgatgtgcaagcaggccagtccctgtaccagatcgatcccgcgacctatcaggcaagttatgacagcgcgaaaggcgaactggcgaaaagtgaagccgccgccatcgcgcatttgacggtaaaacgttacgttccgctcgtgggtacgaaatacatcagtcagcaggagtacgaccaggccattgctgatgctcgccaggccgatgccgccgtgattgccgcaaaagccacagtcgaaagcgctcgcatcaatctcgcttataccaaagtgactgcgccaattagcggacgtatcggcaaatcgaccgtgaccgaaggcgctcttgtcactaatgggcaaacgactgaactggcgactgtccagcagctcgatcctatctacgttgatgtgacccaatccagcaacgattttatgaggctgaagcaatccgtagagcaaggaaatttgcataaggaaaacgccaccagcaacgtagagttggtcatggagaacggtcaaacctatcccctgaaaggtacgctgcaattctccgatgtgaccgttgatgaaagcaccggctccataaccctacgtgctgtcttccctaacccgcaacatacgcttttgccgggtatgtttgtgcgcgcacggattgatgaaggcgtccaacctgacgccattcttatcccgcaacaaggcgttagccgcacaccacgtggtgatgcaaccgtgctgattgttaacaataaaagtcaggttgaagcgcgccctgtcgttgccagtcaggcgattggcgataaatggttgattagcgaaggtctgaaatctggcgatcaagtcattgtcagcggcctgcaaaaagcgcgtccgggagagcaggttaaagccactaccgatacccccgcagatactgcatcgaagtaa

SEQ ID NO: 5473 - DNA, 1026 bp, Escherichia coli
atgaaaaagatgatgatagccacactggctgccgccagcgtgctgcttgccgttgcaaatcaggcgcatgctggcgcgacgcttgatgccgttcagaaaaaaggttttgtgcaatgcgggatcagtgatggattacctgggttctcttatgccgatgctgacggtaagttttcaggtattgatgtagatgtttgtcgtggtgttgccgctgctgtattcggtgacgatacgaaagtgaaatataccccgctcactgcaaaagaacgcttcaccgctttacagtcaggggaggtggatttgctctcccgtaatacgacctggacttcatctcgcgatgccgggatgggaatggcatttactggcgtcacttattacgacggcattggcttcctgacgcacgataaagcggggctaaaaagcgcgaaagaactggatggcgctaccgtctgtattcaggcggggactgataccgaactcaacgtcgccgattacttcaaggcaaataatatgaagtacacgccagtaaccttcgatcgctcagacgaatcagcgaaggctctggaatctggccgctgtgatactctggcctcggatcaatcacaactgtatgccctacgcatcaaattaagcaacccaactgaatggattgtcttaccggaagttatctctaaagaaccacttgggccggtagttcgtcgtggcgatgatgaatggttctcgattgtacgctggacgcttttcgccatgctgaatgctgaagagatgggcatcaattcccagaatgtcgatgaaaaagcggctaatccagcaacgcctgatatggcacatctgctgggtaaagaaggcgattacggcaaggatctgaagctggataataaatgggcctataacatcatcaaacaggtgggtaactactcggaaattttcgagcgtaacgtaggttcagaaagcccgctgaaaattaaacgtgggcaaaataatctctggaataacggcggtattcagtacgcgccgcccgtgcgttaa

SEQ ID NO: 5474 - DNA, 759 bp, Escherichia coli
atgagccaaattttactgcaacctgctaacgcgatgattacgctggaaaacgtcaataaatggtatggacaattccatgttttgaaaaatataaatttaaccgtgcaaccgggcgaacggatcgttctatgtggcccttcaggttccggtaaatcaacaaccattcgttgtattaatcatctggaagaacatcaacagggacggatcgtggtagatggcatcgaacttaatgaagatatccgcaatattgagcgcgtcaggcaggaagtgggaatggtctttcagcatttcaatctcttccctcatctgaccgtgttacagaactgtaccctggcaccgatttgggtacgcaagatgccaaagaaagaggctgaagctctggcgatgcattaccttgagcgggtgagaattgccgaacatgcccagaagtttcccggacagatttctggtggtcagcagcaacgtgttgccatagcacgttcgctgtgtatgaagccgaaaattatgttgtttgatgagccaacgtcggcgctcgatcctgagatggtgaaagaggtgctggatacgatgattgggctggcgcagtcgggtatgacaatgttgtgtgtaacacatgagatggggtttgcacgaaccgtcgctgaccgggtgatttttatggatcgtggggaaatagtggagcaagctgcacctgatgaattttttgcgcatcctaaatcagagcgtacgagggcatttttatcgcaggtaatccattaa

SEQ ID NO: 5475 - DNA, 471 bp, Escherichia coli
atggctacaatcctcatctctgactgcgatttactcgatctattgtccgctcccttcaatgccaccacggatttcaccgtcctggccgactactgcgcccgcttcgccgaaaccctgatagaaaccgacgatccggcgctgcggctggcgctctgcggacggcttcacgcggctcttgcgctattgcaacccacgctgcacgaccccatcccgccgcatctgattgaaagcctgaccgttgatacccttcccgccacaccagagcactttatttccgaaccagattccttgtgcgaatactgcctcgcgctgctccagctactgctggaacgtccagcagagccaaaaacggaacaaaccctgaccgggcttctgtgtgagctggtctggaatttcacggaaggactcaaatccccgcgctggctgcgtaccgccgacggcgtaaaatttatcagtgaggtggccgcatga

SEQ ID NO: 5476 - DNA, 1248 bp, Escherichia coli
atgaaatttaattatctgaaaattaaagatgtatgtgattttgtcggaggaagtcaacctccaaaatctcaatttatttatgtatctaaacctggatatgtcaggttgatccagacgcgtgattacaaaacggatgcatttcccacgtatataccaatatcgtcgacgaagaaattttgtgatgaattcgatattatgattggtaggtatggtcccccaatttttcaaatatgtcgcggattgaaaggagcatataacgttgccttgctgaaggttatacctaaagaaggtgtaagtcgtgattttttatactattttttgaagcaagactctgttttccaatatgttgataaattatctgccagaaccggaggacaaactggagttgatctagtttctttaaaagaatatccagtcaggatacctgaagaaattgaatgtcaagaaaaattggtgactattcttagtgttattgataaaaaaatcgccctcaacaaccgcatcaacacggaactggaagcgatggcgaaaacactgtatgactactggtttgtacagtttgatttccctgatgccaacggaaaaccgtataaaacctccggcgggaagatggagtataacgccacgctgaaacgggaaattccggcaggttggaatgactccattcttggtaagtttattgagttagatcgtggcgttacttatagcaaagaggatgttcgaactcaggatgataaagatacgataggcattcttcgcgctacaaatgtgacgggaaataatgttgatattgatgatttagtcttcattccttctagtagagtaaacgttaatcaaatgctaaataaatttgacatattgatcgtgatgtcaagtggtagtaaggagcatgtagggaagaatggcgtgtattatttcgaaaaaaaacatgcatttggcgcattttgttcaaaaattacacccgtcagaaaatacagatattttataaatacattcctgcaatcgaaatggtttaagtcttatataaacaatcagtgcttgggaactaatattaataacctgaccaatacgcatatcactaattgtgaaatcatatgccccactcctgatgttgtggcgttattcgagaataaaatgatgccaatttataataaactggcatcaaacactcaagagaatagtcatttaatccaactccgcgactggctcctccctctacttatgaacggacaggtcacggtcaaataa

SEQ ID NO: 5477 - DNA, 1638 bp, Escherichia coli
gtggtagaactggaatttagagacaaaaccaaagccctgatcgacagcctgaaaagcatctgtgcgaactacggcctgggcaacgacggtaacgaattcaaaattatcactcaggcattcctgtacaaattcctgaacgacaaattcgcttttgaggccaaacagaaagataaaagtatcgccagcgccgaaagctgggaagatgcgctcagcgcaatgagcgaagatcaactgaaaaagctgcaacagcggatggccccggataccgcccgcctgaagccgcaccattttattcgttacttgtataaccgacaaaacgcagcggactttgccagaacttttgacgacaccctgatggacatcgccgccaccaacaacgacgtcttcgcggtcaaaaccgacggcggcgcgaaagtggtgctgtttgagcgcctcagccagtacatcgccgacgaatcaaagcgcgatgatttctgccgcgccatcatcaacaagctggccgatttcagcttcgaacgcatcttcacgcagaaattcgacttctacgccaccatctttgaatacctgatcaaagactacaacagcaactccggcggcaaatacgcggaatactacacgccccacgccgtggcgcgcatcatggcggaaatcctggtgccgaaagcgcagcagggcgtggtgcgcaacgtaagctgttacgacccgtccgccggttccggcacgctgctgatgaacgtggcgcacgccattggggaagatcgttgcagcatctttgcccaggatatctcgcagaaatcctccagcctgctgcgtctgaacctgatcctcaacaacctggtgcattcgatccctaacgttatccagggcaacactattctgcatccgttccacaaggacggcggcgcgctgaaacgctttgactacatcgtctccaacccgccgtttaagatggatttcagcgactttcgtgacgcgctggacagcaaggaaaaccagcaacgtttctttgccgggataccgaaaatcaaagccaaagccagggacaaaatggagatttaccagttgttcctgcaacacatcattttctcgctgaaaccgggtggcaaggcggcggtcgtcgtgccgaccgggtttatcaccgcgcaatcgggcattgataaaggcattcgcgaacatctggtgcaaaacaagatgctggcgggcgtggtttccatgccgtcgaatatcttcgccaccaccggtaccaacgtgtcgatcctgtttattgacgccagcaacaaagagaaagtggtgctgatcgacgcctcgaatttaggtgaaaaggtcaaagacggcaaaaaccagaaaacggtgctgacggagtgcgaagaaaaacggatctgcgaagcgtttaacaacaagtggagcgaagaggatttctcggtggtggtcagctatgacgacatcgccgcgaaaaattactcgttcagcgccggacagtattttgatgtgaaaatcgaatacaccgacatgacgccggaacagtttgccgcgaagatgaaaggatttacggagaatctgaataatctctttgaacagtcgcgcgagttagaagtgcaaataaaaatgcagatggcagatatcaaatatgaaatttaa

SEQ ID NO: 5478 - DNA, 3099 bp, Escherichia coli
atgaaattcactgaagatacccgagtaaaaatccccgtcatcctccacctgatacggctgggctaccactacctgtcccttaaagaacaacgctgggacaaagaaaccaatatcttccctgacctcttcaccgctgcgattggcagaataaatcccggacttgcgccagacgacatcggacgcctgttaaaagacctcacgctgcttctcgacaacgatgatctgggccgcgccttcttcgaaaaactcagtgaccgttccggtatcaaactgatcgactttgataacttcaacaacaacagtttccatgtcgtcaccgaactgacatgcgaaaacggtgatgaagaattccgcccggacatcacgctgctgatcaacggcatgccgctaatctttatcgaagtgaaaaaacccaacaatcgggaaggcatcgtcgcagaacgcaaccgcatcaacgaacgctttaaaaaccccaaattcaaacgcttcgccaacatcacccagttcatgatcttctccaataacatggagtatgacgacagcgacccggagccgattcaaggggcattctacgccagcagctcttacagcaacccggtattcaactacttccgcgaagaagaactcttcaacctgaccaacttactgaaaccgctgtcagaagaaaccgaaatcgccgtcctgaaagacaacaacctggaagtgatccgcaccaacccggaatttcagaccaacaaagatcacaaccgcccgacaaaccgcctctgcaccgcgctgttgagccgggatcggctggcatttatcctgcgctatgcgctggtgtatgtagccgaaccgggcggcatccaaaaacacatcatgcgctacccgcagctcttcgccaccaaagcgattgagcgcaagctgaacgcgggtgtgaaaaaaggcattatctggcacacccagggcagtgggaaaaccgcattggcatactacaacgtgcgcttcctgacagattacttccagaatcagcaggtgatcccgaaattctactttattgtcgatcgtcttgatctgctccagcaggcgcagcgtgaattcaccgcccgtggcttaatcgttcaccttatcgactcccgcgaagccttcactcgcgatatcaaagcaacgcaggcgctgcacaaccaccacggcaaagcggaaatcaccgtcgtcaacatccagaaattccgcgatgacccggatgtcgtcaccaccaaagactacgacatcaacatccaacgcgtgtacttcctcgatgaagtccaccgcagctacaaccccaaagggagcttcctggcgaatttaagccagtcggacaccaacgccatcaaaattggcctgaccggtacgcctctgctgggcacagactacaactcccgcgacctcttcggcgactacatccacaaatactactacaacgcctccatcgccgacggctacacgctgcgcctgatccgcgaagagatcgccaccaactaccgaatgatcctgcaacaggcgctaaaagaggtggaagtcagaatgggcgatgtggatcgcaaatacatctacgcccatcccagctttgttaaaccgatgctgaactacatcgtcaccgactttgccaaaagccggggcgcgctgaatgatgacaccatcggcggcatggtgatttgcgacagctctgaacaggccaagcagatgtttgagatattcaacactgactacgccgaatcgcccaccgccgccgatgaagtctccgaagaaatgccggtattacaggccgcagaacctgccgccgtttaccacctccacgccaaagaaacgcggaaaatcaaacgcgccgccctgatcttgcacgacatcggcagcaagcaggagcgcaaagaatgggtggagcaattcaaagcgggcaagattgacctgctgttcgtttacaacatgttgctcaccggcttcgacgccaaacggctgaaaaaactctacctcgggcgggtgatcagaaagcacaacctgctccaggcgctgacccgcgtcaaccgtacgtacaaccacttccgctacggctacgtggtggacttcgccgacatccgccaggaatttgacgctaccaacaaagcctacttcgaagagctacaggctgaacttggcgacgaaatggagcactactcccgcctgttcaaatcggcggaagagatccgcgaagaaatcgaacacatcaaagacgttctgtttagcttcgataccgaaaacgcggaaatcttcactgaccagataaaccagatccaggaccgggaaaccgcgctggcgctaaaaaacgcgctggccgacgcccgcagcctgtacaacctcatccgcctccagggcaacactgagtttctccaggcgctggatttcaacaaactcaacatcctttatcgcgaagccagccgccgcctcgacttactcaacctaaaagcggatctggaacagggcgttgacctctccggcctgctgaaccgggcgctggaagaggtgatctttgaattccataaagtgggtgaagaagagctggtactggccgacgagctgaaagagacgctgcgccgcacccgcgaagcgctggccgccaacttcgaccagcaggacccgcagttcgtcagcctgaaagacgaactggagcgtctgtttaagaaaaagaaactcagcgaagtcacccagcaagaaatggttgcgaatatcggcacactcaataaaattcatggccgcatcaaagagctaaaccgccaaaacaacctgctgcgccagaaataccggggcgacgtgaaatacgcgcgtacccacaaacgcctgcgcgagcgcggcggcctgagcgagccggagcgtaaaatcttcgaagcactgcttagcgttaagctggatgcagatgaaaaagtgctgaacaacagccagatactgaacaatgaaagctattttgagcggcatatggagtcatgcgtcatcacgcactttgaggatgagcaccatatcactctgacctccagtgcggtaagcgacatcaaccgcctgattgtggcggaatacctgaacgaatttaataccggagcacgaacgtggtag

SEQ ID NO: 5479 - DNA, 783 bp, Escherichia coli
ttgccaaactatctaaactggttgatgcaaaacacgctacccggtcaggtgctgctccagtcatggcttacccgcaatggcgtagatcgtaagctttcttatctctatgttcagaatggctggctcaggcgcatcgctcacggtgtgtactgccggacgggccgtgagccggattgggtagacgcggtttactgccttcaaacacagtgggaaaagcctgttcgggtggcggggctaaccagccttgcgcttcagggccatgcgcactataccgaaccgggtaagccgcaggtctggctcgcgcttccggcttacgtcaaactgccgggatggtttgctgccttcgaacaatcagcaacatttatcacgctgtatacatcgggccttaccgttgatgtctcgtcatttactacggaactgaaaattggcgaccggcagttagcaggcagtgcaccggaactggccgcgtatgagatcgcctgcggcgttccttcgttgatctcgttcgaacatgccgatgctctgtttcagggggggaatcttctcagcccacgcaaattgcaggcactgcttcgcgccagtcattcgattaaaaccaaccgggtgatgctttaccttgcccggcgtaatggacacccttattttcagtatcttgatcaaagcggtatagaaacaggtacgggaaagcggcaaatcatacctggtggctggctggagccggattatcaaattactgttccccgcacatttaaaccggaaggagtcgaagatggatctgcgtga

SEQ ID NO: 5480 - DNA, 921 bp, Escherichia coli
atggatctgcgtgatagctatgccaggcaggttaaactgttgatggccgctctgccgcatgtggcgaaggaatcctgtttcgcgttgaaaggcggcacagcaatcaatttatttgtgcaggatttcccccgtctatcggtggatatcgatctggcgtataagagctttgcggatcgcgataccgatctggcggcgatcaacgacgctttgaagagaattactgcatcgctgaacggcagaccggggatcaccgcgattcggcaggaaaataaagcggatgaaaagcgcatcattgtgaataccgctgatgcaaagattaagatcgaggttagcccggtctggcgcgggctgttgttgcctccggcagaaatgcctgtgtgcgaacgtgtggaaatggagtatggcttcaccaccatgagtgtcgtctcgctggcggatctttatggcggtaaaatatgtgctgcgcttgatcgtcagcatccgcgcgatctgtttgatgtgttgaatatgctggggagaccgggcctgacgcgcgaaatttttgacggttttctttgttatctggcaggccatccccgtcccattgccgagttgctggcttcaaactgggatacagatcggattgccacgttatacgctcaggaattttcggggatgactcagcaggaaacgtcgctggaatcgcttctgtcagtaacgactttgctgccgcaggcgttgaagtcacattttacggatctggatcgcgagttcttgctcagttttaagcaaaacagccctgactggtcgcggtatcgctatcctgaaattcagcatcttccggctattcgctggaagcaacgcaatctggcgatgcttaaagataaaaatccggcgaagtatgtggcggcggtgaataagctagagagggtgctggagtaa

SEQ ID NO: 5481 - DNA, 777 bp, Escherichia coli
atgacgcttgaccatgccgctttgcagggattgatcgatcacaaccctgctcgcttgcttaaacccgcaatgtttggtgcctcaatgggaaaaccgcgtgagcgttggttgccacaagacgagttgcaaatgttatggaaggcactggatgaagcggggttcggcggcggatctgtcgcaaccggagggcgaggcatcgcgtccagcgttattctttcacaagcgattgctaacgcattacgcctcatcatcctgacgggggtgcgacgttccgaagcggtgaatatgcgttgggagcagattaatggcaaccgctggacaatacctgaaaccaaaaacggtaaaagtcatatcgtgacgctacatcctctggcgctttctctattgaagactcagcgcattatttcagaaggcggctgggtattcgagtcgctcagtaagccaagttttcctgtcaccggtgacgcaataactcgtgctcttgaacgcctgaaaacaaaatatatggcagaagtcgctcctttctcaccacatgatttacgccgcagcattgctacaggctgcgctgaatatctggacgcaccagaacggcttatagaacttctgttaaatcatgtgcccaaagacaggttaatcagaacctaccaggtcgggcagcaagcggaaaaattacggaatctgtttctgaaatggggggattttattgagcatgagatcattgagtctgataatggtactccagataatgttattcagatcagctttggaaagagatag

SEQ ID NO: 5482 - DNA, 336 bp, Escherichia coli
atggcaatattgataacccaggacaggcaagtcgcaaacctgactccccctgaaggaaaaagtcggataaccgtcagcgtcaaatcaaaagtaggttccggcctgtctgtcgaatcccgttccgggagtcaaacgaagagctggatttaccgcccttacctcaacggaaaacagattaaaataacgttaggctcctaccctgcaatgacattgtctcaggcgcgtgaagcacatgcagacgcgctggcgctggttaaacaaggtattgatccgcgttatgcgcgaaaaacggaaaaacagcaaaatgaacaaatgccgattttttcacaattatga

SEQ ID NO: 5483 - DNA, 633 bp, Escherichia coli
atggatcctttgcacgccgtttacctgaccgtaggattgttcgtgattactttttttaatccgggagccaatctctttgtggtagtacaaaccagcctggcttccggtcgacgcgcgggggtgttgaccgggctgggcgtggcgctgggcgatgcattttattccgggttgggtttgtttggtcttgcaacgctaattacgcagtgtgaggagattttttcgcttatcagaatcgtcggcggcgcttatctcttatggtttgcgtggtgcagcatgcgccgccagtcaacaccgcaaatgagcacactacaacaaccgattagtgccccctggtatatctttttccgccgtggattaattaccgatctctctaacccgcaaaccgttttattttttatcagtattttctcagtaacattaaatgccgaaacaccaacatgggcacgattaatggcctgggcggggattgtgctcacatcaattatctggcgagtctttctaagccaggcgttttctttgcccgctgtgcgtcgtgcttatgggcgtatgcaacgcgttgccagtcgggttattggtgcaattattggtgtattcgcgctacgcctgatttacgaaggggtgacgcagcggtga

SEQ ID NO: 5484 - DNA, 1005 bp, Escherichia coli
atgtactatttaaaaaacacaaacttttggatgttcggtttattctttttcttttacttttttatcatgggagcctacttcccgtttttcccgatttggctacatgacatcaaccatatcagcaaaagtgatacgggtattatttttgccgctatttctctgttctcgctattattccaaccgctgtttggtctgctttctgacaaactcgggctgcgcaaatacctgctgtggattattaccggcatgttagtgatgtttgcgccgttctttatttttatcttcggaccactgttacaatacaacattttagtaggatcgattgttggtggtatttatcttggcttttgttttaacgccggtgcgccagcagtagaggcatttatcgagaaagtcagccgtcgcagtcatttcgaatttggtcgcgcgcggatgtttggctgtgttggctgggcgctgtgtgcctcgattgtcggcatcatgttcaccatcaataatcagtttgttttctggctgggttctggctgtgcactcatcctcgccgttttactctttttcgccaaaacggatgcgccctcttcagccacggttgccaatgcggtaggtgccaaccattcggcatttagccttaagctggcgctggaactgttcagacagccaaaactgtggtttttgtcactgtatgttattggcgtttcctgcacctacgatgtttttgaccaacagtttgctaatttctttacttcgttttttgctaccggtgaacagggtacgcgggtatttggctacgtaacgacaatgggcgaattacttaatgcctcgattatgttctttgcgccactgatcattaatcgcatcggtgggaaaaatgccctgctgctggctggcactattatgtctgtacgtattattggctcatcgttcgccacctcagcgctggaagtagttattctgaaaacgctgcatatgtttgaagtaccgttcctgctggtgggctgcttttaa

SEQ ID NO: 5485 - DNA, 3075 bp, Escherichia coli
atgactatgattacggattctctggccgtcgtattacaacgtcgtgactgggaaaaccctggcgttacacaacttaatcgccttgcggcacatccccctttcgccagctggcgaaatagcgaagaggcccgcaccgatcgcccttcccaacagttgcgcagcctgaatggcgaatggcgctttgcctggtttccggcaccagaagcggtgccggaaagctggctggagtgcgatcttcctgacgccgatactgtcgtcgtcccctcaaactggcagatgcacggttacgacgcgcccatctacaccaacgtaacctatcccattacggtcaatccgccgtttgttcccacggagaatccgacaggttgttactcgctcacatttaatgttgatgaaagctggctacaggaaggccagacgcgaattatttttgatggcgttaactcggcgtttcatctgtggtgcaacgggcgctgggtcggttacggccaggacagccgtttgccgtctgaatttgacctgagcgcatttttacgcgccggagaaaaccgcctcgcggtgatggtgctgcgctggagtgacggcagttatctggaagatcaggatatgtggcggatgagcggcattttccgtgacgtctcgttgctgcataaaccgaccacgcaaatcagcgatttccaagttaccactcgctttaatgatgatttcagccgcgcggtactggaggcagaagttcagatgtacggcgagctgcgcgatgaactgcgggtgacggtttctttgtggcagggtgaaacgcaggtcgccagcggcaccgcgcctttcggcggtgaaattatcgatgagcgtggcggttatgccgatcgcgtcacgctacgcctgaacgttgaaaatccggaactgtggagcgccgaaatcccgaatctctatcgtgcggtggttgaactgcacaccgccgacggcacgctgattgaagcagaagcctgcgacgtcggtttccgcgaggtgcggattgaaaatggtctgctgcagctgaacggcaagccgttgctgattcgcggcgttaaccgtcacgagcatcatcctctgcatggtcaggtcatggatgagcagacgatggtacaggatatcctgctgatgaagcagaacaactttaatgccgtgcgctgttcgcattatccgaaccatccgctgtggtacacgctgtgcgaccgctacggcctgtatgtggtggatgaagccaatattgaaacccacggcatggtgccaatgaatcgtctgaccgatgatccgcgctggctacccgcgatgagcgaacgcgtaacgcggatggtgcagcgcgatcgtaatcacccgagtgtgatcatctggtcgctggggaatgagtcaggccacggcgctaatcacgacgcactctatcgctggatcaaatctgtcgatccttcccgcccggtacagtatgaaggcggcggagccgacacctccgcaaccgatattatttgcccgatgtacgcgcgcgtggatgaagaccagcccttcccggcggtgccgaaatggtccatcaaaaaatggctttcgctgcctggagaaatacgcccgctgatcctttgcgaatatgcccacgcgatgggtaacagtcttggcggcttcgctaaatactggcaggcgtttcgtcagtacccccgtttacagggcggcttcgtctgggactgggtggatcagtcgctgattaaatatgatgaaaacggcaacccgtggtcggcttacggcggtgattttggcgatacgccgaacgatcgccagttctgtatgaacggtctggtctttgccgaccgcacgccgcatccggcgctgacggaagcaaaacaccaacagcagtatttccagttccgtttatccgggcgaaccatcgaagtgaccagcgaatacctgttccgtcatagcgataacgagttcctgcactggatggtggcgctggatggcaagccgctggcaagcggtgaagtgcctctggatgttggcccgcaaggtaagcagttgattgaactgcctgaactgccgcagccggagagcgccggacaactctggctaacggtacgcgtagtgcaaccaaacgcgaccgcatggtcagaagccggacacatcagcgcctggcagcaatggcgtctggcggaaaacctcagcgtgacactcccctccgcgtcccacgccatccctcaactgaccaccagcgaaacggatttttgcatcgagctgggtaataagcgttggcaatttaaccgccagtcaggctttctttcacagatgtggattggcgatgaaaaacaactgctgaccccgctgcgcgatcagttcacccgtgcgccgctggataacgacattggcgtaagtgaagcgacccgcattgaccctaacgcctgggtcgaacgctggaaggcggctggccattaccaggccgaagcggcgttgttgcagtgcacggcagatacacttgccgacgcggtgctgattacgaccgcccacgcgtggcagcatcaggggaaaaccttatttatcagccggaaaacctaccggattgatggacacggcgagatggtcgtcagtgtaggtgttgaagtagcgagcgatacaccgcatccggcgcggattggcctgacctgccagctggcgcaggtcgcagagcgggtaaactggctcggcctggggccgcaagaaaactatcccgaccgccttactgcagcctgttttaaccgctgggatctgccattgtcagacatgtataccccgtacgtcttcccgagcgaaaacggtctgcgctgcgggacgcgcgaattgaattatggcccacaccagtggcgcggcgacttccagttcaacatcagccgctacagccaacaacaactgatggaaaccagccatcgccatctgctgcacgcggaagaaggcacatggctgaatatcgacggtttccatatggggattggtggcgacgactcctggagcccgtcagtatcggcggaattccagctgagcgccggtcgctaccattaccagttggtctggtgtcaaaaataa

SEQ ID NO: 5486 - DNA, 834 bp, Escherichia coli
atgcagaacaatgagcagacggaatacaaaaccgtgcgcggcttaacccgcggtctaatgttattaaatatgttaaataaacttgatggcggtgccagcgtcgggctgctggcggaactcagcggcctgcatcgcaccactgtgcggcgactgctggagacgttactggaagagggatatgtccggcgcagtacctccgatgacagttttcgtctgaccatcaaagtgcggcaattaagcgaaggatttcgtgacgaacagtggatttctgcactggcggccccgctgctgggcgatctgttgcgcgaagtggtatggccgacagatgtgtccacgctggatgttgatgcaatggtggtacgcgaaaccacccatcgtttcagccgcttatcttttcaccgggcaatggtcgggcgacggttaccgcttctgaaaaccgcctcgggcctgacctggctggccttttgcccggaacaagaacgcaaggaattaatcgagatgttagcctcccgccccggtgatgactatcaactggcacgagaaccgttaaagctggaagccattctggcgcgcgcgcgcaaagaggggtacggacagaactaccgcggctgggatcaggaggagaagatcgcctctatcgccgtaccgctgcgcagtgaacaacgggtgattggctgtctgaatctggtgtatatggcgagcgcaatgaccatcgaacaggcagcggaaaagcatcttccggcgctgcaacgggtggcaaaacagatcgaagaaggggttgaatcgcaggctattctggtagcgggaaggcgaagcggcgtgcatttacgctga

SEQ ID NO: 5487 - DNA, 1665 bp, Escherichia coli
atggcaatacaacaccctgacatccagcctgctgttaaccatagcgttcaggtggcgatcgctggtgccggtccggtcgggctgatgatggcgaactatctcggccagatgggcattgacgtgctggtggtggagaaactcgataagttgatcgactacccgcgtgcgattggtattgatgacgaggcgctgcgcaccatgcagtcggttggcctggtcgataatgttctgccgcacactacgccgtggcacgcgatgcgttttctcaccccaaaaggtcgctgttttgctgatattcagccaatgaccgatgaatttggctggccgcgccgtaacgcctttattcagcctcaggtcgatgcggtgatgctggaaggattgtcgcgttttccgaatgtgcgctgcctgttttcccgcgagctggaggccttcagccagcaagatgacgaagtgaccttgcacctgaaaacggaagaagggcagcgggaaacggtcaaagcccagtggctggtggcctgtgatggtggggcaagttttgtccgtcgcaccctgaatgtgccgtttgaaggtaaaactgcgccaaatcagtggattgtggtagatatcgccaacgatccgttaagtacgccgcatatctatttgtgttgtgatccggtgcgcccgtatgtttctgccgcgctgcctcatgcggtacgtcgctttgaatttatggtgatgccgggagaaaccgaagaacagctgcgtgagccgcaaaatatgcgcaagctgttaagcaaagtgctgcctaatccggacaatgttgaattgattcgccagcgtgtctacacccacaacgcgcgactggcgcaacgttttcgtattgatcgcgtactgctggcgggcgatgccgcgcacatcatgccggtgtggcaggggcagggctataacagtggtatgcgcgacgcctttaacctcgcatggaaactggcgttggttatccaggggaaagcccgcgatgcgctgctcgatacctatcaacaagaacgtcgcgatcacgccaaagcgatgattgacctgtccgtgacggcgggcaacgtgctggctccgccgaaacgctggcagggtacgttacgtgacggcgtttcctggctgctgaattatctgccgccagtaaaacgctacttcctcgaaatgcgcttcaagccgatgccgcaatattacggcggtgcgctggtgcgtgagggcgaagcgaagcactctccggtcggcaagatgtttattcagccgaaagtcacgctggaaaacggcgacgtgacgctactcgataacgcgatcggcgcgaacttcgcggtaattggctggggatgcaatccactgtgggggatgagcgacgagcaaatccagcagtggcgcgcgttgggcacacgcttcattcaggtggtgccggaagtgcaaattcataccgcacaggataaccacgacggcgtactacgcgtgggggatacgcaaggtcgcctgcgtagctggttcgcgcaacacaatgcttcgctggtggtgatgcgcccggatcgctttgttgccgccaccgccattccgcaaaccctgggcaagaccctgaataaactggcgtcggtgatgacgctgacccgccctgatgccgacgtttctgtcgaaaaggtagcctga

SEQ ID NO: 5488 - DNA, 945 bp, Escherichia coli
atgcacgcttatcttcactgtctttcccactcgccgctggtggggtatgtcgacccggcacaagaggtactcgatgaggtcaatggcgtgattgccagcgcccgcgagcgtattgcggctttctcccctgaactggtggtgctgtttgcgccagatcactacaacggctttttctatgacgtgatgccaccgttctgtttaggcgttggagcgacggcaattggtgatttcggcagtgcggcaggagagctgcccgtgcctgtggagctggcggaggcctgtgcgcatgccgtcatgaagagcgggatcgatcttgccgtttcttactgtatgcaggtggaccacgggttcgcccagccgctggagttcctgctcggtgggctggataaggtgccagtactgccggtgttcatcaacggtgtcgccacgccgctgcccggtttccagcgtacccgcatgttgggggaagccattggacgtttcaccagtactctcaataaacgcgtgctgttcctgggttccggtgggctttcccatcagccgccggtgcccgaactggcgaaagccgatgcccatatgcgcgaccgtctgttggggagcgggaaagatttacccgccagtgagcgcgaattgcgtcagcaacgggtgattagcgccgctgagaagtttgttgaggatcagagaacgctgcatccgctcaacccgatttgggataaccagttcatgactttgctggagcagggacgcatacaggaactggatgccgtcagtaacgaagagctttccgccattgccggaaagtcgacacatgaaatcaaaacctgggtcgccgcttttgccgctatttctgcgtttggcaactggcgtagcgaagggcgttattaccgcccaatcccggagtggattgccggatttggctcgttaagcgccagaacagagaactga

SEQ ID NO: 5489 - DNA, 867 bp, Escherichia coli
atgagttatcagccacaaaccgaagccgccaccagccgttttctgaatgtagaagaagcgggtaaaacgctgcgcatccattttaatgactgcggacaaggcgacgaaaccgttgtcctgctgcatggttccggcccgggtgctactggctgggcgaacttcagccgcaatatcgatccgctggtagaggcgggctatcgggtgatcctgctggattgtccgggttggggtaagagcgattcgatcgttaatagtggttcgcgatcggatcttaatgcgcgaatcctgaaaagcgtggtggatcaactggatatcgccaaaatccacctgctgggcaactcgatgggtggccacagttctgtggcgttcactcttaactggccggagcgcgtcggcaaactggtgctgatgggcggcggtacgggcggcatgagtttgtttacgccgatgccaaccgaaggtattaagcgactgaatcagctttatcgtcagccgactatcgaaaacctgaagctgatgatggatatcttcgtttttgataccagcgatttgaccgacgccctgtttgaagcgcgcctgaataatatgctgtcgcgccgcgatcacctggaaaacttcgttaagaacctggaagccaatccgaaacagttcccggattttggcccacgtctggcggaaatcaaagcgcaaaccctgattgtctgggggcgcaacgaccgctttgtgccgatggatgcgggtctgcgtctgctgtccggcattgccggttctgaactgcatatcttccgcgactgtggtcactgggcgcagtgggaacatgccgacgctttcaatcaactggtgctgaatttcctcgcacgcccttaa

SEQ ID NO: 5490 - DNA, 810 bp, Escherichia coli
atgacgaagcatactcttgagcaactggcggcggatttacgccgcgccgcagagcagggcgaagcgattgcgccgctgcgcgatctgattggtatcgataacgctgaagcggcctacgccattcagcacatcaatgtgcaacatgacgttgcgcaggggcgtcgcgtggtggggcgcaaagtggggctgacgcatccgaaagtgcagcaacaactgggcgttgatcaaccggatttcgggacattatttgccgacatgtgttatggcgataatgaaaccattcctttttcccgtgttctgcaaccccgcattgaagcggagattgcactggtgttgaaccgcgatctacccgcaaccgatatcaccttcgacgaattgtataacgccattgaatgggtacttccggcgctggaggtggtggggagccgcattcgcgactggtcgattcagtttgtcgataccgtggcagataacgcttcctgcggggtgtatgtcatcggcggtccggcgcaacgcccggcggggttagacctgaaaaactgcgccatgaagatgacgcgtaataacgaagaggtttccagcgggcgcggcagcgaatgcctgggacatccgcttaatgccgccgtctggctggcacgcaaaatggccagtctgggtgaaccgctgcgcgccggagatatcattcttaccggggcattaggtccgatggtggcggtgaatgcgggcgatcgttttgaagcccatatcgaaggcataggttcagttgctgcgacattttcaagcgcagccccaaaaggaagtctgtcatga

SEQ ID NO: 5491 - DNA, 951 bp, Escherichia coli
atgagtaagcgtaaagtcgccattatcggttcaggcaacattggcaccgatctgatgattaaaattttgcgtcacggtcagcatctggagatggcggtgatggtcggcattgatcctcagtccgacggtctggcgcgtgccagacgtatgggcgtcgccaccacccatgaaggggtgatcgggctgatgaacatgcctgaatttgctgatatcgacattgtatttgatgcgaccagcgcgggcgcgcatgtgaaaaacgatgccgctttgcgcgaagcgaaaccggatattcgcttaattgacctgacgcctgctgccatcggcccttactgcgtgccggtggttaacctcgaggagaacgtcgctcaactgaacgtcaacatggtcacctgcggcggccaggccaccattccaatggtagcggcagtttcacgcgtggcgcgtgttcattacgccgaaattatcgcttctattgccagtaaatctgccggacccggcacgcgtgccaacatcgatgaatttacggaaaccacttcgcgcgccattgaagtggtgggtggcgcggcaaaagggaaggcgattattgtgcttaacccagcagagccaccgttgatgatgcgtgacacggtgtatgtattgagcgacgaagcttcacaagatgatatcgaagcctcaatcaatgaaatggctgaggcggtgcaggcttacgtaccgggttatcgcctgaaacagcgcgtgcagtttgaagtcatcccgcaggataaaccggtcaatttaccgggcgtggggcagttctccgggctgaaaacggcggtctggctggaagtcgaaggcgcagcgcattatctgcctgcctatgcgggcaacctcgacattatgacttccagtgcgctggcgacagcggaaaaaatggcccagtcactggcgcgcaaggcaggagaagcggcatga

SEQ ID NO: 5492 - DNA, 1014 bp, Escherichia coli
atgaacggtaaaaaactttatatttcggacgtcacgttgcgtgacggtatgcacgccattcgtcatcagtattcgctggaaaatgtccgccagattgccaaagcactggatgatgcccgcgtggattcgattgaagtggcccacggcgacggtttgcagggttccagctttaactatggtttcggcgcacatagcgaccttgaatggattgaagcggcggcggatgtggtgaagcacgccaaaatcgcgacgttgttgctgccaggaatcggcactattcacgatctgaaaaatgcctggcaggctggcgcgcgggtggttcgtgtggcaacgcactgtaccgaagctgatgtttccgcccagcatattcagtatgcccgcgagctcggaatggacaccgttggttttctgatgatgagccatatgaccacgccggagaatctcgcaaagcaggcaaagttgatggaaggctacggtgcgacctgtatttatgtggtggattctggcggtgcgatgaacatgagcgatatccgtgaccgtttccgcgccctgaaagcagtgctgaaaccagaaacgcaaaccggcatgcacgctcaccataacctgagtcttggcgtggcgaactctatcgcggcggtggaagagggctgcgaccgaatcgacgccagcctcgcgggaatgggcgcgggcgcaggtaacgcgccgctggaagtatttattgccgccgcggataaactgggttggcagcatggggtcgatctctatgcgttaatggatgccgctgacgacctggtgcgtccgttgcaggatcgaccggtacgagtcgatcgcgaaacgctggcgctgggatacgctggtgtttactccagcttcctgcgtcactgtgaaacggcggcggcgcgttatggcttaagcgcggtggatattctcgttgagctgggcaaacgccggatggttggcggccaggaggatatgatcgtcgacgtggcgctggatctgcgcaacaacaaataa

SEQ ID NO: 5493 - DNA, 1212 bp, Escherichia coli
atgtcgactcgtaccccttcatcatcttcatcccgcctgatgctgaccatcgggctttgttttttggtcgctctgatggaagggctggatcttcaggcggctggcattgcggcgggtggcatcgcccaggcttttgcactcgataaaatgcaaatgggctggatatttagcgccggaatactcggtttgctacccggcgcgctggttggcgggatgctggcagaccgttatgggcgtaagcgtattttgattggctcagttgcgctgtttggtttgttctcgctggcaacggcgattgcatgggatttcccctcactggtctttgcgcggctgatgaccggtgtcgggctgggggcggcgttgccgaatcttatcgccctgacgtctgaagccgcggggccacgttttcgtgggacggcagtgagcctgatgtattgcggtgttcccattggcgcggcgctggcggcgacgctgggtttcgcgggggcaaacttagcatggcaaacggtgttttgggtaggtggtgtggtgccgttgattctggtgccgctattaatgcgctggctgccggagtcgacggttttcgctggcgaaaaacaggctgcgccaccactgcgtgcgttatttgcgccagaaacggcaaccgcgacgctgctgctgtggttgtgttattttttcactctgctggtggtctacatgttgatcaactggctgccgctgcttttggtggagcaaggattccagccatcgcaggcggcaggggtgatgtttgcactgcaaatgggggcggcaagcgggacgttaatgttgggcgcattgatggataaactgcgtccagtaaccatgtcgctactgatttatagcggcatgttagcttcgctgctggcgctgggaacggtgtcgtcatttaacagtatgttgctggcgggatttgtcgcggggttgtttgcgacaggtgggcaaagcgttttgtatgctctggcaccgttgttttacagttcgcagatccgcgcaacaggtgtgggaacagccgtggcggtagggcgtctgggggctatgagcggtccgttactggccgggaaaatgctggcattaggcactggcacggtcggcgtaatggccgcttctgcaccgggtattcttgttgctgggttggcggtgtttattttgatgagtcggagatcaagaatgcagccgtgtgccgatgcctga

SEQ ID NO: 5494 - DNA, 480 bp, Escherichia coli
atgaacagggagccgcccggtttttgtctgctctcgaaaactggaattgcccgtggtctggcctggtatctccctgattcctatctctgcgttctactcgacggacaccataaggctactgccgccgcgctggaagggcgaccgctcaaaacactggtgctcagcacggcaacccattttaatgatgagcaacaaaccctggtatttcctggcggggaatgtctgcacaaaacagagctgcaataccacataccaaaactcaccgcgtgcaaaacattaccgcccagcgcatgggagagtttcggccctgataagcacatcagcccatccgaaacctggtcaggccccctcaccttccggttgatggcgcaaaaccgaacgccgcaagcagatgctttttttctggattttgccatcaatgatgacggggaacgtccggagctaacgaaaataatggacgactattttcgcaagccttaa

SEQ ID NO: 5495 - DNA, 678 bp, Escherichia coli
atgcaggaaaatagtcctttgcttcagctacaaaacgtaggatatctggcgggtgatacgaagattcttaataacatcaatttttcgctgcgtgctggcgaatttaagttaattaccggtccttctggttgtggcaaaagtacactgctaaaaatagttgcttcattgatcagcccaaccagcggaacgttactgtttgaaggtgaggatgtcagcacactaaagccagaaatctaccgtcagcaagtctcttactgcgcccagacgccgacgctgtttggcgatacggtatacgataacctgatttttccctggcagatccgtaaccagcagcctgacccggccatttttctcgattttcttgaacgcttcgctttaccggacagcattttgacgaagaatatcgccgagctatctggtggtgaaaaacaacgcatctcattgattcgtaacctgcaatttatgccgaaggttttattgctcgacgaaatcaccagtgcgctggatgaaagtaataaacataacgttaatgagatgatccaccgttatgtacgcgagcaaaatattgctgtgctgtgggtgacacacgataaagacgaaattaatcatgcggataaagtgattacactgcaaccgcatgctggagaaatgcaggaagcacgctatgaactcgcataa

SEQ ID NO: 5496 - DNA, 2004 bp, Escherichia coli
atgggtgacattatatatttacgcattacaggggagcaacaaggggatatttctgcaggatgcgggacgcaagtctctgtcgggaatcggtatcaacagggacatgaggatgaaatatttgtttttagttttcagggaggagtaagtaacacaggatttggcattaatcatcaagcgatacaattttgtaaaattctcgataaaagctcaccgctgctgatgaattgcattaataataacgaacgatgccgttttgagttttatttttatcgtattaataaatatggaaaatgggaaaggtattattatattgaagtccgtggtgccacgttaactcagaatcagattataataaaagaaaatgaactcgactatcagtatataacaatacactacgaatatatctactgtaagcatcttacagccaatacagaatttagttatttactcacacctgaaaattataatcgccttttcccaccgacgctcttacctgtcgaggaaaaaccagaaataccgcctgaacgagaaattatcctcaccattggcgtattctttgatggcacaggaaacaatttaaccaatacgaatttacgtatgagtttttgccaaccagaaacctatggtctggatgtccaggatttggcctcgtttaataaacaatgtatgagcaagcagggtaaaacgggatccggagtacagagctatttgaattactatacgaatattcattggttgaataagttgtatcatcggcaattagttttagatgatgatgtatttaatattcaggaaaaaatatatattgaaggtattggcactgaaaataataaagcagactctctggtaggaatggggctaggaaataatgatactggggtaattgccaaaactgacagtgcgatatcactgcttcgtgagacactggcaaagattattgttgatttaaaggatgctaaactagtaattaagcgtctacagtttgacgtatttggctttagtcgtggggcggcagccgcacggcactttactaatcgcgtatttgaacgtgatcccgtactgattaaaaccattgcgacggcatttcagtcagttgaatatttaggtaaaccttccggggaagtgcaatttttaggtatttttgacacagttgcagccatcggagggctgatggatggttttgaccctcatgatggtaataactttccggtaaaagtgaagttaccgccaggtgtggccaaacatgtattccagctcacagcaatgaacgaatgtcgctataacttttgcctcaacagcataaaggaaagctggccagaattaagtttccctggatcacatgctgatattggtggcggctatgacccactggaagatgagtacctgtttttaagtcgcccggcgattgaaacggtactgggaaatgtgccggtggaagcgacaagcgcttaccaaaaagcagcacagcaggcagagttattgtggcgccattcaacgctggctccgattctgccttctggtgtcctaaaaattgaatccaatattgatgaaatagcgtcgcctgaccacttaggtaatgtgagaaaacgggtcgctgcagcggtgacatttcgcagaacgatcaccaatgactggtcaaagattgcgttaagagtaatgtatgaagtcgctaaagaggcaggggtagtatttgatgccatttctgttgctgataaggaattaaaagttcccagtcatttaaaggtaatatgtgaaaaagcaatttctcagggtaaagccgttctcttgtgtacagcgccgatgcctttttctgatgatgagcttaaaaccattgggaaatatttacactgctcttccaactggaataccgtcgattatcgattaaaaaataaggtgtctgctgaagtatcagcgtttaagacgtttagttttgttaatcggccggatgaaaattggaccagaactatatacgatatgcaagggaataaacaaaatggaatttaa

SEQ ID NO: 5497 - DNA, 660 bp, Escherichia coli
atggaatttaatataaaattactgtttgttattacgtctatggttcttaactttaacgcagcagcgaaagaaaaaatatcactgcttgcaccctatgatgaatggtatttcaattttttctaccctgattccctaccagcagaagttacctatgtggagttattagataccgatggcatctattatcagttcagaactctggcgagtactaatgccagtccaggaagtgttggacaatggagcgagaaagtatcagggatgtcgtcagtttttaataaagccaaaaacccaccaatgtctatccatttttgctgggattcagtgattgataaaaaagtgtatgaaacctggataacactggcgggagacgtctggaaattgatgctcacaccttattcaccaccaggcggtggcagtgaaaagtattatctgcggtatctgttaatcgggctggctccggaagggaaaataggagtgtggctggagaaacctgacaagcccaatattcgcctgacggataagcagattctgatagaaacggtttcaggtgaaaaaatggaaatgtgtaacggccgaagtgcctataaacatgggtattcttatccggaaagtacaaaaaactttatcaaagataaaaaatatccctatggtaactggtaa

SEQ ID NO: 5498 - DNA, 669 bp, Escherichia coli
atgaaaataacagctaaaataatttatagattaaccattgcgttaatgatagccggatcagtccagacagcagcgaaagaaaaaatatcactgcttgcaccctatgatgaatggtatttcctttttttctaccctaatgcgctaccagcacaagttacctatgtagaactattggacactgatggtatctattatcagttcagaacgctggatgctaccgctccgagttccactactattggtcagtggagagataatcttcgggttggggtgttatcattcaataaagccaaaaatccccctatgtctatccatttctgctgggattcagtgattgataaaaaagtgtatgaaacctggataacgctggcgggagaagtctggaaattgatgctcacactttattcaccaccaggcggtggcagtgaaaagtattatctgcggtatctgttaatcgggctggctccggaagggaaaataggagtgtggctggagaaacctgacaagcccaatattcgcctgacggataagcagattctgatagaaacggtttcaggtgaaaaaatggaaatgtgtaaaggccgaagtgcctataaacatgggtattcttatccggaaagtacaaaaaactttatcaaagataaaaaatatccctatggtaactggtaa

SEQ ID NO: 5499 - DNA, 669 bp, Escherichia coli
atgaaaataatagctaaaataatttatagattaaccattgcgttaatgatagccggatcagtccagacagcagcgaaagaaaaaatatcactgcttgcaccctatgatgaatggtatttcaattttttttaccctaattccctaccagcacaagttacctatgtggaattattagataccgatggcatctattatcagttcagaactctggatagcactatccctgtctcaacaacaataggacaatggcaggaaaatcttagtggtggaatgacggcattcaataaagccaaaaatccccctatgtctatccatttctgctgggattcagtgattgataaaaaagagtatgaaacctggataacgctggcgggagacgtctggaaattgatgctcacaccttattcaccacctggcggtggcagtgaaaagtattatctgcggtatctgttaatcgggctggctccggaagggaaaataggagtgtggctggagaaacctgacaagcccaatattcgcctgacggataagcagattctgatagaaacggtttcaggtgaaaaaatggaaatgtgtaacggccgaagtgcctataaacatgggtattcttatccggaaagtacaaaaaactttatcaaagataaaaaatatccctatggcaactggtag

SEQ ID NO: 5500 - DNA, 927 bp, Escherichia coli
atgttcgatccagaaaccttgcggactttcattgcggttgctgaaacaggtagtttttcaaaagcggcagaacgattatgtaaaaccacggcgacgatcagttatcgcattaaacttctggaagagaataccggagtggcgctgtttttccgcacgactcgcagcgtgacgttgacggcggctggcgagcatctactttgtcaggccagagactggctgagctggctggaaagtatgcccagcgagttacaacaggtgaatgatggcgtggaacgccaggtgaatatcgtcatcaacaacctgctctataacccccaggccgttgccaggctgctggcgtggctaaatgaacgttacccgtttacccaatttcacatctcccgacaaatctatatgggcgtctgggactcgctattgtacgaaggtttttcactggctatcggcgtcacgggaaccgaggcgctggcaaatacctttagtcttgatcccttaggatcggtgcaatggcgctttgtcatggcggcggatcatccgctggcgaacgttgaagagccgctaacagaagcacagttgcggcgctttccggcggtcaatattgaagacagcgcccgcaccttaaccaaacgcgtcgcctggcgattgccggggcaaaaagagattattgttcccgatatggaaacgaaaatcgccgcccatctggcgggcgttggcattggttttttgccaaaatcactttgccagtcaatgctcgataatcaacaactggtcagccgggtaatcccaacgatgcgccctccttcgccattgagtctggcatggcgcaaatttggcagcggcaaagcggtagaagatattgtgaccttgtttacccagcgcaggccggaaatcagcggatttttagaaattttcggcaacccacgcagttaa

SEQ ID NO: 5501 - DNA, 267 bp, Escherichia coli
atgggcggctttgcttcctcacgtattctggaagttcacggtgagcgcatgattaaacgcacctttaatccaggtttcaaaattgcgctgcaccagaaagatctcaacctggcactgcaaagtgcgaaagcactggcgctgaacctgccaaacaccgcgacctgccaggaattgtttaatacctgtgcggcaaacggtggcagccagttggatcactctgcattagtgcaggcgctggaattaatggctaaccataaactggcctga

SEQ ID NO: 5502 - DNA, 1362 bp, Escherichia coli
atgtcttttgatttaatcattaaaaacggcaccgttattttagaaaacgaagctcgcgttgtagatatcgccgttaaagacggaaaaattgctgctatcggccaggatctgggcgatgcaaaagacgttatggatgcgtctggtctggtggtttcgccgggcatggttgatgcgcacacccatatttctgaaccgggtcgcagccactgggaaggttatgaaaccggtactcgcgcagcagcaaaaggtggtatcaccaccatgatcgaaatgccgctcaaccagctgcctgcaacggttgaccgcgcctcaattgaactgaagttcgatgccgctaaaggaaagctgactatcgatgcggcacaactcggtggcctggtgtcttacaacattgaccgtctgcatgagttggatgaagtgggtgttgtcggtttcaaatgcttcgttgcgacctgtggcgatcgcggtatcgacaacgacttccgtgacgtcaatgactggcaattcttcaaaggcgcgcagaagctgggcgaactgggccagccagtgctggtgcactgcgaaaacgcgctgatctgtgacgcactgggcgaagaagcgaagcgtgaaggtcgcgtaactgcccatgactatgtggcttcgcgtccggtatttaccgaagtggaagcgattcgccgcgtactgtacctggcgaaagtcgctggttgccgtctgcacgtttgccacgtcagcagcccggaaggtgttgaggaagtgactcgtgcacgtcaggaaggtcaggatgttacttgtgaatcctgcccgcattactttgtgctggataccgatcagttcgaagaaatcggtactctggcgaagtgttcaccgccgatccgcgatctggaaaaccagaaaggcatgtgggaaaaactgtttaacggtgaaatagactgcctggtttccgaccactctccatgcccgccggaaatgaaagccggtaacatcatgaaagcgtggggcggtatcgctggtctgcaaagctgcatggacgtgatgttcgatgaagcggtacagaaacgcggaatgtctctgccaatgttcggcaaattaatggcgactaacgcagcagatattttcggtctgcagcaaaaaggccgtatcgccccaggaaaagatgccgacttcgtcttcattcagccgaatagcagctatgttcttaccaatgacgatctggaatatcgccacaaagtcagcccgtatgttggccgtactattggcgcgcgtatcacgaaaaccatcttacgtggtgatgtgatttacgacatcgaacagggcttccctgttgcgccgaaaggtcaatttatccttaaacatcagcagtaa

SEQ ID NO: 5503 - DNA, 1146 bp, Escherichia coli
atgaagattgtcattgcgccagactcttttaaagagagcttaagtgcagaaaaatgttgtcaggcaattaaagccgggttttcgaccatatttcccgatgcgcactatatctgtttgccgatagcggatggcggcgaagggacggtggaggcgatggtcgccgcgacggacggtaacatcgtgaagcttgaagtctgcgggccgatgggcgaaaaagtgaatgctttttatggcattaccggcgacgggaaaacggcggtgattgagatggcagcagcaagtggcctgatgctggtcgtgcctgaaaagcgtaatccgttgctggcctccagttttggtacgggggagttaattctccatgcgctggataatggcattcgccatattattctcggcattggcggcagtgcgacggtcgacggcggtatgggcatggcgcaggcgctcggtgtgcgtttccttgatgccgacggtcagccgctggcggctaacggcggcaatttagcgcgcgtggcaagtattgagatgaatgaatgcgatccgcgtctggcgaactgtcatattgaagtagcatgtgacgttgataacccgctggtaggggcacgcggcgcggcggcggtgtttggcccgcaaaaaggggcaacgccggagatggtcgaagagctggaacaggggctgcaaaattacgcccgtgttttacaacagctaactgaaatcaacgtctgccagatggcgggtggcggcgcggcgggcggtatgggcattgcggcggcggtattcctcaatgcggatattaaaccgggtattgagattgtgttgaatgcggtcaatcttgcgcaggcggtgcagggtgcagcactggtgatcaccggggaagggcgcatcgactcgcaaacggcaggcggtaaagcgccgctgggcgtggcgtcggtggcgaagcagtttaatgtcccggtgattgggattgctggcgtattgggtgatggcgtggaagtggtgcaccagtacggcattgacgcggtattcagcattttgccacgtctggcacctttagccgaagtgctcgccagcggtgaaaccaatctcttcaacagcgcgcgaaatattgcctgcgccattaaaataggtcagggaattaaaaactga

SEQ ID NO: 5504 - DNA, 1407 bp, Escherichia coli
atgagccagggttcgcaggtggcggggttcagtaccgattatttaatcgatcttgtcacacgctttattaactggcagatgattggggccatttttgttttattcgtggcctggttattcctgtcacaatggattcgcattaccgtttttgtggttgccattctgctatggctgaacgtacttaccctggcgggaccaagtttctccttgtggccagccggtcaaccaacgaccactgtaacaacgacgggtggtaacgcagcggcaaccgttgcggcgacgggtggcgcaccgatagtgggtgatatgcccgcacaaactgcaccgccaacaacagcaaaccttaacgcctggctgaataatttctataacgcggaggcgaaacgtaaatcgatcttcccgtcttcgctgcccgctgatgctcagccatttgaactactggtgattaatatctgttcgctttcctggtcggatattgaagccgccggattgatgtcgcatccactgtggtcgcatttcgatattgagttcaagaactttaactccgccacctcctacagtggcccggcggcgatccgtttactgcgcgccagctgcgggcagacttcgcacactaatctgtatcaaccggcaaataacgactgctatctgtttgataacctgtcgaaactgggctttacccagcacctgatgatgggacataacggccagttcggcggttttttgaaagaagttcgcgaaaatggcggcatgcagagcgaattgatggatcaaacaaatctgccggttattttgctgggctttgatggttcgccggtttatgacgataccgccgtgcttaaccgttggctggacgttaccgaaaaagataaaaacagccgtagtgccacgttctacaacacgcttccactgcatgacggcaaccattatccgggcgtcagcaaaacagcggattacaaagcgcgggcgcaaaaattctttgatgaactggacgccttctttactgaactggagaaatcgggtcgtaaagtgatggtggtagtggtgccggaacacggcggcgcgctgaagggcgacagaatgcaggtatctggtctacgtgatatccctagcccgtctatcacagacgtccccgttggggtgaaattcttcggcatgaaggcaccacatcagggggctccgattgtcatcgaccaaccgagcagcttcctggctatctccgatctggtggttcgcgttcttgatggcaagattttcaccgaagacaatgttgactggaaaaaactcaccagtgggttaccacaaacagcaccggtctccgagaactcaaatgcagtagttattcaataccagaataaaccgtacgttcgcctgaacggcggcgactgggtgccttacccgcaataa

SEQ ID NO: 5505 - DNA, 1008 bp, Escherichia coli
atggcgaattgtcgtattctgttaacgccgttgaatgaacgtgacgaacagcgcggatattcgacacaggggttgaagcgactgagcggcactgcaaaattgacccccaggctggggtttacgcgaactcagtttgtgcaggaacttccgcgtcaacaaaaagggatgagtatttccggttaccagcccaaattgcaattagtgctggatgaaggagagttccgcgtcgtagatcatcagggaaattttatccttaagccctctccagccgactttcccggtttggccgaaaatgaacacgcaacaatgacattgatgtctcgtttgggatttgacgtacctgtgcatggcctgttgagttttgcaccacaatcagaggaagagcttgaatacgcatttgttatccggcgctatgaccgggataacaaggggctgccagtgcatcaggaacagcttgatggcgcgatgcagattatggataaatatggcaaaacggggaatgataacgaacaatatgtcagctatgaaacgctggcccgatttttagttgcccatgttaacgacaacatcgcatttaaaatcgatctctttcgtcgcattgtttacgcctggttgctgggtaataacgacatgcatttacgaaactttggcttagtgtactccgatggtttgacgccagcgttagcgccggtgtatgactttgtttctgtcgctccctatccggaatattttcactcaaactatctggcgctgccgttattgacgcgagaagaaggcggtcgggagctggctcctggatttcacagtgattatggcgagtatatcgggcaggactttttgctgttgggtgaatcaatggggttagcgcccagattgctggaaaaactctttcaggatatacgtaaagaaaatgccattgttatggaaacgtatgagcagtcctttatgactcaggatcatatccaggctgtgctgcaatgctatcgacatcgtctggggctgctgtga

SEQ ID NO: 5506 - DNA, 312 bp, Escherichia coli
atgcatcggcgagtgaaagtgttgctctatggtcaggtagtgggtgaactctctcagaacgacagtggttttttgttccagtatgccccggattaccacggaccggcaatctcaatcagcctgcccgtcgcacagcgtcagtttcccagtgagatgttgcatccttatttcgcctcactggcgccagaaggatggctgcgtcaacgctacagccagatacagcatcgtgacgaaaacgatctgctgggaatgcttattgataacggcaagaatctgctgggggccatccagattttaccttgggaggaataa

SEQ ID NO: 5507 - DNA, 324 bp, Escherichia coli
atgatctgctcaggaccacaaaatctggctcaagagttgaaagcgatcggcgaccagctccaggagttacagaagaaacttattcaggggccgaatattagtcaaccacgccccctcctgaccattgagactccccgtcatttgggggaacaactgaacgcacgtcgcaaagaattgggcattgatttatacacacttgaactacaaacggggatctcaacgtccacgttaaagcgactttttaaggatcctgaacaggttaaattcggcagtgtgttcgcggtggcgaatgttcttggagtgaaactatgcatcggcgagtga

SEQ ID NO: 5508 - DNA, 852 bp, Escherichia coli
gtgaaagtactcaacgagctaaggcagttttatcctcttgatgagcttctcagggctgcggagataccgcgcagtacgttttattatcatctaaaggctctcagcaagcctgacaagtatgcggacgttaaaaagcgtattagtgagatttatcacgagaatagaggccgatacggataccgtagggtaacgctgtctcttcatcgagaagggaaacagattaaccataaagctgttcagcgcctgatgggaaccctctcacttaaagcagcgattaaggtcaagcgataccgctcttacagaggagaggtagggcaaaccgcccctaatgttctccaaagagatttcaaggctacgcggccaaacgagaagtgggttaccgatgttactgaatttgcagtcaatgggcgcaagctgtatttgtctccagtaatagatctcttcaacaacgaagttatttcttacagcctttcggaaagaccagtgatgaacatggttgagaatatgctcgatcaggcattcaaaaagcttaatcctcacgagcatcctgttctgcactctgaccagggatggcagtatcgtatgagaagatatcaaaatatccttaaagaacatggtattaaacaaagcatgtccagaaaaggcaattgtctggataatgctgtggtggagtgtttctttggaaccttaaagtcggagtgtttttatcttgatgagttcagtaatataagcgaactgaaggatgctgttacggaatatattgaatactacaacagcagaagaattagcctgaaattaaaaggtctgactccaattgaatatcggaatcagacctatatgcctcgtgtttaa

SEQ ID NO: 5509 - DNA, 522 bp, Escherichia coli
atgtcaaagccaaaatacccttttgaaaagcgccttgaagtcgtgaatcactacttcacaactgatgatggttacaggatcatctcggcacgttttggtgtcccccgaacccaggtcaggacatgggttgccctctatgaaaaacatggagaaaaaggtttaattcccaaacctaaaggcgttagtgctgatccagagttgcgtattaaggtcgtgaaagctgtgatcgagcagcacatgtcccttaatcaggctgctgctcactttatgcttgctggtagtggttctgtagccaggtggctgaaggtctatgaagagcgcggagaagctggtttacgcgcgctcaagattggcaccaaaagaaacattgcaatatcagttgatccagaaaaagcggcatcagcattggagctgtcaaaagaccgacgcattgaggatcttgaaaggcaagttcgatttcttgaaacgcggcttatgtatctaaaaaagctgaaagccttagctcatcccacgaaaaagtga

SEQ ID NO: 5510 - DNA, 438 bp, Escherichia coli; identical to SEQ ID NO: 1678

SEQ ID NO: 5511 - DNA, 1542 bp, Escherichia coli
atgccttatctacttgaaatgaaaaatattaccaaaaccttcggcagtgtgaaggcgattgataacgtcagcttgcggttgaatgctggcgaaatcgtctcactctgtggggaaaatgggtcaggtaaatcaacgctgatgaaagtgctgtgtggtatttatccccatggttcctacgaaggcgaaattatttttgcgggagaagagattcaggcgagtcacatccgcgataccgaacgcaaaggtatcgccattattcaccaggaattggcgctggtgaaagaactgaccgtgctggaaaatatcttcctgggtaacgaaataacccataatggcattatggattatgacctgatgacgctacgctgtcagaagctgctcgcacaggtcagtttatccatttcacctgatacccgcgttggcgatttaggacttgggcaacaacaactggttgaaattgccaaggcacttaataaacaggtgcgtttgttaattctcgatgagccgacagcctcattaactgagcaggaaacgtcggttttactggatattattcgcgatctacaacagcacggtatcgcctgtatttatatttcgcacaaactcaacgaagtcaaagcgatttccgatacgatttgcgttattcgcgacggtcaacacattggtacgcgtgatgctgctggaatgagtgaagacgatattatcaccatgatggtcgggcgagagttaaccgcgctttaccctaatgaaccacataccaccggagatgaaatattacgtattgaacatctgacggcatggcatccggttaatcgtcatattaaacgagttaatgatgtctcgttttccctgaaacgtggcgaaatactgggtatcgccggactcgttggtgccggacgtaccgagactattcagtgcctgtttggtgtgtggcccggacaatgggaagggaaaatttatattgatggcaaacaggtagatattcgtaactgtcagcaagccatcgcccaggggattgcgatggtacccgaagacagaaagcgcgacggcatcgttccggtaatggcggttggtaaaaatattaccctcgccgcactcaaaaaatttaccggtagtattagccagcttgatgacgcggcagagcaaaaatgtattctggaatcaatccagcaactcaaagttaaaacgtcgtcccccgaccttgctattggacgtttgagcggcggcaatcaacaaaaagcgatcctcgctcgctgtctgttacttaacccgcgcattctcattcttgatgaacccaccaggggtatcgatattggcgcgaaatacgagatctacaaattaattaaccaactcgtccagcagggtattgccgttattgtcatctcttccgaattacctgaagtgctcggccttagcgatcgtgtactggtgatgcatgaagggaaactaaaagccaacctgataaatcataacctgactcaggagcaggtgatggaagccgcattgaggagcgaacatcatgtcgaaaagcaatccgtctga

SEQ ID NO: 5512 - DNA, 1497 bp, Escherichia coli
atgacgcaatactggctggggttagattgtggcggtagctggctgaaagccgggctgtatgaccgagaaggccgggaggcgggcgtgcagcgcctgccgctgtgcgcattaagtccacagccaggctgggcagagcgcgacatggcagaactgtggcaatgttgcactgctgtcattcgctccctgcttacccattctggcgtcagcggggaacaaattgtcggtatcggcatctccgcgcagggaaagggcttatttctacttgataaaaacgacaaaccgctcggtaacgccattttgtcctcggatcgccgggcgatggaaatcgttcgtcgctggcaggaagatggcatcccggaaaaactctatccgctgacccgacaaaccttatggaccgggcatccggtgtcgctgttacgctggctgaaagagcacgaaccagaacgctacgcgcaaattggctgcgtgatgatgacgcacgactacctgcgctggtgtttaaccggcgtcaaaggttgcgaagagagcaatatttctgagtccaatctctacaacatgagtcgcggggaatatgacccgtgcctaaccgactggctggggatcgctgaaatcaatcacgccctgccgcctgttgtcggatctgccgaaatctgcggggaaatcaccgctcagacagccgtactgaccggtctgaaagcgggtacccccgttgtcggcggcctgtttgatgtggtttccaccgcactctgcgccgggctcgaagacgaattcaccctcaatgcggtgatggggacctgggcggtgaccagcggcataacccacggtttacgtgacggtgaagcgcatccgtatgtctatggtcgctacgttaacgatggtcaatttatcgttcacgaagccagccccacctcttccggcaatctcgaatggtttaccgcacagtggggagaaatctcatttgctgagattaatcaggccgtagccagtttgccgaaagccggtggcgctctctttttcctgccgttcctgtacggcagcaacgccggactcgaaatgaccagcggtttctacgggatgcaggccattcacacccgtgcacacctcttacaggccatctatgaaggggtggtgttcagccatatgacccatctcaaccggatgcgcgaacgttttactgatgtgcacaccctgcgcgtcactggcggcccggcgcactccgatgtctggatgcaaatgctggctgacgtcagcggtctgcgtatcgagctgccgcaggtggaagaaaccggctgctttggtgcggcacttgccgcccgcgtcggtaccagggtttatcgcgatttcagcgaagcccaacgtgacttacagcacccggtacgcaccctgctgccggatatggccgcccatcagctttaccaacaaaaataccaacgctatcaacatctcattgccgcacttcagggttatcacgcccgcatcaaggagcacacattatga

SEQ ID NO: 5513 - DNA, 816 bp, Escherichia coli
atgctcgaattatccatgacgttaccgattaaagtgcaaaatggtggattatttatttcccgtggcgtagggaggcatcctgcaaggcggctggagtcatgggaaattatcttcgtcgaaaaaggtcgattaacgattcaggaagatgaacggatatttctggtcgatgcgggagagagtttattactctggccgaaccgacagcatgttggggtggaggattttcccgccgatctcaaattttactggctgcattttgaggttaaagcgccggacaacgatccgcgctggctcactcatcttagcgtgccgcaacaaactaaggttgccgatccgcaggtgctggtggccttgtttcgccagttcttaagcgaacaggaaaagcatcaacgcactccggcgctggagtttattgtgctgctgattttgcagcagctcacccgtgacgcgcgtcttgatgaacaggccgatggtgcaggcaccacccttgcctggaaagcgcagaaactgattcgcacgcaatatcaccgcccgctttccacggcgcttttagcccgcgagctgtactgcaatgccgattatcttgggcgcgtctatcggcgggtgtttcatctgacgttaacagaagcaatccaccgccagcgggtgcgcgaagccgaaaagctgttaattagcgaagcgcgatcgctcacggaagtggcggcgttgtgcgggtttaatgacgtcggctatttccggcagatttttcgcaaacacaccggcttaacgccagcagcgtggaagcggcgttacagcaaggaacatatcaattcgtag

SEQ ID NO: 5514 - DNA, 1401 bp, Escherichia coli
atgacctctacaccgattaccaccgctgatatcgctaaaggtaaaattgacgatgcgttatctgtacgggaaaaaataggctacggcctgggtgacgcaggcggcaccgtaataacttgcctgatcatgaactttctcacctttttctacaccgacgtttttggcttaactccggcgctggttggcacgctgtttattgcgctacgcgtgtttgatgccatctccgacccggtgatgggcgtcattgccgaccggacgcaaagtcgctgggggcgctttcgtccgtggcagttatggattgccattcccatcggcattatcggcatcctgacattcaccgtgccagatgccagcatgggagtaaaaatcgcctgggcgttcggtacttacctgctcctttcagtcggttatacagccatcaacgtaccgtactgcgcgctgatcaacaccatgaccacccgctacaatgaagtgatctcctgccagtcctggcgattcgttctctgcggcgtagcgggatttctggtttcggtaggcttaccgtggatggtagatctcttcggtcagggcaacgctgcacgcggctatcaacttggcgtcggcgtattgtgcgccattgccgtggtgatgttcctgtgctgtttcttctgggtttgtgaacgggtgccactctccacaatggggaaatttaccctgcgcgaacatcttgccgggctgcggaacaacgaccaactgctgctgatgctggtcatgtctttcctgctgattaacgtctttaatattcgcggcggtgggtatatgtacttcattacctacgtcttacaaggcagtacgggctacacgtcgctgttcttcaccatggtcaccttcgcctccattatcggctcggtgattgtcagcccattaacgcggcgtttcgataccgtcaaaatttactactacaccaacctgctcctcgctgcgctggcggtgttgatgtggttcctgccttctggcccggcttatcaaacgctgtggctggcggtgatcctcggtaatggcgtgattcttggcttcacattgccattgcacttctcattgatggcctttgccgatgactacggcgagtggaaaacccgcgtacgttcttccggcatgaacttcgccttcaatctgtttttcatcaagctggcatgggcctccagcgccgggatcatcagcctgctgtttatttttgtcgcctaccagcctggcgtggaaaaccagaccgccagttcgcttggcgggatcgcggcgatggaaacattgctgcctgcgctgttccacctgctgctggcgatggcgatccgcttttgcaaactcaataaccctatgatgtcacgcattgctagcgacctgcgtcagcgtcatgtacagccttaa

SEQ ID NO: 5515 - DNA, 1974 bp, Escherichia coli
atgaacatttcggaagtcgatctgcataaactgacggtcagcgatccgttcctcggtcagtaccaacaactggtccgcgacgtggtgattccttatcagtgggatgccttgaacgatcgtatcccagaagcggaacccagccatgcgattgaaaactttcgcattgccgccggacttcaggagggtgaattttacgggatggtgtttcaggacagcgacgtcgccaaatggctagaagcggtagcctggtcgctgtgccagaagccggacgccgaactggaaaaaaccgccgacgaggtgattgaactgatcgcttccgcccagtgcgaagatggctatctcaatacttactttacggtaaaagcgcccgaagaacgctggagcaatctggcggagtgtcatgaactttactgcgccggtcatctgattgaagccggagtcgccttcttccaggctacgggcaagcggcgcttgctggaagtggtttgccgtctgaccgatcatatcgacagcgtatttggtccagatgaaagtaagttacacggttatcctggtcacccggaaattgaactggcactaatgcgcctgtatgaagtgaccgaagagccgcgctacctggcgctgacgaactattttgtcgaacagcgtggtgcgcaaccgcactattacgaccaggaatatgaaaagcgcgggcagacctcgcactggcacacctacggcccggcgtggatggtgaaagacaaagcctacagccaggcacatttgcccatcgcacagcagcaaaccgccattggtcacgcggtacgttttgtctacctgatgaccggcgtcgcgcatctcgcgcgtttaagtcacgatgaaagcaagcgtcaggactgcctgcggctgtggaacaatatggcccagcgtcagttatatattaccggcggcattggctcacagagcagcggtgaagcgttcagcagcgattacgatctgccgaatgacacggtatacgctgaaagttgcgcctccatcggcctgatgatgtttgcccgacgaatgctggaaatggaaggcgacagtcaatatgccgatgtgatggagcgcgcactgtacaacaccgtgctcggcggcatggcgctggatggcaaacatttcttctatgtgaatccgctggaagtacatccaaaatcgctgaaattcaaccatatctacgatcacgttaagccgatccgccagcgttggtttggctgcgcttgttgtccgccaaatatcgcccgcgtgctaacctcgattggtcattatctctacacgccgcgtgaagatgcgttgtatatcaacatctacgcaggaaacagcatggaggtgccggtagaaaatggcacgctgcgcctgcgggttagcggaaactatccgtggcaggaacaggtgacgattgcggttgaatcaccccagccggtgcgtcatacgctggctttacgtctaccggactggtgcatacagccgcagatcatattgaatggggaagaggtcgagcaggatattcgtaaagggtatttgcacattacccgtgaatggcaggagggcgacacgctgaatctgactttgccaatgccggtacgtcgcgtttacggtaacccgctggtgcgtcacgtcgccggaaaagtggcgattcagcgcggcccgctggtgtattgtctggaacaggccgacaacggcgagtcactgcataatctgtggctgcccgccgatgcgccatttacgacatttgaaggtaatggattgttccgccataagatcttaatccaggcaccgggttaccggtatgaacagagcaatccagagcagcaaccgctgtggcattacgacagcgcgccagccaaacgccagccgcaaattctgacgtttatcccgtggtttagctgggccaaccggggtgaaggcgaaatgcggatctgggtgaatgaggaaaccagtgccatccgtaggtag

SEQ ID NO: 5516 - DNA, 681 bp, Escherichia coli
atgagcatgaaaacacttttaaacgtgttaacaatattttcactaggtacattaacaggctgtgattatattgaaaaagcgagtctgatcgatgatcttgccaaacagcaagagttgcaaaaaagtaaaatagaggagcttgagaaacaacaagaacaatataaaaataaagcagaactgtttgaaaaacaacaaaataatatcacaaacagcaccagaatacttgccagcattgtaaagacagtcaaagaaaaacaggacgaatttgtcttcaccgaatttaacccgctacaaacccaatacttcattttaaataacggctcggtcggtttggcaggccgggtgctggctattgatgcggttgaaaatggcagtgtcattcgtatttcgctggttaacttattaagcgttcccgtatcaaatattggctttcatgcgacatgggggaatgagaaacccaccgatgccaaagctctggcgaaatggcaacaattactattcaacaccaccctgaattccactctgcaattaatgcctggtcaatggcaagacattaatctgacattaaaaggcgtctcgcctaataacctgaagtatctgaagttgtccatcaatatggctaatcttcagttcgacactgttcaacctgctgaaacccggcagcggaaaaacaaaaaataa

SEQ ID NO: 5517 - DNA, 1266 bp, Escherichia coli
atgctaacatcctttaaacttcattcattgaaaccttactctcttaaatcatcaatgattttagagataataacttatatattatgttttttttcaatgataattgcattcgttgataatactttcagcataaaaatatataatatcactgctatagtttgcttagtggcactaattttacgtggcagacaagaaaattataatataaaaaaccttattcttcccctttctatatttttaataggcttacttgatttaatttggtattctgcgtttaaaatagataattcgccatttcgtgctacttaccatagttatttaaatactgccaaaatttttatatttggttcttttattgttttcttgacactaactagccagctaaaatcaaaaaaagagagtgtattatacactttatattctctgtcatttctaattgctggatatgcaatgtatattaatagcattcatgaaaatgaccgcatttcttttggtgtaggaacggcaacaggagcagcatattcaactatgctaatagggatagttagtggcgttgcgattctttatactaagaaaaaccatccttttttatttttattaaatagttgcgcggtactttatgttctggcgctaacacaaaccagagcaaccctactcctgttccctataatttgtgttgctgcattaatagcttattataataaatcacccaagaaattcacttcctctattgttctactaattgctatattagctagcatagtaattatatttaataaaccaatacagaatcgctataatgaagcattaaatgatttaaacagttataccaatgctaatagcgtgacttccctaggtgcaagactggcaatgtacgaaattggtttaaatatattcataaagtcacctttttcatttagatcagcagagtcacgcgctgaaaatatgaatttgttagttgcagaacacaacaggctaagaggggcattggagttttctaacgtacatctacataatgagataattgaagcagggtcactgaaaggtctgatgggaattatttccatccttttcctctatttttcactgttttatacagcatataaaagacgagctttgggtttgttgatattaacgcttggcattgtggggattggactcagtgatgtgatcatatgggcacgcagcattccaattatcgttatatccgctatagtcctcttactcgttattaataatcgtaacaatactattaatcaagaataa

SEQ ID NO: 5518 - DNA, 1074 bp, Escherichia coli
atgcgtttaggaacttttcacaaaaagaaaagattttatataaacaaaataaaaattaatttcctttcttttttatttcgtaaaaaaataaataatcaaattacagaaccagcgcaagttaattcatgtcttattattcatgataataataagctcggtgatctaattgtattaagttcgatttatcgtgaactttatagtaaaggggttaaaataaccattcttacaaatagtaagggtggggcgtttctctctaacaataaaaatatatttgagttctgtattaaagaatcaaccggtttccttaaaatgcttactctatgtaagcatctgcgggatttgcagttcgatattgtattagacccctttgaaaccatgccctcatttaagcatagtttaatattatcaagtttaaaagattcttacattctgggttttgatcaatggtataaacgttactattcattttaccatccccacgatgaatgtttaaaagaacatatgagtacacgagcaacagaaatactgaagcatatttatggtgagggtgaattctccaccgactacgacttgcatttaccagtagatgttgaagataaaataaaagaatttattggagatacaagaatagtcattattaacccattaggtgcaaaaaaaatatgccgacttacgtttgagcaaataaaagttatatatcaagaaatgaaactacactttgaaaattatcgggtgatatttaccgggttaccgcaagatttattgacaataccaatacctgaaatcgaaacactaccatttaatgagtttatttataccgttgcgttgaccaagtatagtgattttgtcatttctgttgatacagctcttgttcatatcgctgcggcttatcataaaccaacgcttgcattttatcctaattcacgtactccggaatatccctcacatttaatttggtccccaaataatcataaatcaatacaaatagtatccccaacatttacggtgaaagatatcgatactgaaactttaactgattcagtaaagagattaagttgtatagataagaagtga

SEQ ID NO: 5519 - DNA, 852 bp, Escherichia coli
atgaagaatattagatatattgacaaaaaagatgttgaaaacctgattgaaaataaaacatctgatgatgttattatttttctttcgggccctacatcgcaaaaaacacctttgtcagtattacgaacaaaggatattattgctgtcaatggttctgtgcaatatctgttaagtcataatatcgttccttttatatatgtacttacagatgtccgctttttacatcagcgtcgtgatgatttttataaatttagccagagaagccgttataccatagtaaacgttgacgtttatgaacatgcttccaaagaagataaactttatatcctccagaactgcctcgtattacggtccttttatcgccgggaaaaaggtggttttataaagaagattaaatttaatatattgagtcagattcacaaagaactgctgatctctgtaccgttgtctaaaaaaggtcgtctggttggattttgcaaggacattagttttggttattgttcatgccatactattgcctttgctgcaattcaaatagcatattcacttaagtatgcacggattatttgttctggtcttgatttaacgggtaactgctctcgtttctatgacgaaaataataatcccatgccctcggaattgagtaaggatttattcaaaatcttgccatttttccgttttatgcgtgataatgtagaagatattaatatctataatttatcagatgatacagctatttcttacgatgtaattccatttattaaatttcaagatatcagtagagaagaatcaaaagataagacaagaaaaaaaatgcaatatagaacttcaactgattcttatgctaattaa

SEQ ID NO: 5520 - DNA, 699 bp, Escherichia coli
atgattcagaagagcaagatcaaagacttggttgtttttaccgatgaagagaattcaaagtacctcaatgtattaaatgacttcttgtcttataatataaatatcatcaaggtttttcgttctattgatgatacaaaagttatgcttattgataccgattacggtaaattgattcttaaggttttttctccgaaagttaagcgtaacgaacgtttctttaagtctctgttaaaaggtgattattacgaacgcctttttgtgcaaactcaaaaagtacgaaatgaagggttaaatacactcaatgatttttatttattggctgaacggaaaaccttacgatttgtccatacttatatcatgatcatcgagtatattgatggtatagagttatgtgatatgcccgatattgatgattcgctaaaaaataaaattcaacaatcaattaatgccttgcataaacatggcatggtttctggcgaccctcatcgtggtaacttcattataaaaaatggtgaggtccgaattattgatctctctggaaaacgtgcttcagcgcagcgtaaagcgaaagatcgcattgacttagagcgtcattacggtattaaaaatgagattaaagatctaggctattatcttttagtatatcgtaaaaaaatgcgcaattttatgcggcgtttgaaagggaaaccagctcgctaa

SEQ ID NO: 5521 - DNA, 1017 bp, Escherichia coli
gtggactcatttcctgccatagagatagataaagttaaagcctgggattttcggctggctaatataaatacttctgaatgtttaaatgttgcctatggtgtcgatgctaattatcttgatggtgtaggtgtttccattacatcaattgtcctaaataatcgacatattaatcttgatttttatattattgctgatgtttataatgatgcttttttccaaaaagttgcaaagcttgcagagcaataccaattaagaatcacattatatagaattaacactgataagctccagtgcttgccttgtacacaggtctggtcaagagcaatgtacttccgtttatttgcatttcaattattgggtttaacacttgatcgtttgctttatcttgatgcagatgttgtttgtaaaggcgatattagccaactattgcatctggatttaaacggcgcggttgctgctgttgttaaagatattgacccaatgcaggaaaaggcggcatccaggttgtctgatccagaattactcgggcagtactttaattccggtgtcgtttatttagatttaaaaaaatgggctaacgcaaaactaacagaaaaagcgttgtctattcttatgagtaaagataatgtgtataaataccctgatcaagatgttatgaatgtcttactgaaagggatgacaatatttttgcctcgtggatataatacaatttatacaattaaaagtgaattaaaagacaaaacacatcaaaactataaaaagctgattatagaaaatactcttcttattcattatacaggtgcaactaaaccgtggcacaaatgggcaatttatccatcgacaaaatactataaaatagctttagacaattccccctggaaagatgactctccacgagatgcgaaatcaattattgaattcaaaaaaagatataaacatcttttagtgcaacatcactatatctcaggaattatagcaggagtctgttatctttgccgaaaatattaccctaaataa

SEQ ID NO: 5522 - DNA, 1020 bp, Escherichia coli
atgcagcaggtatttttccaggaaactgagtatctaaattcagttattgattataatcataaagtagaaacagaaaatctttgtctggacatcgcttatggaactgacaaaaactttctatttggttgcggaatttcgattgcttcaatattaaagtataatgaaggaagtcggttgtgttttcacatttttactgattattttggtgataatgatcgtaagtattttgatgccctggcgttacagtataaaaccagaattaaaatatatctgattaatggtgatcgactgcgctcattgcctagcacaaagaactggactcatgcaatatattttcgttttgttattgctgattactttattagtaaggtggctaaagtcctttatctggatgcagatatcatttgtcaggggactattgagccactaattaaattctcatttcctgacgataaagtcgcaatggttgttacagaagggcaagctgactggtgggaaaaacgcgcccattcgttaggtgttgcgggaatttctaaaggttactttaactccggttttttattgattaatactgccaaatgggcagctcagcaggtttctgcacgagccattgcaatgctaaatgagccagaagtaatcaaaaaaataacacatcctgatcaggatgtattaaatatgttgctggcagataaacttattttcgctgatattaaatataacacccagtttagcttaaattatcaactaaaagaaagctttataaacccagtaaccaacaatactatttttatccattatatcgggccaaccaagccctggcatgattgggcctgggattatcctgtatcacaagcctttatggaggcaaaaaatgcttcgccatggaagaatacagcgttgctgaaaccgaacaatagcaatcaattaagatatagcgcaaaacatatgcttaaaaaacatagatatctaaaaggatttagcaactatcttttttattttattgaaaagataaagcattaa

SEQ ID NO: 5523 - DNA, 1080 bp, Escherichia coli
atgaaaatagcatttatcggcgaagctgtttctggatttggcggcatggaaacggtcattcgtgatgttattactaccttcaggcaacaacatatctatagtgaaatgtttttcttttgtcgtaatgataaaatggataagggatggctggaaggtattaagtactcgtgttcattttccaatattcgcttaggttttttgcgtcgggcgaaacatattcatgctttaagcaaatggcttcaagattatcagccagatgttgttatttgtattgacgttatctcgtgtttgtatgcggccaaagcacgtaaaaaatcaggaattgatgtgccagtattttcatggccgcatttttctttagatcacaaaaaacatgctgaatatatcacctgtgcagactatcatttagccatcagctctggcattaaacagcaaatgattaatcggggtgtaccagaatcgacgataaatgttatttttaatccagtcgaagctaaagacacagtcattcctgggcctgaggaaggtgaaacggcaacgttcatttatgttgggcgtatgaaattcgagggccagaagagggttaaagacctgcttgatggtttatcacaagcgcaaggtgactggaaactccatgtactgggtgatggttctgattttgaaaaatgccaggcatatggtagagaattgaagattgataatcgaattgtctggcatggttggcaaaaacatccatgggaggtagtgcgtcaggatattaagaaagtcagtgcattgttattaacctcatcttttgaaggttttccaatgaccttacttgaatcgatgtcatgggggattccgtgtatcagtgccgattgtgtctccggtcctggtgacattattcaacctgatgtcaatggccatttgtatcaaccgggagatattgctggttttgttactcttctaaataaatatatagcaggtgaaattcatatcgaacatgaaaaaattcctgcgtcgatcgataagttttatcaatctaagtattatgatagattacataatataattatttctgctatttcccggaggaaataa

SEQ ID NO: 5524 - DNA, 936 bp, Escherichia coli
atgactatttattttataaactgggttgcagattatgaattaaaaatgatccagtacttgaaaaaaaagcacaagataaaaaatataacaacaccaaaaaaatacaactgggttaataagaaaatttcgaaattagggatggataatgcatggttgggacgattatttatcaaacatcacctaaatgctgtaaaaaaggatgatatcattatatttaatgacagtgtcattaataaaagtattaacaagcaaatattaaaaaatattaattgtcataaagtattacttctaagaaatactgtcagtgaaaattttatttttgataacgctaattattttgatattatctatgattttgagcatagatttatagggaatgaaaagatcaaggcaatagaacaattttttcctataggaatggatgaaattagaaattatagtttatctgacaaaaataacagtcagccaatatgtttttttcttggtcgtgataaaggacgtcttcaaataattaatgaattagccgatagattaacaacactaggatgtaagttagattttaatgttgtcaaagataaaacatcatctccgacttcaaagtatttgattgaaaaacaaatatcgtatgaagagaatattagaagaacattaaatgctaatataattgttgatataactaaagaaaaccaatctggctggactcttcgtatacttgaggcactatttttcaataaaaaattaattactaataatataaatgtacttggttcggaaatctatagtgagtctcgcttttttataataggtcatgatgattgggataagttagagtattttattaattcatctgttaaaccaatggattatgatagtttatataaattcagccctgataaaatgatgtcaacaattgtttatgattttatagaaaaataa

SEQ ID NO: 5525 - DNA, 2109 bp, Escherichia coli
ttgtatctgtttgaaagcctgaatcagctgattcaaaactacctgccggaagaccaaatcaagcgtctgcggcaggcgtatctcgttgcacgtgatgctcacgaggggcaaacacgttcaagcggtgaaccctatatcacgcatccggtggcggttgcctgcattctggccgagatgaaactcgactatgaaacgctgatggcggcgctgctgcatgatgtgattgaagatacacccgccacctaccaggacatggaacagctttttggtaaaagcgtcgccgagctggtagagggggtgtcgaaacttgataaactcaagttccgcgataagaaagaggcgcaggccgaaaactttcgcaagatgattatggcgatggtgcaggatatccgcgtcattctcatcaaacttgccgaccgtacccacaacatgcgcacgctgggctcacttcgcccggacaaacgtcgccgcatcgcccgtgaaactctcgaaatatacagcccgctggcgcaccgtttaggtatccaccacattaaaaccgaactcgaggagctgggttttgaggcgctgtatcccaaccgttatcgcgtaatcaaagaagtggtgaaagccgcgcgcggcaaccgtaaagagatgatccagaagattctttctgaaatcgaagggcgtttgcaggaagcgggaataccgtgccgcgtcagtggtcgcgaaaagcatctttattcgatttactgcaaaatggtgctcaaagagcagcgttttcactcaatcatggacatctacgctttccgcgtgatcgtcaatgattctgacacctgttatcgcgtgctgggccagatgcacagcctgtataagccgcgtccgggccgcgtgaaagactatatcgccattccaaaagcgaacggctatcagtctttgcacacctcgatgattggcccgcacggcgtgccggttgaggtccagatccgtaccgaagatatggatcagatggcggagatgggtgttgccgcgcactgggcttataaagagcacggcgaaaccagcactaccgcgcaaatacgcgcccagcgctggatgcaaagcctgctggagctgcaacagagtgccggtagctcgtttgaatttattgagagcgttaaatccgatctcttcccggatgagatttacgttttcacaccagaagggcgcattgtcgaactgcctgccggtgcaacgcccgtcgacttcgcttatgcggtgcataccgatatcggccatgcctgcgtgggcgcacgcgtcgaccgccagccttacccgctgtcgcagccgcttactagcggtcaaaccgttgaaatcattaccgcaccgggtgctcgcccgaatgccgcgtggctgaactttgtcgtcagctcgaaagcgcgcgccaaaattcgtcagttgctgaaaaacctcaagcgtgatgattctgtaagcctgggccgtcgtctgctcaaccatgcgttgggtggtagccgtaagctcaatgaaatcccgcaggaaaatattcagcgcgagctggaccgcatgaagctggctacgcttgacgatctgctggctgaaatcggccttggtaacgcaatgagcgtggtggtcgcgaaaaatctgcaacatggggacgcctccattccaccggcaacccaaagtcacggacatctgcccattaaaggtgccgatggcgtgctgatcacctttgcgaaatgctgccgcccaattcctggcgacccgattatcgcccacgtcagccccggtaaaggtctggtgatccaccatgaatcctgccgtaacatccgtggctaccagaaagagccagagaagtttatggctgttgaatgggataaagagacggcgcaggaattcatcaccgaaatcaaggtggagatgttcaatcatcagggcgcgctggcaaacctgacggcggcaattaacaccacgacctcgaatattcaaagtttgaatacggaagagaaagatggtcgcgtctatagcgcctttattcgtctgaccgcccgtgaccgtgtgcatctggcgaatatcatgcgcaaaatccgcgtgatgccagacgtgattaaagtcacccgaaaccgaaattaa

SEQ ID NO: 5526 - DNA, 2319 bp, Escherichia coli
atgaaaattagcgacggaaactggttgattcaacctggcctcaatttgattcacccgcttcaggtgttcgaggttgaacagcagggtaatgaaatggtggtctatgctgcccctcgtgatgtgcgtgaacgtacctggcagcttgatacgcctttatttacgctgcgctttttctccccacaggaaggtattgtcggtgtacggattgagcattttcagggggcgctgaataacggtcctcattacccgctcaatattttgcaggacgtgaaggtcactatcgaaaacacagaacgttacgctgagtttaaaagtggcaacttaagtgcgcgtgtcagcaaaggtgagttctggtcactggattttctgcgcaacggcgaacgtattaccggtagtcaggtgaaaaataatggctacgtgcaggacacgaataatcaacgaaattatatgtttgaacggctggatcttggcgttggcgaaacagtttacggcctgggagagcgctttactgccctggtgcgcaatggtcagacggtagaaacctggaaccgggacggcggcacaagtactgaacaggcgtataaaaatatcccgttttatgtgactaaccgtggttatggggtactggtcaatcatccccaatgtgtctcttttgaagtgggatcggagaaagtctccaaagtacagttcagcgttgagagtgaatatctcgaatactttgttatcgacggcccgacgccgaaagcggtacttgatcgttatacccgttttactggccgtccggcgctgccgcccgcgtggtccttcggtctgtggctaaccacttcatttaccaccaactacgacgaagcgacggtaaacagctttatcgatggtatggcggaacgcaatctgccgctgcatgttttccactttgactgtttctggatgaaagccttccagtggtgcgattttgagtgggatccgctgacttttccggacccggaagggatgatccgccgcctgaaagcgaaagggctgaaaatctgcgtctggattaacccctatattgggcaaaaatcccccgtctttaaagagttacaagagaaaggttatttactcaaacgcccggacggttcgctgtggcagtgggataaatggcagccaggtctggcgatttatgactttaccaatccggatgcttgcaaatggtacgccgacaaactgaaaggtctggtcgcgatgggcgttgattgctttaagaccgactttggcgaacgtattccaaccgatgttcaatggtttgatggttccgatccgcagaaaatgcataaccattatgcatacatctacaacgaactggtgtggaacgtgctcaaggacaccgttggtgaggaagaagccgtcttgtttgcccgctcggcctccgttggtgcgcagaaatttccggtacactggggtggcgactgttacgctaactacgaatcaatggcggaaagcctgcgcggtggtttgtctattggcctttcaggttttggcttctggagccacgatatcggcggctttgaaaataccgctccggcgcacgtttacaaacgctggtgcgcgtttggtttgctttccagccatagccgtttacatggcagcaaatcttatcgtgtgccgtgggcctacgatggtgagtcctgtgatgtggtgcgcttcttcacgcaactgaaatgccgcatgatgccgtatctgtatcgtgaagctgcacgtgcaaacgcccggggtacgccgatgatgcgggccatgatgatggagttcccggacgatccggcttgtgattaccttgaccgtcaatacatgttaggcgacaacgtgatggttgcgcctgtgttcactgaaacgggcgatgtgcagttctacctgccggaaggtcgctggacacacctgtggcacaacgatgaactcgacggtagtcgctggcataaacagcagcacagcttcctgagtctgcccgtttatgtgcgtgatagcaccctactggcgctgggcaacaacgatcaacgtcccgattacgcgtggcacgaaggtacggcattccacctctttaatctgcaagacgggcatgaagccgtctgtgaagtgcccgatgctgacggttcggtgatctttactttaaaagcagcacgtactggcaacacgattactgtgactggtacgggcgaggcgaagaactggacactgtgcttgcgcaatattgtgaaagtaaatggtctgcaaggcggttcgcaggctgaaagtgagcagggactggtggtgactcctcaagggaatgcgctgacaattacgttgtaa

SEQ ID NO: 5527 - DNA, 819 bp, Escherichia coli
atgaaactgacaacacatcatctacgggcgggggccgcattattactggcaggagttctgctggcaggttgcgaccagagcagtagcgatgaaaagcatattaaagttggcgttattaatggcgcagaacaagatgtcgcggaagtcgctaaaaaggtagcaaaagagaaatatggcctcgatgttgaactggtaggatttagcggttcgttgctaccgaacgatgcgacaaatcatggcgagcttgatgcgaacgtcttccagcatcgaccctttcttgaacaagataatcaggcgcatggttataaactggtagcggtgggaaatacgtttgtcttccccatggcgggttattccaaaaaaatcaaaaccgtggcgcaaataaaagaaggcgcgacagtggcgatccccaacgacccgactaaccttggtcgtgcgcttttactgctgcaaaaagagaagctaattactctgaaagagggaaaagggttattacctaccgcgttggatataaccgataatccacgccatttgcagataatggagctggaaggggcacagttgccacgtgtactggacgacccgaaagtggatgtagcgattatcagcaccacttacatccagcaaacaggactttctccggttaacgacagcgtatttattgaagataaaaattcgccgtatgtgaatattctggtggcacgggaagataataagaatgcagaaaacgtgaaggaatttctgcaatcttatcaatcacccgaagtcgctaaagcggcagaaaccatctttaacggaggcgcggtgcctggctggtaa

SEQ ID NO: 5528 - DNA, 1239 bp, Escherichia coli
atgttaaagtggtcggctttccctctgaaacatgccacgggtaacaccatgagtgaatttattgctgaaaaccgcggcgcggatgccatcacccgaccgaactggtcagccgttttctcggtggcattttgcgttgcctgtcttattatcgttgagtttttgcccgtcagtttgttgacgccaatggcccaggatttaggcatttcggaaggggttgccgggcaatcggtgaccgtaaccgcttttgtggcgatgtttgccagtttgtttattacccagaccattcaggccactgaccgccgctacgttgtcattctgttcgccgttttgctgacgctttcctgtttgctggtttcctttgccaactcattcagtctgttgttaatcggtcgcgcctgtctggggctggcgctgggcggattctgggcgatgtcggcgtcgctgaccatgcgtctggtaccgccgcgtacggtgccgaaggcgctgtcggtgatcttcggcgcggtttctattgcgctggtgattgccgcgccgttgggcagttttttaggcgagcttatcggttggcgcaatgtctttaatgcggcggcggtgatgggcgtgctgtgtattttctggattatcaaatcactgccttcgctgccaggcgaaccttcgcatcagaaacaaaatactttccgcttattacaacgtccgggagtgatggccgggatgatcgccatctttatgtcctttgccggacagtttgcttttttcacttatattcgcccagtgtatatgaatctggcgggattcggtgttgatggcttaaccctggtgctgctgagttttggtatcgccagctttgtcgggacatcgctttcgtcgtttattctcaaacgttcggtgaaactggccttagcgggcgcaccgtttgtgctcgccctgagcgcgctggtactgacgctgtggggaagcgataaaattgttgctactggtgtggcgattatctgggggctgacctttgctttaattcccgttggctggtcaacgtggatcactcgctcactggccgatcaggcagaaaaagccggatctattcaggtggccgttattcagcttgccaatacctgcggtgcggcaatcggcggttatgcgttggataacattggtctgacttcgccgctgatgttgtccggcacattgatgttgctgactgcattgttggtgactgcaaaggtgaaaatgaagaaatcctga

SEQ ID NO: 5529 - DNA, 360 bp, Escherichia coli
atgcgcgtgtttaaaaccaaatggtttgcaagggaagccaggtctcatgcaataacagatgaagagttgtgccgggccattttagaaacggaacaaggtaaagctgatgtacttggtggtggcgtttttaaaaagcgccttcaccgaaatcgtgagcgtgcaattattctggcgaaagggggaagcaattggttttacacgtttttatatgcaaaacaggatatgtcgaacattaatagtcaggaactggctgggtttcgtgaacttgcaaagcattatgccttcctgacgaaagcccaactgacagcaatgattaacactaaagaactgacagagatctgctatgactgcaaaaactaa

SEQ ID NO: 5530 - DNA, 324 bp, Escherichia coli
atgactgcaaaaactaaatttaaaagtcctgcatttgaagctattcacagcgcagcggctggattgtccagagtcgatgctatttctgccgaaacgatgcgtacttttgacaaagcctgcctgaccagcgtgcaagacttacaacctgttgagataaaagcactgcgggaaaaattaaaagtgagtcagcccgtcttcgctcactatctcaataccagcgtttcaactgtacaaaaatgggaaagtggcgctaaacgccccaatggcatttcattaaaactgctcagcattgtgcaaaaacacgggctggaggtgctgctgtaa

SEQ ID NO: 5531 - DNA, 1335 bp, Escherichia coli
atgaataatgacaataccgattacgtgagtaatgaatcagggacgctttcgcgattatttaaactacctcagcatgggaccaccgtccgcacagaattgattgcggggatgaccacttttttaaccatggtgtacatcgtttttgtgaacccgcaaatcctcggcgcggcacaaatggacccaaaagtggtgtttgttaccacctgtttgattgccggtatcggcagtattgcgatgggggtatttgctaacttacccgtggcactggctccggcaatgggcctgaacgccttctttgccttcgtggtcgtgggggcgatgggtatctcctggcagaccgggatgggcgcgatattctggggcgcagttgggctatttttgctcacgctgtttcgtatccggtactggatgatctccaacattccattaagtttacgtattggtatcaccagcggaatcggattatttatcgccttaatgggattaaaaaatactggcgttattgtcgccaataaagacaccctggtgatgattggcgatttaagttctcacggcgtgttgttaggtattttagggttttttattataactgtgttgtcatcacgtcattttcatgccgcggtgcttgtttctattgtggtgacgtcttgctgtggattatttttcggtgatgttcattttagcggtgtctattccattccgcctgatattagcggcgtcattggtgaagtggatttgagcggtgcgttatcacttgaactcgccggtatcattttctcctttatgctgatcaacttatttgattcatcagggacattaattggtgtgactgataaagctggcttaatagatagtaacggtaaattccccaatatgaataaggcgctgtatgttgatagcatcagttcggtggcgggtgcgtttatcggtacctcgtctgttaccgcctatattgaaagtacttcaggtgtggctgtcggtggtcgcacggggctgactgcggttgttgtcggcgttatgtttctgctggttatgttcttctcaccgctggtggcgatggttcctccttacgcaaccgccggagcgttaatctttgttggcgtattgatgacatcgagcctggcacgcgttaactgggatgattttaccgaatcggtgcctgcgtttattaccacggtgatgatgccctttacgttctcgatcaccgaagggattgcactaggctttatgtcgtactgcatcatgaaagtgtgcaccgggcgctggcgcgatctgaacctgtgtgtggtggtggtcgcagctctgtttgcactgaagattattctggtggattag

SEQ ID NO: 5532 - DNA, 1392 bp, Escherichia coli
atgctggctttcttaaaccaggttcgcaagccgaccctggaccttccgctcgaagtgcggcgcaaaatgtggttcaaaccgttcatgcaatcctacctggtggtctttatcggctaccttacgatgtacctgattcgcaagaactttaacatcgcgcagaacgacatgatctcgacctacgggttgagcatgacgcagctggggatgatcggcctgggcttctccatcacttatggcgtgggtaaaacgctggtttcttactacgccgacggcaaaaacaccaaacaattcctgccgttcatgctgatcctgtctgccatttgtatgctgggcttcagtgccagtatgggcagcggctcggttagcctgttcctgatgattgccttctacgccttgagcggctttttccagagtaccggcggttcatgcagttactccaccatcaccaaatggacgccgcgtcgtaaacgcgggacattcctcggtttctggaacatttctcacaaccttggtggtgcaggcgcagcaggtgtggcgctgttcggcgcaaattacctgttcgatggtcatgtcatcggcatgtttattttcccgtcgattatcgcgctgattgttggttttatcggtctgcgttacggcagcgactccccggaatcttatggcctcggcaaagctgaagagctgtttggcgaggagatcagtgaagaggataaagagacagaatctaccgatatgaccaagtggcagatctttgttgagtatgtgctgaaaaacaaagtgatctggctgctgtgcttcgccaacattttcctctatgtggtgcgtattggtatcgaccagtggtcaaccgtgtatgcgttccaggaactgaaactctctaaagcggtggcgattcagggctttacgctgtttgaagctggtgcgctggtcggtacgctgctgtggggctggctctctgacctggcgaacggtcgccgtggcctggtggcctgtatcgcgctggcgctgattatcgccacgctcggtgtgtatcaacacgccagcaaccaatatatctacctggcttctctctttgcgttgggtttcctggtctttggcccgcaactgttgattggcgtggcggctgttggctttgtacctaaaaaagcgattggcgctgccgatggtattaaaggcaccttcgcttacctgattggtgacagctttgccaagttaggtctgggaatgattgccgatgggacgccggtatttggccttaccggctgggcaggcaccttcgccgcgctggatatcgccgcgattggttgtatctgcctgatggcgatagtggcggtgatggaagaacgcaaaatccgccgcgagaaaaaaattcagcagttgacagtggcataa

SEQ ID NO: 5533 - DNA, 861 bp, Escherichia coli
atgcacactcaccctcacttaataaaacaaactcttgttccacgactcattaatgaaataaacaaaagaacacaaagcaatagtgagaagttatcaaacagtgataaattaacatatattaatgacaactactgtgagataacacgaaactacacgtcattttatggcatgaacattctgagcatcgttctttttttacctatcgttattttatgttttggctctgttttattctttatatatgacattatatttaacttcgaacgatacttagatacgtggagataccgcgcagactctgagttactgctacatattgcttactgcgcaatttttttcatgtcttttgtttttgctgctatcctaaattattttatctttgccccgcgacattacccaattcgttttaatagaaaaacaggaaaggtctatatttgtaattatattcttaatgatatgagtcataaatcgacctataccttctggtggcactacccattctacaaacatactaagcctgaatataaagagtacgactgggaacaaattcaaggtatagctttttttgcgcaaaatcaccattccacatacgccaccattcgctgtattgtttatgaatcattagacagtacaaatattattgacacctttaacctgataacgacagagagtgctacaaatgcattgcatatgacaaataacaaattatggttatggattaatagctttatgaattttgacgatgagtttttagagaaatctatcaacactgctccaggtatttggggccgtgaagtgaattggcctgatgatatgaataagaaatcaatgttgtcttcaatggacgaatatatactctga

SEQ ID NO: 5534 - DNA, 867 bp, Escherichia coli
atgaatggaaaattgcaaagttcggatgtaaaaaacgaaactccgtacaatattcccttattgattaacgaaaatgtgatctccagcggaatttctctgatatcgctctggcatacctacgccgacgagcattatcgggtgatctggccgcgggacaagaagaaaccgcttatcgccaactcatgggttgcggtgtataccgtacaaggatgtgggaaaattcttttaaagaatgacgaacaaataactctgcatggcaactgtattatatttttaaagccaatggatattcactcttatcactgtgaaggtttggtctgggaacagtactggatggaatttacccccaccagtatgatggatattcccgtcggtcagcaaagcgttatttataatggcgaagtttataatcaggaacttaccgaagttgctgagttaattacttcaccagaagcaataaaaaataatctggcagtcgcttttctgacgaaaattatttatcagtggatttgtcttatgcacgcagtcggtaaaaaagatccacaacggcggcaaattgaaaaattaattgccactttacatgccagtctacaacaacgctggagcgtagctgatatggctgccacgatcccctgtagcgaggcctggttgcgtcgtctgtttttacgctataccggcaagacgccgaaagaatattacctcgatgcgcgtctggatctggcgctatcgctattaaagcaacaagggaactcggttggcgaagtcgctgatacgctcaacttcttcgactcctttcatttcagcaaagcctttaagcataaatttggttatgcgccgtcagctgtgctgaagaatacggacaggtaa

SEQ ID NO: 5535 - DNA, 582 bp, Escherichia coli
atgttcagggaatttggcattcacgttgacctggaagagatttttacccgttttaaaggcgtaaaactctacgaaatcatcaacatcatcagtaaagaacagggcgtgacgatgatccaggccgatgccgagcacgtttaccgtgcggaagtggcgcgcctgtttgatagcgagcttgaggtgattgcaggagcgaacgaattgctggctagtgtgaaagtgccgatgtgcgtcgtctctaacggcccggtcagcaagatgcagcattcgcttggtaagctcaacatgctgcactacttcccggaaaaactgttcagcggctatgatatccagcgttggaagcccgatccggcattaatgttccatgcggcaaaagcgatgaatgtgaacgttgaaaactgcattctggtcgatgactccagtgccggtgcgcaatcagggatagatgccggaatggaagtgttttacttctgcgctgacccgcacaataaaccgatcgttcacccgaaagtcaccacctttacccatctttcgcaattaccggaactgtggaaggcgcgtggttgggatattacggcatag

SEQ ID NO: 5536 - DNA, 588 bp, Escherichia coli
atgactcaaaatatcaggccgttacccctattcaaatatcatcccaagccactggaaacaggcgcatttgaacaggataaaaccgtagagtgcgattgctgtgaacaacagacgtcagtttattactcgggtcccttttattgcgttgatgaagttgaacatctctgtccgtggtgtattgcgaacggttctgctgctgaaaagtttgcaggtagttttcaggatgatgccagcatcgaaggtgttgaatttgagtatgatgaagaggacgattttgccggtattaagaacacatatcctgatgaaatgctgaaagagttggttgaacgcacgccaggttatcatggatggcaacaggaattctggctcgcgcattgtggcgatttctgtgcttttatcggctatgtgggctggaatgatataaaagatcgcctcgatgaatttgccaaccttgaagaagattgtgagaatttcggtattagaaattctgatctagctaaatgcctgcaaaagggtggtgattgtcagggttatctcttccgctgtctccactgcggcaagctgagactgtggggcgatttttcatag

SEQ ID NO: 5537 - DNA, 1170 bp, Escherichia coli
atgaatataaaaattgctgctttaacgctggctattgccagcggtatttctgctcaatgggccatagcagcggatatgccagccagcccggcacccactattccggtgaaacagtatgtgactcaggtcaataccgataacagcgtgacctttcgctactttgcccctggggcaaaaaatgtctccgtagtggtgggtgttccggttccggacaatattcacccgatgaccaaagatgaagcgggagtctggtcgtggcgcacgcctgtcctgaaaggcaatctgtacgagtattttttcaatgttgatggtgtacgcagcattgatacaggcacggcaatgactaagcctcagcgtcaggttaactccagtatgattctggtaccgggcagttatctggatacacgttctgttgtgcatggtgatttgatcgccataacttaccactccaacgcattgcaatccgaacgtcagatgtatgtctggaccccgccaggatacaccggcataggcgagcctttgccagtgctctatttctatcacggctttggtgataccggacgttccgctattgatcaggggcgtatcccgcaaatcatggataacctgctggctgaagggaaaattaaaccgatgctggtggtgatcccggataccgaaaccgatgcgaagggcattattcccgaagatttcgttcctcaggagagacgtaaagtcttttatccgttaaatgctaaagcggcagatcgcgaactgatgaacgatattatcccgctgattagcaagcgttttaatgtccgtaaagatgccgatggtcgcgcactggcagggctttcacaaggtgggtatcaggcactggtatcgggaattaatcatctggaaagctttggctggctggccacattcagtggtgttaccacgacgaccgtaccagatgaaggggtcgctgcccggctgaacgatccggcagctattaaccagcaactacgtaattttactgtggtcgtgggcgataaagatgtcgtaaccggcaaggatatcgccgggctgaaaactgagcttgagcagaaaaaaataaagtttgattaccaggaatatcccggtctgaaccatgaaatggatgtctggcgaccagcctatgcagcctttgtacagaaattatttaaataa

SEQ ID NO: 5538 - DNA, 1032 bp, Escherichia coli
atgtctgcatttaccccggcaagtgaagtcttgctgcgtcacagtgatgatttcgaacaaagccgtattctgtttgccggagacttacaggatgacctgcccgcgcgtttagataccgcggccagccgtgctcatacccagcaattccaccactggcaggtattaagccgccagatgggggataacgcccgtttcagtctggtcgccacggtggatgacgtcgcagattgcgatacgctgatttactactggccgaagaacaaaccggaagcccagttccagttgatgaatttactttctctgctgccagtggggacagatatttttgtcgttggcgagaaccgcagcggcgtgcgcagcgccgagcagatgctggcagattatgcgccgttgaataaagtcgacagcgctcgtcgctgtggcctctattttggtcgtctggaaaaacagccggtatttgatgccgataaattctggggcgaatacagcgtcgatggcctgacggtcaaaacgctgcctggcgtgtttagccgcgacggtctggatgtcggtagccagttgctgctctcgacgttaaccccgcacacgaaaggtaaagtgctggatgtcggctgtggcgcgggtgtgctttcagttgcctttgcgcgccattcgccgaaaattcgtctcaccttgtgcgatgtctctgcgccagcggtagaagccagccgcgcaacacttgcggccaacggtgttgaaggtgaagtctttgccagcaacgtcttttccgaggtgaaaggtcgttttgatatgatcatctccaacccgccgttccacgatgggatgcaaaccagcctggatgcggcgcaaacgctgattcgcggcgcggtgcgtcatcttaatagcggcggcgagctgcgaattgtagcgaacgccttcctgccttacccggacgtgctggatgagacatttggcttccatgaagtgattgcgcaaaccgggcgtttcaaggtgtatcgcgccattatgacccgccaggcgaagaaaggttaa

SEQ ID NO: 5539 - DNA, 414 bp, Escherichia coli
atgacatcccgacgagactggcagttacagcaactgggcattacccagtggtcgctgcgtcgccctggcgcgttgcagggggagattgccattgcgatcccggcacacgtccgtctggtgatggtggcaaacgatcttcccgccctgaccgatcctttagtgagcgatgttctgcgcgcattaaccgtcagccccgatcaagtgctgcaactgacgccagaaaaaatcgcgatgctgccgcaaggcagtcgctgcaacagctggcggttgggtactgacgaaccgctatcactggaaggcgctcaggtggcatcaccggcgctcaccgaattacgggcaaacccaacggcacgcgccgcgttatggcaacaaatttgcacatatgaacacgatttcttccctcgaaacgactga

SEQ ID NO: 5540 - DNA, 447 bp, Escherichia coli
atgaacacgatttcttccctcgaaacgactgatttaccggcggcttaccacattgaacaacgcgcccacgcctttccgtggagtgaaaaaacctttgccagcaaccagggcgagcgttatctcaactttcagttaacgcaaaacggcaaaatggcggcgtttgcgattacgcaagtggtgctggatgaagctacattgttcaatattgcggtcgatcctgactatcagcgtcagggattgggaagggtgctgctggaacatctgatcgacgaactggaaaaacgcggcgtggcgacactatggctggaagtccgtgcctcaaatgctgccgccattgccctgtacgaaagtttaggctttaacgaggcgacgattcgccgcaattactaccccaccacggacggtcgcgaagacgccatcatcatggcgttgccaatcagtatgtaa

SEQ ID NO: 5541 - DNA, 678 bp, Escherichia coli
atgaagtgggactggattttctttgatgccgatgaaacgctgtttacctttgactcattcaccggcctgcagcggatgtttcttgattacagcgtcacctttaccgctgaagattttcaggactatcaggccgttaacaagcctctgtgggtggattatcaaaacggcgcgatcacttcattacagcttcagcacgggcgtttcgagagctgggccgaacggctgaacgtcgagccgggtaaactcaacgaagcctttattaatgcgatggcggaaatctgcacgccgctgccgggcgcggtttctctgcttaacgccattcgtggcaacgccaaaatcggcatcatcaccaacggctttagtgccttgcaacaggtgcgtctggaacgcacgggcctgcgtgattacttcgatttgctggtgatttccgaagaagttggcgttgccaaaccgaataagaaaattttcgattatgcgctggaacaggcgggcaatcctgaccgttcacgcgtgctgatggttggcgacactgccgagtccgatattctcggtggcatcaacgccgggcttgcgacctgctggctgaatgcgcacaatcgcgagcaaccagaaggcatcgcgcctacctggaccgtttcttcgttgcacgaactggagcagctcctgtgtaaacactga

SEQ ID NO: 5542 - DNA, 1494 bp, Escherichia coli
atgcagaaaacgttaatggccagtttgatcggccttgcagtttgcacagggaatgcttttagtcctgccttagccgcagaggctaaacaacctaatttagtcattattatggcggatgatttaggttatggcgatttagcaacatatggtcatcagatcgttaaaacacctaatatcgacaggcttgcccaggaaggggtcaaatttactgactactatgcccccgctcctttaagttcaccttcacgcgcagggctattaaccggccggatgccatttcgtactggaattcgctcatggattccttcaggcaaagatgttgccttagggcgtaacgaactcacgattgctaatctactcaaagcgcaagggtacgacacggcaatgatgggtaagctgcatctgaatgcaggcagcgatcgcaccgatcagccacaagcacaagatatgggctttgattactcactggttaatacggcgggctttgttaccgacgccacgctggataacgctaaagaacgcccgcgttatggcatggtttacccgacaggctggctacgtaacgggcaacccactccacgagccgataaaatgagcggtgagtatgtcagttcggaagtcgtcaactggctggataacaaaaaggacagcaagcctttcttcctctatgttgcttttaccgaagtgcatagccccctggcttcgcccaaaaaatacctcgatatgtactcacaatatatgagcgcgtatcagaagcagcatcctgatttattttatggcgactgggcagacaaaccctggcgtggtgtgggggaatattatgccaatatcagctatctggatgcacaggttggaaaagtgctggataaaatcaaagctgtgggtgaagaagataacacaatcgttatttttaccagtgataacggtccggtaacgcgtgaagcgcgcaaagtgtatgagctgaatttggcaggggaaacggatggattacgcggtcgcaaggataacctttgggaaggcggaattcgtgttccagccattattaaatatggtaaacatctaccacagggaatggtttcagatacacccgtttatggtctggactggatgcctactttagcgaaaatgatgaacttcaaattacctacagaccgtactttcgatggtgaatcgctggttcctgttcttgagcaaaaagcattgaaacgcgaaaagccattaattttcgggattgatatgccattccaggatgatccaaccgatgaatgggcgatccgtgatggtgactggaagatgattatcgatcgcaataataaaccgaaatatctctacaatctgaaatctgatcgttatgaaacacttaatctgatcggtaaaaaaccagatattgaaaaacagatgtatggtaagtttttaaaatataaaactgatattgataatgattctctaatgaaagccagaggtgataaaccagaagcggtgacctggggctaa

SEQ ID NO: 5543 - DNA, 1260 bp, Escherichia coli
atgtttaccaacgtaaatgttgattgttgcaaaacaccaggatgtaaaaacctggggttgctgaatagtcaggattatgtcgcacagggtaaaaatattttatgccgtgaatgtggttacttgtttccagtgatatctgaacagtcgcttaatatttatcgtaatattgtgaatcactcctggagaggtttgatttgccaatgttcaacttgcggaggcacgtccctcaaaaaatatggatattctgcacaaggccagagaagaatgtattgccatcattgtgagaaaacatttatcactctggaacatgtaattaccacaccacgaggagcccagttagcattgatgattgagcaaggggaggcacttgcggatatcagaaagtcattacttcttaacagcactggacttagccgtgaactgttaaaattagcgcgtgaagcaaactataaagaaagtcgacagtgtttcccagcttctgatattaccctgagtacccgcgcttttcgcgtcaagtataatggtagcaataactctctttatgctcttgttaccgcagaagaacaaagcggcagggtggttgccatctcaaccaattactccccatctgccgtagagcaacattatcaatacacatcgaactatgaagagcgtatgtctccagggacgctggcacatcatgtccagcgcaaagagttacttactatgcggcgggataccttgtttgatattgattacggcccggcagttttacatcaaaacgatccgggaatgttggtaaaaccggttcttccggcatatcgtcattttgaactggtcagaatactgaccgatgagcattccaacaacgttcagcattaccttgatcacgaatgctttatattgggcggctgcctgatggctaatttgcagcatattcatcaaggtcgctgccatatttcctttgtcaaagagcgcggtgtggcacccgccaccattgattttccgccgcgattattccttagtggtggggtacgaaataatgtctggcgtgcattttctaaccgcaattattcaatggctgtatgcaatctcactggcagtaagaaagtccgcgagatgcggcatgcaacattgaacagtgcgacgcgttttatccactttgtggagaaccatcctttccttatatcattgaaccgaatgtctcctgcgaatgtcgtttctacattagatatcctcaaacatctgtggaataaaaaactagagcatggaacaatttaa

SEQ ID NO: 5544 - DNA, 2040 bp, Escherichia coli
atgtcgtttattaagcaagatccccatcgtctggtctggcaacaagacgatcgttatctctggattgaagcatggggtgagaacagtttacgtgtgcgtagcggtcgccatctgccgatgatgcgcaatgaaaactgggcattaacagaagaaaaaggtgatgctgtcgcctatatcacatatgaagaaaagcaggcaacactacaaaacggcaaaatcaccgccattgttaatctgcagggtcagatctctttctggcgtaatgcagaaaaatgcctgctgcaggagttctggcgtcagcgcggcgaaattggcgaagatgagtcggcccacggtcagtatgtcagcgccctgaatttacaggcccgcgagttcaaaccgattcccggcgggaaatacacaatcaaggcgcggttcgaagccaacgatggcgaaaagttgtttggcatggggcagtaccagcagccaaatctggatttaaaaggctgtatgctagagctggcgcagcgtaattctcaggcatcggttcccttcctgctttctaatcgcggctatggttttctgtggaataacccagcggtgggtcgcgtcactttcgcgcaaaatggcacggaatgggtggcagaagttagcgaacagttggactactgggttaccgcaggggatactcccgcagaaatcagcgccgcctatgcacgtgttaccggtacgccgccaatgatgcccgattacgccatgggattctggcagtgcaagttgcgctaccgtaatcagcaagagttactagaagttgcacgtggctacaagcagcgtaatttgcctatttcggtgattgtcatcgatttcttccattggccgaatcagggtgactggatgttcgatctgcgcgactggcccgatcccgatgccatgattgccgaactaaaagagatgggcattgaactgatggtctccttctggcccacggttgataaccgtaccgagagttatcgggagatgaaagaaaacggctggctggtccacaccgagcgtggtttgcctatcaatatggatttccttggcaacaccacgttctttgatgctacccatcctggcgcacgggaatatgtctggaacaaagccaaacgcaattattacgataaaggcgtgaaactgttctggctggatgaagccgagccagagttcggtgtttacgattatgacaactatcgttactacgcagggcctgtgctggaagtcggtaatatctatccgcgtatgtacgccaaaacgttcttcgatggtatgaccgcggctggtgaaaagcaggtgattaacctgctgcgctgtgcctgggctggcagtcagaaatatggcgctctggtgtggtcaggcgatattcactcctctttccgttctttgcgtaatcagtttgccgctggcttgaacatgggaattgccgggatcccgtggtggacaaccgatattggtggtttccacggcggtaatattcacgatccgaaattccatgaactgttaattcgctggttccagtggggggtattcagcccagtaatgcgtttacatggcaaccgcgacccgcaggttttgcctgaacaaccctatcgtgatggcatagcacaatgtccgactggcgcgccgaatgaagtctggagctatggtgaagaaaccggtgaaattctcacttcctgcctgcagttgcgtgaaaaactgaaatcttatatcagtaaaattatggctgagacgcacgagaagaacagcccgataatgcgcacgatgttctttgaatttcctgaccaggcagaaagctggaatatttatgatcagtactgctttggcccagaccttctcgttgcccctgtaatgcacgaaggtacacgttcacgtgatgtctggttgcctgctggagagacatggatcgatttttatacccatgaacactacgcgggtgggcaaacgcttcatcattgcgcaccgctgcaccagataccggtattcattcgcgagaaagggaaatatcgccagatatttcccgtttaa

SEQ ID NO: 5545 - DNA, 1374 bp, Escherichia coli
atgagttccgtacttgaaactgataaatcatccgcatccgattcactgcctttaatacaacggatcagctatggttcgctggatgttgcaggtaatctgctctactgttttggctccacctacattctctatttctacactgacgtggcgggcataagccttgccgtagctggcatcatcctgctactggcgcgtattgtagacggtatcgatgccccggtatgggggattattattgataaaacgcattcccgctacggtaaatgtcggccgtggtttttatggttgccattaccttttgctgtatttagcgcactctcattctggtcgccagatatcagtatgacaggtaaaaccatatattcagcaatatcgtacatgttagccagcattctttttaccggtttaaacacgccgctaagcgcaatattacctttgatgacgttatcaccaaaagaacggttggtattaaactcttaccggatgaccggcgggcaaattggcgtgttattaatgaatgcgacggcgctaccgttagtggcttttcttggaaacggtaatgataaggcaggatttatttatactgctatcgtcttttccgtaatctcctgtgcgctaacgctatttgccttcaaaaatattcgagaactggataccgacaaaatacagcaggaaccacgtctgccgatgaaaaagagcttttcggcaatgaaaggcaactggccgtggatcctgatggtgctggcaaatctcatcttctggattgccttacagcagcgcaacacaaccattgtttactatttaacctacaacctggatcgcaaagatttagttcccttgatcaacagcctcgccaccattcagattttgtttatcatcgcaattccgtttttcagccgttacctctccaaaacctggatttggatcaccggcctgctggtcgccatgttcggcggaggactgatgtggctggctggagacaatattcctttgatgattgccgcctggatgctggcgaatattggcagtggcattgcctgctctatgcccttcgccatgcttggtttcgcggttgattttggtcgctggaaaacagggattaaagctaccggcattctaatcgccttcggcagtaccttctgcatcaagatgggcagtggtatcggcaccgccttcgccgcctggattatgaacagctttggctatattcccaaccagccacaaactgccgccggtctggacggtattagctgggcgtttatctgggtgccagccgtgctctttgcactcgccgccattccactgctcttctttcgtaaatatgaagcgatggaagagtgcatccaacacgatttgcaagttcataacccttaa

SEQ ID NO: 5546 - DNA, 219 bp, Escherichia coli
atgactcgttttgcagcaattaaacaaggccatattaaaattgtggatatatcgatagtatgcaacttcaccgtcgataagtgtgagctaaatcctgcttatgtcatcaaaaatatcgattccccaaaagatttacttaatgggcaaaaaaaacggtcctcatcagagaaccgtattagttatttgatcaaattagcggatgaaaaatatccgccatga

SEQ ID NO: 5547 - DNA, 1233 bp, Escherichia coli
atgtatcgggatacccgtcgtgaatatattgtccggttacttcgcaacaaggatgagtgcagtgttagcgatttagctaactatttttctgttaccaaagagacgattcggacagatttagcgtggttgcaaaagcgtggtgtagtgagtcgtcatcatggaggcgtctcattgaaaaaacatttaatgcaaaatgcgctttcgcaacaagagtatgtcgatatgagtttgcttatcaagcaacaacagcagggtattggctatttaacctcgcttgatgataaaggacgccgaatggtaggtaaagtttgtgtgttaggatcatttaacgtcgatattgtggcgaaagtgtatcgcttcccgaatgaaggcgaaacgttagtggccagggaaactaccatggggccggggggtaaaggcgcgaatcaggcactagccgctcatcgggcaggtgcgcaaatacacttcgcctgtaagattggtcgcgatcagtttaatcattttgcccgcaatcatattgagtccattggtattggttcatttactttttatgagtctgaactatctaccaccggttgtgcggtcatttatgtaaatgatgaaggtgaaaacatgattgctatgtctccaggggcaaatcatgaattaagtgataacgatattattcaactttctcactttatagccgagtccgatgtattcattgtacagatggaaaataatcttgccgctactcaactggcattaaaatgtgctcaaaaaatgcaggtgacaacgattttaaatcctgcaccgtggtccagtgatgtcgccacattattaccttttgttgatattgtgacgccaaatgaaaccgaagcatcggcgatgtcaggtatggtaattgacaatatttctgatgctgtgaaggctgcgaagcatatttataatgccgggcaatgttcagtaattattacgatgggaaaacgaggtgcattaatttatgacgggcaacaatgtgcgcatattccggcattttcggcagtcgctgtagatacaacaggtgcgggtgatgcgtttaatggcgcgctcgccgccgcactggcgaagggagaatcacttgttaaagcagcctggtatgccagcgctttcgcttcgctggcagtagaaaaagaaggggcagccaatatgcctgatatctctctggtggatgccagaattcagcagcagaatgttgccattcagactttctga

SEQ ID NO: 5548 - DNA, 924 bp, Escherichia coli
atgaaaacaattgaagggattattccggtaatgctaacgccttttacggcggataataaaattgattacctgggtcttaaacggctaattgactggtatatcgaaaacggtgccgacgcgttatttgccgtgtgtcagtccagtgaaatgcagtatttaactttagaagagcgcgtggagctggcgagctttgtggttgaatatagccaacaacgagtaccggttattgcgtccgggcatatttctgatgatctggaacagcaaattcaggagctcaatgctatggcggcaacgggcattgatgcgctggtgttagtgacgaatcatcttgatccacataacgaaggtaccacggtattcctccgtacgcttgatgcgctattgatgtcattacccgaaagtatggcgctgggtctgtatgaatgcccggccccgtatcgccgcttattaaccgatgaggaactgctttactgcgcacaaagcgggcgttttcaaatcttaaaagacgtcagttgtgatctacctacagtgacgcgacgggtgcaattaactcagcacacgccaatgacgattgttaatgctaatgctgccattgcctgggaggcgatgcttgcaggttcgaaaggtttttgtggcgtctttgccaactttcatcctgacttgtatcactggctttggcttgaaggaaaacaacaccctgaagaggcaaaacaactcgcctggtttttatcgctgagtgccgtcagtgaaaatattggctatccgaaaaatgccaaaatatttcatcagcagcgaggaacatttgactgtgttcattgccgggtaacggctgacgatgtgctgaaaaaatattgggggctggaggtggtgctaaaacaaattgctgatgccgcagatttccagcgtcaacaactcaaatattaa

SEQ ID NO: 5549 - DNA, 954 bp, Escherichia coli
atgaaacgaaccctgatgagttgtgccgttgcttcactgctggtttcaggttccgcgctggctgcatggccagaaaaaccaatccaaatcattgtcccctggggcgcgggaggaaataccgatacggttgcacgcctggtggcagaagggctgcaaaaagagttgaaagtgaatgtcaacgtggtgaatcgcacgggaggtgctggggtggttggccatgatgccattgcgaaagctaaagcggatggctataccctgggaattgcgacggtagaaatcaccatgatgcaccatcaggggatgacggcgttaacgtatcagaactacacgccaattacacggctggcagtgaatctgggaggcgtgcaagtcgcagcaaattcgcagttcgaaaatatcgtccagatgaccgactacatcaaggcgaatccaggtaagttaaaagcatcgggtagcgggttaaattccggctggcatctgaacttgataggtatgctcgacagtatggggcttccgccttctgccgtgacctgggtgccttctgaaggttccagttctgcactgatggaactggtttccggtggtatagattttacaacgtcatcaccaggcgaagcgaaaagtatggtcgatgccaaaatggtgcgtaatttagcgaccatggcagaaaaatcagcagggctttataaagatcttccagtattccaacaagcaactggctataaatatcatttggcgacatggaatgccttagtggttccggcgggtactcctgaagaggtctcacaaaaattaactgccgctatgcaggcagtgtttgcgcaggggaaattacaagaattcgctaccaaacagggtttcgaagtttacccgctgtatggcaaagagatgacgacatttatggcagatgaagatgccagatacggaaaattaatagccaaaatcaaaggttaa

SEQ ID NO: 5550 - DNA, 438 bp, Escherichia coli
atgcgcataataccgataacgccgttatttctgctggtttttgccatgtttatttttggctggagcataacgcaatatggaggcatatcgcagtatggcgctggatttatgccttgcatcatcagtggattgttgttgtttttagcggctattgatgtagcgatagatattaaacaccggcaccgtaacaaagtttctttaacttttgatgaagtgaaagcacttttactggttattacagtggtactactgtttgtattactgttagatattctcggctttgtgatttgctcatttttgttgctttttattttaatgaaaatacgaggtgtcagacttttgcattccgttatcgtttcgatatcggcatctcttattatctggctcatttttgccagagtgttgttggtcgcctttcctgaaggaatcttgttttaa

SEQ ID NO: 5551 - DNA, 1488 bp, Escherichia coli
atggatattttgattcaggcactaacgtatattaatttgaatgccattctggccattattgctgctacggcctttgggttatttgtgggggccatccctggattgaccgcaacgatggcggttgcactaatggtgccttttaccttctttcttgatcctatttccgccctggcattaatgattgccgttggtgcgtcatccatttatgccggagatatccccggcgcacttttgcgtataccagggacacctgcttcggcggcttatgttgctgattcaaatgaactggtcaagcaagggaaggtgaatcgcgtattgggacttgggctggtgagttcggtcattggtggcgtgattggatcacttattttgatgttggctgcgcctgtactggcgaaatttgcccttaattttagttcttatgaatacacatggctttctcttttaggcttaacctgcgcgactctggttgtgggtaatcaaccactgaaaggcatggtgaccttatgtttgggattattactggcgtgtatcggttatgatcaaatatccggggttccacgttttacgtttggtcaaatcagcctgttacaaggggtgaactttatcccggcgatgattggtctgttcgcgatatccggcgcaattgaatattatcgtgacaaaattagccaggtaagtggtgttgtgccacaaacgcaaacggggattaatttattcaagggaatggggcaggtgatttggtcacgaaaattaaatcttggccgaagtagtattatcggtacgcttatcggagcattacccggcgctggagcggatattgctgcgtggataagttacgccatttcaaaaaaattctctcgccagcaggagttatatgggcatggatctgaggaggcaattgttgattcctcgagcagtaacaacgccagtctggcggggagttggatcccttcattagttttcggtattccgggcgattctgccgctgcaattatcatcggcgtgctctatatgaaggatatgaatccagggccgacattatttctgttccaggcagataaactttatgccgtatttatcttgtttctgatcgccaatattgcattactaccgttagccacaattgcggtcagtttcatcaaacgcatcatctggattgataaagcgattctgtacccgattattctgattttcagtattgtcggtgcatttgctatcgataactcgggtgcctctgtcgttgtcatgttggtcatgggggttcttggatactggttacaacgtaaggaatacccggtttcgcccattattctggggatgattcttgggccaatgttggaaaaaaacttattatcttcaatgattaagtctaatggcgaatggctggcgtttgttgagcgcccggtatctatggcactggctgtctgtttctttttggttgtcgcgttgcaaggacgcaatatctaccgttcatttagccgttaa

SEQ ID NO: 5552 - DNA, 699 bp, Escherichia coli
atgttaaaactgactgatatcacctggctttaccaccatttgccgatgcgttttagcttaacggtggaacgcggcgagcaggtggcgatcctcgggccaagcggcgcgggtaaaagcaccctgctaaatttgatcgccggttttctgacgccagccagcggtttgctgactctcgacggcgtagatcacaccacaacgccaccgtcacgtcgtccggtgtcaatgctgtttcaggagaacaacctgttcagccacctgacggtcgcgcaaaacatcgggctggggctaaatccggggttgaaactaaatgcggcgcagcagaagaaaatgcacgcgattgcccaccagatggggattgataatttaatggcgcggttacctggcgagctttccggcggtcagcgacagcgcgtggcgttagcgcgttgtctggtacgcgaacagcccattttattgctcgatgaaccgttttccgcgctcgatccggcgctacgtcaggagatgctgacgctggtgagcacgagctgccaacagcaaaaaatgacgctattgatggtgtcgcacagtgtggaagatgcggcgcggatcgccacgcgctcggtggtggtcgccgacgggcgtatcgcctggcagggtaagaccgatgagttgttgagcggtaaggcgagtgcttcggcgctgttgggaattaaaggttaa

SEQ ID NO: 5553 - DNA, 441 bp, Escherichia coli
atgttaggttgggtaattacctgtcacgatgaccgggcgcaagagatactggatgcgctggagaaaaaacatggggcacttcttcagtgccgggccgtgaatttctggcgcggattaagctctaatatgctcagccgcatgatgtgcgatgccttgcatgaaacggactctggtgaaggcgttattttcttaaccgatatagccggagcgccaccgtaccgcgtggcttcattattaagccacaaacactcccgttgcgaagtgatttctggtgtcacgttaccgttaattgaacagatgatggcttgccgtgaaaccatgaccagttcagcgtttcgcgagcgtattgtcgaactgggtgcgccggaggtgagtagtctttggcaccagcaacaaaaaaatccgcctttcgtcctcaaacataatttgtatgagtattaa

SEQ ID NO: 5554 - DNA, 204 bp, Escherichia coli
atggaaataaagacacggagagaaaccaggcagacgttggcgcagtggtttgaagagaagggatttcagaagggatataaagagggactccagaaggtaagactggcccagcgtcttctgagtaaaggaatgtctcgggaagacgttgcagagttggcaaatttacctcttgcagagatagataagctaattaactctaactaa

SEQ ID NO: 5555 - DNA, 597 bp, Escherichia coli
atgcatcccactcaacgtaagctgatgaagagaataattctgtttctgtcattactgtttcccattacctgtccagcgatcgctggacaggatattgaccttgttgctaatgtaaaaaacagcacttgcaaaagcggaatcagtaaccagggtaatattgttcttggtgtcgttggggtgggatatttttcaggtaatgttactcctgaaagctatcaaccaggtggaaaagagttcactgtcactgtctcagactgtgcattacagggaactggcgatgtgctaaatcagttacatattgattttagagcccttagcggtgtcatggctgcaggctccaggcaaatatttgccaatgaagtgacaaccggggctaaaaatgtcggtgtcgttctcttttccattcaggacccggccaatatattcaatgttcttagttcagcgggaaattctcgttcaatctatccagtaatgacttctgccctgaataattcgtcatggaaattttatgccagaatgcaaaaaatcgatcccgcgctggatgtcatatctggccaggtgatgagtcatatattagttgatgtgcactacgaataa

SEQ ID NO: 5556 - DNA, 603 bp, Escherichia coli
atgacatttaaaaatttacgttatggattatccagcagtgtcgttttggctgcctcattgttcagcgtaccctcttatgcggcaactgacagcattgggctgaccgtgattaccaccgtagaaatgggtacttgtaccgctacattagtaaatgactctgatcaggacatttctgttgttgattttggtgatgtatatatttctgaaatcaatgccaagaccaaagtaaaaacattcaaactcaaattcaaagactgtgcgggtatccccaataaaaaagcgcaaataaaattaaccaagcgagccacatgcgaggggactgctaatgacggtgcagggttcgcaaatggttccacagccacagataaagcaagtgccgtcgccgttgaagtctggagcaccgaaactccggcaacagggagagcaacacaatttagttgtgtgacaccagcatctcaagaggtaactatttccactgctgccaatgcggttgtttattacccgatgagtgctcgcctggtcgttgaaaaaaataaaaccgtaagtaatgtcactgcaggtaaattttctgcacctgccacatttacagtaacctataactaa

SEQ ID NO: 5557 - DNA, 573 bp, Escherichia coli
atgataaaaacaacgccacataaaatagcgatactgatgggagtattattatcaccctcagtatttgcaacggatattaatgttgagtttacagccactgtcaaagcgacaacctgtaacatcacacttactggtaataatgtcacgaatgatggcaataataactacactttgagaatccctaagatgggcctggataagatcacgaataaaacgacagaatctcaggctgattttaaactggttgccagtgggtgcagcagtggcattagctggattgataccactctgaccggaaacgcattatcaagctcatccaagcttattataccgctgtctggtgatttatcttcgacgacaagtaatatcggtatgggtttcaaaaaacggactactgatgatgccactttccttcaacctaacaacagtgcggacaagatacgctggagcacagaagaaatgcagcccgataaaggtcttgaaatgactgtcgcgctacgtgaaaccgcagcagggcaaggcgtgccggggatttttcgcgccctggcgacgtttaatttcatctatcaataa

SEQ ID NO: 5558 - DNA, 585 bp, Escherichia coli
atgtctaaaaaattaggttttgcgctctctggtcttatgctggcaatggttgcaggtagtgcttctgcagatatggacggtggtcagttaaatatcagtggtctggttgttgataatacctgtgaaacccgcgtagacggcggtaataaagatggcctgatcctgctgcaaactgcaaccgttggagaaatctctgagggtgtgctggacactaccgttggtgctaaggctaaaccattcagcattactgttgactgtagtaaagctaatccggcaccaggcagcacagcaaaaatgacttttggttcagtcttctttggtaacagtaaaggaaccctgaataatgacatgtcaattaatactccatctgacggtgttaatattgctctgcacaatattgaaggttctactattaagcaggttaaaatcaacaatcctggcgatatctattccaaagcactggatgcaacttccaaatccgcaacttatgattttaaagcgtcttatgttcgtgcagatgcaagtctggcagccacagcaggttatgtaaaaactaacactgcatataccgttacttatcagtaa

SEQ ID NO: 5559 - DNA, 567 bp, Escherichia coli
atgaataaaaaattgctttctctgttagtgtcaggaagtctcatcgctgtagtaagtaccagtgtatttgctacagataccggagtggttaactttaacggtaaaattgttgccgatacttgcgaaattaatgtaaacgagtctgccagtacaacagggacagtcacttttgcagatacttacccagcggactattctggagacggtagtattggaacgtcaaaagattttaaaattgaattaataaaatgcgatccgttggtggacaaactaaacctgacattttctggaacgacaacggatgcaggtttcctgcgtctggaaaatagcgaagctggggctggcagtgcaacaaatgtgggtattacggtgacaaataaaaatggcggtgctaacgatgtgaaatttgatggttcagttcccgatgcatccactgatgttgataatgccgggagcattactccaacaatattcaattacaccgccaatgttattcaggttggtaataacgcgccgactgcgggtaagtatgcctcatctgcgacgttcgaagtattttatcgctaa

SEQ ID NO: 5560 - DNA, 717 bp, Escherichia coli
atgtcagttttttctcgagtttgtttaggttttacgtttcttcttacggcattgcaagttcaggcaagtattgttcttggcggtacacgtattatctatccttcaaatcaaaatgaagttcaaatcacattaaaaaataaagatgcatatgcacgctatttggtgcaaagctgggtgagtaatattgatggctctaaagccccctttctcattacgcctccagtttataaacttgaagaaaatcggcaaacattactccatattgtatttacaggtgataaaaacaaacttcctcaggatagggaaagtttgtttctggcaaacataaaatctgtttctgcgatgccagaagaactaaaagataaaaataccttgcaatttgcaatgaaagcccggcttaaattattttggcggccagcttctttggataatagtgatgctctcactgcatgggaaaaacttaagttccataaagaagcggggaagctcatagtaaaaaatccaacgcctttttatatttcattcagtgatctgacagtatcgggaaaaaatattgttcccaccgagagcaaatctgaacctggcgcattattgatgatggtaggaccattttctgagcagcggtttagtcttcctgtcggagcgggaagtattgttgaatggtcggtgataactgactacggttcaagttctgggaaacgacaacaaaagttataa

SEQ ID NO: 5561 - DNA, 2478 bp, Escherichia coli
atgctgctaccattgcatcgcacatttgtcttaactgggataacatttgcattatcggcagtgtattcattgagctatgcacgagatgaatttaaccttcgtatcctggagctggatagcccacttgaaaatacacaagtgctggaggattttgttaataataataacttaactccgggagtatatcttacctctgttatgtgggggcaagagtatcttgataagagaaatattaccttcattctgtcttcggataaaaaaaggctcatccctcgttttacaaaggcggatctccgtgagttcggtcttaaagttgacgacattcccgcgttacaagtaatggatgatgacactgagtttggtgatattgctcagattattgatggcgcacgttatgatttccagttagacagccaaacgctgtgtctgcggatcccgcaaatctatcagaatgcgcgggccgcagggagtatttcaccgaaatactggagtgatggtgagagtgcggtttggttaagttattacgccagtggttcccggcaaaacagtgatggcgataacctgaattcaaattggttgaatttaaattcagggattaatttaggcgtatggcggctacgaaataataccgtttacagtgactccagttgggagtcgatcagcaccagtttgcaacgcgatatcaaagcattaagaagccagatggaagtcgggcagacgttcacaaatggcgatctttttgacagtgtgcagatgacaggtataaagcttgaaacggacaccagtatgctgcctgacagcgaacaaggctttgcgccagtggttcgtggtattgccaacagcgatgcacaagttgtgattaaacaaaacggctatgttatttaccaaacgtgggtatcggcagggccatttgaaattaaagacttaagccaggtaacggcgggggccgatctggaagtcaccatcaaagaaaccaacgggcaagaacacagttttattcaggccagttcaacggttccaattctacagcgagaaggcgcattaaaatatagtcttgcaactggaaaataccgtgacaacgataatcatgctgagacacctgtttttggtgttgcaaccgcgatatatggcttgccctatggaataacgatttatggcggcatacttggtgcctcaatttatcattctggtgtgacagggattggcgctgatttaggccgtctggggtcggtatctgttgatatcaccgcagcagaaacgaagtttgatgatgggcgtgatgatgctacaggactgtcatggcgtgcacagtatgcgaaagattttccagacactgatacgacagtaactctggcaagttatcgttattctacatcacaattttacactttccaggaagcacttgatcaacgtgatacacctgatgacaagggtatttacagttatcgacagacaaataatcggcgtaatcgtttacaaattaatctttcacaaaatattggtcgttggggctcggtctaccttaacggttatcaacaggattattggggaatgcatggggccgaacgcagtataggaatgggatacagtacgacctggagtaacattaattggtctgttaattacacactaacgaaaacgccaggaatggctggtgagcagcaattttcattaacactcaatattcctctctctcgctggctgccagattcatgggcgatgtataacgtaaaccgttccgataaaagtaatacatcacatcaattgggaattggcggtactgctctgcaagataacaacctgagttataatttacagcaaagttatactgataataatgtgggttatgatgccagcatgaatggacgttatcgtagctcagtgggggaattcggtctgggatatagctatgataaaaatagtcgtcagtggaattacagtgcgcaaggtgcggtggttgctcatgctcatggagtaacattggggcaatcagtgcaggattcattcgcgatcgtgcatattaatgagggtgccaatgtaaaagtacaaaatgcgcaaggcgtttatactgattattggggaaacgcgattgttcccaatatgacgaattatcgacataacgctattactgtgaatacacaggggcacgatagtcttgatatttctgatgccacacaagatgttattccttcgaaaggggctgttgttggtgtcgattttgatgcacgtagcggaatacgagccttgttgacattagtccataataaagaacgcgtaccctttggggcattgctgacattagggaatagtacagcgattgttggtgaagatggggaggtttatattactggtgtgcaagaatcaatgacatttacggtacagtggggaaaagagattaaccagcaatgtacaggagttgtcacagtgccagaaaaatacaccacgggtatctataaagccacaatggattgccgataa

SEQ ID NO: 5562 - DNA, 1011 bp, Escherichia coli
atgaagccaggattcgtctcttatatacgaacattattgaccataatatttcttagctggggcgtcattcctgaggttttcgccggttgtaacatttctggaaatggaggaaatccggcaacagtacaattctccgtgcctgcgttggttgttaatagcgatgccgttcctggaacgattattgcgacagtaaatgcgaacagtccgtcaatttcagtttcctgtacggcaaatggtgagatctggcaaggatataccgtattgacaaacggtgatatgcgtactgataacccacttaacaatgtgtttcagactaatgtgccaggaatcggttttcgcgcggcgtgggcgaataacaccagtgcgcaactcaccgccggatatttaatgacgccctggcataaaggctcgtcaacagtgattaaaggatatggttatccgattacaatacatgcagctattcagtttattgtcacaggacctgtcggtaatgggaccattgataccagcaaactggttgctgactggaagtatgacaatcgtgttattggagagcttcgttttagttctgttccggtcaatattcaaccgggcacatgcgaccttatagaaaaaaatattaccgttccactcaatgatattggcacagatgattttgatgttaacaatgtgtcacctgtagtttccgatgatcggtttaaaattcagattgaaaaatgttctcaggatgtaaaagttgattaccgctttacttcatcaggttctactggagtaacgggtaataatattcttaatattgagtctggttcaggaatggcggaaggagttggtctgcagatcctcgatagtaataacaatgtgatggtatttgatacagactatacacctgttcaaaaaacgacgttaaatcaaaatgttactattccgttaaaagcacgctacatcaaaatgggtagcgtcaaaagtggtcgggttaattctgttgccaccttcgaagtgtattaccgataa

SEQ ID NO: 5563 - DNA, 1983 bp, Escherichia coli
gtgagtaaacgaattgcgctttttccggtgttattgctggcgctgctggtggttgctgctgcggcgttgacctggatgaacttctcgcaggcgctgccgcgcagccagtgggcgcaggccgcctggtcgccggatattgacgtcatcgagcagatgatttttcactacagcttgttgccgcgtctggcgatttcgctgctggtgggcgcgggcctggggatggtgggcgtgctgtttcagcaagtgctgcgtaacccgctggcggaaccgacgacgttgggtgttgcaacaggcgcgcaactggggattaccgtcaccacgctctgggcgatccccggcgcgatggcgagccagtttgctgcgctggcaggggcttgtgttgttggcttaatcgtctttggcgtcgcgtgggggaaacggctttcgccggtaacgctgatcctcgcggggctggtagtgagcctttattgcggcgcaatcaatcagttactggttatcttccatcatgaccaactgcaaagcatgttcctgtggagcaccggaacgctgacgcaaaccgactggggcggcgttgagcgtttatggccgcagctgctgggcggcgtgatgctgacgttattgctacttcgcccgttaactctgatggggcttgatgatggcgtggcgcgcaatctcgggctggccttgtcgctcgctcgtctggcggcgttgtcgctggcgattgtcatcagtgcgctgctggtgaacgcggtggggattatcggctttatcggtttgttcgcgccactgctggcgaaaatgctgggggcgcggcgtttgttgccacggttgatgctggcatcgctgattggtgcgttaattctgtggctttctgatcaaatcatcctctggctgactcgcgtgtggatggaagtgtctaccggttcggtcactgcgttgatcggtgcgccgctgctactgtggctgctgccgcgtttacgcagcattagcgcgccggatatgaaggtcaacgatcgtgtcgcgactgaacgccaacacgtgctggcgtttgctctcgcgggcggcgtgctgctgttgatggctgtggtggtggcgctgtcgtttggtcgtgatgcgcacggctggacgtgggcgagcggggcgttgctcgaggatttgatgccctggcgctggccgcgaattatggcggcgctgtttgcgggtgtcatgctggcggtggcgggctgtattattcagcggctgaccggaaacccgatggcaagcccggaagtgctggggattagctccggcgcggcgtttggcgtggtgttaatgctgtttctggtgccgggtaatgcctttggctggctgttacccacaggcagtctcggggcggcggtgacgctgttgatcattatgatcgccgccggacgcggtggattttccccacaccgcatgttactggcggggatggcgttaagtaccgcgttcaccatgcttttgatgatgttgcaggcaagtggtgacccgcgaatggcgcaagttctgacctggatttccggttcgacctacaacgcgaccgatgcgcaggtctggcgtactggaattgtgatggtgattttgctggcgattaccccgctgtgccgccgctggctgaccattttaccgctgggtggtgataccgcacgagccgtggggatggcgctgacgccgacgcgaattgcgctgctgctgttagcggcttgcctgacggcgaccgcgacaatgaccattggtccgttgagttttgttggtttaatggcaccgcatattgcgcggatgatgggctttcgacggacgatgccacacatcgtaatttcggcgctggtgggaggattactgctggtgttcgctgactggtgtgggcggatggtattgtttccattccagatcccagcggggctgctgtcgacctttatcggcgcgccatattttatctatttgttgagaaagcagagccgttaa

SEQ ID NO: 5564 - DNA, 153 bp, Escherichia coli
atgctgacgaaatatgcccttgcggcagtcatagtgctgtgtttgacggtgctgggatttacgcttctggttggagactcgctgtgtgagtttacggtgaaggaacgtaatattgagtttaaggctgttctcgcttacgaaccgaagaagtag

SEQ ID NO: 5565 - DNA, 786 bp, Escherichia coli
atgatcgcaaaagattttgctcaacaattgtttgatctccacgatcgcgtcgcctttgtcactggcgcaggtagcggtatcggacaaatgatcgctctggctttagccagcgcaggctcacgagtggtgtgttttgatctacgggaagatggcggacttaaagagacggttaataatatcgaagcgcttggcggacaagccttgtattacacgggcgatgttcgggaattgagagatcttcgcgcagcagtcgctctggcaaaaacacattttggtcgcctggatattgccgtaaacgccgctggaatcgctaacgcaaacccggcgctggagatggaaagcgagcaatggcaacgcgttatcgatatcaacctgactggtgtgtggaattcctgtaaggcggaagctgagttaatggtagagaacggaggcggttcgattataaatattgcgtcaatgtccgggattattgtcaatcgtggtctggaacaggcccactacaacagttccaaagccggcgtgattcatttatctaaaagtcttgcgatggaatgggtgagtaaggggatccgcgtgaactcaatcagcccaggatataccgcgacaccaatgaatacacgacctgaaatggtacatcagactcgggagtttgaaagccagacgccgattcaacggatggcgaaagtggaagagatggcgggtccagcgctgttccttgccagcgatgcggcgtcgttctgcacgggtgtggatctggtggtcgatggtggctttgtctgctggtaa

SEQ ID NO: 5566 - DNA, 798 bp, Escherichia coli
atgcaacgtaattttcagggtaagactgtagttattaccggggcatgccggggaattggggccgggatcgctgaacgcttcgcccgcgatggcgcaaatctggtgatggtttctaacgctgaacgcgtacatgaaactgcagagcaactgcgccaatgttatcaggctgacattttgtcattagaagtcgatgtgacagatgaagcgcaagtacaggcactctatgaacaagcggctgcacgttttggcagcatcgatgtttccattcagaatgcaggcattatcaccatcgattattttgatcgaatgccggctgctgatttcgaaaaagtgctggcggtgaacactacggcagtctggctctgctgccgggaagcagccaaatatatggtgaaacagaatcacggctgcctgatcaacacctcttctggccagggacgtcaggggtttatctataccccacactatgcagccagcaaaatgggtgtgatcggcattacgcaaagcctggcgcacgagttagcgcagtggaatatcactgttaacgccttctgcccgggtattatcgaaagcgaaatgtgggactacaacgaccgcgtatggggagaaattctcagtaccgatgacaagcgttatggcaaaggcgagcttatggcggaatgggtggaaggtattccgatgaagcgtgccggtaaacctgaagatgttgccggactggttgccttcctcgcctctgacgatgcgcgttatctcaccggtcaaaccatcaacatcgacggcggcctgattatgtcgtaa

SEQ ID NO: 5567 - DNA, 1068 bp, Escherichia coli
atgaatcagaaatatatgatctatatgtacctgttgaaggccagaacgtttatcgctctgctattagtgatcgccttctttagcgtgatggtgcctaacttcctgacagcctctaacctgttgatcatgactcaacacgttgcgattaccgggctgctggcaatcggaatgacgctggtgatcctgaccggcggcatcgatctttccgtcggcgcggtagcggggatctgcggaatggttgccggggctcttctaacaaacggcctgccattgtggagcggcaatattattttcttcaacgtgccggaagtgatcctctgcgtggcggtatttggcattttagtgggactggtgaatggcgcggtaatcacccgctttggtgtcgcgccctttatctgcaccctcggtatgatgtacgtcgctcgtggctctgccctgctgtttaatgacggcagcacttatcccaatctcaacggcatggaaacgctgggcaacacgggtttcgccacccttggttctggcacgtttttaggcatttatctaccaatctggctgatgattggctttttgattttaggctactggatcacgactaaaacgccgctcggtcgttatatctatgccattggtggcaatgaatctgccgcgcgactggcaggcgtccccatcgtaaaagttaaagtgttcgtctatgcgttctccgggttatgcgccgcatttgtcggtttgattgttgcctcgcagctgcaaactgctcacccaatgaccggcaatatgttcgaaatggatgctattggcgccacggttcttggtggaactgcactggcgggtggtcggggacgtgtctctggctcgattatcggtgcctttgtcattgtcttcctcgccgatggcatggtgatgatgggtgtcagtgacttctggcaaatggtcattaaaggcctcgttatcgtcaccgccgtggtggtcgatcagttccagcaaaaattgcaaaacaaagtcattttgatgcgtcgccatgaagaaaagatggccgccgcacctgccgtaaaaccgctttccagttaa

SEQ ID NO: 5568 - DNA, 1545 bp, Escherichia coli
atgttaccgcaagaaattgcccccccccagactgatgaatcacctgtaatcatagaaacgcatgacttatcgcgtatttatccgggtgtggtggcgttagataacgtgaattaccgagtctatcgcaataaagtaaatgtgcttattggtgaaaacggtgcgggtaaatccacaatgatgaaaatgctggcgggggttgaaacaccttcctcaggcaagatcattcttgatggtaaagaagttaccctaaattctacccatcaggccgaaaaacatggaattagtatcatttttcaggagctgaatttattcccgaatatgaatgtcatggataatattttcatggcgaatgaattttttcagaaagggaagattaacgaaaaatatcaatatgaattagccaaatctctattagaaagactggaactgaatgttgatccctatacccaactgggagagctaggtattggccatcagcaactggtggagattgcccgtgccctttctaaagatacccgggtactgattatggatgaaccgacatcggccctcagccagtcggaagtaaaagtccttttcaatgtgatcgcacaactgaagcgccgtggtgtcaccatcatttatatctcccatcgtctggaagagttgatggagattggcgatttcatcaccattttccgtgatggtcgctttattagtgaacgcgccgtgagcgatgccagtattccatggatcatcgagcaaatggtcggtgataagaaaaaacatttcgattatcaaccagctacacaaggtgacactgtactggcggtacaagggttaacggcgctgcatcccagcggtggttacaaactcaatgatgtgacattcagcctgcataaaggcgaagttatcggcatttacggcttgctgggcgcaggacgtactgaactatttaagggattggtgggcctgatgccctgtcagagtgggaagatccagcttaatggtgaaaccatcgacaaatgccatttccaggcgcggctcaaaaaggggctggcgttggtgccagaagatcgccagggcgaaggcgtcgttcagatgatgtcgattcagtccaatatgacgctatccgatttcagcctgcaaggttttcgccgtgcctggaaatggctgaatccgcaaaaagagagcgccagtgtgaaagagatgatcctgcaactggcgatcaaagtcagcgatgccgaactccctattacctcactcagcggcggtaaccagcaaaaagtggtacttggcaaagcgttgatgacccagccacaggtggtgtttcttgatgaacccacacgcggcattgatgttggcgcaaaaacagatgtctatcagctggtgggaaaaatggcacaacaggggctggcagtcatgttctcttcttcagaactcgatgaagtcatggcactggcagatcgcattctggtgatggctgatggccgtattaccgctgatctcccccggggcgaagtcacccgagagaaactgattgcggcttcaacacctcaagattaa

SEQ ID NO: 5569 - DNA, 621 bp, Escherichia coli
atggataaaaaagtctggctggcgctggcaattctgagcctgggtggatgtcgcatcgtctcgcagcaggaacttgccgatctcaaatccccgcctaatcctcatatggcaaatatcgatcagacctggcagaaaaacatcgtgccgcaggtggtagaaaatgcgcgtccggttgcggagttaatggcggcgctacaggcagaaaaagatgtcgatgctgcctgtaaaacgctgggctatcgttctcaggaagaaaacccgtgtatcttctacgttaaggtcgaaggtggcatcaccaatattgatgcgaaatcccgtagcggaaaaatgaccatcacagatatcagcggcacaaatattgtcgtgcagacggggccaactcttcgcggcacgcttctgcgagatgcatataaaggtgcaagctatgagcattttaacgatcaggttttatttggtgaatatggtcgtgctatcaatgagcaagccatcaatatgattcagtcggcaaagcttaaaaccggggaaacggttcaggtttatggcgtattttctgcatgggatattccgcaaactatcccggatataacgcctgcgaaaatagccagggcgggaggcgagtaa

SEQ ID NO: 5570 - DNA, 936 bp, Escherichia coli
atgaaattacgtttaacactgttaaccgctgcgaccctgactgctctttctttttctgctcatgcggtagaaaaaggaaccattatgattatggtcaattcactggataatccttattacgcctcggaagcgaaaggtgccagtgaaaaagcccagcaactgggatataaaacgaccattctttctcatggtgaagatgtcaaaaaacagaatgaactgatcgatactgcaattggtaaaaaagttcagggcattattttagataatgccgactccactgccagtgttgcagccattgaaaaagcaaaaaaagcaggtattcccgttatattaattaatcgcgaaatacctgtggatgatgttgcactggtgcaaattacccataataacttccaggctggctcggaagttgccaacgcatttgtcgagaaaatgggagagaaaggaaaatatgccgaactcacctgtaatcttgctgataataattgcgtaactcgctcgaaatctttccaccaggttattgaccagttccctgaaatggtcagcgtggcgaagcaagatgccaaaggcacgttaattgatggcaaacgaataatggacagtattctgcaagcccatcccgatgttaaaggggtgatttgtggtaatggtccggttgcactgggagctatcgcagcactgaaagccgccaatcgcaatgacgttattgttgtcggcattgatggcagtaacgatgagcgcgatgccgtgaaagccgaatcattgcaggctaccgtgatgttacaagcacaagccattgccgcgcagggtgttaccgatctggataattacctgcaaaaaggagttaaaccagccaaacagcgggtgatgttccgcggcattctgataaccaaagataacgcagataaagtccaggatttcaatatcaaatcctga

SEQ ID NO: 5571 - DNA, 1521 bp, Escherichia coli
atgtttgcaggaaataaagagttcgttattgcgttggatgagggtaccaccaatgcaaaagccatcgcacttgatggtttcggtaacgtggtggcgaagttttctcaaccactggctattcagacgccacgtgaaggctgggttgagcaatccggggaagcgttaatctctgcctcgcttgatgttattgcccaggccatcaaccacgtgggggcagaaaatgtagcggctctggctatcagtaatcagcgtgaaacggctatcggctggtatcgtcagagtggaaaaccactcaatgcggcgattacctggcaatgcacgcgcagtgccgagttttgtgaaacactgcgtcgcgagggcaaagagcagcaaattaaaacgactacgggtcttcctatcgccccgctattttccgcgtccaagatgcgttggctactggaatctacacctgagggtgtgcaacttgccgaccagggtgaaatttgtctcggcaccattgatgcctggttgctatggaacttgactgctggcgattcattttgctgcgactactctaacgccgcgcgaactcaattacttaacctgaaaacaggcgagtgggatgaggaaatgctggcgttgtttcacattccacgcgctgcattgccagaaattaaaccttccagtggcctgttcggttatacccgagggcttaaaacaattccggatggtattcccgtcatggcgatggtgggcgattctcacgccgctctttttggtcatgcgttgggagaagcgggatgtgtgaaagcgacctatgggaccggttcttccgtcatggcccccgtcaactctgctcagtgtgatatcgccacacttgccacaaccattgcctggcatgatggcgaaaatattatttacggtctggaaggaaatatcccccacaccggcgatgccgtggcatggatggctgacagcaccggtttaagtgaactgacagacgcggagctggccctcgaactgaataccctgccagcctcagtggattcgactatgggtgtttattttgttcctgctctcactggcctgggcgcgccatggggggatgacagcgctcgcggcgtggtgtgtggcttaagccgtggcgtaaagcgcgcgcatttgattcgtgccgcaatggaatcaatcacttatcaaattgcagatgtagtggaggcaatgcaacagcatgatgattttcacttatcggcgttaatggtggatggcggcccgaccaaaaatgactggttgatgcaatatcaggcggatctgctgggttgcccggtgatgcgcagtgatgtgccagagctttcagccattggtgcgggcctgctcgcccgcaaagcgcttatccccggtaccgttgcagatttaaaagcgttattaactgaacacagtgaatttaaaccggacatggcgcgtcatcagcgactgcaaaagagatggcaggagtggcgtcatgcggtaaacagaacattatggaaaccggcatcgtcaatttga

SEQ ID NO: 5572 - DNA, 951 bp, Escherichia coli
atggctaagcaggatgaacagcggctactggtgaagatcgccactctttactatcttgaggggcgaaaacagtctgacatcgcccaacttctctcgctttctcagtcatttatatccagagcgctaacccgttgccagaaagaaggcgtggttaaaattagcgttgtccagccgtcaaatatctttctcaatctggaaaaaggcattgaagagcgttacggcattaaacaagcgattgttgtcgataccgaagatgatgccagtgatcacaccattaaacgcgccatcggctctgccgccgcgcactatctggaaacgcgtttaaggccaaaagatttcattggcgtctcttcgtggagttctacgattcgcgcgatggtcgatgaagttcacgcccaaaacttaaaagccagcggcgttattcagctgctgggcggcgtggggccaaacggcaatgtgcaggcaactattttgacacagaccctggcccagcatctgaattgcgaagcctggttgcttccttctcaaagcattgaaggttcggtagaagagaaaaaacgcctggtggcaagccaggatgtggctgacgttatcgccagatttgacgacgtcgatatcgccattgtcggcatcggtatccttgaaccctcgcagttgctaaaaacctcgggcaactattatcacgaggatatgttacaggtactggcggatcgcggtgctgtgggcgatatctgcctgcactactacgataaacatggtcagcccgtgttgcaggacgatgaagatccagtgattggtatggcactggataaaatcaaaaaatgcccgaatgtggtggcgctggcgggcggcaaagacaaagttgccgccatcaaaggtgccatgcagggtgggtatatcgatgttttgatcactgatttccccaccgccagaatgctgattgcggattaa

SEQ ID NO: 5573 - DNA, 831 bp, Escherichia coli
atgaatccctatagctatgatatccagacccttgagcgaaaagcgcgggcggtacgccgccatatcgtgcgcttaaatgccaatagcccggcaggtggacacaccggggccgatctctctcaggttgaattactgaccgcactctattttcgtattctcaatgtcgcaccggatcgccttcacgacgatgaccgggatatatacattcagtcaaaaggccatgctgttggatgttactactgcgtgctggcggaagcaggattcttcccactggaatggctttccacttatcagcagccaaattcacacttacccggtcatccggttcggcaaaaaacgccaggtattgaactgaataccggagcactggggcatggtttccctgtggctgtaggacttgcgctggcggcgaaaaaaagtcaaagccgtcgtcgtatcttcttaattactggcgatggtgagctggctgagggcagtaactgggaagctgcactggcggcggcgcattacgggcttgataacctggtcattattaatgacaaaaataatctgcaattagccgggccaacgcgcgaaatcatgaacaccgatcctctggcagagaaatggctggcattcggtatgcaggttactgaatgtcagggcaatgatatggcttcggttgtcgcgacgcttgaagagcttaaacaggaaggcaaaccgaatgtggtgattgcccacaccactaaaggggcaggcatttcctttatacaagggcgtgcggaatggcatcaccgggtgccgaaaggcgatgaaattgaacaggcactggaggaactcaaagatgcgtaa

SEQ ID NO: 5574 - DNA, 936 bp, Escherichia coli
atgcgtaacagtgaacatctggcaaatgtgatggttcaggcgtttatcgatgccgtaaatgaggggatcgatttggtgcctgtggtggctgattcaacgtctacggcaaaaattgctccctttattaagcaattccctgaccgactggtgaatgtgggtattgccgaacagagcatggttggtacagctgccgggctggcgctgggcggcaaggtggctgttacctgcaatgccgcgccgtttcttatcgctcgcgctaacgagcaaatcaaggttgatgtctgctacaactttaccaacgtaaaattgttcggtctgaatgccggggcgagttatggaccgctggcgagcacgcatcatgcgattgatgacattgcggttatgcgtggtttcggcaatattcaaatctttgccccgtcttcaccgcgggagtgccgtcaggtgattgattatgctcttcgctatcaggggcctgtttatatccgtatggacggtaaagccctgccagaaatccacgatgaggactaccgatttgtaccaggtgccgtggtgactttgcgcgagggcagcgaactggcgctggtagccacaggctctaccgttcatgaagtggtcgatgccgcagaacttttagcgcagtctggtatcgcggctacagttgtcagcgtaccgtcgattcgcccatgcgacaccaaagcattgctggcagcgttaaaaggatgcaaagcagtgatgacggttgaagagcataacgtcaatggcggccttggtagcctggtcgcggaagtgttggcagaggccggaacggggatcaaattaaaacgcgcgggcattatggatggagaatatgccgcagcggcggatcgtgggtggttgcgtcagcatcatggctttgatgctgccggaattgcagctcaggcacgggaaatgctttga

SEQ ID NO: 5575 - DNA, 783 bp, Escherichia coli
gtgaacgccttatccggcctacaaaaatcttgccaattcaatatattgcaggaccacgtaggcctgataagcgtagcgcatcaggcagttttgcgtttgtcatcattctctaatatggttgacatgaaaactacgcatacctccctcccctttgccggacatacgctgcattttgttgagttcgatccggcgagttttcgcgagcaggatttactctggctgccgcactacgcacaacttcaacacgctggacgtaaacgtaaaacagagcatttagccgggcggatcgctgcaatttatgcgctgcgggaatatggctataaatgtgtgcctgcaatcggcgagctacgccaacctgtgtggcctgcgggggtatacggcagcattagtcactgtgggactacggcattagccgtggtatctcgtcaaccgattggcattgatatcgaagagattttctctgtacaaaccgcaagagaattgacagacaacattattacaccagcagaacacgagcgactcgcagaatgcggtttaaccttttctctggcgctgacactggcattttccgccaaagagagcgcatttaaggcaagtgagatccaaactgatgcaggttttctggactatcaaattggaaattgtcagcatcaacagatgaatataagcgggccgaatggcgaccatatcgtgcagtggttagtaaggggtaataatgttattaccttgtgcctggcagataaacacccgcacactgcagcatgcgggttatctggcgggtaa

SEQ ID NO: 5576 - DNA, 2241 bp, Escherichia coli
atgaacaagaagattcattccctggccttgttggtcaatctggggatttatggggtagcacaggcacaagagccgaccgatactcctgtttcacatgacgatactattgttgttaccgccgccgagcagaacttgcaggcgcccggcgtttcgaccattaccgcagatgaaatccgcaaaaacccggttgcccgcgatgtatcggagatcattcgtaccatgcctggcgttaacctgaccggtaattccaccagtggtcagcgtggtaataaccgccagattgatattcgcggcatgggtccggaaaacacgctgattttgattgacggcaagccggtaagcagccgtaactcagtgcgtcagggctggcgtggcgagcgcgatacccgtggtgatacctcctgggtgccgcctgaaatgattgaacgtattgaagttctacgtggtccggcagctgcgcgttatggcaacggcgcggcgggcggcgtggttaacatcattaccaaaaaaggcagcggtgagtggcacggctcctgggatgcttatttcaatgcgccagaacataaagaggaaggtgccaccaaacgcaccaacttcagcctgaccggtccgctgggcgacgaattcagcttccgcttgtatggcaacctcgacaaaacccaggctgacgcgtgggatatcaaccagggccatcagtccgcgcgtgccggaacgtatgccacgacgttaccagccgggcgcgaaggggtgatcaataaagatattaacggcgtggtgcgctgggacttcgcgcctctgcaatcactcgaactggaagcgggctacagccgccagggtaacctgtatgcgggtgatacgcagaacaccaactctgacgcttacactcgctcgaaatatggcgatgaaaccaaccgcctgtatcgccagaactactcgctgacctggaacggcggctgggataacggcgtgaccaccagcaactgggtgcagtacgaacacacccgtaactcgcgtattccggaaggtctggcgggcggtaccgaagggaaatttaacgaaaaagcggcacaggattttgtcgatatcgatcttgatgacgtgatgctgcacagcgaagttaacctgccgattgatttcctcgtaaaccaaacgctgacgctgggtacagagtggaatcagcaacggatgaaggacttgagttccaacacccaggcactcaccggaacgaataccggcggtgctattgatggtgtgagtgccaccgaccgtagcccatattcaaaagcagaaattttctcgctgtttgccgaaaacaatatggagctgactgacagcaccatcgtaacgccggggctgcgtttcgatcatcacagtattgtcggcaataactggagcccggcgctgaacatttcgcaaggtttaggcgatgacttcacgctgaaaatgggcatcgcccgcgcctataaagcgccgagcctgtaccagactaacccaaactacattctctacagtaaaggtcagggctgctatgccagcgcgggcggctgctatctgcaaggtaacgatgacctgaaagcagaaaccagcatcaacaaggagattggtctggagttcaaacgcgacggttggctggcgggcgtgacctggttccgtaacgattatcgcaataagattgaagcgggctatgtagctgtagggaaaaacgcagtcggcaccgatctctatcagtgggataacgtgccgaaagcggtggttgaaggtctggaaggatcgttaaacgtaccggttagcgaaacggtgatgtggaccaataacatcacttatatgctgaagagtgaaaacaaaaccacgggcgaccgtttgtcgatcatcccggagtatacgttgaactcaacgctgagctggcaggcacgggaagatttgtcgatgcaaacgaccttcacctggtacggcaagcagcagccgaagaagtacaactacaaaggtcagccagcggttggaccggaaaccaaagaaatcagtccgtacagcattgttggcctgagcgcgacctgggatgtgacgaagaatgtcagtctgaccggcggcgtggacaacctgttcgacaaacgtttgtggcgtgcgggtaatgcccagaccacgggcgatctggcaggagccaactatatcgcaggtgccggggcgtatacctataacgagccgggacgtacgtggtatatgagcattaatactcacttctga

SEQ ID NO: 5577 - DNA, 3882 bp, Escherichia coli
atgagccagcatttacctttggtcgccgcacagcccggcatctggatggcagaaaaactgtcggatttaccctccgcctggagcgtggcgcattacgttgagttaaccggagaggttgatgcgccactactggcccgcgcggtggttgccggactagcgcaagcagatacgttgcggatgcgttttatggaagataacggcgaagtctggcagtgggtcgatgatgcgcagacgttcgaactgccagaaattatcgacctgcgaaccaacattgatccgcacggtactgcgcgggcattaatgcaggcggatttgcaacaagatctgcgcgtcgatagtggtaaaccactggtctttcatcagctgatacaggtggcggataaccgctggtactggtatcagcgttatcaccatttgctggtcgatggcttcagtttcccggccattacacgccagatcgccaatatttactgcgcattgctgcgtggcgaaccaacgcctgcttcgccgtttacgcctttcgctgatgtagtggaagagtatcagcagtaccgcgaaagtgaagcctggcagcgtgatgcggcattctgggcggaacagcgtcgtcaactgccaccgcccgcgtcactttctccggcacctttaccggggcgcagcgcttcggcagatattttgcgcctgaaactggaatttaccgacgcggaattccgccagctggctacgcaactttcaggtgtgcagcgtaccgatttagcacttgcgttggcagccttgtggctggggcgattgtgcaaccgcatggactacgctgccggatttatctttatgcgtcgactgggctcggcggcgctgacggctaccggacccgtgctcaacgttttaccgttgggtattcacattgcggcgcaagaaacgctgccgcaactggcaacccgactggcagcacaactgaaaaaaatgcgccgccatcaacgctacgacgccgaacaaattgtccgtgacagtgggcgagcggcaggagaggaaccgctgttcggtccggtactcaatatcaaggtatttgattaccaactggaaattcctggtgttcaggcgcaaacccataccctggcaaccggtccggttaatgaccttgaactggccctgttcccggatgaacacggagatttgagtattgaaatcctcgccaataaacagcgttacgatgagccaacgttaattcaacacgctgaacgcctgaaaatgctgattgcccagttcgccgcggatccggcgctgttgtgcggcgatgtcgatattatgctgccaggtgagtatgcgcagctggcgcagatcaacgccactcagattgagattccagaaaccacgctgagcgcgctggtggcagaacaagcggcaaaaacaccggatgctccggcgctggcagatgcgcgttaccagttcagctatcgggaaatgcgcgagcaggtggtggcgctggcgaatctgctgcgtgagcgcggcgttaaaccgggcgacagcgtggcggtggctctaccgcgctcggtctttttgactctcgcgctacatgcaattgttgaggctggtgcggcctggttaccgctggataccggctatccggacgatcgcctgaaaatgatgctggaagatgcgcgtccgtcgctgttaatcaccactgacgatcaactgccgcgctttgccgatgttccagatttaacccgcctttgctataacgccccgcttacaccgcagggcagtgcgccgctgaaactttcacaaccgcaccacacggcttatatcatctttacctctggctccaccggcagaccaaaaggggtaatggtcgggcagacggctatcgttaaccgcctgctttggatgcaaaaccattacccgcttacaggcgaagatgtcgttgcccaaaaaacgccatgcagttttgatgtctcggtgtgggagtttttctggccgtttattgccggggctaaactggtgatggctgaaccggaagcgcaccgcgacccgctcgctatgcagcaattctttgccgaatatggtgtaacgaccacgcactttgtgccgtcgatgctggcagcatttgttgcatcgctgacgccgcaaaccgctcgtcagaattgcgcgacgttgaaacaggttttctgtagtggtgaagccctaccggctgatttatgccgcgaatggcaacagttaaccggcgcgccgttgcataatctatatggcccgacggaagcggcggtagatgtcagttggtatccggcttttggcgaggaactggcagaggtgcgcggcagcagtgtgccgattggttatccggtgtggaatacgggcctgcgcattctcgatgcgatgatgcatccggtgccgccgggtgtggcgggcgatctctatctcaccggtattcaactggcgcaggggtatcttggacgacccgatctgaccgccagccgctttattgccgatccttttgccccaggtgaacggatgtaccgtaccggagacgttgcccgctggctggataacggcgcagtggagtacctagggcgcagtgacgatcagctaaaaattcgcgggcagcgtattgaactgggcgaaatcgatcgcgtgatgcaggcgctgccggatgtcgaacaagccgttacccacgcctgtgtgattaaccaggcggcagccactggtggtgatgcgcgtcagttggtgggctatctggtgtcgcaatcgggcctgccgttggataccagcgcattacaggcgcagcttcgagaaacattgccaccacatatggtaccggtggttctgctgcaacttccacagttaccacttagcgccaacggcaagctggatcgcaaagccttaccgttgcctgaactgaaggcacaaacgccggggcgtgtgccgaaagcgggcagtgaaacgattatcgccgcggcattctcgtcgttgctgggttgtgacgtgcaggatgccgatgctgatttctttgcgcttggcggtcattcgctactggcaatgaaactggcagcgcagttaagtcgacagtttgcccgtcaggtgacgccggggcaggtgatggtcgcgtcaactgtcgccaaactggcaacgattattgatggtgaagaagacagcacccgacgcatgggattcgaaaccattctgccgttgcgtgaaggtaatggcccgacgctgttttgtttccatccggcatccggttttgcctggcagttcagcgtgctctcgcgttatctcgatccacaatggtcgattatcggcattcagtcgccgcgccctcatggccccatgcagacggcggcaaacctggatgaagtctgcgaagcgcatctggcaacgttatttgaacaacaaccgcacggcccttattacctgctgggttattcacttggcggtacgctggcgcagggcattgcggcgcgactgcgtgcccgtggcgaacaggtggcatttcttggcttgctggatacctggccgccagaaacgcaaaactggcaggaaaaagaagccaatggtctggacccggaagtgctggcggagattaaccgcgagcgcgaagccttcctggcggcacagcagggaagtacttcaacggagttgtttaccaccattgaaggcaactacgctgatgctgtgcgcctgctgacgacagctcatagcgtaccgtttgatgctaaagcgacgctatttgttgccgaacgcacgcttcaggaaggtatgagtcctgaacaggcctgggcaccgtggattgctgagctggatatctatcgtcaggattgtgcgcatgtggatattatctctccggtggcgtttgaaaaaattgggccgattattcgtgcgacgctaaataagtaa

SEQ ID NO: 5578 - DNA, 1134 bp, Escherichia coli
atgtcatcactgaatattaaacagggaagtgaagctcattttcccgagtatcctctggcgtcgcccagtaataatgaaattgatttacttaatctaatcgaagttttatggcgggcaaaaaaaacggtcatggcggtcatttttgcgtttgcctgcacaggattgctgatctctttcatcctgccgcaaaaatggaccagcgcggcggttgtcacgcctccagaacctgttcagtggcaagagctggagaaaacattcactaagcttcgtgtgctggatctggatatcaaaattgatcgtacagaagtatttaacctgtttatcaagaaatttcagtctgttagcttactagaagagtacctgcgctcatcaccttatgtgatggatcaattaaaagaagcgaaaatcgacgaactggatttgcatcgcgctatcgtcgcattgagcgaaaaaatgaaagcggttgatgacaatgccagtaagaaaaaagatgaaccgtcactgtatacctcctggacgctaagttttaccgcgccaaccagtgaagaggcgcagaccgttttgagcgggtatatcgattatatctctgcgttggtggtgaaagagtcgatagaaaacgtccgtaataaactggagatcaaaacccagtttgaaaaagaaaaactggctcaggatcgcattaaaacgaaaaatcaacttgatgcaaacattcagcgcctcaattattcactcgacattgccaacgcggcaggaattaaaaagcccgtatacagtaatggtcaggccgttaaagatgatcccgatttctctatttctctcggcgctgatggtattggtcgtaaactggaaattgaaaaagcggttactgacgttgcggaattgaacggtgaattacgtaatcgtcaatatcttgttgagcaattaacaaaagcaaatgttgatgacgttaaattcattccgtttaaatatcaattaagcccatcgttgccggtgaaaaaagacggtccgggtaaggctattattgtgatcctttccgcgttgatcggcgggatggtggcttgtggtggtgtgctgttgcgtcatgcgatggcatccagaaaacaggatgccatgatggcagaccacttagtttaa

SEQ ID NO: 5579 - DNA, 219 bp, Escherichia coli
atgatgcccagacagcctggcccaccatcgtcaacgggcattggctgcggttgcggctccgataacgctggcgaaggggtggaccaggactataagcaagcgatgtactggtatctgaaggctgctgctcaggaaagcgtcggcgcttacgtcaacatcggttatatgtataaacacggacaaggcgttgagaaagattatcaggccgcctttgaatag

SEQ ID NO: 5580 - DNA, 555 bp, Escherichia coli
atgaataaaaaattaatgtatatattcgcaatatttatagttgcagcaataacctgtattagccaacccaagaaaacgacgttgcgtgataaagccatggcgaattatgcctttgattatttaagctcaccgggcagtcttccattcaccacggcagccacggagctttccgcgattcatggtcactcaacgtcgcaatatcgccttggagaattttatcttcatggtagcgacggtaaaccactggattatacacaggcgagatactggtatgagcaatcagcagaacaggaaaatccacgcgcgcaaagtaaactggggtggatctacctcaaaggtctgggggtcaaacccgacacccgtaaagcaattctctggtataaggaagcagctgaacaagggtatgctcatgctcaatatactttgggtttgatctacagaaatggctcaggtattaatgttaaccattatgaatctcaaaaatggttaaaactggccgccaaacaacattacaaaaatgcggaaagattacttgccgggctttccgcacattaa

SEQ ID NO: 5581 - DNA, 708 bp, Escherichia coli
atgaataaggaagaacaatatcttctttttgcgctttctacgcccatggaaatacttaatcagggttgcaagcccgcgcatgactcgccaaaaatgtataccgggataaaagaattcgatctctcatcatcctggggaataaataatcgtgatgatttaattcagactatttatcagatgaccgatgatggtcatgccaatgatttagctggcttatatctgacatggcatcgctcttcccctgaagagtggaaagcattaattgctggcggctcggagagagggttgatttatacccaattcgttgcccaaaccgctatgtgttgtggggaagggggaatcaaagcctgggattatgtgcggatgggttttttatcacgggttggtgtgctcaacaagtggttgacggaagacgagagtttatggctgcaatcgcgcgtctatatacgagcacaccattactatcacagctggatgcactatttttctgcctattcgttagggcgtctctactggcaatcttctcagtgcgaagacaacgcttcgctacgcgaggcgctaaccctgtacaaatacgatagcgccgggagtcggatgttcgaagagctggcagcgggaagcgaccgtttctatgccacgcttccctggcagccattaactgtccagcctgaatgcccggtaacgcttaaggatgtgagcgacctatga

SEQ ID NO: 5582 - DNA, 1452 bp, Escherichia coli
atgaaaacatgttggcaaatcctcgaaattgaaagcacgacgcaaatagacattatccgccaggcttatcttgctcgcttaccgttatgtcatcccgaaaccgatccacaagggtttaaagcattacgccaggcctatgaagaggcgctgcgactggcggtaaatcctgtcgaggaagcagatgatgaagaaaaagatgctgccactgagcatgaaatactacgtgtattcagggcattactggattcagaaaatgatcgttttcagccctccgcctggcagaaatttattcagcaattaaatacctggaacatggaggatgtcgatcaattacgctggccgctgtgtgcaatcgctatagaagcgcgatatctttcattaaattgtgcttctttgctggcagagcgtttgaactggcattcgtttaatgactgcgaaggaatagatgaggaagaaagggaggcttttcttgaggccattcaggctggtgattgtttcgatttccttagccttctggaatatcccgttgcgttgcagaaccagacggttgagtattacttctcgctggaacgttgctgccgttaccatcctgactatgtcactgcgtttttggcgatggaaggtccgtggttcattcctgatgatgcgaagttgcatcgcaaactgttgcgctggtacagctcggtgcaaacaggtatggcggaactcattcctgtcgctcaacagtggcaagcggaagaaccagaaagcgaagatgcccgttattaccagtgcgcacaacggttgtactgcggcgagggggaaagcctgcttgccgatctctgcgcgtaccgggaaagttacccatctacacaagccgataatttgttgttgcagtggagcaagcgtcattgcccggattatttcgcgttattagtgatggttatcgaagcgcggagcatggtagatgcgcaaggtaagccgttgaaatatgttcctggtgagagcgcccggacgcggctgttatgggcggagattttacatagcggaaaattatcgccgttaggtcaatcgtttattgagtcgttattcttcaaacgcaaagcatgggcgtggtggaaatcgagagtcggtagcgagacagagcaagattcaccgttactggatttgtatcgggtagcggaacaggtagtacttgaagcgtttccgaaacaagagatgctggcccgtctggacgcgcggctggaacgcggagaggcacatccattagagaccattatcacccgaatgctgttgacgaaagtgaagctcgagccggaggatgaagatgtcgatgagccaacacctgaaaaccatgaagaaataaatgatgaggatgaaaaaccacagagcattaccagcattatcaaaatcagtttaacggtgctggtgataggttatgctctcggcaaaatcgcgatgttgtttagttga

SEQ ID NO: 5583 - DNA, 1671 bp, Escherichia coli
atggataatgcagaacttgccattggtatcgatctcggtactaccaatagtttaattgccgtctggaaagacggtgccgcgcaattaattccaaataagttcggtgaatatttaacaccatccataattagcatggatgaaaataatcatattttagtcggaaaaccggctgtatcacggcggacttcgcatccggataaaacggcagcgttatttaaacgtgcaatgggcagtaataccaactggcggttaggcagcgacacatttaacgcgccagaactgtcctctttggtattacgctcattaaaagaagatgccgaagaatttctgcaacgtccgattaaagatgtggtgatctccgttcctgcttatttcagcgatgaacaacgcaagcatacccgtttagcagcagagttagccgggctaaatgcagtgcgcctgattaatgagccaacggcagccgcgatggcgtatggcctgcatacgcagcaaaatacccgctcgctggtttttgatctcggtggcggcacgttcgacgttacggtgctcgagtacgccacgccggtgattgaagttaacgcctccgctggcgataacttcctcggtggcgaagattttacccatatgctggtcgatgaggttttaaaacgcgcggaagttgccaaaaccacgcttaacgatagcgaactggcagccttgtacgcctgcgtggaagcggcaaaatgtagcaatcaatcgccaatgcacattcgctggcagtaccaggatgaaatgcggaaatgcgaattttacgagaacgaactggaagatttgtggttgccgctgctcaatcgcttgcgagtgccgattgaacaggcgttgcgcgatgcacgtctgaagccgagtcaaatcgacagtctggtgctggttggcggcgcgtcacaaatgccgctggtgcagcgaatcgcagtgcgtctgtttggcaaattaccgtatcaaagttacgatccgagcaccattgtcgcgctgggcgcagcaatccaggccgcctgccgcttacgcaatgaagatattgaagaagtgatcctcactgatatttgcccttactcgttgggtgttgaagttaaccgtcagggcgtatccggcattttctcgccgattattgaacgaaacaccacagtaccggtgtcgcgtgtagaaacttattcaaccatgcacccggaacaggattcaattacggttaacgtctatcagggagaaaaccacaaagttaaaaataacattcttgtggaatccttcgatgtgccgttgaagaaaaccgggacttatcagtcgattgatattcgctttagttatgatatcaacggcttgcttgaagttgacgtgcttctggaagacggcagcgttaagtccagagtgattaatcacagtccggtaacattgagcgcgcagcagattgaagagagtcggacgcggttatccgcattgaaaatttatccgcgcgatatgctcatcaatcgcacctttaaagccaaactggaagagttgtgggcgcgggcgctgggtgacgagcgagaagagattggtcgggtgatcaccgattttgatgcggcgttgcagtcaaacgatatggcccgcgtggatgaagttcggcggcgggcgagcgattatttagccattgagatcccataa

SEQ ID NO: 5584 - DNA, 438 bp, Escherichia coli
atgctgcgttttatgacggcgttgatgggtgcgttattacttatgcaatctgcgttcgccgatacggttaaaccggaaatcggtaaatatgtttttggctatcgtgggcaggaaggcgctgtggtgtggatgatgcggataggcccgaaagcttctaatgaagccctcattcaggtatcgcatgttgataatgacatcgatggtcagatatttcgctgtaaagtgaaagcattacaggaaggtgagaaatcctataccgccgtaattaagggcaaatcttttgagttattacgcctgaaagagggaaatggcagactgcatattccggatgagcaggcgacctggttggtggcctacagtgatgagttgtcaaatagcgatgtggcaaacccggaacatttccttactgcatatcagaatcaacaagcgccccagtaa

SEQ ID NO: 5585 - DNA, 933 bp, Escherichia coli
atgctgaagattattcgtgcgggcatgtacaccaccgtgcaggatggcggccgtcacggctttcgtcagtctggtatcagccactgtggcgcactggatatgcctgcgttacgcattgctaacctgctggtgggtaatgacgccaatgcccccgcgctggagatcacgctcggtcagttaacggttgagttcgaaactgatgggtggtttgctctgacgggtgccggttgcgaagcgcggctggatgataatgccgtctggaccggctggcgattgccgatgaaagcaggccagcgtttaacgcttaaacgcccgcagcacgggatgcgcagttatctggcggtcgcgggtggtattgatgttccgccggtaatgggatcatgcagcaccgatctcaaagtggggattggcgggctggaaggccgtttactgagggatggtgaccgactcccgattggcaaagcgaagcgtgattttatggaagcgcagggcgttaaacagctgctctggggcaaccgcattcgcgccttgccggggccggaatatcatgagttcgatcgcgcctcgcaggatgcattctggcgttcgccctggcagcttagcccgcaaagtaaccgcatgggctatcgcttacaggggcaaattttaaaacgcaccaccgatcgcgaactgttatctcacggtttgttgccgggcgtggtgcaggtgccgcataacggccagccgattgtattgatgaacgacgcacagaccaccggtggttacccgcgtattgcctgtatcattgaggctgatatgtaccatctggcgcaaattccgctcggtcagccgattcattttgtccagtgttcactggaagaggcactgaaagcgcggcaagatcagcaacgttatttcgaacaattagcgtggcggctgcacaatgaaaattga

SEQ ID NO: 5586 - DNA, 714 bp, Escherichia coli
atgagtgagagtgcgttattgaccagcgtaacgttatcgtcacaggtcaaaaatcatattcttaatctgatcgccgaacaaaaattgacaccggggatgccagttcccagtgaagttcagctgattcagaaattgggtgtcagtcggggtattgtgcgtgaggcctatcgttcacttgccgccctggggattctggaaacgcacagcggtaaagtgccacgaatcaaaaaatttgatgatgaagtgctgcgcgtggtgtttggatttgccctggcgaccgaacaagtgacaacagagcaaattcttcaagtacgccgctggctggagttgggcgttgtggaagctgctgcccgtaatggcgaagaggaagattttgctaacctacgggctgaaatggcaaaaatccgcgaacagttcaatgatgttgaaagctttatcacccatgatatccgcttccatcagttacttgccgttgcctcaaaaaatccgctttttatgatgttattgcaggcattacatcagcagttgcggcaatccatccaggagggtttaaacgcccaaagcgatcagaaagagtatggcaatcacatcatcacactacaccagaaaatctgcgatgctgtgtgtgccagggatgtcgaaacggcgactcaagccatgaaatcacacttcgacagcccggtcagtgcactgatcaataattcctcgtcataa

SEQ ID NO: 5587 - DNA, 687 bp, Escherichia coli
atgtggaagagtgataacgaactttttgctttgatgaaaacccggctatttaccgccgtggttggcgatattctcgacacgctgggctatatgcaccagtttgtttctccggcaatcaagccgctggatgtgaatacggtggtggcaggccgggcaatgccggtgctggagtcggacgtttacgaaaccaaatcgacgtcgggtaagacggcgattggcgaaaaaccgtttggcatcatgtttgaagcgctggatgccctcaaagagaacgatgtttacatcactacgggcagctctctgcgctatgccttgtggggcgggttgatgtctacccgtgccatgcatctgaaagcagcaggtgcggtactcgatggttacgcccgtgactctgctgaaattcttgaattgaaatttcccactttttgtcatggcacttacgcacaggatcaaggtccgcgcggcaaggtcatcgacttcggcgtacctattgaatttcacggcgtgcgagtgaatccgggcgatatcgtgtttggtgatcgtgacggattactgattattccccaggttgttgagaaagaagttattacccaggccctggaaaaagtggcaactgaaagtgaagtgcgcaaagccatcagtgatggcatgagcacggtacaggcctttgaaaccttcggcgtaatgtaa

SEQ ID NO: 5588 - DNA, 1014 bp, Escherichia coli
atgaaggcattaaccattgagcagggaagtcaggcgcgatttgttgatatccccgaacctgtctgcggtaaaggagaagtgctaatcaatgttgagcgtgtcggactgtgtggttctgacctcaatacctggcggggactaaatccgctggttaattatccctgtattccggggcatgaaattggcggcacggtgctggcaactggcgatatggcaggggcgatcaagccaggtgaccgggtggtcgttctgccttgcactgagtgtggcgtgtgcagctcctgtctgagcggtcgtcctaacgcctgtaaaaacaaccaaactcttggtgtgcaacgtcagggggggatggcgcaacaactgacgatgcctgcacataaagtcattgtctgtaatgccttaagtgttgatgagttagcgctggtagaaccgctggccgtgggactacatgcggccagacgtgcgcaaattaatgtgggtgaatgggtcgcagttatcggttgtggggtaattggccttggcgctatcgccgcggcatccgccatgggggcgcgcgtaattgctatcgatattgatgatcgcaagcggaacattgccctggaatgcggtgcgcaacgttttcttaattcgcagcaatgtgacgtggcggcagaactggtgctgttaaatgacggtcgcggcccggaagtggtgattgaagcggtgggtaatcaacaaaccattgaacaggctacagggttggtggcgtttagcggtcgtgtggtttatgtcggttacgccaaacagccagtgagttatcagagtgcgcagttcctgatgaaagaactggatatccgtggttcgcgcaatgccaccgtggcggattttcgtgccgtgctggcattgatggagtccgggcgttatccggtcagcaatctggtgagtgctcactacccgctggaacaggctgatcacgcttttagcgactgggcaagtgatcccggcgcgtataccaaaatcctcattgacctttaa

SEQ ID NO: 5589 - DNA, 756 bp, Escherichia coli
atgaatgctttttctttacataacaaaaccgcgttgatcaccggtgcagccagtgggctggggctggcaatggcgaaatgcatgatagtcagcggggcgaaggtcattattgctgacctgaacggcgagctggcgcaagcgaccgccggaacattggggtcgcaggccagttggatacaaatggatgtcggggataccgcagccgcgcaggaaaaagttgatgtgcttattagcgaacacggggctatcgatatcctggtcaataacgcaggcaatcactgcaaaaaaccgattgaagagatgagcgtcagtgattttgagtcagtactcgacgttcacgtagtcggcgcatttgcgttaaccaaagcgctggtgccgcatatgaaacaacgcggtaaaggctgtgtgctttttactgcatcgatgacctcatttcttgggcagcctctggttactggctacagcgcagcgaagtcagcctatctcggcatgattcgcggtatgaccacggagcttgccgttcatgggattcgcgtcaatggtattgcgccaggctggatcgatacaccaatgttgcgtaaggccattgaaggtgatgacgaacgccgtaacaaaatcctgggtcgtaccccgatgaaaaaattcggcaagccggaggatatcggttgggctgcggtttatctggcttcagacgcagcggcgtttgtcagtggtcaggtgctggtggtggatggcggcgcattgatcggcttctga

SEQ ID NO: 5590 - DNA, 312 bp, Escherichia coli
atgcgcaaacgtgcgttaaagctacatgccaaagataactgtgtagtcgcgctgaatgacatcgccagtggcgatattgtctggtgggatgagggggaaatggtggcctgtagttccgttaccctggggcacaaactggcctgcgaagcgctgaacaatggtgattcgattctgaaatacggcgccattatcggacacgccactcgcgatattgccatgggtgaacatgtgcattcccataatcttgccagcaatgccatcgccatttttcatcatgatgatgccggctatcagtcagaggaaaaagcataa

SEQ ID NO: 5591 - DNA, 1197 bp, Escherichia coli
atggaaggttatgtacggcaaaatggtcgaccaggtattcgtaatactgtgcaggtaatctttatggtggagtgtgccagccatgtcgctaaaaagattgccgaaggatttccttgtcacgacgtgcagtattttggtttttcaggttgttatcccagcgattatggctatcggctggtgaaaaatctggcgactcatagcaacgtaggtggtgtactgattatttcgctggggtgcgagaatttcgatcgccgtcggctggagcaagaagtacgagaaagtgggcgaccgtgccatacgctggtcattcaggaaaataaaggcacgaccaacaccattactctgggtaagcagttggtcgctgaaatgctggaacagcttgcggatacaccgcgttgtatcctgaactggagcgacctggtggttggtactatctgcggtggctccgatggcaccagtggtatcacgggtaacccggcagtaggacgtgcctttgaccaactgctggagaaaggggctacctgtatttttgaagaaagcggtgagttgcttggttgtgagcagcatatgatgtcgcgcgcggctagttcgcaggcacgtgatgccatcgaagtggcaatgacaaaagccgaacgttattacagtttgatggggctggggagtttttctaacggtaatgctgaaggcggcttaaccactcaggaagaaaaatcccttggggcttataccaagtcgggcgatgcgctgattgctggcgttattttgccgacgcaacaaacgccctttcctgggctttggttgatggacgtggtgcctgatggtgaacctcgttttgggtatccgaatattaacgattcctcagaagcactggaacttatcgcctctggctgtcatatggtgttatttaccacaggtcgcggttcagttattggttcagtgatcgctcctattattaaagtgtgtaataacccgcagacgtgggagcatttatctgacgatatggacgttaatgccggtcgtgtaattagcgaaggcgcaacgctcgacgatattgcagacgatattatgcaggtgattgaacatgtcgccaacggtcaatattgtgccgcagaacgactggaacatcaggagtttgttttaacgtataaagcatttgattacagcaaaagtgcagtctgtcgggcagatccccgttaa

SEQ ID NO: 5592 - DNA, 969 bp, Escherichia coli
atgaaaaaattactgacaccacttttatttcttttagctttatttagtccgatgctgaatgccgcaccggtaactatcaaaatcgcctatgaaagtaaccccggcgagccagcggatacagtagtgaagcactgggcagaacttgtgaagaaaaaaagcaatggagatattgttttcgaactttacccaagttcacagttaggttctaaacaagatattactgaacaagcgttgatggggatgaatattatcaccatcagtgatgtaggatttttaactgactacgatgcagacttgggaatattgtttgggccttatttaaccgaagatccgcagaaactgtttgcgatttatgccagtgactggtttaaacaaaaagaacagaaactacgggaaaaaggtatgcatattgtcatgagcaactatctgtacggtaccaggcagatcattgctaaaaaaccgattcgtacacctgaagacttgaaagggatgaagatccgcgtgccgaataacgtcatgcagattaaagctatcgaagcgatgggcgcaaccccaacaccaatgccgctgggagatgtttatccggcgctgactcaggggatgatcgatggtgtggaaaacccggtttctgttctctatgggcaaaagctgcatgagcaggcgaaatatctgtcaatggtgaactatctgaccaatacatcattatggttgggtggcgaagcgtttttcagtaccctgacacctgcgcagttagatattattcaccagacagcgtatgaagctggtttatatagccagaaaattaccactgagcaggatgcgacaatgttgaaaaccatgcaggagcagggcgtggaaatcatctatcctgacgtcgcccctttcaaagaaaaagccttaaaagtctatcaacaattcccggaatggacccctggtttgtatgacactattcagcaacagctgaaataa

SEQ ID NO: 5593 - DNA, 462 bp, Escherichia coli
atgcgtcttttagggaaaatgattgaagttgctgcggtattaacgctctttatattggtaatcatgaccattgctgcggtaataatgcgttactgttttcatatgccattacagtggacagaagaggtttccggtttattaatgatttgggtagtcatgtttggtgcggttgttgctgaacgagataatacccatttatcgattccatttttagccgatgcacttacttcacgcgggcaacgtatattagcgtttttagtctctctgatgtctattattttgctggtggtcatggcctggtcagcatggaaattagctgccgggacagcctttaaaaccacgcaaatattaaaaatatcctggttttggatcgatattgccgtcacggttggcgctatcggtgtcgcctgttttactgccttacaactgatcaagaaaacgccacgcaaggaaggtgaataa

SEQ ID NO: 5594 - DNA, 1311 bp, Escherichia coli
atgacagcattgagtgaattactggcgggaagctggctggataactggctgatgatcattccgcttatgttcgtctgtttatttatcaatatgccggtatggctggcgatgttttgcggcattctgacctacttcctttgctattcaaatgtgccgttaatggtggcaattcagcgtttgattgccacgacgcaaaccccttcgctgttagctattccgttttttatcttattaggcacgttaatgagctataccggtattgccgcgcgtattttgcaaattgccaacgtgttgattggcagaatgcgcggtggcctgggtggggctaatattctggtcagtaccatgatgggcggtgtcagtgcctcaaatctggcggatgccgcaatgttatcgcgcatgatggtgccggaaatggaacagaaaggttattcccgtggctttgcggcggcgataacggcaagtggttcgctgattacaccaattattccaccgggtattgcactgatcctttacggactggtggcggatgtctccatcggctccatgtttatggccgggatcctgccaggtctgctgtgctccgccatgttgatcgttaccgtatggttggtggctattcgtcgcggtttaaaaccttccagcgaacactggccaaaaccgaaagaagtatcagtggcgctggtgcaggcctggccagcactgttcttaattgttgcggttatcggtggtattcgggcaaatatctttacgccaacggaagccggagcggtagcagtattattggtaatgtttattggttttgtaatttatcgcgaactgaaaatcagccatgtatttacagcactctctgagacggcgcgttccacggcatcggtcatgttaatcattatggcgagtgccgcgctgggctggatattttcccttgagcgggcaggtatcacggttgcggagtttgtaacttctctgaccgataataaatacgtctttttattgattatcaatctattgctgctggtgcttggcatgttccttgaaggtagtgccattctgctgatattagtcccattacttaaacccgtggtggctcattttggcattgatccggtgcattttggcatcattatgatcctcaacttatcgttaggaacgttatcaccacctgtcggaacggtgatgctgctggtatgtaataccgtacaggtttctgtcgggcaatttatgcgtgaagcggtgccattactgatcagtcttattttacttctgttggtcattacctatattccggcaatatctttgctgctggtgtag

SEQ ID NO: 5595 - DNA, 723 bp, Escherichia coli
atgggacacaaacccttataccggcagattgccgatcgcattcgtgagcagattacgtgcggcgagctaaaacctggcgatgcgttacccactgaatcggcattacaaacagagtttggcgtcagccgggttacggtgcgccaggctttgcgccagttagtcgagcagcagatcctcgaaagcatccagggcagcgggacttacgtcaaagaagagcgggtcaattacgatatttttcagttaaccagttttgatgaaaaactgtcggaccgtcacgtcgaaacacatagtgaagtcctgatatttgaagtaattccggctgacaattttcttcagcagcagctgcaaattagcgagcaggatcgtgtgtggcatgtgaagcgcgtgcgctatcgcaagcaaaagccggtggcgctggaagaaacctggatgccgcttgcattattcccggatctcacctggcaggtcatggaaaattcgaaatatcactttattgaagaagtgaagaagatggttatcgatcgtagcgaacaggagataattcccctgatgcccacggaagagatgagccgtctgcttaatatcagccagactaagccgattcttgaaaaagtatcgcgtggatatttagttgatggccaggtgtttgaatatagccgcaacgcttttaatactgatgactataaatttaccctgatagcgcagcgaaaatcgccgcgataa

SEQ ID NO: 5596 - DNA, 1917 bp, Escherichia coli
atgaacctgacgactctgacccaccgcgatgcgctgtgtctgaatgtgcgctttaccagccgtgaagaggccatccacgcgttgactcaacgtcttgctgctctggggaaaatttccagtactgagcaatttctggaagaagtgtattgccgtgaaagcctcggcccgaccgccttaggtgaagggctggccgtgccgcatggcaaaactgctgcggtaaaagaagcggcgtttgcggtcgccacactcagcgagccgcttcagtgggaaggcgtggatggcccggaagcggttgatttagtggtattgctggccattcctcccaatgaagcaggtactacgcatatgaaactgcttaccgcgctgaccacgcgcctggcggatgatgagctcagggcgcgtattcagtcggcaacgacgcccgatgaattgctctcggcgctggatgacaagggggacgcgcaacatactgcctctttttcttatgcgccaactatcgtctgcgtaacggcctgcccggcgggtattgctcacacctacatggctgcggaatatctggaaaaagccggacgcaaactcggcgtgaatatctacgttgaaaagcaaggtgctaacggcattgaagagcgtttaacggcggagcaactcaatagtgcaaccgcctgtatttttgcggcggaagtcgctatcaaggagagcgagcgttttaacggcattcccgcgctttctgtgcctgttgccgagccgattcgccatgcagaagcgttgattcaacaagcgcttaccctcaagcgtagcgatgagacgcgtaccgtacagcaagatacgcaaccggtgaaaagtgtcaaaacggagctgaagcaggcactgttgagcgggatctctttcgccgtgccgctgattgtcgcgggtggcacggtgctggcggtcgcggtattactgtcgcaaatcttcgggctacaagatttgtttaatgaagaaaactcctggttgtggatgtaccgcaagctgggcggcgggatgctcgggattttgatggtaccggtgctcgcagcctataccgcctattcactggctgataaaccggcgttagcgccaggctttgcggcagggcttgccgccaacatgattggttccgggtttctcggcgcggtcgttggcggattgatagccggttatctgatgcgctgggtgaaaaatcatctacgtcttagcagtaaattcaacggattcctgactttctatctctacccggtgctcggtacgttgggggcgggtagtctgatgctgtttgtagtaggggaacctgtcgcatggatcaataactcgcttaccgcctggctgaacggtctgtcaggaaataacgcactgttgttgggcgccattctcggttttatgtgttcctttgaccttggtgggccagtgaacaaagccgcttatgcattctgtctgggggcaatggcgaacggcgtttacggcccgtatgccattttcgcctccgtcaaaatggtttcggcatttaccgtaaccgcttccacgatgctcgcaccgcgcctgtttaaagagtttgaaattgaaaccgggaaatccacctggctgttaggattggcaggtatcaccgaaggggcgatcccgatggcgattgaagatccgctgcgggttattggttcgtttgtgctgggatctatggtaacgggcgctatcgtcggtgcgatgaatatcggcctttcgacacccggtgccggcattttctcgctctttttacttcatgataatggcgcgggtggtgttatggcggcaattggttggtttggtgcggcgttggtgggggctgcaatctcgactgcaattctcctgatctggcggcatcatgcggtaaagcatggaaactatctgactgatggcgtaatgccataa

SEQ ID NO: 5597 - DNA, 2634 bp, Escherichia coli
atgaaagcggtatctcgcgttcacatcaccccgcatatgcactgggatcgggagtggtatttcaccacagaagagtctcgcattctgctggtcaataatatggaagagatcctgtgcagactggaacaggacaacgaatacaaatattacgtactcgacgggcaaacggcgatcctcgaagattatttcgctgtcaaaccggagaacaaagatcgtgtgaagaagttggtcgagggcgggaaattaattatcggtccctggtatacccagaccgataccacgattgtttctgctgaatccatagtccgtaatctgatgtacggaatgcgtgactgcctcgcgtttggcgagccgatgaaaataggttatttaccggattcctttggcatgtccgggcaactgccacatatatacaatggatttggcattacccgcaccatgttctggcgcggatgttctgagcgccacggtactgataaaaccgagtttttgtggcaaagcagtgacggtagcgaagtgacggcgcaggtgctgccgctgggctacgccatcggtaagtacttacctgcggacgaaaatggattacgtaaacgcctcgacagttattttgacgtgctggaaaaagcgtcagtaaccaaagaaattttattgccgaatggtcatgaccagatgcccttgcagcaaaatatcttcgaagtgatggagaaactgcgcgaaatttatcctcaacgaaagtttgtgatgagccgctttgaagaggtattcgagcagattgaagcgcagcgtgaaagtctggccatcctgaaaggtgaattcatcgatggcaaatatatgcgcgtgcatcgcaccatcggttccacgcgcatggatatcaaaattgcccacgcacgcattgaaaataagattgttaatctgctggaaccgttggcaacgctggcctggactttaggttttgattatcaccacggcttgctggagaagatgtggaaagaaattttaaaaaaccacgcccatgacagcatcggctgctgctgcagtgataaagttcatcgcgagattgtcgcccgcttcgaactggcagaagacatggcggataatctaattcggttctatatgcgcaaaatagcagacaacatgccgcagagcgacgccgacaaactcgtcctgtttaacctgatgccctggccgcgtgaagaagttatcaacacaactgttcgactgcgcggtagccagtttaatttgcgagacggtcgcggtcagcctgtgccatattttattcgacatgcccgtgagatcgatcccggccttattgatcggcaaatagttcattacggcaattatgatccctttatggagtttgatattcagatcagccaaattgtcccttctatggggtatcgcacgctctatatagaagcgaatcagcctggcaatgtggtcacgccaaaaagtaaaacagagggaatactggaaaatgctttctggcaaattgcactcaatgaggatggttcacttcgtctggttgataaagatagtggcgtgcgctatgaccgggtgtttcaaattgaagaaggttccgatgatggggatgaatatgattattcgccagcaaaagaagagtgggccattacctcagcgaatgcgaaaccgcaatacgatattattcatgaagcctggcagagtagggccataattcgctatgaaatagcggtgccgcgtaatctgtcagagcgtcgcgcaaagcaatgttctggcagggtaggggtggagacggtgatcactcttagccataacagcagacgcattgatgcggatattaatcttgataaccaggccgatgatcaccgtattcgtgtattgattcccacgccttttaacacagatgttgttcttgcggatacgcagtttggttcattgacgcggccagtgaaggattgcgcaatgaatgtctggcagcaagaaggctggaaagaagcgccggttccggtatggaatatgctcaactatgctgtcttacaggaagggcgtaacggcatagccgtttttagcgaaggattacgtgaatttgaagtcattggagaagagaataaaacctttgctattacgttgttgcgtggtgtgggattactgggaaaagaagatttacttttaaggccagggcgtccttcaggaattaaaatgcctgtgtccgattcacaattacgcggatcattttcctgtcgtctgagtttatttagttatatcggtactcccgtaactgccggtgtagcccagcaggcacgcgcatggctgacgccagttcagtgttataacaaaatcccgtgggatgcgatgaagcttaataaagccaaattcaatgtgccggaaagctatagtttgctgaaaatgccaccagtgggatgtctgatcagcgcgctaaaaaaagcagaagacagacaggaattaatattgcggctgtttaatccggctgaattgacaagctgtgatgcgaccgtcgcgtttagcaggaaggtgatgacgtgtacagaaaccatgatgaatgaacgctttaatacagaaaaaaatgaggttttaaaagaattagctctctttttaccgggacagtcgcggacatttagctaccgaatagtctga

SEQ ID NO: 5598 - DNA, 1149 bp, Escherichia coli
atgaggcgcttcgcaggcgcatgtcgtttcgttttcaatcgtgctctggcgcttcagaatgagaatcatgaggccggtaataaatacatcccttacgggaaaatggcttcctggctggttgagtggaaaaatgccactgaaacgcaatggcttaaagattctccctcacagccattgcaacagtcactgaaagaccttgagcgggcttacaaaaacttcttccagaagcgggctgcttttccccgattcaaaaagcggggacagaatgatgcattccgctacccgcagggcgttaagctcgatcaggaaaacagccgtatttttctgccgaaacttggttggatgcgctaccggaatagccgtcaggtcacgggagttgtgaaaaatgtcactgtcagccagtcctgcggtaagtggtacatcagtattcagacagaaagtgaagtatcaactccggttcacccttcagcatcaatggtcgggctggatgctggcgtggctaaactcgccacgctgtcagatggcacagtctttgagcctgtaaacagttttcagaaaaaccagaagacgctggcgagacttcagcgacagttaagccgcaaggtcaaattcagcaacaactggcagaagcagaaacgcaaaatacagcgactacattcctgtatcgcaaatatccgcagggactaccttcacaaagtcacaacgaccgtcagcaaaaaccacgcaatgatagtcattgaggatttgaaggtcagcaacatgtcaaagtcagcagcgggtacggtcagccagccggggcgcaatgtccgggcaaaatcaggtttaaaccgtacgatactggatcagggctggtatgaaatgcgccgccagcttgagtacaagcagctctggcgtggcggtcaggtgcttgctgttccgccagcgtacacaagccagcgttgcgcgtgctgtggtcatacagcgaaagaaaaccgcctgtcacaaagtcaattcagatgccaggtatgtggatatacagcgaacgccgatgtaaatggcgctcgtaacattttagcggcggggcacgccgttcttgcctgtggagagatggtgcagtcaggccgcccgttgaagcaggaacccaccgaaatgattcaggcgacagcctga

SEQ ID NO: 5599 - DNA, 1317 bp, Escherichia coli
atgccattagtcattgttgctatcggtgtaatcttgttattactcctgatgatccgcttcaaaatgaacggcttcatcgctctcgtcctcgtggcgcttgctgttggattaatgcaagggatgccgctggataaagttattggctccatcaaagctggtgtcggcggaacgctcggtagccttgccctgatcatgggttttggtgcgatgctgggcaaaatgctggcagactgcggtggtgcacaacgtatcgctaccacgctgattgccaaatttggtaaaaaacacatccagtgggcggtggtactgaccggttttaccgttggttttgccctgttctatgaagtgggtttcgtgctgatgctgccgctggtgtttaccatcgcggcttccgcgaatattccactgctgtatgttggtgtaccaatggcggctgcactgtctgtgacccacggcttcctgccaccgcatccgggtccgactgcgattgccaccattttcaatgccgatatgggtaaaactctgctgtacggtactattctggcaatcccgaccgtgattctcgccggtccggtttacgctcgcgtgttgaaaggtatcgataagccgatcccggaaggtctgtacagcgcgaaaaccttcagcgaagaagagatgccgagctttggcgtcagcgtctggacctctctggtgccggtggttctgatggcgatgcgtgcgattgccgaaatgatcctgccgaaaggtcacgctttcctgccggtggcggagttcctcggtgacccggtaatggccacgctgattgccgtgctgattgcgatgttcacctttggtctgaaccgtggtcgttcaatggatcagattaacgacacgctgatttcttccatcaaaatcattgcgatgatgctgttgattatcggtggtggcggtgcgttcaagcaggtgctggtagacagcggcgtggacaaatacattgcttccatgatgcacgaaaccaacatttctccgctgctgatggcctggtcgattgctgccgtactgcgtatcgcgctgggttccgcaaccgtcgcggcaatcactgcgggtggtatcgcggcaccgctgattgcaacgacgggtgttagcccggagctgatggttattgcggttggttccggtagtgtgattttctctcacgtgaacgatccgggcttctggttgttcaaagagtactttaacctgactatcggcgagaccatcaaatcctggtcgatgctggaaaccattatctcggtgtgcggtctggtaggctgtctgctgctgaatatggtgatttga

SEQ ID NO: 5600 - DNA, 1506 bp, Escherichia coli
atgcaaagcggaaaatggattttgacctcgctggtaatgactttttttggcatccccatactggcgcaatttttggcagcggttgttgccatgctgggggccgggcttgccgctattcttgaggtttgcaatttactctttacgccaacaatttatcttctactcaacgtctttatgctgacgctgggggcgataatcatatttttctctggtcgcgtgtgggctggtgatagcgcaccagaaaaaagagaaatagccgcctggcgacaatgcttttttctcttacccgcgctattaaccctggttggctggataatcgcgctacatctggcagattatcaatttcgccagatgggatcgggctggttggcaaaccttatgctttcctggcagggtgttttgttactctcattaatcagtggcgactactggtggatagtcattatacccgttggcgcgcatatcagtttttcgctgggatacggctggccgacaaggcatcctttaaccggcacgtccgggctacgttgccgtaacttactcctgtttctacttctcttacttggttttgtcgctgggtatcaggcttatttatataaacagcttaatcccggtgtcggtgtgcgtgaaaatattgatacctgggcctggcgacccgataaacttaataatcaactgacgccactgcgtggtaaaccacaaattcaatttacgcaaaactggccgcgactcgatggcgctacggcggcgtaccccatttatgcctctgcattttatgcattaagtgtaataccagaggattttcacgtttgggattatctggataactctcgtacgcaagaagcatataacaaaatcgttaacggtgatgccgatattattttcgtggcgcaaccttccgatgggcaaaaaaaacgcgctgagaaatcgggcgtcactttgctgtacacgccatttgcccgtgaagcgtttgttttcatcgtcaatgcggataatccggttaattccctgactgaacaacaggtgcgtgacattttcagtggcgcaattaccaactggcgcgcggttggcggtgacgatcaggagatccagacctggcaacgcccggaagactctggcagccagacggtgatgctatcgcaggtcatgaaaaatgtccgcatgatctcgccgcaggaaacggaagtggcaagcgtgatggagggaatgattaacgttgttgccgaataccgtaatacaaaaaacgcaataggctacaccttccgctattacgcaacacaaatgaatgccgataaaaatataaaactgctagcgattaacggtattgcaccgactgcggaaaatattcgcaacgacaaatatccctatatcgtcgatgccttaatggtaacgcgggaaaatacgacgtcagagacacaaaaattggtggagtggtttttaacgccgcaggggcagagtttggtggaagatgtgggctatgtgccgatggataaaacgttgcattaa

SEQ ID NO: 5601 - DNA, 1974 bp, Escherichia coli
atgacacaactcgccattggcaaacccactcccctcggcgcgcattacgacggtcagggcgtcaacttcacacttttctccgctcatgccgagcgggtagagctgtgtgtctttgatgccaatggccaggaacatcgctatgacttgccagggcacagtggcgacatttggcacggttatctgccggatgcgcgcccgggtttgcgttatggttatcgagttcatggcccctggcaacctgccgaggggcatcgctttaacccggcgaagttgttgattgatccttgcgcgcggcaaattgacggggagtttaaagataacccgctgctgcacgccggtcataatgaacctgactatcgcgacaacgccgccattgcgccgaaatgcgtagtggtgattgatcactatgactgggaagatgatgccccgccgcgcacgccgtggggcagcaccatcatttatgaagcccatgtcaaaggattaacgtacctgcacccggagatcccggtcgagatccgtggcacttataaagccctggggcatccggtgatgatcaactatttgaaacagttgggcattaccgcgctggaactgctgccggtggcacaatttgccagtgaaccacgtctgcaacgtatggggcttagtaactactggggttacaacccggtggcgatgtttgcgctgcatccggcgtatgcctgctcgccagaaacggcgctggatgagtttcgcgatgcaatcaaagcactgcataaagcgggtatcgaagtcattcttgatatcgtgctcaaccatagtgcggaactggacctcgacggcccgttattctcgctgcgtgggatcgacaaccgtagctattattggataagagaagacggcgattatcacaactggaccggttgtggcaacacgctcaatttgagtcatccggcggtggtagattatgccagcgcctgcctgcgttattgggtagaaacctgccacgtcgatggtttccgctttgatctggcggcagtcatgggccgtacgccagagtttcgtcaggatgcgccgttgtttaccgctatccagaactgcccggtgctctcgcaggtgaagttaattgctgaaccgtgggatatcgctcctggtggttatcaggtgggaaatttcccgccgctgtttgccgagtggaacgatcatttccgcgatgcagcccgtcgtttctggctgcattatgatttgcctctgggggcgtttgccgggcgttttgctgcctccagcgatgtttttaaacgtaatgatcgtctgccgagtgccgcgattaatctcgtcaccgcgcatgacggttttacgcttcgcgactgcgtttgcttcaaccataaacacaatgaagcaaacggagaagaaaatcgcgacgggaccaacaacaattacagtaacaatcatggtaaagaagggttaggcggtactcttgatctggttgaacggcggcgcgacagcattcacgccctgttaacaacgttgttgctctcccagggtacgccgatgttactggccggtgacgaacatggtcacagccagcatggcaataacaatgcctactgtcaggataaccaattaacctggttggactggtcgcaggcaagcagtggtttaaccgcatttaccgccgcgttaatccatctgcgcaagcgcattcccgctttgatggagaatcgctggtgggaagaaggcgacggcaatgtccgttggctaaatcgatatgctcaacctttaagcacggatgagtggcaaaacgggccgaaacagctgcaaattctgctctcggatcgctttttgatcgcaattaacgccacgcttgaggtaacagagattgttttacctgctggggagtggcacgccattcccccattcgctggagaggataacccagtgattacggctgtctggcagggacctgcacacggattgtgtgtgttccagagatga

SEQ ID NO: 5602 - DNA, 1203 bp, Escherichia coli
atgaatctttcagccaatgctcaagcaactctcctgctaaccagcgatttttctcgcgcggcggcgagtgagtataaacctcttagtaatagtgaatgggggaagtttgcattatggctgaagcaccaacgtatcagtcccgccgagcttctggtgccgcaaccgcaagagaaacttacaggctggagcgatccgcgtatttctcaggagcgaattcttggcttgctggcgcgtggtcatagtctggcgttggctgtagataagtggcaacgcgccggtttatggatcttaacccgcggagatgccgattatcccgttcgcttgaaaaaccgattgcgaacggatgcacctcccgttttatttggctgcgggaataaagcattactgcaagcggaaggtatggcgattgttggctcgcgagatgctccgactgacgatttgcgctatacccaacaactggccgcgaaactggcccaacaggggatttgcgttatctctggtggtgcgcgaggtattgatgaatgtgcaatggcctcggctctggaggtcgggggaactgccgttggcgtattagctgatagcttgttaaaaacgagtacgttagtgaaatggcgtgaagggcttatagcaggcaacctggtgttgatttcgccgttttacccagaggtacgtttcaccgtcggcaatgcgatggcgcggaataaatatatttattgccttgctgaaagcgcaatggttgtacgtgcgggaatgaccggtggaacgataaccggggcgatggaggcattaaaacatcagtggctgcccatgcaggttaaaccaaatcaggatatgcaatcagccaattcacgattagtagaaaatggggcgtcatggagtgctgaacaggctgagaatgtgacgatcagactgccagacgttcctgggctgatgtatgacagagcactccgtaacgctcaaccagaactgttttcgctgcacgaagatgacgcaaattacgcagtaatgcccgcgcatacccctgtcgatttttatcaactctttgtggcggaactggcgatccttgcaaaggaatcgataagtattgaaaggctggcgtcttgtactggtttaaccatcgaacaaattagtgtgtggctgaaccgcgcagaagaagagggaagggttatccgattgggcgaaggtcattatcagttcaggtaa

SEQ ID NO: 5603 - DNA, 2100 bp, Escherichia coli
atgatggagaaacacggagctgaattgctgttacagcggatgttaagtaacaccagcgctactttcagggaagggcaatgggaagctatagatgcggtggttaatcagcggcgaaaactactggttgtacagcgcaccggctgggggaaaagtgccgtgtacttcatcgccagtaaaatcttccgcgatcgcggcgctggcccgacaattatcatctctcctttgcttgccctgatgcgtaaccaggttgccgccgctgaacggttaggtattacggctgaaacgttgaattctacaaacagggaagaatggcagcgcattagcgataagttgctgcaaggtggcgtagattgtctgctgatttcacctgaacggttggcgaatcaggattttcttgaaacggttttatatccagtcgctgaccgcatcggtttactggtggtcgatgaggcgcactgcatctctgattggggccacgatttccgcccggattaccgacgtatattagatattttgcgccaactgcctgcgaatacccctattctgggtacaaccgcgacagcgaataaccgtgtcgttgaggatatccgtcagcaattgggtgacattgtgattcagcgtggaacgctggctcgcgaaagtttggcgcttgatgccttagtcttaggagaacagtcatcccgtctggcatggttagcaacggttatccctcagttttccaaatcgggaattgtttataccctgacgactcgcgatgctgaacttgtcgccgagtggttaaggaaaaatggtatcagtgcatttgcttattacagcggcgtgacttgtgaaggtgcggaagattctaatactgccagggagtatctggagcaggcactgctggcaaataaaatcaaagtgctggtcgcgacgacggcattaggtatgggatttgataaacctgatttaggtttcgtcattcattatcagatgccggggtctattgtcggttactaccaacaggtggggcgtgccgggcgtgctatagattccgcagttggcatattgctttgtggtggtgaagaccgcgctattcatcaattcttccgtgaaagcgcctttcctgcggaggcgcaaattcatgaaatactcaacgtacttagcgagaatgacggtcttaccctacgaggcattgaacaacggacgaatcttcgttatgggcaaatagaaaaagcactgaaattattggtagctgaaaatccatcgcctgtggtgtataccgagaaattatggcgcagaactatcgtcagtttttctcctgatcatgaacgaattaaccatttgatgaatcagagaaaaagtgagttggcagacgttgaaagctatatcacgaccaaggagtgcaaaatgcaatttctgcgccgcgcactcgatgagccaagtgccgaacgttgtggtaaatgtagcagttgtcttcagcatccgctgttgtcgcccgacattgatagcgacttactccatgcggcaaatttatttattaaacacgctgacctgccattaaatctcaataaacaggtggcatctggggcttttacgcaatacggatttaaagggaacttgcctgcgggtttacaaggatctacggggcgaatcctttctcgttggggagattccgggtggggaaagcaggtagcccaggagaaaaaaacggggcgcttcagtgatgagctggtggaggcatgtgcggaaatggttcgccaacgctggaatccgcatcctgaacccacctgggtatgctgcgttccttcattaaggcacctcgacctggttcctgattttgcccggcgactggcggcgaaacttggcttaccttttattgatgccattgaaaaagtcgtggacaatccaccgcagaaaatgcagcaaaaccgttttcaccagtgtcaaaatctcgacggggcgtttgtgattacccctcctttgatgccaggtccggcgttgctggttgatgatatcgtggattctgcatggacgctgacagttctgacagcactgttacgccaggcaggttgcccgacggtttatcctcttgcccttgcttctacctcggtaaaaaattga

SEQ ID NO: 5604 - DNA, 996 bp, Escherichia coli
atgaaaaagaaaagacccgtacttcaggatgtggctgaccgtgtaggcgtgaccaaaatgacggtcagccgttttttacgcaacccggagcaggtttccgtcgctctacgcggcaagattgccgccgctcttgatgaactgggttatattcccaatcgcgcgcccgatatactctctaacgccaccagccgggcgattggcgtcctgttaccttctctcaccaaccaggttttcgcggaagtattacgcggaatcgaaagtgtcaccgacgcgcacggttatcaaaccatgctggcgcactacggttataaaccggaaatggagcaagaacgcctcgaatcaatgctctcatggaatatcgacggcctgatcctcactgaacgtacccacacgccacgcaccttaaagatgattgaagtggcggggattccggtggtggagttgatggacagtaagtcgccgtgtctcgatatcgccgtcggttttgataactttgaagcggcacgccagatgaccaccgccattattgctcgcgggcatcgccacattgcctatctcggcgcacgtctcgacgaacgtactatcatcaaacagaagggatacgaacaggcgatgctggatgcaggcctggtgccgtatagcgtgatggttgagcaatcttcttcttactcttccggtattgaactgattcgccaggcgcggcgggaatatccgcagctggatggcgtgttctgtactaatgatgacctggcggtcggcgcggcgtttgaatgtcagcgtctggggttgaaagttcctgacgatatggcgattgccggtttccacggtcatgacattggtcaggtgatggagccacggctggcgagtgtgctgacgccgcgtgagcggatgggcagcattggcgctgagcgcctgctggcgcgtattcgtggcgaatctgtgacaccgaaaatgttagatttaggtttcaccttgtcaccgggcggatctatttaa

SEQ ID NO: 5605 - DNA, 1038 bp, Escherichia coli
atggtcattaactgcgcctttattggcttcggcaaaagcaccacccgttaccatctgccgtatgtacttaaccgcaaggatagctggcatgtcgcgcatatttttcgccgccatgcgaagccggaagaacaggcccccatttattcccatatccatttcaccagcgatctcgacgaagtgctaaacgatcccgatgttaagctggttgtcgtctgcacccacgcggacagccacttcgagtacgcgaagcgcgcgctggaagccgggaaaaatgtgctggtcgaaaaaccgttcactccgacaattgcgcaggcgaaagagctgtttgcactggcgaaaagcaaagggctgatcgttacgccgtatcagaatcgtcgctttgattcctgcttcctgacagcgaaaaaagcgattgaaagcggcaagctgggagagattgtcgaagtggaaagccattttgactattaccgcccggtggcagaaaccaaaccggggctgccgcaggatggcgcgttctatggccttggtgtgcatacgatggaccagattatttctctgttcggtcgcccggatcacgtcgcttatgacatccgcagcctgcgtaataaagccaatccggacgacacctttgaagcgcagctgttttatggcgatctaaaagccatcgtcaaaaccagccatctggtgaaaatcgattatccgaaatttatcgttcacggtaagaaaggttcgtttattaaatacggtatcgaccagcaggaaaccagcctgaaggctaatattatgccgggcgaaccaggattcgcagcggatgattcggtcggtgtgctggagtatgtcaatgacgagggcgtgacggtaagagaagagatgaagccagagatgggcgattatgggcgcgtttatgatgcgttgtatcaaaccattaccaacggtgcgccaaattacgtcaaggaatctgaagttcttacgaatctggaaatccttgaacgcggttttgagcaagcttctccctccgcagtgagtctcgcgaggtaa

SEQ ID NO: 5606 - DNA, 528 bp, Escherichia coli
atggatgatctgacgatagagattctgaccgatgatgcagattatgatctacagcgattcgactgcggcgaggaagcattaaatctctttctgacgacacatctggttcgtcaacatcgcaataaaattctgcgagcgtatatcctgtgtcgcaacactccagaacgtcaggtgctgggatattacacattatccggcagttgttttgaacgagccgcactgccctcgaaatcgaaacagaaaaaaattccctacaaaaatattcccagcgtaactcttgggcgtctggcaattgatcgttcattacaggggcagggatggggagcaacactggttgctcatgccatgaaagttgtctggtcagcctctttagcggtaggtattcacggtctttttgtcgaggcgctgaatgaaaaagcccatacgttttatcagtcgctgggctttatcccattggtcggagaaaacgaaaatgcgttatttttcccgaccaaatctatagagctactttttacaccagacgattaa

SEQ ID NO: 5607 - DNA, 267 bp, Escherichia coli
atgtctgctgttaaaaagcagcgtattgatctgcgtttaactgacgatgacaaaagtatgattgaggaagcggcagcgatatctaatcagtccgtcagccaatttatgttgaacagcgcttcgcagcgagctgcggaagtgattgaacagcatcggcggatgattctcactgaggaatcctggacgcgggtgatggatgcgctgagtaatccaccgtcaccaggtgaaaagctaaaacgtgcggcaaaacgtcttcagggaatgtaa

SEQ ID NO: 5608 - DNA, 993 bp, Escherichia coli
atgaaacctcatatgaaacgtggcctgacaaaagtcgcgctggcactgatgctggctggatactgtgccgtaccagtcgctatggcggaagatgctgcctgggtcgccagtggaacgacagctgaattcgaggggaccataccctggctctatcgcgaaggggggaatgctacgattaactcggaagatgcggatcacatcaaagtgacatctgatagtaaaggtatccgtcctgcaggtagcgagtctgataaacgcctttactcaggggataccatcacgctgggttgggatatcggcgataccgaaggggatatcgatgatggttccgcaggcattgatgcgaaaacgacggcgaccatcaaatggtacagctacagtgataatgcgggtggcggtaaaacggagttgactgcggcggcaggaaaaaccagttataaaatcaccgatggcgatcgtggacgctatatcggtgttgaaatccagcctatcactcagaccggtaatcccttccagggaacttcgctgactctgctggatatttctacggccagcggtggcggcagcgatacggataatgtcgatcctggtccggttgttaaccagaacctgaaagttgccatcttcgagaaagacaccagtaccaaccttatcggtggtaatacagccattgcgcttaacaaaacgtatgtggccaaactgtactcggatgaaaaccagaacggtaaatacgacgcgggtacggatgtggacgttaccgctaactacgactttgcgtgggtctttaacggtaacagtaaacaacttgcggcggcgggcggtattgccaacgccagcttcgataacaatgacattgttattccgcaaactaacgaacaagcaagaaccagccttaacggtagtgaccgtgatggtaagaccggccttgcaatcccggcaaacggcgacggcgttcagggctatacgctgtctatcatttacaaacaccactaa

SEQ ID NO: 5609 - DNA, 8082 bp, Escherichia coli
atgtcggtatgtctgaaaccaggaaaaatcattgtgcttctgggcatgttggcagcctttatgctgtctgactttgcacgggcagaggtggaatggcagacatatcctggttctacaggcgagtttaacggtacagttcctattgccgatagcgccagcgtacccgtttatcagggaagcgttcagcttgatcctgctgcatctcatgatgtggcgttttctgctaaaccgaatgaatttagcgttgacgatgacgctgctaacctgatagttgctaatcctcaggacagtgaaggcgaccagttttctacaccacctgcgctgcgctgggaaaaccagacgccgccgaccgtcagtctggtgtgggcggatgccgccacgccggatacgccgctcaatccacagcccatcgccaaccgcagcttttgcgcgcaaggtctggccgggcgttcgctggtggcctggccacagattgatgcgcagcagaccattccactgctttatctgctgacctcgaccggttatccctatgaggggacggtggtgctggctgaccagaaagtgacgctgaatatcgcgcccgcgcagggcgatttaatttcggtgagcgccagtggttataacgaaacgctcggcgcggcaaaaaccaccgttggcggcactatcacgctgaccgtcaccaccaaagattgtcagggtaacgtcgcgggtaatattccatttattatcaagcgtaaagatgcccaaaaccgtcagggcgcggtaaataataccgcgccggtggtgctggatagcaccgagttaacgacgacggtaaccgagtatcgtggcacatcggatgctaacggtacggcaaccatcacggtgacccagcctaacggccccggtgttaaaacgccgctggtagtcggcatttccggcattgcacaaaccagtgaggcggcggtgatctttaccgtgctcaccagcccggacgtggcgcaggccacgatgtggggccatatggcggagacggtggaagcccatggttacacgttcagtagaccaaaactggcggcggaagtcagtaacgaaaatgccacggtcgtcgatcacaatgaaacctggtccacctttacctggagcggcgcagatagccattgcaccgtgctgccgggcatgcgccacttcggcgcactggcgacggtgattccctccacggtacagactgtgctcggctggccgatgcagggcgattattactggtcatcgctggcggggcttaccgggcagcaccatgcggcagatgtctctaaccgtggcgaaacgcagaagccggacagcaccacgttcctcgtgagctgcgtggataagcccgcgcctgacgtcgagccgaaaatcgtcctcacgccagaaaactatgatgacacggcgcaggcgatgaaagcgaaggtgggcgaggatgcgacgatgcgtctggccatcaccgacacgaaaaacaacgatcaaccgctggcgtattactacttctcgctacatctggatgatggcgtcaatcgtaagaatcaaaccgacactgcctgggaagcccatccggtacagattgctggcggcagtaattttcgccaggtcgacgcacatacctatgaaggcatgaccgacgccaacggccaggcttcgctcaccctgagccagcccggcggcgcgggggtgaaaacccatatcacggcaagaatgcgcagcgattttaacgccacagatgccaaagatgtgatttttaccgtaatcaccagcccggacagcgacaaagcgcggatgtggggccatatgcgcggcattattgagtccggcagtttgtataaacgcccgttgctggcggatgaaaccgagcatgaattgggaacagtgcgggaaaataacgaagactgggcgctctacgatcaaaacaccagtatgcaggcggaatgcggcgtcggtcatataccgcgccagagctcactggaaagcctgttttcagcccatcccggtaacgcgattggtactgaatatggctggcccactgcacaacagggctatttaagcgcggtggagcaagccacgcattcatcggtggatctggggaacgggagcgtcgacagctattccggctttaagccgaattacctctcctgttcgggtaatgagatggtagcgaatgttgaagtcagcaccgatcatgatgtgtctgttggcacccaagcgcaagccaaagtgggtgacaccattgtgatgaccgtgcgtacgattaactcgctcaataatatccctgtaccctttactgcattcaccattaccaaaggtatggggtataaccgagcggggcaggtgagcgggtttgatgacccgagcagtggtgcaatcacgatggataacacgcaatacggcacatcacagtcatcgaaggtttatgcgggaataaccgatgcccggggcgtggcgacggtcgagattaagcaaccacagggcgtcgggctaaaaacggtgctgagcgtaacgccggtaaattcctacctgccgaataccgttaactacagcgttatttttactaccccaaccagcccggacgttaccggcgcgcagatgtggggccatatggatgaaacgatcaccgttgattcatcaacctttacccggcctaaactggcgtcggaagtcgccagcccggacggaaccctgaccgaaaataacgaaatctgggcgcgcgtgagccaggccaatacgtccagtaccagtaaaggtggctgcgacaccaatatgttgccacgtcgttcccagctaagtgcgctgtataacgccaacagtggtaacgcggtgcaaacggcgcacggttggccaacacagcgtcagccttactggagcaactcaccggcagataaaactccacactttttcacgatagcgctgaacgatggcgcacaaactattggcggcgatacgccggtttacgtcagttgcctgaagacggcgaacaaacctgccagcagcattacgctggaggtggttgataaagcgcaatggaataccgggaatagcgcggcaacgctgaaaaaaggcgagacgctacaggttaaagtgacggtaaaagacgcacagggcaacgcgttagcggatatgccatttaccctcaatcgcggtgatggctatacccgtagcggcgaaaaacatgtggcgggcagcggcgatgcgctggttgcgccggtggtagtcaatggcgggctggcagatgaaaccacgttgaacgacactgcaacggtgtataccgccatgaccgacaatgacggcagcaaaattctcaatattacccgcccggatactcacggcaccaaaacggcgctgacggcaatgctttactctgatgcgacgaaaaaatccagcatcgacacaatctttacggtggtgaccagcccggatagccgcctggcaaaaatgtggggacatatgccggaaacggtgactgctgcggacggtacggtatttaagcgcccgctgttgttgaaggaactggcctatcagactgggcgaacatcaacgtctgaagacaatgaaaactgggcgttgtttaacattaattatgcaagtttttccacgacgtacagcggctgtggaaccaactatattccgactcaggccggtctgacgtcactgtttgctaataatgcgggcaacaccatgaaaaccgtgcagggctggccggtggcaacgcgctatttatccaacacttccgacaacggcagcatggagcagcgtaactacaaggcggtagatctcagcaatggcacgagtgcggcagtgtcatcaacgacgctggagctgctgacctgccagaccgcgccgatagccgcggtgagccaaatcctgctggaagcggcagatccggtgacgctggataccacctataacgtggtaaaagcgaaaaaaagcgaagaatccgtggtgcgcgtcatcaccaaagatgcgcaaggcaaccttgtgggcaatacggcatttatcctgacgcgagccaacagtgtaagtcgggctaattcatcggcgacgatgagtgtgggcgcgctgacggtgacggatgcgtggggaaatacgcgaaataatttccagtcaacgagtgaaaccatttacggcgtgaccggtgccgacgggtcaacgacatttaccctaaaacaggataacagtaccgggttaagaaccgatctcacggcaaaactggatacgtccagcagcgtcaaggcgatgctaccggtggtctttaccgtcgtgaccagcccggattcgccaaaagcgaatttttggggacatatggccgaaacggtgacggcctccgatggttcggtttataagcgaccgttgctgtttggcgagcttaccaacaactatgcacgatatagcacgtttgagaacggtgaaagttgggcaagattcacctcgactcagtcggctgacaccagcatgaatgggtgtggtacagattatatgccaacgctggatggtctgaagtctttgtatgacgccaatagaggtaatgcgatgaatacggtacagggatggccggtaaatatgagttatctcaccaataccccgagtaatacacaaacagggagccgttactacaatgtggtgcaactaaattctggcgcagtttcgcaaatcgtatccaccgtgctggcgttacaaacctgccgtacaacgccgttgatgactgccagccagattacgctggaagcctcagaccccgggcagtttgtcagcattgacagcacacttagcgccgtcaaagcgaagaagggggatgaggtgtcgatccgcatttcgactaaagatgcgcaggggaatttagtcggcaatacgccgtttgccctgaaacacgcgaactcgatcaatcgtcagaatgtgacgtcatcgcagaaagtgtcagtcacgactgcggcgggtgcgacggtggataccagtgcaacgaccatcctgtatggtgtaacagggccagatggaaccactacgatgacgctccgacaggatgcttccactgggttaagaaccgacttttatgctctattaaacgatactggcgtgtcgtcggacaccttgtcggtgatctttaccgtcaccaccagcccggatacgccgctggcgaccaattggggccatatggcggaaacctttaccagcagcgaaggcgtcaccttcaaacggcctttcctcaaagccgaactctctggcggtacggcgaaaacggccaataatgaagtctggtcgctcctgaccgcgactgagaaagcggacgtcagcaaggctgggtgtgatgaggcgtatcaaccgctgacgactgatatgcaggggctgtatgtcgattatcccaatggtcaactggcaacggtgctcggcttgccgactgctgcagggaactggtgggattatgacatgatggcggtagcgggcggtagctggagtaaccaggcgtttgttccgggaaatggtcagttgattcaggcatcgtccagctatacggcgatagtgatgtgtttggtagagcctcatacggaagcagtcacaatagagcttacctcaacggcgcaggatgcagcaaaatcgctcagcaatgatggacgaccgagcgctgtagcgaagaaaggtgagctgattccgttgacggtgaccgtgcgtgatagcgccgggaacccgatgccatatgccgactttaccctttcgcgtgaaacgacgctggatcgcgcgaaagcaaccgttaacacgagtgcagacgatcttaccgtaacggcattggttccggtgagtagggatagcgtgttgacagcaagtggagcaaaaactctcgcaacgacgggcagtgatggcacagccacctttgaggttgggcagtactctactaccgggttggcgacgccgttaaccgtgacgctggcgcgtgatacaacgaaagtcgccacgctggatgttatctacacggtgattaccagcccagattcaccgagtgctaaattctgggggcatatgccggacacctttaccagttcggcgggcgtcaccttcaaacgacccctgctgaaaaccgaaaccagctcaggcttatcgattagttctaacggcgaagtttggtcgtatatgagcaacttgcaaaatttaacatctacagattgcccactcgagaatcaaccgcgcagtaaggaactgttggatttgtatagtgatcatccgaacggcgcaataatgactgaccttgggttaccgatgaatgcgggtaactggtgggcttatgatatggccatactgggtacaacaacgtggtcttatcagactgtcagcctgagaacaggagctatcgcgaagaattctgcaaccaacgcactgatgctctgtctggcgcagccgcatccggcaggcgttagcgtaacattgacgtcatccgcactggatgacgccagaaccctcagcaatggcggccgacctagcgcgtcagtgaaaaaagataacccattgccaattgtggttatggtcaaagatcgtgatggcaacccgctggcgggcgaagcgataacgctcaggcgtgataatgcgatgagccgctcaggaaccattgtaaacacggcagcaaatgtgatggtattgacggaactggcacccgtgtcggcaacattcactctcgcctcacacggcacgcaatggcttggttttaccggcagcgatggtacggcgatattcaatgttgaacagcctgatactgtcggcctggcaacaccgtttaccgccatcctggcacgtgatacggaaaccaccactgtccttgatgcgatcttcaccgttgtcaccagccctgattccgcaatggcggcctactggggtcatatgccggatacggtaacggcagaaaacggtgtggtctttgaaagacctaaattgtggaaagagctgccgtcgacatcaggggttagcaaggtcaatagtaacaatgaagtctggcccgtgtttaacgcaacgcagagggctgacagcaatctcagcccttgtgaagcggcacgtcggccattgagtgatgatttagaatcgctctatgctcgctatccggggaacacgctgacgacacaaatcggttggtctacgcagtatacatggtgggcgctggataactggctgggaggcagtaatccgcaggtagtcggtctgaataatggttcagcgtgggggacggtgaataccgcgtatcaagggtgcctggttaacccgcgtgcgactgtctccagcgtcacgttgacatcgacggcactggatagcagtacgcaggcggcgaaggtgaaaaaaggcgacgccgttcccgttgtcgttaccgtgaaagacagtgtcgggaaaccagtgccgaatatttcgtttatcctcaaacgtggtgacgctacgccgcgtaatagcggggcgacgttgtatggcgatgtggatacaatggacgatttgactgtacaaccctcatccggtgcggcagtcacgttggctgatagcgggaatacaatcgatggagttactggagcagacggtacagcaagttttaccgttggtcaggataatacgccaggatataaaacgccgttgacggtgacgctgacggataacgccacaataacggcgacgctggacacgattttcaccgtgccgaccagtcctaatgtcgccacggcgtatttctggggtcatatggcggataccgccacggtaagtggcaagatgctgcatcgcccgctattaaaatcggagttgccgtcaggggttaccgcagcagcaacgcccaatgtgaataatgaaacctgggcgctggcacatgttatagattccactaaatgggatgtcgcacggcagtgcggtagtatgaataacgtgccgagcagtgccgaattacaaacattacactccggctttagcacattgggatggccgtcatcgataagcttcccgtatttatctactgataaggctggatcgttctattgtggtgttgaggaaggctctggcagtctcaactgtggcattcagcctgcgaaaacgccggggtttgcaacctgtttccaataa

SEQ ID NO: 5610 - DNA, 1173 bp, Escherichia coli
atgagcgcaaatgcggagactcaaaccccgcagcaaccggtaaagaagagcggcaaacgtaagcgtctgctcctccttctcaccttgctctttataattattgccgtagcgatagggatttattggtttttggtactgcgtcatttcgaagaaaccgatgacgcatacgtggcagggaatcagattcaaattatgtctcaggtgtctggcagcgtgacgaaagtctgggccgataacaccgattttgtaaaagaaggcgacgtgctggtcactctcgacccgacagatgctcgccaggcgtttgaaaaagccaaaactgcactggcttccagcgttcgccaaacccaccagctgatgattaacagcaaacagttgcaggcgaatattgaggtgcaaaaaatcgccctcgcgaaagcacaaagcgactacaaccgccgtgtgccgctgggcaatgccaacctgattggtcgcgaagagctgcaacacgcccgcgacgccgtcaccagtgcccaggcgcaactggacgtcgctattcaacaatacaatgccaatcaggcgatgattctggggacgaaactggaagatcagcctgccgtacaacaggctgccaccgaagtacgtaacgcctggctggcgctggagcgtacccgtattgtcagtccgatgaccggttatgtctcccgccgcgcggtacagcctggggcgcaaattagcccaacgacgccgctgatggcggtcgttccagccaccaatatgtgggtggatgccaactttaaagagacgcagattgccaatatgcgtatcggtcaaccggtcaccatcaccaccgatatttacggcgatgatgtgaaatacaccggtaaagtggttggtctggatatgggcacaggtagcgcgttctcactgcttccggcgcaaaacgccaccggtaactggatcaaagtcgttcagcgtctgcctgtgcgtattgaactggaccagaaacagctggagcaatacccgctgcgtatcggtttatccacgctggtgagtgtcaataccactaaccgtgacggtcaggtactggcaaacaaagtacgttccacaccggtcgcggtaagcaccgcgcgtgaaatcagcctggcacctgtcaataaactgatcgacgatatcgtaaaagctaacgctggctaa

SEQ ID NO: 5611 - DNA, 708 bp, Escherichia coli
atgaatacccaacgtaaatacgggagaacctggcattaccccttctctccaggcaccaccagcgatgaccgcattaacaccgattactggcaggatttacagaccatcacgcaattggtgcacacagaaaaactcgatggcgaaaataactgccttaaccgctacggcgtgtttgcccgctcccatgccacgcctacgcagtcggcatggacctataaaattcgccaacgctggcaactgctgaaaaacgatctcggcaacctggagttgtttggtgaaaatctctacgccgttcattccattgaataccgcgcgctggaacaggacttttacctgtttgccgttcgctgccaggatatgtggctgagctgggaagaggtgcagttttacgccgctctgtttgatttcccctgcgttcccgaaatctccggcccgcagccggggaatgatgaaaaaagctggcaacgtgattttctggcgctgaccaatgcgcgcggcacattcgatccctgggatacgcaaacctgtcaaccctgtacgctggaaggcattgtcagccgaaatcatgatgcgttttctgtcgctgacttttcgcataacgtcttcaagtatgtgcgcaaaaatcatgtcaaaaccactgtgcactggaaacgccactggcaacgggcgcggatggcccatgagttcgtttatggagaacagtcatga

SEQ ID NO: 5612 - DNA, 240 bp, Escherichia coli
atggcaataaagaaaacggataacaccccacaaaacgtgctcaaacaaaccacacaaatgcgtatgtgggtcatcattggcggcatcagcgcactgatttccgtgatatgtaaagttttatcttctggctatcttgaaccttttgacttcggtcaggctgcgttaggcgttgtctgcctgggatatgcgatatcgctgtcgaaaaaaatcaagcaattacgccattcgaataaacagtaa

SEQ ID NO: 5613 - DNA, 204 bp, Escherichia coli
atgtcatcgacactagtgtcgatgacatgtgatgacagtatttatcgtagtaaggcagagagaatccgttttctaatgaatattttatcgttgccagtccacatctgggtacttttttccgacaagtcgttctggtggtataaaaaagtaattgccagtaacggggaggatttaagggaagcaaccgtgccggatacggcgtga

SEQ ID NO: 5614 - DNA, 873 bp, Escherichia coli
atgcgctatttcatactaatattcacactcgtgtgttcctttgttgcagcccaaccaactattgtcccacaattacagcaacaagttacggatcttacgagtagcttaaactcacaagaaaagaaagaactgacgcgcaagctagaatctattttcaataatacccaagtacaaattgctgtattaattattcccacaaccaaagacgagacaattgaacaatatgctgcaagggtttttgacaattggcgtttaggagatgccaaacgcaatgatgggatactgatcattgttgcctggtcggatcgcactgtccgcatccaggtaggttatggactggaagaaaaggtaaccgatgctctggctggagatatcatccgtagcaacatgatacccgcatttaaacaacaacaattagctaaaggattagagttagctataatcgctttgaataaccgactcacttcacaacaccaatattcggttaatccttcagaaagtgaatcagcatcttccagcgatcattactactttgctattttttgggtatttgcagtgatgttcttccctttctggttttttcatcaaggcagtaatttttgtcgcgcatgtaaaagcagtgtctgtatttcagcaatctatcttttagatttattcctgttctccgataaaactttttccattgctgtatttttcttcttttttactttcaccaccattatggtctttacctgtttatgtgtacttcagaaaaaagcatctggtagaagttatcattcagacaacagcggttccggtggcggctcaagtggcggcggatttagcggcgggggcggttcttctggcggtggcggcgcgtccggtcgttggtaa

SEQ ID NO: 5615 - DNA, 1299 bp, Escherichia coli
atgtccaaaatcgtaaaaatcatcggtcgtgaaatcatcgactcccgtggtaacccgactgttgaagccgaagtacatctggagggtggtttcgtcggtatggcagctgctccgtcaggtgcttctactggttcccgtgaagctctggaactgcgcgatggcgacaaatcccgtttcctgggcaaaggcgtaaccaaagctgttgctgcggttaacggcccgatcgctcaggcgctgattggcaaagatgctaaagatcaggctggcattgacaagatcatgatcgacctggacggcactgaaaacaaatccaaattcggcgcaaacgcaatcctggctgtatctctggctaacgccaaagctgctgcagctgctaaaggtatgccgctgtacgagcacatcgctgaactgaacggcactccgggcaaatactctatgccggttccgatgatgaacatcatcaacggtggtgagcacgctgacaacaacgttgatatccaggaattcatgattcagccggttggcgcgaaaactgtgaaagaagccatccgcatgggttctgaagttttccatcacctggcaaaagttctgaaagcgaaaggcatgaacactgctgttggtgacgaaggtggctatgcgccgaacctgggttccaacgctgaagctctggctgttatcgctgaagctgttaaagctgctggttatgaactgggcaaagacatcactctggcgatggactgcgcagcttctgaattctacaaagacggtaaatacgttctggctggcgaaggcaacaaagcattcacctctgaagaattcactcacttcctggaagaactgaccaaacagtatccgatcgtttccatcgaagacggtctggacgaatctgactgggacggtttcgcataccaaaccaaagttctgggcgacaaaatccagctggttggtgacgacctgttcgtaaccaacaccaagatcctgaaagaaggtatcgaaaaaggtatcgctaactccatcctgatcaaattcaaccagatcggttctctgaccgaaactctggctgcaatcaagatggcgaaagacgctggctacactgcagttatctctcaccgttctggcgaaactgaagacgctaccatcgctgacctggctgttggtactgctgcaggccagatcaaaacgggttctatgagccgttctgaccgtgttgctaaatacaaccagctgattcgtatcgaagaagctctgggcgaaaaagcaccgtacaacggtcgtaaagagatcaaaggccaggcataa

SEQ ID NO: 5616 - DNA, 1638 bp, Escherichia coli
atgacaacgaactatatttttgtgaccggcggggtcgtatcctctctgggtaaaggcattgccgcagcctccctcgcagccattcttgaagcccgtggcctcaatgtgaccatcatgaaactggatccgtacatcaacgtcgatcccggtactatgagcccaatccaacacggggaagtgttcgttactgaagacggcgctgaaaccgacctggacctggggcactacgagcgtttcattcgtaccaaaatgagccgccgcaacaacttcaccacgggtcgtatctactctgacgttctgcgtaaagaacgccgcggtgactatctcggcgcaaccgtacaggttattccgcacatcactaacgctatcaaagagcgcgtgctggaaggcggcgaaggtcatgacgtagtactggtcgaaatcggcggtactgtcggtgatatcgaatccctgccgttcctcgaagcgattcgccagatggctgttgaaattggccgtgagcacaccctgtttatgcacctgacgctggtgccgtacatggcagcgtcaggtgaagtcaaaaccaaaccgactcagcactctgtaaaagagctgctttcaatcggtatccagcctgatatcctgatttgtcgttcagatcgcgccgttccagcgaacgaacgtgcgaagattgcattgttctgtaatgttccggaaaaagcggttatttctctgaaagacgtcgattccatctataaaattccgggcctgttgaaatctcaggggctggacgattatatttgtaaacgattcagcttaaactgcccggaagcgaatctgtccgaatgggaacaggttatcttcgaagaagcgaatccggtaagtgaagtcaccattggtatggtcggcaaatacattgagctgccggatgcatacaaatccgtgatcgaagcactgaaacacggtgggctgaagaatcgtgtcagcgtcaacatcaaactgatcgattcacaagatgttgaaacgcgcggcgttgaaatcctcaaaggtctggacgcaatcctcgtacctggcggtttcggctatcgtggcgtagaaggcatgattacgaccgcgcgttttgcgcgtgagaacaatattccttatctgggcatttgcctgggtatgcaggtggcgttaattgattacgctcgccatgttgccaacatggagaacgccaactctacggaatttgtgccagactgtaagtacccggttgtggcgctgattaccgagtggcgcgatgaaaacggcaacgttgaagttcgtagcgagaagagcgatctcggcggtaccatgcgtctcggcgcacagcagtgccagttggttgacgatagcctggttcgccagctgtacaatgcgccgacaattgttgagcgtcatcgtcaccgttacgaagtcaacaacatgctgttgaaacagattgaagatgcaggtctgcgcgttgcgggccgttccggggatgatcagttggtcgagatcatcgaagttccgaatcatccgtggttcgtggcttgccagttccatccggagtttacttctactccacgtgatggtcacccgctgtttgctggctttgtaaaagccgccagcgagttccagaaacgtcaggcgaagtaa

SEQ ID NO: 5617 - DNA, 792 bp, Escherichia coli
atgaatcaaatcgaccgtttgctcaccatcatgcagcgcctgcgcgacccggaaaacggctgcccgtgggataaagagcagacatttgccaccattgcgccttacacccttgaagaaacctacgaggtgctggacgccatcgcccgtgaagattttgacgatctgcgcggtgaactgggcgatctgctgttccaggtggtgttttacgcacaaatagctcaggaagaagggcgctttgactttaatgatatttgcgctgctattagcgataaattagagcgtcgccatccgcatgtttttgctgacagttctgccgaaaatagtagtgaagtgcttgcccgttgggagcaaatcaaaaccgaagagcgcgcgcagaaagcgcagcattcggcgctggacgatattcctcgtagtttaccggctttaatgcgtgcgcaaaaaatccagaaacgttgcgccaacgttggtttcgactggacgacgcttggtccggtagtcgataaagtctacgaagagatcgacgaggtgatgtacgaggcgcggcaggctgttgtcgaccaggctaaactggaggaggaaatgggtgacctgctgtttgccacggtcaatctggctcgtcatttagggacaaaagcggaaatcgcattgcaaaaagcgaacgaaaaattcgagcgtcgttttcgcgaagtggagcgtattgttgccgcgcgtggactggaaatgacaggtgttgacctcgaaacaatggaagaagtctggcaacaggtaaaacggcaggaaattgatctctaa

SEQ ID NO: 5618 - DNA, 2235 bp, Escherichia coli
atggttgcggtaagaagtgcacatatcaataaggctggtgaatttgatccggaaaaatggatcgcaagtctgggtattaccagccagaagtcgtgtgagtgcttagccgaaacctgggcgtattgtctgcaacagacgcaggggcatccggatgccagtctgttattgtggcgtggtgttgagatggtggagatcctctcgacattaagtatggacattgacacgctgcgggcggcgctgctattccctctggctgatgccaacgtagtcagcgaagatgtgctgcgcgagagcgtcggtaagtcggtcgttaaccttattcacggcgtgcgtgatatggcggcgatccgccagctgaaagcgacgcacactgattctgtttcctccgaacaggtcgataacgttcgccggatgttattggcgatggtcgatgattttcgctgcgtagtcatcaaactggcggagcgtattgctcatctgcgcgaagtaaaagatgcgccggaagatgaacgtgtactggcggcaaaagagtgcaccaatatctacgcgccgttggcgaaccgtcttgggattgggcaactgaaatgggagctggaagattactgcttccgttatctccacccgaccgaatacaaacgcatcgcaaaactgttgcatgaacgccgtctcgaccgcgaacactatatcgaagagtttgtcggccatctgcgcgctgagatgaaagctgaaggcgttaaagccgaagtgtatggccgtccgaaacacatctacagcatctggcgcaaaatgcagaaaaagaacctcgccttcgatgagctgtttgatgtgcgtgcggtacgtattgtcgccgagcgtttacaggattgttatgccgcactggggatagtgcacactcactatcgccacctgccggatgagtttgacgattacgtcgctaacccgaaaccaaacggttatcagtctattcataccgtggttctggggccgggtggcaaaaccgttgagatccaaatccgcaccaaacagatgcatgaagatgcagagttgggtgttgctgcgcactggaaatataaagagggcgcggctgctggcggcgcacgttcgggacatgaagaccggattgcctggctgcgtaaactgattgcgtggcaggaagagatggctgattccggcgaaatgctcgacgaagtacgtagtcaggtctttgacgaccgagtgtacgtctttacgccgaaaggtgatgtcgttgatttgcctgcgggatcaacgccgctggacttcgcttaccacatccacagtgatgtcggacaccgctgcatcggggcaaaaattggcgggcgcattgtgccgttcacctaccagctgcagatgggcgaccagattgaaattatcacccagaaacagccgaaccccagccgtgactggttaaacccaaacctcggttacgtcacaaccagccgtgggcgttcgaaaattcacgcctggttccgtaaacaggaccgtgacaaaaacattctggctgggcggcaaatccttgacgacgagctggaacatctggggatcagcctgaaagaagcagaaaaacatctgctgccgcgttacaacttcaatgatgtcgacgagttgctggcggcgattggtggcggggatatccgtctcaatcagatggtgaacttcctgcaatcgcaatttaataagccgagtgccgaagagcaggacgccgccgcgctgaaacagcttcagcaaaaaagctacacgccgcaaaaccgcagtaaagataacggtcgtgtggtggtagaaggggtcggtaacctgatgcaccacatcgcgcgctgctgccagccgattcctggagatgagattgtcggcttcattacccaggggcgcggtatttcagtacaccgcgccgattgcgaacaattggcggaactgcgctcccatgcgccagaacgcattgttgacgcggtatggggcgagagctactccgccggatattcgctggtggtccgcgtggtggctaatgatcgtagtgggttgttacgtgatatcaccaccattctcgccaacgagaaggtgaacgtacttggcgttgccagccgtagcgacaccaaacagcaactggcgaccatcgacatgaccattgagatttacaacctgcaagtgctgggtcgcgtgctgggtaaactcaaccaggtaccggatgttatcgacgcgcgtcggttgcacgggagttaa

SEQ ID NO: 5619 - DNA, 2757 bp, Escherichia coli
atgaccaactacagcctgcgcgcacgcatgatgattctgatcctggcaccgaccgtccttattggtttattgctgagtatctttttcgtcgtgcatcgctataacgacttgcagcgtcaactggaagatgccggtgccagcattattgagccgcttgcagtttctactgaatatggcatgagtctgcaaaatcgcgaatctatcggtcagttaataagcgtactgcatcgtcgccattctgatattgttcgcgcgatttcggtttatgatgaaaataaccgactctttgtcacctccaattttcatcttgatccctcatcaatgcagctcggcagcaacgtgccgtttcctcgccagctcactgtcactcgtgacggcgatattatgatcctccgcacgccgattatttctgagagttactcccccgacgaatcgcccagtagcgatgccaaaaatagtcaaaatatgttgggatatattgcgcttgagctggatcttaaatcggttcgcttgcagcaatataaagagatctttatttccagcgtgatgatgctgttttgtatcggtattgcgcttatttttggctggcgcttaatgcgcgatgtaaccggtccgattcgcaacatggtgaataccgtcgaccgcatccgtcgcgggcaactcgacagccgggtggaaggatttatgctcggcgagctggatatgctgaaaaacggtatcaactcgatggcaatgtcgctggcggcttatcacgaagagatgcaacacaatatcgaccaggcgacgtccgatctgcgtgagacgctggagcaaatggagattcagaacgttgagttggatctggcgaaaaagcgcgcccaggaagcggcgcgtattaaatccgagtttctggcaaatatgtcacacgagctgcgtacaccactgaatggtgttattggctttacccgcctgacgctgaaaacagaattaacaccaacgcagcgcgatcacctgaatacgattgaacgttcggcaaataatttgctggcaattattaatgatgttctcgacttctcgaaactggaagccggtaagctgattctggaaagtattccgttcccactgcgcagcacgctggatgaagtcgttacccttctggcacactcttcccacgataaagggctggaattgacgctcaatattaagagcgacgtccccgataacgtgattggcgacccgctacgtttacagcaaatcatcactaacctggtggggaacgcgattaaattcaccgagaatggcaacatcgatattctggtggaaaaacgtgcgctgagtaataccaaagtgcaaattgaagtgcagattcgggataccggcattggtattcctgaacgcgatcaatcgcgcttattccaggccttcagacaggctgatgccagtatttcccgccgtcatggtggcaccgggctggggctggtgattacacaaaaactggttaatgaaatgggcggtgatatttcgttccatagcctgccgaatcgtggttcaactttctggttccacattaatctcgatctgaacccgaacattattatcgaagggccatccacccagtgcctcgctggtaagcgcctggcctatgtcgaaccaaactccgcagcagcacaatgcacgctggatattttaagtgaaacgccgctggaagtggtttatagcccaacgttctccgcgctgcctcccgcgcattacgacatgatgttgttaggcatcgcggtgaccttccgcgagccgctaacaatgcaacatgagcgattagcgaaagcggtatcgatgaccgatttcctgatgctggcacttccttgccatgcacaagtcaatgctgaaaaacttaagcaagatggtatcggcgcgtgtctgctgaaaccattaacacctacgcgcctgttgcctgccctgacggaattttatcatcacaaacaaaacacgcttttgcctgtaaccgatgaaagtaagctggcaatgacagtcatggcggttgatgacaaccccgctaacctgaaacttatcggcgcattgctggaagatatggtgcaacatgtggaactttgcgatagcgggcatcaggcagttgaacgggcgaaacagatgccgttcgatttaatcttaatggatattcaaatgccggacatggacggcattcgggcatgtgagctcatccaccagctcccgcatcagcagcaaacgccggttatcgcggtaacggcgcatgcgatggccgggcaaaaagagaaactgcttggcgcggggatgagtgattatctcgccaaaccgatcgaagaagagcgattgcataatttgctgttgcgctacaagcctggcagcggtatttcctctcgcgtcgtgacgcccgaagtcaacgaaattgtggtcaacccgaatgcgaccctcgactggcaactggcactacgccaggcagcaggaaaaaccgatttagcgcgcgatatgctgcaaatgttactcgatttcctgcctgaagttcgcaacaaagttgaggaacagctggttggagaaaacccggaaggcctggttgatttgattcataaactgcatggcagttgcggctatagcggtgtaccgcgtatgaagaatctctgccaactgatcgaacaacagctacgtagcggtactaaagaagaagatttggagccggagctgctggaactgttggacgagatggataatgtagcgcgcgaagccagcaaaattctcgggtaa

SEQ ID NO: 5620 - DNA, 1341 bp, Escherichia coli
atgacgacacaatccagtcctgttattactgatatgaaagtcattccggtcgccggacatgacagcatgttgcttaatattggtggtgcacataacgcatatttcacccgcaatattgtggtactcaccgataatgccgggcataccggcattggtgaagcgccgggcggagaggtgatttatcaaacactggtcggggctattccgatggtgctgggccaggaagttgcgcgcctgaataaagtggttcagcaggtgcataaaggtaatcaggcagccgattttgataccttcggcaaaggtgcctggacttttgaattgcgcgttaatgccgtagcggcgctggaagccgccttgcttgacctgttaggtcaggcgctgaatgttccggtctgcgaactgttagggccaggcaagcaacgtgatgctattaccgttctcggttatctgttttatatcggtgatcggaccaaaaccgatcttccttatctggaaaatacgccgggcaaccatgagtggtatcagttgcggcatcagaaagcgatgaacagcgaagccgttgtgcgtctggcggaagcctcacaggatcgctatggctttaaagatttcaaacttaagggtggcgtgttacctggcgagcaagaaatcgacactgttcgtgcattgaagaaacgcttcccggatgcgcggattaccgttgatcccaatggtgcctggctgcttgatgaagccatttctctgtgcaaagggctgaatgatgttcttacctatgcggaagacccgtgcggcgctgagcagggtttctccggtcgtgaagtgatggcggagtttcgacgggcgaccggcttgcccgtcgcgaccaacatgattgccaccaactggcgcgaaatgggtcatgcggtgatgctcaatgcggtagatattccacttgccgatccgcacttctggacgctttccggtgcagtccgcgtggcgcaactttgcgacgactgggggctgacctggggctgccattctaataaccactttgatatctctctggcgatgtttacccatgtgggcgcggcggcaccgggtaatcctaccgctatcgatacccactggatttggcaggagggcgattgtcgtctgaccaaaaatccgctggagattaaaaacggaaaaattgccgttcctgatgcgcccggtctgggcgtggaactggactgggaacaggtacaaaaggcacatgaggcctataaacgtctgcctggcggtgcgcgtaacgacgcaggcccgatgcagtacctgatccccggctggacctttgaccgtaaacgccccgttttcggccgtcattga

SEQ ID NO: 5621 - DNA, 1266 bp, Escherichia coli
atggcactgactgacgcaaaaatccgggctgcaaagcccactgacaaggcttataaactcactgacggggctggcatgttcctgctggtacatcctaatggttcccgttactggcgtctccgttatcgtattctgggtaaggagaaaaccctggcacttggtgtgtatccggaagtttctctctccgaagctcgtacaaaacgggatgaggcccgaaaactgatttcggagggggttgacccttgcgaacagaaaagagctaaaaaagtagtccctgatttacagctctcttttgaacatattgcacgacgctggcatgccagtaataaacaatgggcacaatcacacagcgataaagtactcaaaagcctcgagactcacgttttcccctttatcggcaaccgggatatcacaacactcagtaccccggatctgcttatccctgttcgtgctgcagaagttaaacaaatttatgaaatcgccagtcgtctgcagcaaagaatatctgctgtaatgcgttatgccgtacagtctggcatcatcagatataacccggctctggatatggctggtgcattgaccacggtaaaacgccagcatcgccctgctctggatctttcacgcctgcctgaacttctgtcgcgtattgacggttataaaggccagcctgtcacccgactggcagttatgctgaatttactggtttttattcgttccagtgaactcagatatgcccgctggtctgaaattgatattgacaatgccatgtggactattccagccgaacgcgaacctctgccaggcgtaaaattttcataccggggctccaagatgcgaacaccacatcttgtgccactcagccaacaggctgtagccatactggcagaacttcagacatgggcaggtgaaaatggtctgatctttacgggagcacacgacccacgtaaaccaatcagtgaaaataccgtaaataaggccctcagagtgatggggtatgacacaaccaaggaagtctgtggccatggattccgggcgatggcgtgcagtgcattgattgaatccggcttatggtcaagagatgcggttgaacgtcagatgagtcatcaggagcgcaacggagtacgtgccgcgtatattcataaagcagaacatctggaagaacgtcggcttatgctgcaatggtgggcagattttctggatgcaaacagggaggagtgtatcagtccgtttgaatatgcaaaagttaacaatccactgaaaaggtga

SEQ ID NO: 5622 - DNA, 636 bp, Escherichia coli
gtgttttcttattactttcaaggtcttgcacttggggcggctatgatcctaccgctcggtccacaaaatgcttttgtgatgaatcagggcattcgtcgtcagtaccacattatgattgccttactttgtgctatcagcgatttggtcctgatttgtgcggggatttttggtggcagcgcgttattgatgcagtcgccgtggttgctggcgctggtcacctggggcggcgtagccttcttgctgtggtatggttttggcgcttttaaaacagcaatgagcagtaacattgagttagccagtgccgaagtcctgaaacaaggcagatggaaaattatcgccaccatgttggcagtgacctggctgaatccgcatgtttacctggatacttttgttgtgctgggcagccttggcgggcaacttgatgtggaaccaaaacgttggtttgcgctcgggacaattagcgcctctttcctgtggttctttggtctggctattctcgcagcctggctggcaccgcgcctgcgcacggcaaaatcacagcgcattatcaatctggtagtgggatgtgttatgtggtttattgccttgcagctggcgagagacggtattgctcatgcacaagccttgttcagttag

SEQ ID NO: 5623 - DNA, 294 bp, Escherichia coli
gtgataggcatagataatacttatccgacaattatttttgatcagttgattagtctcggagataagtacgaaggcgtgaccatccagccagttgagttcagcgaaaatggcgttatcgataatctttttgaccgtcagttagattttattatctccccacagcatgtatctgcacgagttcaggaactggaaaacctgactatcagtgaactaccaccgctgcgattgggctttctcgtttctcgccgttatgaagggcgacaggagcaagagctgcttcaggagctgccctag

SEQ ID NO: 5624 - DNA, 1581 bp, Escherichia coli
atgaaacaaaagaaagcctggagtttttttcagagcctggggaaggcatttatgtatcccattgctctgctaagtgtatgtggcatgatgctagggctgggaagtggtttagccagtgatgatatggcaaagttaattccatttctggctattccaataattaaaaccatacttgatttcattgttagtcttggtttgtttgcctttgttaatttacctgtattgtttgcgatagcgattcccttaggattattaaaagataaagaggataaagcctatggtgctttttctggcttaattggttttatggcgatgcatctgggaacgaacttttatcttaaacagcacgacttattggtcgttgctgaccaaatgtcgacacatgggcaaaccatcattctggggatccagtcctacaataccagcgtgttggggggaattgttgctgggttattagtcgccagcatgtataaaaagatcgttaatttacgcattcctgaatcgttaggtttttatagcggcccacgtctggtgcctatcattacactgattgtgatgagtggatttggtctgatcattccttttatctggccgccgtttttcaatcttttcatgctcattggacactggatttcaacttccggtcctgttggttatttcttctatgcagttgccgaacgcgtgacgattccttttggcttaaaccatctggtgacgtcagttttccgctttacgccaatcggcggttcggctgtgattggcggcgaagaatattacggcaccctgaacatgtttatggcgtacgtcaaagagaatgcggtcattccgctggatttggcggggaaaatggagcagggcaaactgatgattcagtatggtctggctggtgccgcgctggcgatgtatcgcactgctcatgctcaaaacagaaaggctatcaaagcattgcttatttccggggtgcttacggtgattattggcggcgtcagcgaaccgattgagtttctgttcttatttgtcagtccactgctgtttgtcttccatgcctttatgaatggattcgctaacatggttctaccatatatgggggtgaagatgggatttactggcgatctgattcaatttattagctttggcgtattgcgtggcacaagaacaggttggccgatcgcggtgtgtgtcgaagtggcctatttcttcatttattactttgtgttccgttggaccattcttaaatttaacctgatgaccgtaggccgtgaagagtccagtcctgtcacgctgaacgctcacgaagatacggctatagcggatatcccaactcctgataaatcagagctgcaagcggcggagcagatggttaaggcacttggtggtaaagagaatattaagtcactggataattgcgtaactcgtttacgtttaacaatcgcagatatgggattgattgacgaagttgcaataaaaatagctggcgggattgcggttgttaaacttgatcaaaataccctacaagtcattatcggcactaaagtcatcgccctgcgtcgggatatggataactatatggggatatactga

SEQ ID NO: 5625 - DNA, 948 bp, Escherichia coli
atgaaaaatgttctggtcaccgtccccagcttttcagcacgctgtgtttccgccagcaagttgctaagagagaataattttaatcttattattaagaataatgtggagcatctgcttaaatcagaatccactgcattacgagaatctatttgcgcggtcatcgccggaaaagatggttatcaggcggacacgctatcattgctgtctggtgtgaaaataatatcgagattcgggacggggatagacaatattgatcttcgtgcggcacagcaatccggtattgttgtcaataatgcggttgggattaattcaaatgcggttgcggaatttatcattggacttatcttcgcgagcatgagaaatatccctggcagctatcatgcgatgcaaaatggctactggggtgagtcgcatggctgtgaattacaagggaaacggattggcctggttggctacggtaatataggtaaaattctggcgaaaaggttatccggttttgatgttgagcttttagcttttgacaaacaacccgactatcaggttgctgacaaagctggagttcagtttgtatcaattgaagatatctttatgcagtcgcatgtcatcattgttcttttgcctttttcttctgagctggagaacttcattagtcataaatatttgtcgatgatgcgcaatggtgctctgatcatcaatgccgcaaggggaaagttgctggatgagggcgctttacttcaggtgattgaagaacgaaatgtgtttgcggcgctggatgtgtttagctctgaaccgttggcgcaatttagcccactgctacatgccaaaaatatcattacaacgccgcatattgcggccgccaccgttgagtcataccagcaaaccgggatacacgttgcccagtcgataattgattacttcgcaggaagggagataaaaaatgtgttgtga

SEQ ID NO: 5626 - DNA, 1518 bp, Escherichia coli
atgtctgaacgagaaacacggggagccaatgaggctattgattttaacgatgaactgagaaatcgccgcgaaaaactggcagcactacgtcagcaaggtgtggcgtttcccaatgattttcgccgcgaccatacctctgaccagttgcacgaagagtttgatgcgaaggataaccaggaactggaatccttaaacattgaagtctcggttgctggccgaatgatgacccgtcgtattatggggaaagcctcctttgtaacgttgcaggatgtcggtggccgtattcaactgtacgttgcgagagatagcctgccagaaggtgtttataacgatcagtttaaaaaatgggatctgggtgacattatcggtgcccgcggtacgctgtttaagacgcaaacgggtgagctttccattcactgtactgagctgcgcctgctgactaaagcactacgtcctttaccagataaattccatggtctgcaggatcaggaagtccgttatcgtcaacgttatctggacctcatcgctaacgataaatcccgtcaaacgtttgttgtccgttcaaaaattctggccgctatccgtcagttcatggtcgcgcgcggctttatggaagtagaaaccccgatgatgcaggtaattccaggtggggcatctgctcgcccgtttattacccatcataacgctctggatttagatatgtacctgcgtatcgcgccggagctgtatctgaaacgtctggttgtaggcggttttgaacgggtattcgaaatcaaccgtaacttccgtaatgaaggtatttctgttcgccataatcctgagttcacaatgatggaactctacatggcatatgcggattaccatgatttgattgaactgacggagtcactgttccgcaccctggcacaagaggtactgggtaccactaaagtcacttatggcgagcatgtgtttgatttcggcaaaccgtttgaaaaactcaccatgcgcgaagcaatcaaaaaatatcgtccagaaaccgatatggcggatctggataattttgatgctgctaaagcattagctgaatctatcggtattacggtagagaaaagctggggactggggcgtattgttacggagatctttgatgaagtggcagaagcacatctgattcagccaacctttattacggaatatccggcagaagtgtccccgctggcgcgccgtaatgatgttaacccggaaatcaccgaccgttttgaattcttcatcggtggtcgtgaaattggtaatggttttagcgaattaaacgacgcagaagatcaggctgaacgtttccaggaacaggttaacgctaaagctgcaggtgacgacgaagccatgttctatgacgaagattacgtgactgcgctggaatatggtctgccgccaaccgctggtctgggtattggtatcgaccgaatgattatgctgtttacaaacagtcatactattcgcgacgttattctcttcccggcgatgcgcccacagaaataa

SEQ ID NO: 5627 - DNA, 273 bp, Escherichia coli
atggaaatacgcgaaggccacaataaattttacattaatgacgaacaaggcaagcaaatcgctgaaattgtctttgtgccgaccggagagaatttagcgattatcgaacataccgatgtcgatgaaagcctgaaaggacaagggattggtaaacagctggttgcgaaattcgtggaaaaaatgcgtcgggaaaaacgaaaaattatcccactatgcccatttgcgaaacacgaatttgataaaacacgggagtatgatgatattcgcagttga

SEQ ID NO: 5628 - DNA, 3930 bp, Escherichia coli
gtgaacagaatatattcacttaagtattgtcaccttactcaagggcttatagctgtatcagaattagcatcccgagtatcctctaaaaccggtcgaaaacttctcgctatatttatagtctctgccttgtcttatggtgcggctgaatatgcctgtgcagcacagatggacacccgaaatttctggatccgtgattatcttgatctggcacagaataaaggtgcatttcagcccggagcatacggggtaaaaacgccattaaaaaatgggggagaattcagttttcctgaagtaacaatccctgatttttctcctgtatccgctaaaggtgcaacaactgctattggtaatgcctacagtgttacagcaagtcataatggcactattcaccatgccattaaaactcagacatggggacagtcagattatcattatgttgatcgtgtgaccaaaggtgactttgcggtccagcgtctggataagtttgttgttgaaacagcgggtgcaacagagcatgctgatttcaacttatcagcagcagaagcactagagcgttatggtattgaattcaatggaaagaaacaaataatcggtttccgcgttggagccggagcaactggtgttacatcttatggggtgggacaggcatataatccattattacgcagtgcctctatgtttcagttaaactggaacaatatgttagccacgaataatacaggtggattttataatgaagtgacaggaggagacagcggttccggattttatctttatgacaatcagagaaaaaaatgggtcattcttggaacaacatatggtaaagcattctccagtaaggatacctgggcctttttttctcgatatgatcagaacactgtcgataccttgaaaaatacttttacccaagaggtgaacctcaatggtcagaaaatgacagttaataataaaaatattgccattaacgataaaataactgctattgaactgaccaagagtaataaaaataaagatttgaaatttcatggtggcgggagcattgagctcaccgataacctgaactcaggaaccggaggattgatttttgatgagggacaacattattcggttattgggaaagataaagcctataaaggggcgggtgttgagatcggaaaagatacggttgtcgactggtcggtaaaaggggaggcaaacgataacctgcacaaaacaggggccgggacactgaatgtcaatgtggcccaggggaataacctgaaaacaggtgacggtaccgtttttcttaatgcagaaaaggctttcaatgctatctatgttgccagtggccgtggaacggtcaaactggggcaggccgatgcgctggataaaaatagtgattacagaggtatttattttactagtcgtggggggactctggatttaaacgggttcagccagtcgttcaagaagatcgcggcaactgatgttggtaccattatcaccaatacttctgataaaacagcgaccctttccctacaaaacccctcccgctatgtctatcacggtagtatcacgggaaatacgaatatcgaacacactgggacacagaaaagtgctgacagcagtctgattattgatggaaacattaatacacgcaatgacattactgtgcggaattcccagctcagacttcaggggcatgccacatcacatgcaatattccgcgaggggcctcggcactgctatgtccccggagttctttgtgacaaagattatgttactgattttgccagactggaaagtgaggcaaataagaaaaataacagtgcctataaaacaaataatcaggtggcttcttttgaccaacctgactgggaaacccggcatttccgatttaagactctgaatctggaaaactcagaattcacaactgcacgtaactcagttgttgagggtgatattgtcgcatcgaattcaacgctgaaactggggggcgacgttccggtgttcattgatatgtatgatggcatcaatatcaccggtaatggttttggcttccgccaggacgttcgtgaaggacgctcagcagatgatggcagtagcagctatacaggcaaaattacactgcaaaaaggctccacgctggacatcaacaaccggttcattggcggtattgaagcccatgacagtaaggtaaacgtcacctcaccggatgccctgctgcagaacagtggtgttttcgtgaattccaccctttctgtccgtgacggcggtcatctgacggcacaaaaagggctctacagtgacggccgggttcagattggaaagaacggtacgctttccctgagcggcacgccggaaaatggcgctgataatacctggatgcccgtactgacatacatgacagaaggctatgatttaaccggtgataacgccacgctgaacatcagccagcaggcgcatgtttccggggatgttcatgcaaccagttcatccagcattcgtattggctccgaaaaccctggctcagtttcctcttctgtctcccctgttctggctgccgggttgttcagcggatataacgcggcgtactacggtgccatcaccggcggtaaggggaacgtcagtatgaataatggcctgtggcagctgaccggagattccgacatcaacagtctgacgacccgtaacagccgggtacagtctgaagaaaacggtgccttccgtaccctgacggttaagacacttgatgccacgggcagtgattttgtcctgcgcactgatctgaaggacgctgataaaatcagtattacggagaaagccagcggttcagacaacaccctgaatgtcagctttatgaagaacccgtctccgggacagtccctgaatatcccgctggtcagtgcaccggccggaacatcaggggatatctttaaggccggcacccgggtgacaggcttcagtcgtgtgacgccgacgctgcgtgttgacaccactggcggcagtacgaagtggattctggatggtttcaggacggaagctgataaagcggctgcagcgaaggcgaacagtttcatgaatgccggctacaaaagctttatgacggaagtaaacaatctgaacaaacgtatgggggagctgcgtgacacgaacggtgatgccggtgcctgggcccgtattatgaacggcgccggttcagccgatggcggatacagtgataactacacccacgttcaggtcggttttgacaaaaaacatgcgctggacggtgttgacctgttcaccggtgtcacgatgacctataccgacagcagtgcagacagtgatgcgttcagcgggaagacaaaatccgtggggggaggtctgtatgcttcagcactgtttaactccggtgcctacattgatttgattggtaaatatattcaccatgacaatgactacacaggtaactttgccggtctgggtacgaagcactacggaacccactcctggtatgccggagcggaaacgggttaccgttatcacctgacggaagacacatttattgagcctcaggccgaactggtttacggcgcagtgtccgggaaaacattccgctggaaagacggtgagatggacctgagtatgaagaacaaggatttcagcccgttgattggcagaacagggattgagctgggcaaaaccttcaggggtaaggactggagtgtgacagcccgtgccggaaccagctggcagtttgacctgctgaataatggcgagacagttcttcgtgatgcatccggagagaaacggatcaaaggggagaaagacagcaggatgttgttcaatgttggcatgaacgcacagataaaggacaacatgcgctttggtctggagtttgagaaatccgcctttggtaaatacaacgtggataacgcaataaacgcgaatttccggtatatgttctga

SEQ ID NO: 5629 - DNA, 180 bp, Escherichia coli
atgctccaaattgcaggatatcgttcaacgattcgagtccggaacactattcgctatggaggcatgttcaacttctcattctgggggatgaacgttcagttctatggaatatcccctgactattccctgcacaacagcatcatttttggtaaaaaaaataacattattcttaatatatag

SEQ ID NO: 5630 - DNA, 792 bp, Escherichia coli
gtgagaggggatatatccggtaactctacattggttcttaaaaagattagattctacaattgtgccattatttatcttcgcaatgcccaattacttgttaaaacgatagatgggggggttattaatatcccacctgaatcaatatgttatattgagaaaaatacagtcattgatgtaacacttaacgtgttaggtaaaggcatgccttatgatatttttcatatagataataatatattaagctgtatctgcaaagtcatggaaccattgttactgaatccccataaaattggccctatgcgaagtagaatttttaattgcatggcggataagacagatacagaaatatttaaaatgataacagaggcaaatgtcccaaatcatagactaatttataacattacttatttgttatctaaagttgacgatattgaatctttggtttgctcattatctgtttcaacagactctactttcacagaaaaattaaagttaataatagaatctgatctgtcaaaatcatggcgattagttgatctggcaaatgttttacatatgtctgaagtctcaattcggaaaaaacttgaaaaagaaaataataattttaacaatttgattttggatattagaatgcaacatgcagcaagattgataactaccactgaaaaacatattaatagtatatctgatgaggttgggtatgttagtacatcatattttatccgtaattttaaaagttattttggtataacaccaaaacagttttcattgaaagtgaaaaggaaatcataa

SEQ ID NO: 5631 - DNA, 483 bp, Escherichia coli
atgaccgttgctctaataatggttacaaaagatttttatttaaaaaatggtctcttatatttttcaagtcaggatgaagagtataaatgttttgagttcagtggccgtgcctctgtatatgaggccgttcagcaatataatcatgtttatatgatttgcgataatagtaattattttttatacagtcttcttttttcaggggggcctgttaaatgcatatgtgctgataatataagtatccactatggaaatcggttatcaattgattatacgtatccaccagaacaaattcttcgatctcttaataataccgaacgagagattctttacctctatttcattaagcggagaaaaataaaagaaatttcaaagattacatgtttaagtgtaagtaaaatttattatagaataagaatgataaaaattaaatttggtgctgaaacgacacggaagcttccaattctttttaggtgttatctgtaa

SEQ ID NO: 5632 - DNA, 3711 bp, Escherichia coli
atggtgggaggatacagctttccatcgtgtgcttccgtcgttagctccactacttcctatcaaacatatcgtgattttgctgagaataagggagagttccgccccggcgcggaagatgtacctctatatgataaaaatggcaatcccgtcatgacgctaaataaagcgccaatgattgacttcagctctaatgactcgactggggttgcaacactggtttcaccacaatatgtcgtcagcgttaagcacaatggtggttatcaatatgtgaaatttggctatgcggatgattcctcctatgctcttgttgacagaaataaccactggagagatttccacactccccgtctcaacaaaattgtcaccgaggttacaccgctggatataaccaatgcaggtacagctaagggaacctatcaaaatgctgaccgtttccctgtgttctatcgagtaggtacgggaactcaatatgtaaaagatactaacggaaaaatcacctatttaatgggagcctactcgtataaaacaggtggaatagtaaatacgccggctatatctgactggagttttgtcacgaataccactaatactccactctcaacctacggtactcccggtgacagcggctctcctctttttgcctgggatgcagaccaaaataaatgggttttgttagccgttctcaattcatatgcaggggtcaatggcaatactaactggtacacaataattcctgctggtgatgtaaaaaatacgatgaaacaagatgccgatgcaccagtaaatacaaaacaaggtgaaggggatattcattggtcatatgacgaaaaaacgggacttggttcattaacccagggaagcacatcatgggaaatgcatggaaatttgggggcaacatggcctgcttcgcttaatagtggtaaagatctaacttttcagggcggcggtactgtagtgttagaaaataccgttaatcagggggctggcacacttacttttgatgatgattatattgtcaagcccgttgatactcagacatggaaaggcggcggaattattgttaatggtgaacatcttgttgactggcagattaatggggttactggtgatagtttgcataaactgggtacgggtacgttaaaaattaacggtaccggtgtaaacccaggaagcttaagtgtgggagacggaaccgttatattggcacagcgtgctgatgataacggactgagccaggcgttcagttctgtcagtattgtaagtgggcgtcctactctggtgctaaacgacgacaaacaaattaatccggataatatcaaatggggctatcatggcggcaagctcgacattaatggaaacagtttgacttttcataaacttaacggggctgatgatggagctatactgactaacagtggctccatggctaatgttaatctggatttcaacagcccagatacaacagccacggttgctaatatctggcacggccatttcaccggcaatctaaatatcaataatgaggttaccgcaggaacacagaatgatttcgctattgatggtggagtgaatactcaggggagtataacccagcaaaatggtcggctatttatgcaaggacatccggttgttcacgccgtcagcagtcaggacgtagcaaataagctaaaggcgctgggtgacaattcagtactgacccaaccagtgtcatttactcagaacgattgggaaaatcgacagttcagtatggcggagcttaacttacaaaatgctgaatttaaccttgcaagaaacgccagccttaataccagaattaatgccgagcattctaccgtgacattaggtagtgaggatctttacattgatctcaatgacggtaatggcgtggcaaccaaaccaacattgggtaagtcaaaggcaaccgcagaagatgatcagagtcgtttcaatggacatgtacagttgcaacaaggatcggcactaactattaatgaacattttgccggcggtattgatagtgcagatagtgcgacgacgataacctctacagataccacgcttaatcagctcagccgtttcacccaatcttctttgtcattaggtgaaggggcaaaattgaccgctacagccggattactttctgacgggacggtaagcagtaatgccggggcgagtctttccttgctatcagaccagcctggaacgatgtattccgcccaaagctgggagcttagcgggcaagacacgagcttaaatgttggcgcgggtgggatcatcactggagatatcaatgccaatgatgcggccagcattagctttggcacgactgatattaaccaatccacaaattactatggaaatatcaacgcgccgttggcaagtgtaacaatgaaggacactgcctggcaggtaaacaagcagtcggtggctaagtcgctcactttgaatggttcaacactgagctttaatcgtttcgggcaagggggactgacgtcagatacgctggaggccactaacagttcgttcattatcaatgccgatggtaaagcagcagatacggtgacggtaaaccaggcattgacaggggggaataacacactggttgttattcctacgacaaattcagtaaaacagggcggtgaccctgtgtcattggttactgccccgaaaaatacacaaagcaatatatttacacttaacccggtttcaataaatgcagggttccatagtttcacaccgcaacttgatgtgttggagaccgacgttaataagcaatggcgtctggagggattttacatacagcctgataaagccgctttgcggacaggcaagagttttatggatctcggttataaaaactttattacagaaattaataatctgaatgatcgtatgggggacttacgccatacccatggtgaaactggggcatgggctagacttaacagtggttcgggctcagctactgatggatttaccggaagttatacgcacttgcaaattggggcagacaggaaacatataattgaaggcggagagttatttactggagtaacggcgacatttacaagcagtaataaccggggaactggttggtcgggaagaaccaaatcaacgggtattggtgtgtacgcttcagctatgtttgactctggactctatgtagatactatcgggaaatatgtgcgtcatgacaatcattactcatcaagtgcgttaggaatgccagaacaagattatggctcgcactcctggtatttgggcgctgaggccggttggcgtttttccttacctgacgaaacatatatacagccgcaaacagagttgatctacggtactgtatctgagaatcagtttgcctggcaattcaatgggggtgagatctatatgcaacgtaagcagatgcaaccattgattggtcgcacaggaattgaatttggcaaaacattccgcggcaaagactgggaaatgacagcactgactgggattaattatcagtacgatttatttaagcctactgtgacagcgttcaaggatctggcaggtgatacatatattaataatggtaaagatagcagagtggtattcaatgtcggggtaaatactaaaattaaagaaaacactaggataagtctgaatgtggagcgttctgagttcggttcatacaatattgataagttaataaatgctaatattcgttatacattctga

SEQ ID NO: 5633 - DNA, 513 bp, Escherichia coli
atggcagcagcaaattctggtacaaccatcggaacaggtacattagcggtaacaggcactgttgggacgtctacttgttcagtgacttttccacaaagtgtgacaatgccaagtattaccactgcgatgtacaatcaaacgtcgacccagaatgccatggttcaacagtctgctggcaatatccagttttcaggatgcaatggtcaatccgttaatcttaaagtgatggctagcaatgttacggttgccgggagtaaagtaatcgcttatccgagagttaacaataaccaacaagggtggctaggtctgacttttggtgtatcaacagataacggctcgtcttttaagaatttgaagttggacaatagcccatcagagccaatcagtgttacgagcgacacatttgcattacctgtgcgtgttgaagcagttaaaatgtcatcaaatactgcaactgatataggtcaaggcaattatagcgcatcttttgttgtaactgctacatacgcttaa

SEQ ID NO: 5634 - DNA, 705 bp, Escherichia coli
atgagaaaaaaaatactttatacttttcttctcctgttatcgtcaccagttgttgcacatgaccttgaaggtataaatttagacttaaccagagtaatatttgactcacaacaaaatagtgcatcaataaaagtcaataactttaatgaaaataaatcttggctattacgttcatggatatccaactatagcgatgatggaaaaagtaaaagtttcattataactccaattctttacagagtattgcctaatgaaagtattcaattaaaaatcgaaaaaacagatgacttgttaccaacagatagagaatctgttttccgaattaatgtgcttgcaattccaccaaaagagattagtaatgataaaaccagttcgaaaccttctgatttacaatttgcaattaatagcagaatcaaactcatttatcggcctcataagcttaacgaaacagacaaagttaatgctgcatttaagtccttaaaaatattaaagaaaaacgaatatatcagcatagaaaacgcaacaccttactatattacaatggataatgtaaaaattaacaataagaaagtaacctcaattgaagatttcatggttgcaccatattcggagtttaaaatacccacacagaacgcaaaatcttttagttatacaacgattaatgattatggcggaaaaaaccctattatagatattaaattctaa

SEQ ID NO: 5635 - DNA, 2538 bp, Escherichia coli
ttgaaagttttattaaaaaaatccttattactggtaaggatcgcactcctgtgtccggcgttcagttggggagctgcgtctcccgttcctggtcataataatgagttatcatttaaccctgattttctggaattatctgatggtaacaatgctaaaaacattgacctcagttattttatgaatgcgagtggagcggcaccaggagaatatactgttgacgttattatgaatggtaaaattgttgacagtcaaattaaaatcgattttaccgaacaagataatgagctaaccgccagactgacgcctcaacagttggaacgttggggaattgatacaaataagctctccgtatcttccccatctgcttaccagcaaaatattgcatatattattcagggcgcaacagagaaattcgatgcgaacaaccaaaagctaatattgaatataccacaaagctacctcaaacctcaggattggttaagtactccgccccatctctgggatgaaggtatgccagcgctaatggttaactatctatttaacggaattaagcaaaataataatggctacggtagccgtagtcagtttttatctctggatagttctctgaaccttggtggatggcgccttcgccataacggtaactggtcaacaaactcatataataaagagagccactggcaacccgttagtgtttatctacagcatgattattctttcctgcagggagggcaatttactgtagggcaaacctcaacggatggtgcgatatttgacagttttccttttgaaggagcacagttttcatctgatgatggcatgattgccccagaactcagccaatatagtcctgttgtccgtggcattgcttattctcaagcacaggtatccgtcaagcaaaacggagttgtcatttatcaaaagaacgtcccacctggaccgtttgaattacgcgattttaaccaaatattcaccggtgacctggaggtggaaatccgtgaggcagatggcactattcgccattttactcaggcgacggccgttttaccgattctgcaacgtcaggggcgcttacgctataacctggcattcgggaaatatcgctcaagttctactttgaataatagtgtgtctgagcctcagtttgttcagtcttcagcagcaatcggattacctgatgaatatacattttatggtggtggtatcaaagcagacaactatgcagcagttctgcttggcctgggtaaatactcagatttttttggagcgttctccctggatgtcactcatgctcgctcacaattttcgcagaattataagtctttcggaaaacagcaaggacagtcttaccgctttatgtattcgcgtggttttggtgagacgaatacgacattgaatattaccggctatcgttatgccacacgcggttactacgattttgatgagttacaacaaattcagagtggattcgttgatgagaaaaatataaacagttatcatcaacgttcgcgtatatcaacaacgataagtcaagatcttcaggattggggacaattctacctctcagcaagtaaagatcagtactgggataccgctgatggatataacttatctgcgagttactcgctgccattccgctatatctcggcaatgctatcgctcgggtataataaaagcccgtattaccacgaggctgataaatcgctgtttttatctgtgtctgtgccgctcaactcattgctgaatggaaataacctgttcttaaccacgaataccattacgaataatggtcaggtgcaacagcaggttggattaaacggctcctcacaggatggtgagtttaactatgccgtggcgcaaggctggcagaatcaaaacagaggagagtcaggtaacattaaccttaactatcgtggaccttatgcacaaatgaacggcggctatgcctggcaaaaagaatccagtcaatggacatacggaattagcggtggtattacgttgcatccacatggattaaccttatcccagccattaagtctggacagtgccagtgctctggttcaggctcgtgatgccgccagcgtaaaagtattgaacgggtctggtatttatacggactggcgtggatatgctgtggtcccatatttgaatccctataaccgaaatcaaatttcacttgatgttaatagtgttaaggataatgttgagctgctaaatacagatgttactgtcatcccttctcgaggagctttagtttccgctccatttaaagtcaatgtcggtaataaggcaataattaccttgatacagaagaatggtgagcccgtaccgtttggtagtgtggtgacattagattctgaaaatagcattaacagcagtattgttgctgatcaaggacaggtgtatatgtcagggttacctgaagaggatacacttattgcacaatggggtgaggaagcttctcaaaagtgtaaaacaaattacaaattgcaaaataaaacagcgaaattcagtgaattaactttacaatgccaatag

SEQ ID NO: 5636 - DNA, 2823 bp, Escherichia coli
atggataagatcgaagttcggggcgcccgcacccataatctcaaaaacatcaacctcgttatcccccgcgacaagctcattgtcgtgaccgggctttcgggttctggcaaatcctcgctcgctttcgacaccttatatgccgaagggcagcgccgttacgttgaatccctttccgcctacgcgcggcagtttctgtcactgatggagaagccggacgtcgaccatattgaggggctttctcctgccatctcaattgagcagaaatcgacgtctcataacccgcgctctacggtggggacaatcaccgaaatccacgactatttgcgtctgctgtacgctcgcgttggtgagccgcgctgcccggaccacgatgtaccgctggcggcgcaaaccgtcagtcagatggtggataacgtgttgtcccagccggaaggcaagcgtctgatgctgctcgcgccaatcattaaagagcgcaaaggcgaacacaccaaaacgctggagaacctggcaagccagggttacatccgtgctcgtattgatggcgaagtctgcgatctttccgatccgccgaaactggaattgcaaaagaaacataccattgaagtggtggttgatcgcttcaaagtgcgtgacgatcttacccaacgtcttgccgagtcgtttgaaaccgcgctggagctttccggtggtaccgcggtagtggcggatatggacgacccgaaagcggaagagctgctgttctccgccaactttgcctgcccgatttgcggttacagtatgcgcgagctggaacctcgcctgttttcatttaacaatccggcgggagcctgcccgacctgtgacggtcttggcgtacagcaatatttcgatcctgaccgcgtgatccagaatccggaattgtcgctggctggcggtgcgatccgtggctgggatcgccgcaacttctattatttccagatgctgaaatcgctggcagatcactataagttcgacgtcgaagcgccgtggggcagcctgagcgcgaacgtgcataaagtggtgttgtacggttctggcaaagaaaatattgaattcaaatacatgaacgatcgtggcgatacctccattcgtcgtcatccgttcgaaggcgtgctgcacaatatggagcgccgttataaagagacggaatccagtgcggtacgtgaagaattagccaagtttatcagcaatcgtccgtgcgccagctgcgaaggaacccgtctgcgtcgggaagcacgccacgtgtatgtcgagaatacgccgctgcccgccatctccgacatgagcatcggtcatgcgatggaattcttcaacaatctcaaactcgcaggtcagcgggcgaagattgcagaaaaaatccttaaagagatcggcgatcgtctgaaattcctcgttaacgtcggcctgaattacctgacactttcccgctcagcagagacactttccggcggtgaagcccagcgtattcgtctggcgagccagattggtgcaggcctggttggcgtgatgtacgtgctggatgagccgtctatcggcctgcaccagcgcgataacgagcgcctgctgggtacgcttatccatctgcgcgatctcggtaataccgtgattgtggtggagcacgacgaagacgcgattcgcgccgctgatcatgtgatcgatatcggtccgggtgcgggtgtacacggcggtgaagtcgttgcggaaggtccgctggaagcaataatggcggtgccagagtcgttgaccgggcagtacatgagcggtaaacgcaagattgaagtgccgaagaaacgcgtacccgccaatccagaaaaagtgctgaaactgacaggcgcacgcggcaacaacctgaaagacgtgacgctgacgctgccggtaggtctgtttacctgcatcacaggggtttcaggttccggtaaatcgacgctgattaacgacacactgttcccgattgcccaacgccagttgaatggtgcgaccatcgccgaaccggcaccgtatcgcgatattcagggactggaacatttcgataaagtgatcgatatcgaccaaagcccaattggtcgtactccgcgttctaacccggcgacctataccggcgtgtttacacctgtgcgcgaactgtttgcgggcgtaccggaatcccgtgcgcgcggctatacgccaggacgtttcagctttaacgttcgcggcggacgctgcgaggcctgtcagggcgacggcgtgatcaaagtggagatgcacttcctgccggacatttacgtaccgtgcgaccagtgcaaaggcaaacgctataaccgtgaaacgctggagattaagtacaaaggcaaaaccatccacgaagtgctggatatgaccatcgaagaggcgcgcgagttctttgatgcggtgccagctctggcgcgtaagctgcaaacgttgatggacgttggcctgacgtacattcgcctcgggcagtccgcaaccacactttctggtggtgaagcccagcgcgtgaagctggcgcgtgagttgtcaaaacgcggcaccgggcagacgctgtatattctcgacgagccgaccaccggtctgcacttcgccgatattcagcaactgctcgacgtactgcataaactacgcgatcagggcaataccatcgtggtgattgagcacaatctcgacgtgatcaaaaccgctgactggattgtcgacctgggaccggaaggcggcagtggtggcggcgaaatcctcgtctccggtacgccagaaaccgtcgcggagtgcgaagcatcacacacggcacgcttcctcaagccgatgctgtaa

SEQ ID NO: 5637 - DNA, 1815 bp, Escherichia coli
atgaaaatatcgtggaattatatatttaagaacaaatggcgatttcacattacaagcatttcactttttcttatcatgctcgcggtttcaatcgcttttttgcacttgcgttttaataccttgtccggtaccgataaaatgcggcttgaaatgtataagtccacattatattccaccatcgagcaattttatgttttaccctatatgctctcaacagaccatatcatccgtcaggcggtaattacgcctgacgatatgacgtccagcgaactcaatcaacgaattgcacatttcaatactcaactcaaaaccgcagcaatatttattctggatacccaaggtaaggccatcgcttctagtaactggcaggaccccggcagctatgtagggcaaaattatagctatcgcccctattataaacacgccatgtctggcttaaatggacgcttttacggtattggtagcactacaaatacaccgggattcttcctctctacaagtataaaagataaaggaaaaattgtcggtgttgtagtagtaaaaataagtcttaatgaaattgaaaaagcatgggccgaaggtcctgaaaatattatcgtgaatgatgaacatgggattatatttttaagttcaaaatcgccatggcgaatgcgaacactgcaaccgttacctgttcaggcaaaacaaaaactacaatctacccgccaatatagtctcgacaatcttttaccggcggattattatccctgttataccgtgagcaattttactttcctgaaagataaaaaagaacaactctgtttattcccgcaacattatacgcaacaaatagccattccagaatttaactggaaaatgacaattatggtccccttagataacctgtactggtcatgggctatttcgttagtcattacactaattatttatctgctgtttttgttatttattaaatactggagaatgcgatctcatacacaacaattattaacactggcgaatgaaacattagaaaaacaggttaaagagcgtacatctgcccttgaattgatcaatcaaaaattactccaggagatgaaagaacgcagtcaggctgagcaagtattacaaattacgcgcagtgaactggcagagtccagcaaactggcggcgcttgggcagatggcaaccgaaattgcccatgaacaaaatcaaccattagccgccattcacgcacttacagataacgcgcgcattatgctgaaaaaagagatgtatccgcaggttgaacaaaatctgaaacatattatttccgtgattgagcggatgacgcagctcatttccgaacttaaagcatttgcctcgcgccatcgcgtacctaaaggttctgccgatgtcatcaaagtgatgtatagcgccgtggcgttacttaatcacagcatggagaaaaataacattgagcgacgaataaaagccccatccatgccgttatttgtcaattgcgatgagctcggtcttgaacagatattcagtaatttaattagcaacgccttagattctatggaaggtagctcttacaaacgactggatatcgccattcgccaggcaaataacaaagttattattaccattaaagacagcggtggcggttttgcacctgaagttgtcgatcgcatatttgaaccattttttaccactaaacgtagaggaatggggttgggactggcaatagtcagcgaaattgtccgaaattcgggtaatgactccaacttactgatagtgttttatgttcagataatgcccgatgaccttgtcatgcagctccaccgattttga

SEQ ID NO: 5638 - DNA, 267 bp, Escherichia coli
atggcgacgctggggcgtcttatgagcctgctgtcaccctttgacgtggtgatatggatgacggatggctggccgctgtatgaatcccgcctgaagggaaagctgcacgtaatcagcaagcgttacactcagcgaattgagcggcataacctgaatctgagacaacatctggcaaggctgggacggaagtcactgtcgttctcaaaatcggtggagctgcatgacaaggtcatcgggcattatctgaacataaaacactatcagtaa

SEQ ID NO: 5639 - DNA, 741 bp, Escherichia coli
atgattaacaaacttactcttccctggccggtattatttttagaattttttgtgcgagaagttgcctttaagggtaagggaattgttcgttctacattaccagcagatgcccatttttataccggtgggtcaaaagccctgcgttatcacctacaaccaggaaaccaatggccaaactatatatggcatgatgatataggtgatattgtaccgtttcctctaccctcgcttccgcttacatttaccgctaaccgacccacatttaattccagagaattagcggataaatggatgaaggataatattcataccgctgtcatcatggcgggggaatttctgtctgctaatgaatggattcgccgcaaaaaccagcttaaaactagtgtacaccctgcgtcagttgcttctttcgcaccctatggctttaacattaaccagtgtgatgacgatggcaatctttggactaatttcccacgtccccacatcaaattaaaaatcgcaccaggaaaaacagcttgttttctctgccgccgggaagagcttttatttggttatgatgaagcacataatcactaccagccgaatcttaatctggttttatttgtgaaaaatcatgggttgcataaggatgtttacctaaaatctcatgacgataaaagtgaatacgatagcagaatattatgtaacgaaaaatttaccacttatgatttccgtaaaaaccggtccagatacagcttttga

SEQ ID NO: 5640 - DNA, 849 bp, Escherichia coli
atgaataaaaacgaatcaatttcttacaccgaaatgcaaaaattttttgccagagaaattaaggaagtaggcggtaggcccatcacttctaagaatttagagttaagtctgctacccattcacgccagggaaaacctttctgcgccagaaatgccgtggtataccgaagttaatgatatctatatggagttcagacgctcaccattctggatggttgccggttatgtattcctgggatttatgctttcactactttccatctcgatattatctattgttgcattctcattttatgagatgggctttaatagtgacttgttatttctgtatttacttgcatttgtgcttggctgttttatattacctggcgctgcaaaaattgcttttttcacgccacattatcttcctataagatttaacagaaaaacacaaaaaatttatgtttcagatttaattattgaaggcaatgtcttctttggaaaaataaaactcacttttcatgaatatgactggaaagatgttgaaggttgggaggtgagtagacatttcagtaaaagtatgccttacaatggattacatctggtagttaatagagaaaatgatataaatgcactgcgacagacacgcgtttatacaacccgtgcaccgtggagtgcacaagaaatggcaagacaaaagaactatatcccccaaatatggctttattgccataattatatggcttataaaactgtgtctggtgcaaagaacaaaccacaaccatttatttttttaagaaacaattggctatttaaatggccaaaagaaatggataaacgttccagaagctcaaagatactgtctgaataa

SEQ ID NO: 5641 - DNA, 243 bp, Escherichia coli
atgaaccctctggcaggtatggatatgagcagaattttactcgatttatcgaatgaggtgattaagcaacttgatgatcttgaggtgcagcgtaatcttccgcgtgcagacctattacgggaagcggtagatcaatacctggtaaatcaatcgcaaacagcaagaaccagtgttcctggcatctggcaagggtgtgaggaagatggtgtcgaataccagcgtaagctgcgcgagaaatggtaa

SEQ ID NO: 5642 - DNA, 1836 bp, Escherichia coli
atgagtacattacagttacctggcagttcatattctacagaagttaatttaaacggcttaattgaggtgctcagcaagcacctttactctacccccgtggtcgccgtacgggagctggtgcaaaacggacacgatgcgatcgtgcgccgcagaattgagcagcccgatgcgccaaaggataaccaaattcgagtggtggctgacgtggcgaagtccactatcaccattaccgataccggcgcgggtctgacagaaagcgaaattcacggcttcctggctacagtgggtgtgggttatacccgaatgttgcgccagcaggatgacaacaccggtttaattggtatgttcggcctcggttttttgtcggcatttgtactggcaaaagaggtcacggtgttgaccacatcctggcaaacgccggatcagagctggaaataccactctaccgacgggcaaaaatataccgttacgccacatcaggcttcggggacggggacgcaggttattctgacgctcaaagaagagtacagccatctggcgagtaacaatttgctgaaccgcgttctttcccgctactgcatattgctgcacgaaccggtctttgtcggcgatgccagcgagccggtaaataaacttcaaccaccgtggcgtgaagttgcccccgaaggcgtaactatgcaccgtgcgctggtacagcgtaaaaatctcgcctttgccgcccagtttgaatcctccttcgaaccgatttgcactattccggtggtgccagcggggatgagtgacgcggtcgggattttatggattcaggatggcgcaacctacggcaccagcgataaccgtaacctgtcactgtttttgcgcggcatgttactggatgacgaagcgcgtgaactgttgccgccctgggccggttttattggtggtgtgattgagtcatcgaaactgacgccgacggcgagcagggaagatctccagcgggacgaaacctgggtcgcggtacagggggcgttaaaagaggcgctgatttctggtttgtccgatctcgcacaaaatcagccagaaatctggcggcgtgtattaatgcgccacaacgaagcgttgctcggtgcggcgttgtgtgatgaccgtctgtttgatttgctcaaagatcgcttgcaggtgccaacgtcaaaaggcgcgctgctggcaaaggatttacgcgttaataacagcattcatattctgttaagccgcgacggcggttttgaagagatgttgttccatattctgcaacggcctgtagcccgtggcgatcgctatgcggtggtgccatttttacgccgttgggcgctgttatatcactgccggattatcgaagtcggtacgcaaacgggtaatgagcagttgttcagcctggcggaattacccgaagagcaggtggcttatctggaagagcatctctgcgacggcgagcaattaattatctctcgcttcgaaccagcggttttaccgctcgtggttacgccagaccgcgaagcagaattaaaacaaattctcgaacaggatgacgcagataaacgcatcagcaccgcagcgttaatgctggcgcggcaatttacctcgcaaatccaaaagactaaaacatcaagtctgtatatcaatcttaataacccctgtgtcatgcaactggtgacggccttacaacaccatcagcagccagcggcagcattacggttattaaaatcgctgaaagtgattttgtgctccagcggtaataaagaacagcagtgggatttacaccaggcactggaagattttactcaggttattcctgtcttaattaatcaaggaaaataa

SEQ ID NO: 5643 - DNA, 2307 bp, Escherichia coli
atggatacatgggagtggtacaacaaatatagtcaggagttgcgcgatgccgggcaagaatatattccgcagcttattgatgatttttcagaaagtgttttgcacctgcaaatagaaaaatgcgattcgctattgccggaaatgaaagcgctgaatcaagtagctaaaaatccgtggctggaaatatttatcggtcactgggagatgcgtcatcgcctgactaactatgaagaaggtgaaaaggtgctgccagacgtggtagcgctgtttgaaaaagcgcaccgggaagaggcaaaagattgcccgcaatccatttgcgttacccaggatttatcagcctgctacgaaaatatcgatggcccaggctgggcgaatgaacgcatggcagtatgtgaagaaaccattgcgcgcattgatccgacctggagctgctttatgtgtttatcctgcgagtatgccagtgcactggtggactccaacaaaacagaagaagcgttggtttatatcgacaggcaaattgaggcggtgaaagcatcggggagtgaatatttagaagcgctgctggcaacacgcgccgatattttagttgcccttcagcgctacgatgaagctcgtgaagtgattgatgaactggcaaaagagaacgattactggggccgtgaccgcatcaattatcatctcaaaaaactgtacatcatggcgttatgcgggcaggacgatgaagtttgggaagaattaccgcgttggtcagatctgactccctattcgtggggcatgtgggtaaagattattaccgtactgcttcctcgccatccgcagagaaaccactggcagctggcgcgcatcatccaaaaaatgctggagcaacgttcgcaggccggggcacaccgcaaagcggtagatctggcaaaactgcaaatcactctggcgctggagcgtgaatccgtctgggtggccaaaatggcgatgaaactggcccagcagcacatgccaaaattacgctcgttagtgggtgtcgatcgcgagtttctcgaacttagtgaaaaaattgccgccaaagaagcggaactgcttgctcgtccggttgtagaagtacctgaaaatagcgacgaagaaacgcagccagatccagaaaaagacgtcgaaatattccgtcgcgcttatctgaacacgccagataatgcggaattgctgggcaaactggtcaatgcgttaaacgcctgtaatgcgcttaatgagtcgattgaacttctgcaacgctacgttgaaagccaccttcaggaagataacggcctgtgcttcgatctactggatctcttgcttaaccgtggcgatcagcaggcgatcgagcatctggcgaagctgtatgaacaggcgggtctgctacatatggcgctgtggttccgtgcgcgggtgatcaaccaacaggaagactggagtgaactggagtcgattgggcaacagttgctggaaaacgaaaaagggcgtgagtgggtcggcgtttatcgcatgtgttcctgggcagcacaaaaacaggaagcctgggatcgacaactggattatttacagcaattgcagcaactgatgattagccgtgaagaagatattcgtaatctccagtgggatatcatggcgaccgccagcatcttacaacagtgggatttagttcgtgctattgctgctgaactggaaatcgaactcacagaaggcgaaggttttatcgacgaaaaatgggggctgctaaacattcgcttccgggaaaattacgaataccgctattactatgctcaacgcattgggccggtaacagcaaggattatagagccgacttaccggaccgatttcccgcaacatgttgatgaaattgtggttttcgatgcggaaatgttgaatacccggcctgaagacgaagaagatcagaagaatttcacgccactttatgggtgtctgaaaaccattatcccgaccgagtacggcgagtcctggttctgcgaaggtgtcatgcctggtgaagaacagtttaatgccttccgtgaggcgctccgtgaacgaaactggtactactggagcaacagtaatgatgactatacgttaacggacagtcatcagggtgaagatgcgcagccgctgcccgcattctactttgttatcagtgcgccgcgttcagtttctaaaggtgatatcgataagaccttgcacgaattgaccgctgactggaaacatccgttgtgctggtggcgtcttgccaaagaagccggtgcgaatgaagagaagcatgttgctatttctgagcgttatggaatgtaa

SEQ ID NO: 5644 - DNA, 1044 bp, Escherichia coli
atgaaaaggaatctattatcttccgctattatagtcgccatcatggctctcggtatcacgggttgtgatgataaaaaagctgaaacagaaacacctccgcccgccaatagtcaacctgccgcacccgctcctgaagcgaaaccgactgaagcccctattgcaaaagcaaaaatgccagcgcaaccggtggctgatgaacaagcggttttcgacgaaaaaatgaatgtctatatcaagtgttacaacaaattacaggtccatgtacagcatagtctggcgcgttatgctgactggctgaaagattttaaacagggaccaacgggtaaagagctccatgtttatggcatctacagtattagtgaatccagcctctctgactgtgaaaaggaaataaaaaacgtagtggcgttaatgccggcgttggaacccattgatggcgaggcattgaattatattgatgcagcagttgcgctggggaatactattaatgaaatggataaatattacactcaggaaaattacaaagacgatgcgtttgcgaaaggaaaaatgctacatcaggtatttataaaaaatgtcgatgcctttaagccggttgcggaatcttatcatgcggcaattcaggtaattaatgataagcgccaacttgttgaactgaaaaatattgaacaaagagaagggaaaacattccactattattctctggcagttatgattttagcgaaacaaattaatgccatgatttcgcaagagaatgttgacgctgaaacggcaatgaagaaagtggctgaacttgaaacgctggtggcgcaagccaaagaagtgagtaaagacagtatgaattctctcttcatcggcgctgcagaccgatatcaaattgctgctaaaaagtatgctcgtcgtatcagagataacgtcccgtactctgactcggataaaaagaaacttcaggacgcaaccaccaactggatggttaaggactcttacccgcaatcattacgcgcttataacgaactggtcggtagttataatcgcctgcgttaa

SEQ ID NO: 5645 - DNA, 1749 bp, Escherichia coli
atgctaaacgaacgtcagttaaagattgtcgatctgctggagcaacagccgcacacgccaggtgagctggcgcaacaaacgggcgtttccggcaggaccattctgcgtgacattgactatctcaactttaccctcaacggcaaagcccgcatttctgccggtggcggtgtgggctatcaactggagatattcgaccgccgcagcttttttcagttgctgcaaaaacacgacaatgatgatcggctactggcgcttttatttctaaatacctttaccccgcgcgcacaacttgcctcggcacttaatttgccggaaacctgggtagcagagcgcctgctccggctaaagcaacgttatgaacgcatttgttgcctggccagtcgcccgggtttgggtcatttcattgatgagtgcgaagagaaacgcgttattctgctggcgaacttgctacgcaaagatccgtttttgcttccactggctggcgtgacgcgggagagttttcagcaattatccactgcctgcgacaaccaacaccgctggccgctcatgcagggtgattatctctccagcctgattctggctatttacgccctgcgtaatcaactgaccaacgagtggccggaatatcccagtaatgagataaaacaaatcgttgaacaaagcggcctgtttctgggcgataacgctataagaactctgacggggctgatagaaaaacagcatcagcaagcgcaagcaatttctgccgataatgtactggcgttgctgcaaagagtgccgggcatcacctcattgaatattatcgatgcgcaattggtcgagaatattaccgggcatttattacgctgccttgccgcgccggtatggattgctgaacatcgacaaagcagtatgaataacctgaaagccgcctggcctgccgcctttgatatgagtctgcattttattacgctactgcgcgaacagttcgacattcctcttttcgacagcgatctgatcggtttgtattttgcctgtgcgctggaacggcatcaaaacgaacgccagccgatcattttgttatccgatcagaatgctattgccaccattaatcagtttgccattgagcgcgatgttttaaattgtcgggtaattattgcccgtagtttaggtgagcttgtggccatttgcgaagagatcgagccattattgatcataaataatagccattatttactggatgatgcggtcaataattgtatcaccgtaaaaaacattattactgccgccggtatcgaacaaataaaacattttcttgcgacagcgtttattcgccggcaaccggagcgttttttccctgtcacaggaagtcttcactattcgaatgtgcgaggtgaaagctggcaagaaatcactggccaaatttgtgtgcagctcgtggcgcaacagcatattactgccgatgaagcgcagcggatcatcgcccgcgaaagtgaaggtgaaaacctgatcgttaatcgcctcgccatccctcattgctggagcgagcaagagcgacgttttcgtggattttttattcccctcgcgcaaccgattgaggtgaataacgaaatcattaaccatgtgttgatcgcctgcgccgctgccgatgcgcgtcatgagttaaaaatattcagctatcttgccagcgtgctgtgccagcatccaccggagactattgctgggttaacgggatatgaaggatttatagcgttacttcgccaggggtga

SEQ ID NO: 5646 - DNA, 1071 bp, Escherichia coli
atgaacattgagttactgcaacagttgtgcgaagccagcgccgttagcggcgatgaacaggaagttcgcgacattctgataaacacgctggaaccttgcgttaatgagatcacctttgatggtctgggcagctttgttgcccgcaaggggaataaaggtccaaaagttgccgttgtcgggcatatggatgaagtcggctttatggttacccacatcgacgagagcggttttctgcgtttcaccaccattggtggctggtggaatcagtcgatgctcaaccaccgggtaaccatacgcacacacaagggagtgaaaatccctggtgtgattggttccgtcgcgcctcatgcgttaaccgaaaagcaaaagcaacaaccgctgtcatttgatgagatgttcattgatattggcgcgaacagtcgcgaagaggtggaaaaacgcggtgtggcgatgggcgattttattagcccggaagccaattttgcctgctggggcgaagataaagtagtcggcaaggcgctggataatcgcatcggctgcgcgatgatggcggaactactacagacagtaaataaccccgaaattacgctgtatggcgttggcagtgtggaagaagaagttgggctacgcggggcacaaacctcggcggaacacattaaaccggatgtggtgatcgtgctggatactgctgtcgcaggtgatgttccgggcattgataacatccaatacccgctgaaactgggcgacgggccggggctgatgctgtttgataaacgctacttccccaaccagaaactggtggcggcgttaaaaagctgcgccacgcagaatgatttaccgctgcaattttccacgatgaaaaccggtgcgacggatggcgggcgctacaacgtgatgggcggcggacgtccggtagtcgcattgtgtctgccaacccgctatttgcatgccaatagcggcatgatttcaaagaccgattacgatgctctgttaatactgatacgggattttctgacgaccttaaccgcggagaaggtcaacgcgttcagccagttccgtcaggtgagctaa

SEQ ID NO: 5647 - DNA, 1452 bp, Escherichia coli
atggagtcatccttacgtattgtcgcgatcaccaactgccctgccgggatcgctcacacctacatggtggcggaagccctggaacagaaagcccgttctctcggctataccattaaagtggaaactcaaggatcaagcggcgttgaaaaccgcttatccagcgaagagattgccgctgccgattacgtgattctcgccaccgggcgtggtctgagcggcgacgatcgcgcgcggtttgccgggaagaaggtttatgagattgccatctcccaggcgttgaaaaatatcgaccagattttcagtgaattaccgacaaactcgcagctttttgccgcagatagcggcgtaaagctcggcaaacaggaagtacaaagcggcagcgtgatgagccacctgatggcgggcgtctctgcggcactgccgtttgtcatcggcggcggtattctggtggcgcttgccaacatgttggtgcagttcggtttgccgtataccgatatgtcgaaaggcgcgccgtcgtttacctgggtggttgaatccatcggttatctcggcttcacctttatgatacccatcatgggcgcttatattgcctcgtcaattgccgataaaccggctttcgctccggcgtttctggtttgctacctggcgaacgacaaagcgttgctcggcacccagtcaggcgcgggtttcctcggcgcggtagtgctggggctggcgattggctacttcgtcttctggtttcgcaaagtgcgtcttggtaaagcattacaaccgttgctcggttcaatgctgatcccgttcgttactctgctggtttttggcgtactgacttactacgttatcggaccggtgatgtccgacattatgggcggtctgctgcacttcctgaacaccatccctccctcaatgaaatttgcggcggcgtttctggtcggtgcgatgctggcgttcgatatgggtggccccatcaataaaaccgcctggttcttctgcttctcactgctggaaaaacacatttacgactggtacgccatcgtcggtgttgtcgcgctaatgccgcccgtcgcggcgggtcttgcgacgttcattgcgcccaaactgtttacccgacaggaaaaagaggctgccagtagcgctattgtggtcggtgccactgtcgcaaccgaaccggctattccttacgctctggcagcgccgttgccgatgattaccgccaatacgctggcaggcggcattaccggcgtgctggtgatcgctttcggaatcaaacgtctggcgccaggtttgggtatctttgacccgctgatcggcctgatgtcgccggtaggttcgttttatctggtgctggcgattggtctcgcgctgaacatttcattcattatcgtcctgaaaggattatggttacgccgcaaagccaaagccgcgcaacaggagcttgcccatgaacattga

SEQ ID NO: 5648 - DNA, 447 bp, Escherichia coli
atggcagcacttactgcaagctgtattgacctgaatattcagggcaatggcacttattccgttctgaagcagttggcgacaatggcgttacaaaacggttttatcaccgactcacaccagttcctgcaaacgttactactgcgcgaaaaaatgcactccaccggttttggttccggcatagccgtaccgcacggtaaaagcgcctgcgttaaacaaccattcgtgttgttcgcacgtaaaacacaagccattgactggcaagccagcgatggcgaagacgtcaattgctggatctgcctcggcgtaccgcaaagcggcgaagaggatcaggtcaaaatcatcggcacactgtgtcgcaaaattatccatcaggattttatccaccaactgcgacaaggcgacaccaaccaggtgcttgctttgttaaatcaaaccctcagctcataa

SEQ ID NO: 5649 - DNA, 1260 bp, Escherichia coli
atgaccactcaactggaacaggcctgggagctggcgaaacagcgtttcgcggcagtagggattgatgtcgaggaggcactgcgccaacttgatcgtttacccgtttcaatgcactgctggcagggcgatgatgtttccggttttgaaaacccggaaggttctctgaccggtggtattcaggctactggtaattatccgggcaaagcgcgtaatgccagcgagctgcgtgccgatctggaacaggctatgcggctgattccggggccaaaacggcttaatttgcatgccatttatctggagtcagacacgccagtctcacgtgaccaaatcaaaccagagcacttcaaaaactgggttgaatgggcgaaagccaatcagctcggtctggattttaacccctcctgtttttcgcatccgctaagcgccgatggctttacgctttcccatgccgacgaccgcattcgccagttctggattgaccactgtaaagccagccgccgtgtttcagcctattttggtgagcaactcggcacaccgtcggtgatgaacatctggatcccggatggcatgaaagatatcaccgttgaccgtctcgccccgcgtcagcgtttgctggcagcactggatgaagtgatcagcgagaagctaaaccctgcgcaccatatcgacgccgttgagagcaaattgtttggcattggcgcggagagctacacggttggctccaatgagttttacctggggtatgccaccagccgccagacggcgctgtgcctggacgccgggcatttccacccgactgaagtgatttccgacaagatttccgccgccatgctgtatgtgccgcagttgctgctgcacgtcagccgtccggttcgctgggacagcgatcacgtagtgctgctggatgatgaaacccaggcgattgccagtgagattgttcgtcacgatctgtttgaccgggtgcatatcggcctcgacttcttcgatgcctctatcaaccgcattgccgcgtgggtcattggtacacgcaatatgaaaaaagccctgctacgtgcgttactggaacctaccgctgaactacgcaagctggaatcggcgggcgattacactgcgcgtctggcgctactggaagagcagaaatcgttgccgtggcaggcggtatgggaaatgtattgtcaacgtcacgatacgccagcgggtagcgaatggctggagaacgtgcggacttatgagaaaaaaattttgagtcgccgcgggtaa

SEQ ID NO: 5650 - DNA, 1131 bp, Escherichia coli
atgtcgactctgtttacgattaatgcctgtaagtcgtttggttgccgtaatttagggcagccaacatcgacagattatagctggcccgactatcgactgggttatccggcactgcactgtcgggcatgtggcagttacccgccgttgtttgacgagcaacaatttcgtgactggttgacagttcacttatctacttttgcaacagagaaaggccatttttgcccggtatgttatggcacagagacgatttgttatggtcacaatccacagggttcgcaacgcattcaatgccgtaactgcaaaaaagtatggacacccaaacaatatcagaaagaaataacgactcccgaaataatcgaaacggttgctttgctcgtgccatttcagggagtcagcagcgggcagaaactgtatgttttaatcagttttgatgctcttcgcggtaatattcttcatctttctactaattacacgcagcatcaggctggagaaagtctgcattatcgatacagaggaaatgcagaaccagagttacacgacaataatattgtacaacgcgttgatatgcgcgaagcacaatttctacgccgcagtcagtttgatgaaattcagtatggcagcgcagcgctcaagcgcaatgccaaaggcgctattctgcgtccggttatcactgcacacgggcatttcagagtactgaatattttattccctacagtaaaaacacatgtaatttcacacgagtgttttttaagaggtgccattattacggcctgggctgatctgtttcgccaacagcaaggtgaaatttggtttattgaagaggaaatagctgacgataccgataatatgccctggcgttttcagggaaaaacttatcacggctggtggaaaaatcagtggcaactctgggttcagggaaaaaatcgtaaaatggtatgtgcattaacgggcggaaagagtagcaaagcagaaatgctctctttagcaaccagcagacattttatcgactggctacataaacaagcagtatttactcacagcgccccgctttccgcagggcgcgttacgcaaatactgctttctctggctcaggattacaacaactgcgccagtcggttaatatccgactga

SEQ ID NO: 5651 - DNA, 1899 bp, Escherichia coli
atgatggcagggatatatcgctgcattttgctgttgatagttgggctttttttctcttcgttgagttatgcgaaaaacacggagatcccttcttatgaagaagggatctcgctctttgatgttgaagccactctgcaaccgaatggggtgctcgacatcaaagagaacattcattttcaggcgcgaaatcagcagattaagcacggattttatcgtgatttaccgcgactctggatgcagcctgatggggacgctgcactgctgaactatcatattgttggcgtcacccgtgatggtattcctgaaccctggcatcttgactggcatatcgggttaatgagtattgtcgtgggcgataaacaacgtttcttgcctcaaggcgactatcattatcaaattcattatcaggttaaaaatgctttcctgcgtgagggggattctgctctgctaatctggaacgtgaccggtaaccactggccgtttgaaatatataagaccctattttcactcaagttgcctgatattgcgggtaatccatttagcgaaatcgatctctttaccggagatgagggcgacacatatcgaaatggccgcatccttgaggacggaagaattgaatctcgcgatccgttttatcgtgaagatttcacggtcctctaccgctggcctcacgctttacttggtaatgccccggcaccacaaacgacgaatattttcagccatcttcttttaccctctacgtcatcgttgttaatttggtttccgtgcctgttcctggcgtgtggatggttatatctctggaagcgcaggccgcaatttacgccggtagatgtgattgaaaccgatgtcattccgccagattacacgcccggcatgttacgtctcgatgcgaagctggtttatgacgataaaggtttttgcgccgatatcgtaaatctgattgtgaaaggaaaaattcatctggaagctcattatgacaagaaccagcaaatcctgattcgtgttaatgaaggcgcgaccagaaataatgcggtattactgcccgcagagcagttattactggaagcgttatttcgtaaaggcgataaggtcgttcttacggggagacgcaacagagtcttacgcaaggcatttttacggatgcagaaattttatctgccgcgtaaaaagtcttcgttttaccgacctgatgcgtttttgcaatggggcgggatggcgatattggcggtcattctctacggtaacctgagtcccgtaggttgggcaggaatgagtctggtaggcgatatgtttattatgatctgctggcttcttcctttcttattttgttcccttgagcttttgtttgcccgcgatgatgacaagccttgcgttaatcgtgtaatcatcactttgtttttaccactgatttgttcaggcgtggccttctattctctctacatcaatgtcggagatgtattcttttactggtatatgccagcgggttattttagcgctgttttcctgaccggttatctcactggcatggggtatatttttctgccaaagtttacccaaactgggcagcaacgttatgcccacggtgaagctatcgttaactatcttgcgtgtaaagaggcagcaacacacagtgggcggcggaggaaaggggaagcacggaaactggattacgctttgttaggttgggcggtctcggcaaaccttggcagagaatgggcagcacgtatcaccccatcactcacagcggctgtccgcgccccggaaattgcccgtagtggcgttttgttctcattacagatgcatctgagtctgggggccaataccagtttgttggggcgaagttattccggtggtggtgctggcggcggtgcgggtggcggaggcggtggtggctggtaa

SEQ ID NO: 5652 - DNA, 1023 bp, Escherichia coli
atgattagatatagtggaatatttctatcgctgttaatgctttcaggttgtgcaaccgaagcattgaagaatgaacaagctgaaactgttattactgcgggtaacaaggcggttgcggcgaatgcaagtttctttaaacaatactatgcttctcgtgaaaactttcttgttaatttttatgcgactaatccggattgtgcattgcgacctgattacgaaacgattatggaaaataatactaataaagagtccttatgtttgcaatcagagaaagggggcaaaacatcgtataaagacattactaaaattcaattggcaacaacagaaaaacaaaaactactggcttcacttgaggtcgttaacagtatgagttcctatgtggagttgttgacggtgggtatggatgttgaggatagtaaacaaattatattacttaatcaggcgctcgatcacgcaaacaacgcccaaaaactacttggcctttcagaaggtgaagaattgactaagtcagttgtggctgttaaagatttagttcaatatttcaatggattatacaaagagaagattaaatcagaaaatgttggtaaaacggtaggtagtgactggcctcgacttcaaagaaatttacaagatttactcgatgatatagcaacgaaacagcagcaaatggatcggaataattatgcgaacatcagtaataatttttattactacaataaggcccaggcaaatactaaaaatatagagtttaagacattaaagagcaggcaggaatttttgagtgcagtaattaatcttaatgaaagcagattgcgttcatctgatccggcggctccagcaatacaagctattaatgccttcatggataaaggaaatcatctacaagatttatactctaataaatctctttcaaaagcggatttagagcgtagaaatgagatccttcgttctcaagttattagtggtctacaggcgtcagaggagctggcaaaacttcttattgccagcggagttatgttatag

SEQ ID NO: 5653 - DNA, 309 bp, Escherichia coli
atgaacgatgtgcaaaatcgacgaatactggcattgctcaatatgctgtactatgccttaggaaaccgaacaacctgcgatatatgtcacaaatattttattctggttttgtcagtaatgaataatctgacaattaattatggctcgcaaacgtcaccagaactgacgggtattagttatgaagatgctaatgatttgatcactgaattaatactgtttattgaagacgtcaatgcggataatgatatggaatatcccgcacacttgaataaaattcaagctcttcttaattttgccgtggctaattaa

SEQ ID NO: 5654 - DNA, 1350 bp, Escherichia coli
atgacgcctgcccacgatgagcgcagcagcattgcggcgaaaggtttaaccggcgaaggctacaaaggccacgttttctgggatacagaagtatttttgctaccgttccatctgtttagcgatccgacggttgcccgaagtttactgcgttatcgctggcacaacttgcctggcgcgcaggagaaagcgcgacgcaacggctggcagggcgctctgtttccgtgggaaagcgcgcgtagcggcgaagaagagacgccggaatttgccgccattaacattcgtaccgggctgcggcaaaaagtggcctctgcgcaggcggaacaccatctggtcgccgatatcgcctgggcggttattcaatactggcggaccacgggggatgaaagtttcattgctcatgaaggcatggcgctacttctggagacggcaaagttttggattagccgcgcggtgagagttaacgatcgtctggaaattcatgatgttattgggccagacgaatataccgaacatgtcaataataacgccttcaccagctatatggcgtattacaacgtccagcaggcgctgaatatcgctcgtcagtttggctgtagcgacgacgcgtttattcatcgtgcagaaatgtacctcaaagaactgcggctgccagaaattcagcccgacggcgttttgccgcaggatgattcgtttatggctaagccgttgattaatctggcgaaatacaaagtggcggcggggaagcaaaccattctgctggattattcacgcgcagaagtgaacgagatgcagatcctcaaacaagctgatgtggtgatgctcaattacatgctgccggagcagttctcagcggcatcgtgtcttgccaatctgcaattttatgaaccgcgcactattcacgactcgtcattaagtaaagcaatccacggcattgttgccgcacgctgtggcctgctgacccaaagttatcagttctggcgcgaggggactgaaatcgatcttggtgctgatccacctagctgtgatgacggtatccacgctgccgcaactggcgctatctggctgggggcgattcagggttttgccggggtgagtgtgcgtgacggtgaattacatctcaatccggcgttacctgagcagtggcaacagttgtctttccctctgttctggcagggctgcgaattacaggtcactctcgacgcgcagcgtattgcgattcgaacttctgcgcctgtttcactgcgcttgaacggtcagcttatttacgtcgctgaagaatctgttttctgtttgggggattttattttgcccttcaatgggaccgctaccacgcatcaggagggtgaatga

SEQ ID NO: 5655 - DNA, 660 bp, Escherichia coli
atgaaactgcaaggggtaattttcgatctggatggagtaatcaccgataccgcgcatctgcatttccaggcgtggcagcagattgccgctgaaattggcatcagcattgatgcgcagtttaacgaattcctaaaagggatcagccgcgatgagtccctgtggcgaattctgcagcacgggggtaaagagggcgattttaacccacaggaacgagcgcaactggcgtatcgcaaaaatctgctttacgtccactcactgcacgaactgacggttaatgctgtgctgcctggcattcacaatttgctggtagatctccgggcacagcagattccggttgggctggcttctgtctccctgaatgcgccgacgattttagcagcgctggagctgcgcgagtttttcaccttctgcgcggacgcttcccaactcaaaaattcgaaaccggacccggaaatctttctcgccgcctgtgcagggctgggcgtgccgccacaggcatgtatcggcattgaagatgcgcaggcgggcattgaagccattaacgccagcggtatgcgctcggtggggatcggcgcgggcttaaccggggcgcaattattgttgccctcaacggactccctgacctggccgcggttatcggccttctggcaaaacgtatag

SEQ ID NO: 5656 - DNA, 234 bp, Escherichia coli
atgtcagtacgtagtttgtaccgaatgtttgccgataaaggtttggtggtcgcgcaatatattcgtaaccgtcgtctcgatttttgtgcagatgcgattcgccatgccgcagatgatgaaaaactggcaggcattggctttcattggggattttccgaccagagtcatttttcaacggtatttaaacaacgctttgggatgacgccaggcgagaatcggcgtaaattccgctaa

SEQ ID NO: 5657 - DNA, 171 bp, Escherichia coli
atggacggtgtggtgattggtgagaacagtattgttggtgtttccgcatttgtgaaagccaaagcagaaatgccgactaattacttgattgtcagcagcccggcgaaagcgattcgtgaactcagcgagcaggagctggcattgagaaagcagggcatcaggtgctggtga

SEQ ID NO: 5658 - DNA, 567 bp, Escherichia coli
gtgaccgccgccgctgacgtccagtgtaccgtcctgattcaccaccgcgttattacctgcgatttcggtacctgtagagccctgaccatcaacggtggtgttaccgttattgttcacggtggcttcatcaccgttaacctgtgtgccggtgccgccgttgctgatggcgttgtcgccgtcattgttgacgatggctttatcaccgtcgatcagaataccgatggaatccggatcggtaaccgtcataccgcccttgttgtccaccgtggcgctgtcgccggtgatatcaatcccgtgaccgccgccgctgacatccagtataccgtcctgaataactttcccgttattaccggcgatctccgtgccagtggaatctttaccatcaacgatggttttgccattgttgtttactgtggcattatcacccgtaataacaagctcaccgttatgattatattgccacttcgttgcgccatctgcgctcaccccgtcaagggcaaccgtgttattcgcttcatcaatttgccaaatattaatagttgccttacggccattgctatcttgtag

SEQ ID NO: 5659 - DNA, 945 bp, Escherichia coli
gtggctacgattgcattccaggggaatcttgcgggaataatgagaaagataaaaatagggctggcgctgggatctggcgcggcaagaggttggtcgcatattggcgtaattaatgcgctaaaaaaagtgggtattgaaattgatatcgttgcaggatgttcaattggttcgctggtgggcgctgcctatgcatgcgatcgattatctgcgctggaagattgggtgacctctttcagttattgggatgttttacgcctgatggatctctcctggcagcgcggtgggttactgcgcggcgagcgtgtcttcaatcaatatcgcgaaataatgccggaaacagagatcgaaaattgttcccgtcgcttcgcggctgttgccaccaatttaagtactgggcgtgaattatggtttactgaaggcgatctccatcttgctattcgtgcatcatgcagtattccaggactaatggcacccgttgcgcataacggctactggctggttgatggcgctgtagttaacccaattcctatttccctcacgcgtgcattgggggctgatattgtgatagcggtcgacctgcagcacgatgctcatttgatgcaacaagatttgctctcctttaatgtcagtgaagaaaatagcgagaatggtgattctctgccgtggcatgcgcgtctgaaagaaaggttaggcagcataacgacacgtcgggcggtgacagcgccaacggcaacagagattatgaccacttctatccaggtgctggagaaccgccttaaaaggaaccgcatggcaggtgatccgcccgatattctgattcaacctgtttgcccgcaaatatctacgcttgatttccatcgcgcgcacgctgccattgcggccggacagctggcagtggaaaagaaaatggacgaacttttgccgttggtacgcaccaacatttga

SEQ ID NO: 5660 - DNA, 1092 bp, Escherichia coli
atgaacctgtttaatcccgacaggttaatcacttttcctgccgatgatccacaactggtgaaacaactgcaaagcggtacgaaagtttatctggcgaaatcaggcgatcatcggtatgccgacggatgggcattcgtcaaaatggcggtgttgattattgcttgtttctcctgttacttactggcgttatttcaacgtcaatggggactgtatctgttgtggtatctcgcgatgatgttttgcgccatgttgttagcggtcaatgtggtgcatgacgcttcgcatgatgcgtttttgcgtggtaaaaagaccaatgcccggcttaaccggtgggttgcttttcctatggggctagatccggactgctggcgggtgcgccacgttcgctttcatcacggttttaccaatattgaattttacgatccagatacagcagaaaatggcattcttcgccagacgccgtggcaacggtggcgaccttttatgcgccagcaacatcgctattggccactggtcgccgcgctcacctttccctggtatatctgggtagtggactggctcgatcgcgcagggtttacgccggtcacgcgacatctggccctgcgaggctttgctggctggggatatttcttagccgggaaactggcgcattgtgcgctgtgtctgataattccctggcttttgtctgattttagttttatgaccatcctgctgacttatctgctcagccagctgctggcgtcattgatttttgtgacgttgattattggaacgcactgggcgaagggacatacgcagttaccaccagaagagggcaaaatgcccgtgggcagactggcgcatacctttgctaccacctttgattggacgccgcaacctgcatggcttggctactggctgggtgggattaatctgcaccttacccatcatctgtttcctcactggcatcatcgccattattcggcgctaagccgcattattgcgcaaattgccagccagcaaggtctggattatcagttgttgacgttagcggatttgttgaggctacagcagcagtttttacggcgaatgggggagaagccgaaggtttga

SEQ ID NO: 5661 - DNA, 1125 bp, Escherichia coli
atgagtgatttattattccccatcatatcgatggtgctgttggtgttagccgaagcgggcgtgttgcaattcaccgggcggcaaaaagtggactggctggacgttatttttaatatcaactccggtcatatgatgctgtggttatttcgctgcctggaagtgctctgctatggcctggtggtcaatcacttcagccttggactgtttgataatgtgccggtgatcctgctgtggttgtttactatcctggcgtgggatttcggcttttactggctacatcgctggcatcacgaaatgcgcccgctgtgggcggtacatgtggtgcatcatcagggggaacactacaacctgtcattaggcgtgcggaactcgtggtactcctcgttaacctcaatcccgttttttatgctgctggcgatgcttggtgtgccgttacaggtctttttggcggtttctattattcactatagttggcaattttttaaccataacgcactaacgccgaaactgggctggctggaaaaagtgctgatcacgccttcgcatcatcgcgtccatcatctgaatcaaaagcaatatgccgataccaattacggtggcacctttttgttgtgggataaacttttcggttcgtatagtgccgggccggaatacgacgtaggctacggcgtaaaaaatagtcgcttgtcctgtaacccgatgcgcgagagtaatctgccatttttacgcttaatgggcttttgctcatttggcaaagcgattgaaggtcgctaccagagttctccatgggcggtaggggcaggggtgatcctgctgtttatgctggtgcttggctacattcaacaatatggctatggcattgagtttattaccagcgagcaagccgtattatttgttctgctggcggcaggctccgttgcgctggggggcatgagcgacgggcagcattggggtatgattttgtggtgctctgtgacgttgtcactgctctattttattgtctatatgtgttcatggagtactctgctctggaagggattagtgggtattctgctggcccattgcctgttatttgtaatcggcgtaggacgtaaatcgctaaggaaacagtatgaacctgtttaa

SEQ ID NO: 5662 - DNA, 603 bp, Escherichia coli
atgagcaattcactgctacgcctgaaacagatgctgctgggctggggaactgttggggttatctacaactttagcgactacctgcaaggtgagggatatcaattaacaccgtcaataattgataatttgattgcgttttccccctccgctgtgtggctgtatctctcgttttttttcattgtgccgttaggttatttatccacgccactttgccacctgcgctggctggcccgttcaatgcaaatttccgcactggtggctggcgtattttatcttctctggcccacaaccatgcattatccctcgtttgatcagatggggatatccgcgggcgcactcaacaggctgatcgccattgactcaagccagaactgttttccctccttacacgccgcgctaacgctgttggcggtatgggcgattgctaaaaaggggaaccgttggctgacgctaatgagcgtggtctgggcgatagcaatcgccttttcgattctgcaattacgcagacatttatttatcgatttagtaggcggcgcgttgctggcgtcgatttgcggttggatatgcgcaacatgcgagaaaaggaagacacaatatgagtga

SEQ ID NO: 5663 - DNA, 1287 bp, Escherichia coli
atgatcccgttgatgttgatctggcgctacttccgtacccgcaggctgcatttcaccgatcgcgaggcactggaaaactggcaggcaaaaaggctgcatcagttccggcaaaatgtcttatctcatagcccgtggtttcagcgttatctgacgttgccctttaatcagtggccaatgatggataaagcgttaatgatgacgcacttcgatgagatgaataccgcaggtttaaagcgcgacgaacttctcgattgtgcaatgcgcagtgagcagagtcgtgatttcaaaccctgcgttggtaagttcagcgttgggctttcatcaggtacatccgggcgtcgtggactttttgttgttagcccgcacgagcaacagatgtgggccgccggtgtgctggcaaaagtgttgcccgatgatttatttgccaaagagcgggtggcgctgtttctgcgcgcggacaacaacctgtatcaaagcgtgaataatcgctggttaagtctcgatttttacgatctgctagcgccatttcaggcgcaactcaaacttctccaacagcgagcgcccacgattattgtcgcgccagctcaggtattacgcgcactggcgctggaggtgatggccggcgaattgacgctaaaggtcaaaaaagtgatttcggtggcggaagttctggagccgcaggatcgggaattactgcgcaacgtgttccacaatgtgggggaaatttatcaggcgacagaaggctttctcgcttccacctgccggtgtggaacgttacatctcaacgaagagtttgttcacattgaaccgcaatggctggatgagcaccgtttcgtgccgatcgtcacagactttacccgcaccacacagccgatagtgcgttatcgactggatgatgtgctggtggcaagcgaacagccatgcccctgtggcagtgcaacaatggcgattgcgcgtatcgaagggcggcaggatgaccaactgcaactaccaacaagatccggcgatattcagaccgtttttgccgatgcctgtagtcgtgtgctggcaatgacactgccgctaacagtcgattatcgcctgctacaaaccgggtcagcacaattgacgttaatcgccgattgcgagctgtggatgctggagcattgccgggaggcgttgaatgccttgtttatacgccaggatatcgctgtcgggcaattaatttggtcgctggaactgcaaactgtgccagtctcttttacagccaagcggcggcgcattgtgcgtcagtgggggcgggaatga

SEQ ID NO: 5664 - DNA, 807 bp, Escherichia coli
atggcaaaaataaccgcatttgaaacgggctggtgtacccatattagctgtattgcgctgaaaggggcagggctgaaagtgtgcaaattccccgcccgcgcctggctgctggaggtgggcgacaaacggtggctgtgggacacaggctattcatcgtggttcgaacactacacgcaatctggtgtgtttcgtctttatcgccaggtcacgccggtttatttcgatccgcaacaggcgctggtgcgacaactttctgccaccggcctcgcagcgaaagatgttgatgcgattattctgtcgcattttcacgctgatcatattgctggcctgcgtgatttccctgatgtttcctgcatctgttctggtgaaggctggcggcaagtaagaactctgcgtggtgtcactgcgctgcgccaggcctttgtgccagggctaatcccggagaattttgactcctcactgcgctttattgaaagtttcgcatcggtgaatttgcccgcgcaactggcaccgtttgagtgcggctatttgctgccagaaagcaatggcgaaattattctcgtgccgcttccaggacatgctgccggacatattggcgcgtttgtgttaaccgacaacggctggactttactggctggcgatgcggcatgggcgccagctaactaccgggagctgcgagggccttcaccactggcgcatctggttatgtccgacagccacgcctactaccacacgcttgggcaactccatcagctttggcaaaacggtgtggtggagattcgtttgtgccatgagggggatttatga

SEQ ID NO: 5665 - DNA, 1017 bp, Escherichia coli
gtgaagatcctcgtaacaggggcgaccagcggccttgggcgaaatgccgtgcaatatttgttgcaatcgggtgagtcggttgtggcaacagggcgaaattgtgaggttggcagaagcctgacaaacgcaggcgcacagtttgtggctctcgatttaaccgaggcaaccgaggatgactgcgcccgcctgatggacggctgcgatgccgtctggcactgtgcggcaaagtcctcgccctggggcgacaaaacggcgttctggcttgccaatgtcaaagtgacccacactctggcacaggcggcaggcaggctgaatattccccggtttatccatatctccacgcctgcggtttactttgattttcaacatcactatgacctgccagaaacttatcttgcgcgagcattctccagccattatgccagcagtaaatatgccgctgagcaggttattgctggcgctgtttctcgatattctgccacgagatttattcttttgcgtccccgtggtttgtttggcccccatgaccaggtaattgttcctcgtctgatgcagcaattgcaacagggcggcggttgcttacgtttgccgcgcgggggcgacgcgttattggatctcacgttcgtgcaaaacgtggtgtatgccatgcggctggcaacgaacgttgaaggcttacgctcgggcagtatttacaacatcagcaatcaccagccgcagcagctatcggtgatgcttgacgccttgctgcaccagcaactgggcttgagttaccgcattgctgctgttccctggtcgctgctttctctgatcgcgcgtggcctggaactgtatgggaagtgcgttaatcaggaacctgttatcacacgatacagcgccggaacactctgtttcgatatgacgctgagtgcgcaaaaggccattacagagctgggatatcgcccacgcttttcgatggaacaaggtattgcaatcacgggacaatggctgagggaacatggcaaaaataaccgcatttga

SEQ ID NO: 5666 - DNA, 1008 bp, Escherichia coli
gtggctcgacctaatcaaccgacgatctccgcggcgttaaaaataatcgccacggggatcgccttaccccctgatcaaatcacttctaaacaactggatgttcagttaaataagccagttggctatgttgagcgacgttccggtatttgctggcgctattttgcccgcaacgacgccagccaggccgaactggcggcagaggctttacataatgcgttagtagcggcagccttaaatccttctgatattgatctgctaatttgtgcatcggccattgccgtacaggcattaccctgtagcgcaattcatattcttaaagccgcagccatgcccgtaggcgttgccgggtttgatatcaacagtagctgtgtgagctttatttccgctcttgaagtcgctgccggattattaaactgtggagcatatcgacgcattgccatcgtttcggcagatattgcttcacgcggtatcgactgggatcatgaagagtcttcattaatttttggtgatggcgcggcgtgcgcgattgttgagcggggcgatgggcgcagcgggattatcgctagcctgatcgaaatgtatcccgaaggcagcgaactgtgtgaaattcgtgctggcggtacgcggcgtaatcctcgctctggtgtgagtgatagcgactttctttttcatatgcaggggaaaccgctgtttcgttttgcttcttcgcttattgaagattatttttctcggttgctgcaaaaaagcagcctgcaactgtctgatatcggcacggtcgttccgcatcaggccagtcatctttcccttgaacatatgcgtaaacggctgcgagtgccggaatctgcgctcatcgatgtgtatcgtttttacggcaatcaggtcgcggcctctatccccacggcgctgcatgaagcagtgattagcggtcgtttcacagcggataaacctgtaatgttgattggcacggcagcgggactaacgctggctggcatggtgcttttaccgtga

SEQ ID NO: 5667 - DNA, 3744 bp, Escherichia coli
atgagtaaattcctggaccggtttcgctacttcaaacagaagggtgaaacctttgccgatgggcatggccagcttctcaataccaaccgtgactgggaggatggatatcgccagcgttggcagcatgacaaaatcgtccgctctacccacggggtaaactgcaccggctcctgcagctggaaaatctacgtcaaaaacggtctggtcacctgggaaacccagcagactgactatccgcgtactcgcccggacctgccaaaccatgaacctcgcggctgcccgcgcggtgccagctactcctggtatctttacagcgctaaccgcctgaaatacccgatgatgcgcaaacgcctgatgaaaatgtggcgtgaagcgaaggcgctgcatagcgatccggttgaggcatgggcttctatcattgaagacgccgataaagcgaaaagctttaagcaggcgcgtggacgcggtggttttgttcgttcttcctggcaggaagtgaacgaactgatcgccgcatctaacgtttacaccatcaaaaattacggcccggaccgtgtcgctggcttctcgccaattccggcaatgtcgatggtttcttacgcatcgggtgcgcgctatctctcgctgattggcggtacttgcttaagcttctacgactggtactgcgacctgcctcctgcgtctccgcaaacctggggtgagcaaactgacgtaccggaatctgctgactggtacaactccagctacatcatcgcctggggttcaaacgtgccgcagacgcgtaccccggatgctcacttctttactgaagtgcgttacaaagggaccaaaactgttgccgtcacaccagactacgctgaaatcgccaaactgtgcgatctgtggctggcaccgaaacagggcaccgatgcggcaatggcgctggcaatgggtcacgtaatgctgcgtgaattccacctcgacaacccaagccagtatttcaccgactatgtgcgccgctacaccgacatgccgatgctggtgatgctggaagagcgcgacggttactacgctgcgggtcgtatgctgcgcgctgctgatctggtggatgcactgggccaggaaaacaatccggaatggaaaactgtcgcctttaataccaatggtgaaatggttgcgccgaacggttctattggcttccgctggggcgagaagggcaaatggaatcttgagcagcgcgacggcaaaactggcgaagaaaccgagctgcaactgagcctgctgggtagccaggatgagatcgctgaggtgggcttcccgtactttggtggcgatggcacggaacacttcaacaaagtggaactggaaaacgtgctgctgcataagctgccggtgaaacgcctgcaactggctgatggcagcaccgccctggtgaccaccgtttatgatctgacgctggcaaactacggtctggaacgtggcctgaacgacgttaactgtgcaaccagctatgacgatgtgaaagcttacacccctgcctgggcagagcagattaccggcgtttctcgcagccagattattcgcatcgcccgtgaatttgccgataacgctgataaaacgcacggtcgttcgatgattatcgtcggcgcagggctgaaccactggtatcacctggacatgaactatcgtggtctgatcaacatgctgattttctgcggttgtgtcggtcagagcgggggcggctgggcgcactatgtaggtcaggaaaaactgcgtccgcaaaccggctggcagccgctggcgtttgccctcgactggcagcgtccggcgcgtcacatgaacagtacctcttatttctataaccactccagccagtggcgttatgaaaccgtgactgcggaagaactgctgtcgccgatggcggataaatctcgctataccggacacttgatcgactttaacgtccgtgcagaacgcatgggctggctgccgtctgcgccgcagttaggcactaacccgctgactatcgctcgcgaagcagaaaaagccgggatgaatccggtggactatacggtgaaatccctgaaagagggttctatccgtttcgctgcggaacagccggaaaacggtaaaaaccacccgcgtaacctgttcatctggcgttctaacctgctcggttcttccggtaaaggtcatgagtttatgctcaagtacctgctggggacggagcacggtatccagggcaaagacctggggcagcagggcggcgtgaagccggaagaagtggactggcaggacaacggtctggaaggcaagctggatctggtggtgacgctggacttccgtctgtcgagcacctgtctctattccgacatcattttgccgacggcgacttggtacgaaaaagacgacatgaatacttcggatatgcatccgtttattcacccgctgtctgcggcggtcgatccggcctgggaagcgaaaagcgactgggaaatctacaaagccatcgcgaagaaattctccgaagtgtgcgttggtcatctgggtaaagaaactgacatcgtcacgctgcctatccagcacgactctgccgctgaactggcgcaaccgctggatgtgaaagactggaaaaaaggcgaatgcgacctgatcccaggtaaaaccgcaccgcacattatggtcgtagagcgcgattatccggcaacttacgaacgctttacctctatcggcccgctgatggagaaaatcggtaacggcggtaaagggattgcctggaacacccagagcgagatggatctgctgcgtaagctcaactacacaaaagcggaaggtccggcaaaaggtcagccgatgctcaataccgcaattgatgcggcagagatgatcctgacgctggcaccggaaaccaacggtcaggtagctgtaaaagcctgggctgccctgagcgagtttaccggccgtgaccatacgcatctggcgctgaataaagaagacgagaagattcgcttccgcgatattcaggcacagccgcgcaaaatcatctccagcccgacatggtctggccttgaagatgaacacgtttcttacaacgccggttacaccaacgttcacgagctgatcccgtggcgtacgctctctggccgtcagcagctgtatcaggatcaccaatggatgcgtgatttcggtgaaagcctgctggtttatcgtccgccgatcgacacccgttcggtgaaagaagtgatgggccagaaatccaatggcaacccggaaaaagcgctcaacttcctgacgccacaccagaagtggggtatccactccacctacagcgacaacctgttgatgctgactttaggtcgcggtggtccggtggtctggctgagtgaagccgatgccaaagagctgggtatcgccgataacgactggattgaagtcttcaacagcaacggtgcactgactgcccgtgcggttgtcagccagcgtgttccggcagggatgaccatgatgtaccacgcgcaggaacgtatcgttaacctgcctggttcggaaattacccaacagcgtggtggtatccataactcggtcacccgtatcacgccgaaaccgacgcatatgatcggcggctatgcccatctggcatatggctttaactactacggcaccgtaggttctaaccgcgatgagtttgttgtagtgcgtaagatgaagaacattgactggttagatggcgaaggcaatgaccaggtacaggagagcgtaaaatga

SEQ ID NO: 5668 - DNA, 1176 bp, Escherichia coli
atgctcactgatacgcaatgccgcactgctaagccgaaagaaaaactctatcgacttaatgatttcaatggtctctacctcgaagtgaaacccaatggtaaaaaggcatggcgctatcggtttaaactcaacggtaaatccagcatgtttgcgctgggtgagtacccgacggtaaaacttgccgaagctcgcgagaaatgcgagcaagcgcgtaagcaagtcgcagatggagttagcccaacacaggctcgtcagttagataagatccgcaaggtcaacgacgcatccaacacctttgagctaatcgctaaagaatggttgcagatgaaagactgggccggaattaccaaaacgcggcgactggatatgcttgaacgtgtggtttttcccgccatcggtaagctccctgtcagagagatcactccacaccatatacttaaaattcttcaggaaaccgctaaacgaggagcaccaacagttgccgctgaagcccgtcgcaccatttcatcagtttttgagttggcagtcgcgacgcttagagctgatagcgatcccgtatggcctgtgcgcaaggcccttccggctaataagacacagcacaaacaggcactaaatccccaacaaatcggaaagttactaagctgttttgacaatagtcgtggctcgtatcaggttaactattgcatgtggcttatgtggtggacattggcgcgtcctgcagaagccaccgaagcagaatggacagaattcaatcttgataacgccctatggactattccggcagcgcgaatgaaagcccgcagagaacacgttattcccctacccttccaagctgtcaaaatgctcagaacactacagggattaaccgggcatcggcagcaccttttcccgggcagagacaatccgctaggtccaatgacatcgcactcactgcgccagctacttaaaagcctcggctggagtggtacatatagcccacatgcaacccggaccacaggaagtacccgtttaaacgagttgggctatcgacctgatgctattgaggcccaacttgcgcacgctgataccaacaatgttcgtcgcacatacaaccatgcaacttatcttgatgagcgtaaagtgatgatgcaggaatgggctgatatgttggacaaatgggtagcaggattcaagtag

SEQ ID NO: 5669 - DNA, 285 bp, Escherichia coli
atgggcacaccacgatttaccccagagtttaaggaagaagctgtccgtcaggtcactgaacggggctattccgttgccgatgtttctgaacgcctcggcgtatcggctcacagcctttataagtgggtccggtcagtcagaccggataacagcgggcatcaggcgcaggatttactggatgcgcggacggagattctcaggcttaaagcgcagcttaaacgtactgaggaagaacgggatattctgaaaaaggcagcgcggtactttgcaagggagcccgactga

SEQ ID NO: 5670 - DNA, 492 bp, Escherichia coli
atggtaaaacccaaccaggtgtgggtgactgatattacctacatccgcacctggcagggttggctgtatctggcggtggttatcgatctttttgcccgtaatgtggtgggctggtcgatgaaaccaacgctgtcgcgcgagctggcactggatgcgctgctgatggcagtctggcggcgtaagcctgcagaaaacgtcatagtgcacagcgatcagggcagtcagtatggcagtgatgactggcagcggttctgcagggccaacaatctggcgccgagtatgagccgtcgtggcaactgctgggataatgcggtggcagaatcgttcttcagttcactgaaaaaagagcgcatcagaaagcggatatataaaacccgggacatggcccgggcggatatcttcgattacattgaagtgttctacaaccggacccggcgccacagtcatctgggtggcgtcagcccggaggccttcgaaaaggcctcaccgtga

SEQ ID NO: 5671 - DNA, 171 bp, Escherichia coli
atgcgccgaaagctgctttcgcacatgttacagggactggaaagccgggctgtttacgattacgttgccagtcataagggcgtttgcgcactggagcacgatgggtttttttcatataaagaggtcactgactggtcccatccatatctgttgattgagaaaaagcattaa

SEQ ID NO: 5672 - DNA, 252 bp, Escherichia coli
atggccccgaagctacttatcatcgatgaaataggttatctgccgttcagtctggaagaagccaagctgttcttccaggtcatcgctaaacgttacgagaggagcgcgatgatcctggactccaacctgccgttcgggcagtgggatcagacgttcgccagggatgcagccctgacatcggcgatgctggaccgtatcttacatcactcacacgtagtccagataaaaggagagagctatcgactgaagtag

SEQ ID NO: 5673 - DNA, 198 bp, Escherichia coli
atgagtaacccaggcccacttgcagcgttagtgtatggttttattttgatagttttgctatcggtatctttaatcctttattcaattggacgtaccataaaaaacgagattggaaaaggtatagcatacgcgcttactggtattttattaattctgtcattattagttggcgctttcattttgacgcttcttacataa

SEQ ID NO: 5674 - DNA, 138 bp, Escherichia coli
atgggtcaacatggtaaatctttaccaagttttgatgctccggaaacgcttaagggccgtaaaatagaatgggaatacgaaaatctcacccacggcaacaaggcatacaacggatacgtgacggccattcttaactga

SEQ ID NO: 5675 - DNA, 1197 bp, Escherichia coli
gtgcgggtttttaaccatctgggggatatggtgccgtttgcgctggtggcgcagaaaacccagaccgttacgccagagacagtggctctgcgtcttttcccgcttgatatgtcgccggttccgccgcgtgatgagggtcaacgtagtggggatgctgttgttttacgttcaaaaaacggtattgaaattcatttgcaaagcgatgatgtcactgcgctcgggcagagctatttactgacgttgccggaagagaggaaagactctctttcactgacgcaattgcgtctgaactgggggacgccgacgggcaactggcaggggaaagcctcggtttatgtcagccgtgatttacgctactggcgacccgtgcaggaagatgcgccgttaatggatctgacgcgggatagcgatcgtctgaaaatggacgccatcagcaccaacctgacattgtcacttgaaggaaatcgctacctgctggtgatcctcaactcgcaaagcccggcactgacgttaaacagcgtgagcgctattgctgacagtaatgagccggagtccgaacgtattgtgattggcgctcgggcggataaggtgtcggatgatgaagccgtctggcgatggacacagccgcagcccctgacatcgttgcggatcgatctggaaaatgaaggcgttttaccggtggaactggtctggcgcagcggcgaaaaagaaccctggcagtcactgacaaaaacggtgttgtatcgcctggacgggaagcgttcagaagatattcgtcttcctggccagttagttgaggctgttcgaatacgtacaattaatgcgcgattgccggaggcattgccagcattgagcggtgcgcgcgacagttatcaactggtttttaacacgcaaggcaaaggtccttacatgctggcgtggggaaaccgggcggcgaaaaaggccgatgttggactcgatatgttgatccctgcgtcgctgcgtaaaacgcaggagatagataatctgccgtgggctataccgcaggagagcgtaactctcggcggtgaattgcgactaacggcgacgtcggcagccgaacaacaaagtcagtggaaaacgctgctggtgtggggggcgttaatacttggcgttgccgttctggcgtttatggcatggcgaatctggcgagaagttaaaaaggacggtgcggcgtaa

SEQ ID NO: 5676 - DNA, 213 bp, Escherichia coli
atgaaatggatgaaagcggtgttatgcagcgtgctactgagtactgcgggcgcggcggtcagcagcgatgaagtgaaggaagcgccaacggactacgcaacaggcgtcgcgctggaaaccacgggggcattcgccctggtatcgcatttcgctgccgcaggtggtgtatcagagcactgcatggccggatttgcgcgatgtgcgggtttttaa

SEQ ID NO: 5677 - DNA, 2658 bp, Escherichia coli
atggatgagctgctaacccttggctgcattgctttattcttcgcactggtggtggttcccatcctcgcgattatcgcgctcagccgcagcacggctgttcgttctgagctggcgaccctgcgtcgccgggtggaggtgcttgagcagcgcggtgtgactgaagcacccgccacagtggtaacaactgtgccgcagagtgtttcgcagatggttgtgcctgttgaaacgtcttcgcctgcggttaacatcgtgctgtcggagcctgtggctgatgtcacgcctgagtccgttgacccctggcgtccacaaccgaagccgcaaaacgaggcgctacccacaccagcggtcgaacaatcttccgcttttggtggggtgatgtcgtccctggtgcgctggtttatgcagggcaacccgctggcaaagctgggtattctgcttctcttccttggcttctccttcctgctgcgttatacggttgaacactccctgttcccgcttgagctacgtctggtggcgacttcgctgtttgcgattgccctgctggtagtgggctggcgattgcggcataaacagctggtttatgcgctgatcatacagggtggagctacggggacgctctatctcaccgtttttggcgcattctggctctggcagatgctgccgatgacgctggcgtttgcattactggtggcgatttgcgcggcgagcgtgggactggcgattatgcaaaaagcgctcagcctcgcgatgctggcaagtatcggtggctatctggcaccgctgttgctttccaccggcggcggtagtcatgtggcgctcttctctttctaccttctgctttccgtcggtattctcgccatcagcatctggcaacactggcgcgagcttaatctgcttggcctgttatttacctttggtatcggcggtctttggggactcgacggctatcgatcagagtattacctgagcagtcagcttttcctgatagccaatacgatcatttttggtgtgctgagcgtggcgctatcgctacgagcacaggagaaaggtaagcagattattgatggcgtgctgttgtttgcatcgccgctggtcggttttggcatgcagtacgccataacccggcatatggaatatggtccggcgcttagcgcgctgggttacggcggtttctatctggcgttagcatggcttgcattgcgtcgctatccctctttggggaggccgctggtgctggcggcgctggcgctgggtggggcatttaccacgctcgctatcccactggcgctttcggcccgctggacggcgatggcctgggcgctggaaggtctcggcatcctctggctgggcgtgcaacagcagcagcggcgtatgagctatagcggcactgcgctgctggtgctggcagtgtgcagcgcgctgtgggcgcagatgaacgggatgagcgcgctttctctggtgctaatctttgccgtactcagcctcagctggctggctgccgcctggctgtggcgcaatattcagttgcagggtagttgggttctgttggctggcggtttgatcttctggataatcgcgctcattggggcatcgcaactggtgctgaaaaaggactcgctggtgctgtctggcgtgctggcgttaatggcgatatcggtctggggctggcggattgtctctggtcgtctggcctggtgggagctggatgtcagcaaatggttgctgtggccgacgatgctggtgatgctgctgtctcaaatttcacaacatgagatttttgctgcgggctggcagaatctggcctggtgtctggcgttacccgctgcgggggcattgctctggcgtgatgctgagacgttgccgccgcgcctctccagactggcgcacctttcactcttctggatgattctgctcgcgctggcggcggagctattctggtttgcgcaagatctgccatggggcatggcggcgtggggctccggcctgatgatggccgcggggggcctgctcatctttctcgttcatgaggcggttcatcgtcagctatggccattccgaagctggcccgcactctacgcttctcaggcgatgataccggtagctgcggtattggttgttctgctagtactgacgaatttgcaggatggcgtagtttatcgccagacctggctgccgctggtgaatccactggaggagggggccgcttttgcgctactgggactcattgtattttatcgcgtttcgcagcgctttttcccggtgcagatttcggtatgccgtccctggccgctcattgcactgctggcgcttagcttctggtggctgaatggcatcctgctgcgcgcattggcctggtacggcgaagtgccctggagcgcggaaacactgtggcattcgcggctgattcagacctgttttgccctgttctggatgctggcggcattagtggtgatgctacgtgcgacccggcgttgctcacgtcgcgaatggctttgtggatccgtattgttagggattgttattgtgaaactgatgttggtagacagtgcgcgtggcggcggcctggcacgcgcggtcacgtttatcggcgtggcaattctggtgctaatcgtcgggtatttttcaccgttaccgcccaaagcgggagaagaaaaatga

SEQ ID NO: 5678 - DNA, 681 bp, Escherichia coli
atgaaacgaagaactcgtattaactacacgccagagcaaaaggtgattatttgggacagatataagcaaggtgattccctgcatgatatccccagaatgttcgacagatttcactctactatcatgcctacaatccaccaggccggtggctaccgtcctcccgtgcgaaagcggcaccggttagcgttttcgcttgatgaaaaagaggagatatccagaggactggtagcaaaacgcatcatcagggacatcgctgctaaattatcaatagctccctcaacgattagccgcgagatcaggaggcacggcggtgcaaaacaataccgtgcagcaaaagccgatcctgctgcgtgggaaaatgctctgagaccaaaaccttgcaagctaattgaaagccccacattgtgtaaaatcattgcagagaagatgcatcaggactggtcgccggaacaaattggcggttggctaaaacgctgttatcccgataatcaggaaatgcatgtgtcacatgaaatgatttataaaacgctttttataccaacccggggagctttaaaaaaagagctgcagcaatgcctcagaagcggaagagtagtgcgtagatccaaaacctcatcacttaaagtaaacagagatacattctggtcacgaatgcccggttgttcgtgctttgcgttttaa

SEQ ID NO: 5679 - DNA, 1398 bp, Escherichia coli
gtgagtactgaaaaggattatccagtgaagatccctaagtgggtttatgaccgtattactgaaataacggattatgtcgtgggggatacgcaatgggctgttacccggcggcagacagtacggtggttcctggctcacatatggctggaaacagacgatgatggctggactatatgcactgtccgggatatccgtagcagctatgccagtctcctgggacagtgtgaaattagttaccagggggagtgctttatgtccacgctaactgatttcctgccgacactttcggatattgaatttcgtgcaggaaaagcgagcaaagacccggaaaagcgtagagccagtgcatggcggttcaaccccctgctgcctgtgtgtgatgagtctgccaggggtaagttaaatctggttgacttggatactggtgagtctgttagttttagagctctgcttcaggggaacgggaaagctcctgggcatgcgatagatgtagagaaacgccagacggccctaaaacaaacggaaaaggacttcttggccaaagttgggcgggggcgcatgagtatacagtttgtgaaggaattgcgtagccgtgagccggatcactattaccgcgcaggaatacgcagccttaaccatctctacaatggcaggattgagggacaatatgtcacttacgaccatcattatcgtctgacgtttggagggcggtattatgatcaagctttccagaatctgcccaatgagttcaaagctaaatttcggaccgggttactcaactatgacatcgaagcgtgcaatctggcctgtctgaaccatctgttcagacagtatgacgtcgattatcgtgtgaagtcatcgatatataaaaccatgatggaacataccgggctgacccgtaaacagtgcaaacagatggtccataccaccacctacagaattgggcgtgtgactattggtgttaatgatggccttggggcaaaagtgtatggatggtgcggtaacagcaaaaaaaaggcgctaaagattttgcgttggtggaaccgttatatcagtccattgaaatctgcgcttgagtcattgctggaacgtgtgcatggcgcacaccgcaagagttgttcatcaccgcgtaactatcacaggtacgctaatgaagtcggattaatactggatcttaatagtgaggtgtatcagcgtgaaaagactcaccatcatcaatatgcgcggaataaggcactgttggcgtttatgatctgtggtgtggagcaggcgtatatccgtgaggttgtcagtatgaaccctggtcgtgtctgcatgctggatcatgatggggtagtggcaacgggcgcgctttcactaccggactggcgtggtttcacgatgaaagtgaaggactag

SEQ ID NO: 5680 - DNA, 855 bp, Escherichia coli
atgaacgattcttattacttcagaacatctgacccggattacattcgtcacgcaccgtcaatgcttgagattttaagtaaagcattccccactattattacccagcaggaaagtgagtatgaactgcagcgtcttaaccatttactaaataaactgaaaggcagcaatcgctgctacaacatcattgctcaaaaactaaggcagtgcagaaacggatctccatgcaacagtcttatatgcccgcattgccagcgggaacgcattctggcgcaactggctatgttgcatgtcttgccggggaattcagcagaatacgtgggagtggtcctgtttttcaacaaggatacgcaaactccgccgccatggaagaacattggggcgctcagggcgcaaatcggtcgttataagcagaggataagccgggtacttaaccgcctggggtacgccggtccggccacaggcaccttcagtatgatgcgacatatgcctgatggcccagaagagcgtattttctgggttccacagttgtgtttgttcctgcccaatgacagtacgttgattaaggggctaaaagcgcatatgtcgcgaagtggtggggcattcattgatgcatcgacgcttaacacaccagtgatcgtgctcaggtataaagatcccgcgagactgatttcatgcgccctgaatccagtctggcacacagcagattacacactgactgataaagacgctcttgttaagtcaagaatggagctactgaaaggccggacactgttaaaaagtctgcttaccctggactcactcggaacaggtgtcgtttctttttcgtttgggcaacccccagggaaagtgcactga

SEQ ID NO: 5681 - DNA, 468 bp, Escherichia coli
atgaaagagataaaatcgaaaaccagttctgcgaaaaaaacgctggttccttggttcgaaactatggggaaacaggttggtttatcacaagaaacgatatcagcagtgttaaaggagcagcgtttacggatacgtaagcttaactacgcatctgcatatacagtgtccaatattctcatacaggattgcggcggggccgatgacatgtggagcaactacgctaaactggcgcttatccttgagcgttgtaaatacattccctgcgggagcagggcctgtgcatattgttctaccgctcagcaattacattatcagggggtggatgtaaccggggaatacgctttatatcagttgcctgagttatttttagattttttagaaacaaacgacaaaaattcctcttatcattgggattacaataagttagttgagcggcatgaagatgctcaggcgaggtcattcgggtaa

SEQ ID NO: 5682 - DNA, 198 bp, Escherichia coli
atgaacaccaaccgtattttgcgtaaaaaagaggtacttcatctgacggggatctcgtcagcgacgttgtaccgactcatctcgaaaggattctttcctttgtcaaagaggctaacgggcgacaatggccgggcggtaggctggctggagagtgatatcaataactgggttaacagccgtatgcaggcgggagaatga

SEQ ID NO: 5683 - DNA, 615 bp, Escherichia coli
atgattggtaaccaaagcaacaaggctgacgccagatgccaccgggaacggaaaagcagtaacgaggtctttaaatttctggagaagaagctttatctgggacgggatacccggcaaaaactggcactgattgcccggaaactgacgggagcgggttttagcccggataaattcgctgcggagaaagcggcagatgtgctgagtgcctgcgtgaaccacatgtttaatgacctgctcaatgagggagagccaaacgggatttataggccggaggaacaccccatgatagtcccggccaggtcccctaaggcactggaaatctatactgtttaccagcttgtaaaaggtcgttttgacaagcttcatacgggggagtcagatcgtgagaaatatgcttcggtagcagaaaaacttaatgagtatggaatatggaaaccccggttaaaacgactctctgacggtaaagaatgggcgcgtgaggatgttgcgtggatgcttcagcctgaaaatatcaatgcacaaattaacatccagaatcaaaagtacgcgcggttgagtgctgaagatgaaactgaaaccgagtctggcaacgcctcaactgctaaaaacatctga

SEQ ID NO: 5684 - DNA, 915 bp, Escherichia coli
ttgcgtcaggtcgtgccggtggtgcaaaccaccgtgttcgatgcgtatattgtcggtctggccccctcgggacggcgaggtatcaccagcctgttaaaccgcagcgccagcatacttaaacacggtgcggatgcagcagactatccgtgggaacaacttaactacgccgccgttgccaaagtgcgcgcggcactgctggatgacggttacgccgtgtcatcggtcaacatggcgctgtcagcactccggggcgtagcgcagacggcctttaacctcaattacatggatgccgaaacgctggcacgtatccggtcagttaagcgcgtgagcggcgatgtccagcgcaagggaagggcgctgggcaggcaggaaatccgggtactgattcaggctgcaaaacagcatccgcaatctgtacggcgctgtcgcgatgtcgccattgtgctgatgctttgcggaacgggcctgcgggccggggaactggttaaacttgagcgccgggactatgacaacggcatcctgacggtgaggcaagggaaggggcgtaaataccgtgaaattcacgtggcggatgcggtggacaaggctattcgtgcgtggctgaaagttggcgcagacgaggctgacagtgcgttgtttaggcgaattcagcgcagtggtaaggtcgcaagccaaccgctaactacgaccgggttaacgggtatcctggctgagttacagcaaacggcaggtatagcacgttttaccccgcatgatatgcggcgcaccttcatcacccgtttgctggagcagggcgtggatatcaataccgtccgccagttggcaggccacagcgacatatccacgacgacgcgctatgactgtcgtggtgatactatgaagatcagtgccagcaagcgcatcagatgtttttag

SEQ ID NO: 5685 - DNA, 453 bp, Escherichia coli
atgaccatgtttacccagcgtgaaacccgtatccttgaccaggcgcgtgacattattagccggtactaccagcgtggggttcaactctgttcccctgatgatgttcgacggtgcgtgatggttgagctggcaccgcttgaacatgaagagtttggcatcatcctactcgataatcagaatcagctgctgcaccgcgaaatcctgttcaggggtacgctaaactcggtcagcgttcacccccgtgaagttattaagcgtgtgctgaaacataacgccgccgccgtcatccttgtccataatcaccccagcggcgagcctgaacccagccggtgtgacatccagttgaccaaaaagcttcaggagctgctggaaatactggatgtgcggttacttgatcactttatcgtggcaggaactgaaacggtgtcgatggctgagcgaggactggtgtga

SEQ ID NO: 5686 - DNA, 540 bp, Escherichia coli
gtgacgactgacagagggatacgtgcgtctcaacagggcgaactggactgtctttgcggtgcttattgcgtggttaacatgctgagctggctgtatgacggcagggtgaaacgacgcccgttaatgaactggcttattcagacttatcagcagcgctggcctttgcatgaatggctgactgaaggaattgaagaagaccgcttagactggttaatagctcaggtgttgcagaaagggcattaccgccgccagttcccggttgaaatcaccagaccctttgcagggaagcgggggttaacagacgggcggctgttcagggaaatgcagcggtttcttgacgtcactgaccactctcgcctgattatgctcagcgaccagtttcactggtcccttctggtcaaaatggacgaagaaatgctctgcttcttcgacagcaacgggcgaaccaccatgccccgtaaagctttctccctgcgtactggcgtaacccgccgccagctgtttccagacgccatttacttcattgaacgggagttctga

SEQ ID NO: 5687 - DNA, 423 bp, Escherichia coli
atgaatattgtccatcaggaagggctagctatgcccgtcgatcaggaattaataaatatcatattaaatgaagcgggaaatccaccgccgcataaagccaaaattacagccgtcagtctgttatttaaagacctgagttacagcgctgaaaagggtggttaccatcctgtcgaaatacggattatttcacgcaatgatgaatggtattttgattacattaccgacttcagttatatggggacggtataccccgaacttgaaaaggaaattgatatcagctggagtcagcaatatgtctttcttgcttatgttggtgacctgcctgttaacgccggaagggagctgtttgaactctggcaatccaactttattcagtatcacggcatgaacatctacaccattaccgttctctgggaaagctaa

SEQ ID NO: 5688 - DNA, 489 bp, Escherichia coli
atgagcagtaagagaacagtttcggctatacctactcatcctgaagcttctgttgaagaggctaaagactggctgacagcagaggaattcactcatattgaggggatgccgggcactgcgcgtggcgccaggatgcgcttggaaaagctggcatccctgcacccggaaatacgtcgtaaaaggactgccgggaaaggtgtggtttaccatattagcgcagccacaatgtcgcttgatgatgagagaaacagggctaagggcgaagcgtttactctcaacgacagtgatcgccagctaagcctctgggtgcagctgtatcgcaatatgtcgccagcttcgcgggcgcaactgatggagcaggccctcaggctggtaaaggacgatctgatgtctcaggggcccaatgtttctgaactggcggtacaaatcatgaagctgcccgaagatgagcgtaagcgcctctttgaaaagctgaacgggaaggtgtga

SEQ ID NO: 5689 - DNA, 270 bp, Escherichia coli
gtgcgtaactcaacagcatcgcagaaaaagcaaatcaaaggaagttcagggaactggcatcgtgccgatattgtggcagcacttcacaagcgagggttaacgctggcgttactgtcacgcagtcacggccttgcgccacggacattaaataacgccttagagcgtcattatcccagagctgagcgcattattgccggggctctggatacgacaccggaaacattatggccggaaaggtatgcccttaaaaatggacctaatagcaggtaa

SEQ ID NO: 5690 - DNA, 528 bp, Escherichia coli
atggcaaccaccatcactgaaataacggaatgctttgagtattttttcagttctctttatcgcagggagttcgtcaaaaccctgcgtctgaacgaatgtagcgagcgggaattactgcctctggtacgttgctatttgctgggttggtttgcagataacgtctcaccggaagtaaaaagcaaactgccaggaactgtatccgggcacggttacattgattttgtcattgacgatgtggccgttgagtttgcagtacgtaaaccaactgcggcacgttccaatgtctctgcgaccgtcaacagtacagaagtaaagaaattgatgaaacatgacggcaaagccttgcttgtgctgtttgatttctctgacacaccctattcagaagaacagattgaatccttccgcaactggccctctcttggtcgagggaatcatcgcaagtctgcattcaacgtcgtttatttctttgtggaaaaacgcagaccgctggcactggggaaaatcaccaaaaacatccgtatcacttaa

SEQ ID NO: 5691 - DNA, 360 bp, Escherichia coli
atgaacagaaaactgttggccttattcatggcagccataacgctaccagtcgcagcagcgcagtacgtaaaacccggagcggttctaaccctgcatccgggacagaataacgctgaattcaacattaatgcctcaacgggggatggttcgggcgtatgcaatatggaggggacagcacagcaaatagctgccggagaaagtcagaagcgtcgctgggtctggaatgacaatgccagcgagtgtgttgcagtaattagtgaactgacaaacggtaaggccagcattatgacacgtggttgcgagggatactgcggggcttctgcggcaggcgcaatggatggtctatttaataagaaataa

SEQ ID NO: 5692 - DNA, 336 bp, Escherichia coli
atgaaaagagcaatacttctggtattaattgctgctggtttgctggctggctgcggcgagaaaacgccaaaatgtagtagtgatgatgcaaaaaatctggtcggggatattgcaagaaagacaatcgagaaagggatgaaactggataaggatgtgcgtatttctgtagaaaatgtcagaacaattagccatgaatcagatctggatgtttatcagtgcgctgctgatttaacgtttacaaaaccagatttgcaaaattctctaccaatcacctaccggattcagaaaactgatgagggtaaaggtccgttttatataaacgtaacaggtttataa

SEQ ID NO: 5693 - DNA, 246 bp, Escherichia coli
atgaaaaagatcatcatatttaccattatagctattatcacatttagttggctcgttacacacaatacaactgagtccgaaaaaatccctcctgctaatactccctttattattaagtctaacgtacctggcatgtgcaaggtcagcgccatcacaacctctacagataccaaacagaatatacctgtcgtagcgtgcaaaatcagcattacgaccgcaatcacttccagtactaccagttactga

SEQ ID NO: 5694 - DNA, 1887 bp, Escherichia coli
atgcttcgtataagaaaaatactattgcgcggaaacagcgttcaagacgcttatgttgatttctataagggtgcgaatattctagcaggggaatctgatactgggaaaagttaccttgtgagttgtcttgactacattcttggtgccgaaaaactcaaaaaaaagcttaaagaggccaccgattacacccatctttatgttgaattcgaaaatgatgaagggggggtgttaacgctcaagcgcggtcttgagggggggaaattagaggcacatgatgtcgctattcaagacatccatggagaaggtaaaataattgctcctgtgcgtaaaggaacgagtaaggggccagatgtgacgtccatacttttcccttttgcggggatcaaagaggcgaagcttcgcaagaatgctcgtggcgaaacgcaacgtttctcgattcgaacgctcgctcctatatttttggtagatgaagtatccattatcgacgaatactcgccagtaacgggacgttccggttatgacgacactgctcgaaaacgcatgttttcatacatccttaccgggcacgatgatggtggtgttaccgtagaggaaaagcctgaaattgtaaaagcgaggttgatggcgaagcttgaattcatccaggatttgattcgaccacttgatgaacgtttctcaatttgttcgcccaagtttccattaacgagctcagcagatgatttatcagatcaattgattgcacaagcaattgatgaagttgagagggctgcagccgctatttctgacttgctcgagggaataaaaatggagacagcgttaacgttaaaaatagaatctcagttaatgggagtatctgaaattcaatcgagatatagcctattagaagaacgttaccattccgacctgaagcggttggattttatttccgaaggttctcactatttcacttcacttcaggaagttccttgttccctttgtggacaaaatttactacatccacacagtgagaacgctaaaaaattaatgaacagtaatgaagtccgacgttcttctttagctgaagctgcaaaaattcatggataccttgcaggcctgcaaaaagcgatgagtgatcttgaccgaagaaaagaagctctgaatatagacagatataagtcaaaagaaagcttggatggaatgaagaaccagatcaaatatacttttgagcctcttcttacactttccaaagaaagcctagatttagctattgagcagcgagctgaaagagactctgagttgaatgatcgacagagatggtttgagttactaaaacatcaaaaggatatagaaatactgctggaaaagagcagtcaaccacggctcgaatgggagggattatctacccgtacgctggccgaactttgtagagaaattgaaactgttttaaaagactggaaatggggtgccgagcctgacgtttcatttaatgaaaaagagtatgacatcattgttgatggacaacctcggcagtctcacggtaaaggtgttcgtgccattctttattcagctttcatcattggattactaaaatattgtattaaaaaaggatacccgcatcctgggctagtcgtgattgattcaccgctgacaagttataagaagaaagccgctgctacggtatcgggcttcgatgaacccatatcggctggtattgaggaaggcttctggcattcactgacccaattgcctgataccttacaaatcatagttatagagaataaagaaccgccggtatcaatcatgaataaagttcattacgaatggtttgcgggtgaacatgcaatggatggagagcgcagagcccttatcccgctgccctcaaaaaatagtgctattttaatgaagtaa

SEQ ID NO: 5695 - DNA, 516 bp, Escherichia coli
atgagcgaaatgcaagtatttgaaggaaactttgagcagagaccttttaacactccgctggagtatggatttcgtgctctgttcatattggatgcagcggacaatgtagcaatggacctacaaaggatagtttcgtatgactatcttcttgtgcataccagtgacgtacctagggggcctaaaagccttcatccagcagttcctcaccggggagcagagcttcttgttaagcgaagcgcaattcaggcagggctgcatttaatgctatcaagagaattgattaaggttgtctttgctgccgaaggtattttgtatcaggctaccaatttaacaggaaggtttgtgcggcttttgatgtcacagtattcaaaagagctcgcagaacgtgcctcttgggtcacaaagcaattctatgaatatacggatgaagaacttgcttcatatatatctcagaatgtggggcaatggggttctgaattcgaccgattgaccgcaattgatctactggatttataa

SEQ ID NO: 5696 - DNA, 1128 bp, Escherichia coli
gtggtagagaagatgaaacaaaattcaagttcgacgcttggcgcgctttctgctcctacaacgtggccgggtgcgaacgctcggctgcttgggttaggtgtagggcttccaatagcccccttggatcgtctggcacagtttagcgccgccgaatttgaaaggtttacactcgaatgggcctctgaatacttagctggtcagcaatatgtcaacgaagtacaacaacgtggcggggcaggagataaaggcagagatattgttgtatggcttgatccatctgatgctgttcctcgaagatggcacttatatcaatgcaaacattatgatgcgaatttaggccttcctaaggcaggcatcgaagttgcaaaagttatctattatactttcatcaaggactacacagtacctacacaataccattttgttacacataaaggggtaacatcgccattccaagacctcctagatgatccaactaaactcaaagagaaaatgctatccgagtgggcaactttttcaaagcaaattacatcgaaacatagtgttgacctgacgcctgaacttgaaaaatatattaaagagtttgattttagtatttttcatgcaaaacagcctattgagatacttgccgaacacagtaaaacctcttttcatcttatggtctttggcgcaccattaattgagcgggatccaccaactaggcccccatcatctgtggctcccattgaaactgtatatattgaacaactcttttcagttatcagcgctgatatcaaaaccaacgtgcgagatttagttgattttcaatcaagtatcagccatgtaaaactctttgaacggtcccgaataactttttattgctcggaagggctaaaggaactcgctagggaccaaatggcgaatcaagaattctttaattctttacttgtagagtttgatgatggtctgtatcactacacctctgacctgacagggactccactccttcggttaaaaaataccgtcaaggccgctcagaccctgcaacttggtgcgcacccacttgccattcacgtaacgaataaggatcgtgaaggtatatgccaccaactagccaatacaaacttgattaattggtgcaatccatga

SEQ ID NO: 5697 - DNA, 168 bp, Escherichia coli
atgctgatgtcaaaagaggcttatgctcggcacagtggagtgagctgccaaactgtcgatgactgggtagccggtggggcggaagtagttatgtcccgtagcaaggttaagatttgctcttgtgtgtggggaaccttagtcaattactttcctggcgcactgtgttag

SEQ ID NO: 5698 - DNA, 1758 bp, Escherichia coli
atgtttaaacctacctatctggcaagactgcaggcttgttgtaacaaatttgaactggctgatttgcttcagattaaagttacatttctgactaatgttttgtatagaataaggccagaaaatcaatacaaaaaatttactataaagaaaaagtctggaggagagcgggagatctttgctcctgatgaaaaactgaaagatattcaacaacgactttctgaacttctatatatatgccaggaagaaatttgggcaaaaaataatattaaacaaaatgtatcacatggttttgagaagaataaaactataattacaaatgctgagaggcatcgagataaaaatattgtatttaatattgatattgagaatttcttcccatcctttaattttggtcgcgtgcgaggatattttattgcaaaccaaaatttcaagttacatccaaatgttgcaaccattattgcgcagatagcctgcctggatggatcgcttccgcaaggaagcccttgttctccagtaataactaatcttatttgtaggattttagatttcagattatcaaagctagcagtcacatatggttgtagttacagccgctatgcagatgacattacgttttcaacaaacaaaaaaaacatccctgatgcattagtttctaatgagaaagaaaacgaaccaggtaagatattggtagaagaaattcatcgtgcaggcttcactttaaaccataataaaaacagagtgtctaggtgtacatcaagacagcaagttacaggtttaactgtaaataaaaaaataaatgtaagcagagagtatataaagaatacaagagcgatggcgcattctttatactttgaaggttcgtatacacttattgagaaagatggaaaacatagaaagggcacccttagtgaattagaagggcgatttgcatttatcgatatgcttgataaatataataatgtggaagcaaagaaaaatgcgcgtcctgagagatatgtggttaaaggatttgggttggattttaagcagagacttaactccagagagaaagcatacagcaaattcctatactataaaaatttctatggaaatgagcaaataacaatcttaacagaagggaaaactgacccggtttatcttaagtgtgcaattgattctttgtttttggattaccctcagttagttagagaggaaaaaaacacaaagaatagagtgttaaaagttaatttatttaaaaccaatgacaagaaaaaatattttctcgatttgtctggtggagctgcagactattcgaggtttttcagacgacatggtttactttgtaaagcgtatgaaaaacagcctcctaaaaatccagtgataattttattagataatgacacagggccatctgacttcataaatcaaataataaaggattattcgcatctaccaaaaaaagcggaggatgttagaaaaggggcgttttatcacttagagagtaatttatatgttctttttactccgttattaccaggggataactattcttcactagaggatttttttgaaccaaaagttttgcaaatgaagtataatggaaaaagcttcgataaaagcaataatcatgacagttctactacatttggaaaagatagatttgctacttatatagtaagggaaaatagaaaaactatcgatttttcattattcaaacccatacttgattcaattattgaaatcaaaaaacattttatcaatctacacccatcaaagtga

SEQ ID NO: 5699 - DNA, 240 bp, Escherichia coli
atgttcgtactcattttggagttagctcgcattcgtaatgcgaagggcgtaggttctactcctctcagcaaggatactgccggcagaatccttcatgaggctggaatgctcaaaaagtccaccagcgtggagggatggctgatacgtatgccacggctgagacacctcaagcatgcacgtccctgggcttatacgctgttgtttactccggtatctgaaacggaaaccggagaagaataa

SEQ ID NO: 5700 - DNA, 261 bp, Escherichia coli
gtgcagagtttctttaccaccctgtctaacacggttaaacaagcgaataaagatatcgatgccgccaaattgaaattaaccaccgaaatagccgccatcggggagataaaaacggaaactgaaacagccagattctacgttgattatgatgatttaatgctttctttactaaaagaagcggcccaaaaaatgattaacacctgtaatgagtatcagaaaagacacggtaagaagacactctttgagatacctgaagtctga

SEQ ID NO: 5701 - DNA, 363 bp, Escherichia coli
gtggaaaataacaccagtcttgaaaccacagataaaacgaacattgttacctatggggaaaatgcagtaggagttcttgcatgttcaagtcctggagagtctcgaacatgtgtcgatgctgtagatgatgaagtttgtgattctaacagttacgaagttattagccgtgctgatttaaaaatgaatggtggttccataacaactaatggtattaatagctatggtacttatgctaatgggaataaagcatatattaatttagattatgtggtacttgaaactgtggctgatggaagttatgcagttgctattcgacaaggtaacattgatataaaaaagttctattacaacaaatggcactaa

SEQ ID NO: 5702 - DNA, 1212 bp, Escherichia coli
atgcttaccacccttatttatcgtagccatatacgtgacgccgaacctgtcaaaaaaatcgaagaaatggtttcgatagcaaatcgcaggaacatgcggtctgacgtaacagggatcttactgtttaatggttctcattttttccagcttctggaaggtccggaagaacaggttcaaatgatatatcgggccatatgccaggatccacggcactataatattgttgaactgttgtgcgattacgcgcctgctcgccgttttggcaaagcaggaatggaattatttgatttacgcctgcacgagcgagatgacgttttacaggccgtattcgacaaaggcacatcaaaatttcagctaacttatgatgacagagcgctacaattttttcgtacttttgtccttgcaactgaacaatcaacctatttcgagattcctgctgaagactcctggctttttatcgctgacggatctgataaagaacttgattcttgtaccctttcatcaaatataaacgaccactttgcctttcatcctattgtcgaccctttatcgcggcggataatcgcttttgaagccattgtgcaaaaaaatgaagacagcccgtcagctatagcggttgggcagcgtaaagaaggggaaatctacacagcggatctcaaaagtaaggcgcttgcattcgcgatggcacacgcacttaagctcggtgataaaatgatttcaatcaatctattacctatgaccctggttaacgagcctgacgcagtctcttttttacttgatgaaataaaggccaatgctctggtgcctgaacaaatcatcgttgaatttactgaaagtgaagtcatatctcggtttgatgagtttgccgaagcggttaaatcgctaaaggctgccggtatcagtgtagcaattgatcattttggcgcaggttttgctggtttgttactcctgtcacgcttccagcctgacagaattaaaatcagtcaggaattgattaccaacgttcataaaagcggaccacggcaggcaattattcaggcgatcatgaaatgctgtacatcacttgaaattcaagtctctgctatgggcgtggcaacaccagaagagtggatgtggcttgaatctgcaggaattgagatgtttcagggagatctgttttccaaagctaaattgaatggtatcccttcagttgcgtggccggagaaaaaataa

SEQ ID NO: 5703 - DNA, 294 bp, Escherichia coli; identical to SEQ ID NO: 2997

SEQ ID NO: 5704 - DNA, 279 bp, Escherichia coli; identical to SEQ ID NO: 2998

SEQ ID NO: 5705 - DNA, 1614 bp, Escherichia coli
atgagtcagaaatacctcattcgcatcgcagagctggaaaggttgctctctgagcaggctgaagccctccgtcagaaagaccagcaactgagtctggttgaagagacggaagccttcctgcgctctgcactgacacgtgccgaagaaaagatcgaagaagatgaacgggaaatagaacatctgcgggctcagatagaaaaactgcgccggatgctgttcggtacccgttctgaaaaactgcgtcgtgaagttgaactggctgaggctctgctgaaacaacgtgaacaggacagcgatcgttacagtgggcgggaagacgatcctcaggttccccgccagttgcgacagtcgcgccatcgtcgtccgttaccggcacaccttccccgtgaaatacaccgcctggagccagaagaaagctgttgcccggagtgtggcggtgagctggattatctgggggaagtcagcgctgaacagctggaactggtgagcagtgccctgaaagtgatccgcacagaacgggtaaaaaaagcctgtacaaaatgtgactgtattgttgaagcaccggcgccgtcccgcccgatagagcgtggtatcgcgggccccggattacttgcccgcgtgttaacgggaaaatactgcgaacatctgccactgtatcgtcagagtgaaatctttgcccgccagggtgtcgaactgagccgggccttactctccaactgggttgacgcgtgctgccagttaatgacaccggtgaatgatgccctgtaccgttatgtaatgaatacccgcaaggttcacactgatgacacaccggtaaaggtactggcaccgggtcagaaaaaggcgaaaacagggcgtatctggacgtatgtccgggatgatcgcaatgtgggttcgtcatctcctccagcggtctggttcgcgtactcgccgaaccggcaggggaaacacccggagcaacacctccgccccttccggggtatcctgcaggcggatgcgttcacaggttacgacaggttgttcagtgcagaacgtgaaggtggtgcactgacagaagttgcgtgctgggcccatgcccggcgaaaaatccacgatgtatacatcagcagcaaaagtgcgacggcagaagaagccctgaagcgaatcagtgaactgtacgccatcgaggatgaaatacggggattaccggagtcagagcgtcttgccgtcaggcagcagcgaagcaaagtgttactgacgtcgctgcatgaatggatggtggagaagaatggtacgctgtcgaaaaaatccagactgggcgaagcgttcagctatgtactgaatcagtgggatgccctctgttattacagtgatgacggtctggcggaggcggataataatgctgcggaaagagcgcttcgtgcagtctgtctcggaaagaaaaactttatgttctttggcagcgatcacggcggcgagcgtggagcactgttgtacgggctgatcggcacctgccgtctgaacggtatcgatccggaagcgtatctgcgccatatcctgagcgtactgccggaatggccttccaaccgagttgacgaactcctgccatggaacgtagtactcaccaataaataa

SEQ ID NO: 5706 - DNA, 219 bp, Escherichia coli
atgtttaagtgtgcagagatgttgatggtggaagaagatgataaagtatgtgaacttatttttaaacaacaagataattttattttaaaaataaatgatagatttcccagaataattataaagaaataccgaacattacaaggtaaagtcgtatggctatggatattgccatttgttattgaatggttaagtgtgcgcactttaggcgcaaacagttag

SEQ ID NO: 5707 - DNA, 129 bp, Escherichia coli
atgggggcggatgttacagagttctcggtacaggggaaaagtggtacctgtcgccagttctccgatctgtttaaccgggaaattatctcctacagcttgtcagaaaggtcggtgatggagcatcgttaa

SEQ ID NO: 5708 - DNA, 195 bp, Escherichia coli
atgaatgagaacagaataaaaaggctggagcaactgttacaggcacgccaacgggagtttgccactaaatggggacgtgccgcgttgccacatgaacgcctaacctattttccacttgaagacctcattaaaaataatggcaaaaaaatcaggcctgataagaaacactttttagaatgcaatgaagacaaataa

SEQ ID NO: 5709 - DNA, 306 bp, Escherichia coli
gtgagctatcagcttggtggtctggttttgcctgatttaagccgccgtgggtatttgtccaagaatgcttcaagctccaatcgttttggcctggtgaatggagatgggttaagcaaagactctcgttgctggtgtactttttcgcgctggtgctcaagcatggataatgcgattgcctgtagttcttcgttagtcattgtctgcacctggaaagcaatttaccggagtacctcacactacggcaaaaatgttttaattgttgcaacttgcgtaataattcaggtcagtttggaacgccctgtataa

SEQ ID NO: 5710 - DNA, 1047 bp, Escherichia coli
atgagtcagaaaaattttgtggaactgcgcaacgtcactaaacgattcggcagtaatatggttatcgacaatatcaatctcaccatcccacaagggcaaatggtgacgctgctcggtccttccggatgcggcaaaaccaccattctgcgtctggttgccgggctggaaaaaccgagcgaagggcaaatttttatagatggcgaagatgtcacgcatcgttccattcagcaacgcgatatctgcatggtgtttcagtcatacgctctgttcccacatatgtcgctgggcgaaaacgttggctatgggctgaaaatgcttggcgtgtcgcgtaatgaagtgaagcagcgggtgaaagatgcgctggcaatggtggatctggaaggattcgaagaccgctatgtcgatcagatttccggcggtcagcaacagcgtgtggctctggcccgtgcgttgatcctcaagccaaaggtgctgctgtttgatgagccgttaagtaacctcgatgccaacctgcgccgcagtatgcgcgataagatccgcgagctgcaaaagcagtttaatatcacgtcgctctacgtgactcacgatcaaagtgaagctttcgcggtgtccgacactgtactggtgatgaataaaggtcacatcatgcagatcggttcaccgcaggagctctatcgtcagcccgcctcccgctttatggcaagttttatgggcgacgccaacctgttcccggcgaactttagcgaagagtatgtcgatatctacggttatcgcctgccgcgcgcggcgtatttcccggtgcaaggtagaggcaccgtcggcgttcgcccggaagccatcaccttaagcaatcacggcgaagagagtcagcgttgtgttattcgccatgtcgcttacatggggccgcagtacgaagtgaccgtagaatggcatggtcaggagattttattgcaagtcaacgccactcgtttacagcccgatactggtgagcactattacctcgaaatccatccttacgggatgtttgttttagcggattcggcataa

SEQ ID NO: 5711 - DNA, 2079 bp, Escherichia coli
atgtcacagacacttgcactccatcccgcgaaaaagcgggatgcgattttcctttgggttttgctgggctggctggcatttatcctgttgccgagctggagcctcgattatggtctgctggagtccacgagtgatgagatcctcgaggcgtacagctggtcgcattttaatatcagctggctgtggtatttactcccgagtttgctgctggttcgcccgtttaatgaggccaaacgcgagcagcgtagccgtcattattttgatgccggctgggcattgctttgtatagcgtttatggtcatcagtgccaccatcgttggccgcggtctaggctacgccgccatcgtgctgtttatcgaattaagcgcgataatgacgctggccttaacccgcctcgaatggctgggtggcgaccgctttgtgatcggctcgctgattgcgattgtggcgctgattggcatttttatcgtctggccgagcatcgccatttttatcccgatgttcgccaacgacgcgggagagttcgccccactggcgtttatgaatgtgctctcgcaggcccatatcattcaggtgatcgtcaactctatcgtcttatcgatagcggtgggtattggctgcactttcttcggtctggtgctggcgatatataccacgcgcatcgctaaacgcagcgccgtaatcggccgcatcttttccattctgccaattgtcacgccaccgtttgtggtcggcttaggcgttacgctcatgatggggcgctccggctacataacggaatttatggtggagtggtttgggctgaccaacaccaactggctgtatggttttaccgggatctggctggcacaggtcctggcatttacgccaatggcttttatgatcctcgatggggccattaaaaccattcatccctcgctggaagaagcctcctacaccctacgcgccagccgctggcaaacctttagcggtgtgtttgtgccgttgttaaagcccgcgcttgccaatgcctttttaatcgtcgtggtgcagtcactggctgacttcagtaacccgctggtgcttggcggcaacttcgacgtactggcgacgcaaatttacttctacattaccggctcgcagctggattatcaggccgccagcacccttggcgctttcctgctgctgttctcgctactggtgttctgcgtccagtatatgtggattggtaaacgctcttacgtcacggtttccggaaagtcctaccgcggcgatgtccagccactaccggtcaccctggtgtgtagcgtggtcgccatacttgcgatatggattgcctttaacgccctgctctatggcagcattttctacggcagcttcaccgtgaactggggcgtggactacaccctaacgctggataactttatcaagttatttggtcaggggatgagcgacggcgcgtggccttcactgttagataccttgctctacgccgggattgccgcacccattaccgctatttttggcctgctcatcgcctgggtggtggtgcgccaacaattcaaaggcaaaaagagcatcgagttcaccaccatgttgtgctttgccgtaccgggtacagtggcgggggtctcgtatattcttgcctttaatagcgccccagtctatctcaccggaacggcagcaattgtgattatctcgatggtgatgcgtaacgttccggtgggtattcgcgccgggattgcaggtctggggcagatcgacaaatcgctggatgaagcctcacttagcctgcgtgcaggttccctgcgaaccattacgcacattttactgccgttattacgcccagctattctctcggccctgatttacagctttgtgcgggctatcacgacggtcagcgccatcgtctttctcgtcacgccggacacccgcgtggcaaccgcctacatccttaaccgcgtagaagacggcgaatatggcgtagccatcgcctacggttcgattctgatcgtggtgatgctggcgattattttcctctttgactggctgatcggtgaagcacgtatttcccgttctaaagccaaaaaccaggcgtaa

SEQ ID NO: 5712 - DNA, 1032 bp, Escherichia coli
atgaaaatgccccttacctctactctgattgcttctgccgttgcgctggcaaccttaacgggtgccgcgcaggcaaaaggccggctggtggtctattgcagcgccactaatgaaatgtgtgagaccgaaaccaaagagtttggcgagaaatatgatgtgaaaacctcgtttatccgcaacggctccggtagcaccctggcaaaagtcgatgctgaaaagaaaaacccacaggctgacgtctggtacggcggcactttagacccgcagtcgcaggccggcgagatgggcctgttacaggcatataaatcgcctaaccttgaacagatcatggaaaaattccgcgatccggcaaaagtgaaaggaaacctttcctccgccgtttatgtggggatcctcgggtttggcgtcaacacagagcgtctgaaagagaaaaacctgcctgtgccgaagtgctggaaagatctcaccaaacctgaatataaaggcgaaattcagattgccgatccacaaagttccggtaccgcctacaccgcgctggctacctttgcgcagctgtggggggaagatcaggcctttgattatctaaaacaacttaacgccaacgtctcccagtacaccaaatcaggcattgccccggcacgtaacgccgcccgcggcgaaacggcgattggtattggtttcctgcatgactactcgctggaaaaagaacagggcgcaccactggagttgatttccccgtgtgaaggtacgggctacgaaataggcggcgtcagcattctgaaaggtgcgcgcaacctcgacaacgccaaactgttcgtggactgggtattatcaaaagaagctcaagaactggcgtggaagaaagggaaatcttatcagatcctgaccaataccaccgccgaaacgtcgccaaattcgctgaagctcgacgacctgaaattaatcaactacgacatggataactacggttcaactgatgttcgtaaggcattaattaataaatgggtcagcgaagtgaagatgggtaaataa

SEQ ID NO: 5713 - DNA, 1305 bp, Escherichia coli
atgcacgcgcgttcagcgagagagattaatcaatgctaccggacattacgtccacgattgctgatgtgcatgattattggctacgccgcattttatctgacgcgaaaaagcgtgaattacgtccttccggcgctgcaaaccgacctcggactggataaaggcgacattggcctgctgggttcactgttttatctcagctacggattgtcgaaatttaccgccggactgtggcatgacagccacggacaacgcggttttatgggtatcggcttgttcgccactgggctattgaacgtggtgtttgcctttggcgaatcacttacgcttctgcttgtggtctggacactgaacggattttttcaaggctgggggtggccaccgtgtgcccgcttactgacccattggtattcccgtaatgaacgtggtttctggtggggctgctggaatatgtcgatcaacattggcggagcgattattccgctgattagcgcctttgccgcccactggtggggctggcaggccgcgatgctgacaccggggataatcagcatggcattagggatctggttaacgctacaactcaaaagcacgccccaggaagagggattaccgacagttggtcactggcgtcacgatccgctggagttacgtcaggaacaacaaagtccgccgatggggctgtggcaaatgttgcgcaccaccatgctgcaaaatccgctgatctggctactgggtgtctcttatgtacttgtttatgtgatccggattgcgctaaacgactggggcaatatctggctgacggaaagccacggcgtcaacctgctcagcgccaacgccacggtaatgctgtttgaagtaggcggcttactcggcgcgttatttgccggatggggttcggatttgctgtttagcgggcagcgagcccccatgattttgctgtttacccttgggttgatggtttcggtcgctgcactctggttggcaccggttcatcactatgcccttctggctgtgtgcttttttactgtgggcttttttgtctttggcccgcaaatgctgattggacttgcggcagtggaatgtggacacaaagctgcggcgggttcaatcaccggatttctcggcctgttcgcctatctcggtgcggcgctggcaggctggccgttgtcgctggttatcgaacgctacggctggtcgggaatgttcagtttactctcggtcgccgcagtacttatgggtttactgctgatgccgttactgatggcgggcatcaccaccactcacgctcgaaggataaaacaatga

SEQ ID NO: 5714 - DNA, 1542 bp, Escherichia coli
atgtcgcgtaaccttcgtcattgggtgatttcgctgtttattgtgctggcctggggaagcggctggctgatgttatggacgctcagcttttatctgaccaataacggtcaacaggcagtgttatttctgccgcacggagtttacctcgcttttcttattttgcactctcgccgttactggcctgcgttggtgctcccccctttgctgatgatgttctggctgcacagcgagcaactgttgaacggctatctcatgctggcaacgccggttattagcctgcttcctgccatcattgcacaaaacgtctggcaccgttttccactttactggcagcgtctgacgttgctgttagcctcagtaacagcagcttcattgctgaatacagccatgctaaccccttttatgtcaggcccaataatgctgcccggtctgacctcatttaccggcggcgtattgttgacgccgtttgtctatcttatctttgagtttctgcgccagcagcatcgctatcagcttctgagactcgatacgcataatccccccttgcgaacctctttaatcatctggtgtagcctattttttattattggtatcggcacccagatggtgttgtcgcctgaaatcgaacgcctgctgctgatcgtggtatttctacccaatgtagtcatggcctggaaatttggctggcaagggggcgtactctcggggcttttgggcagcatgatgatcactattgcccgccagattggtgtgggctttagtaacctggtggaactggagatttttctcgcaacccaagcattgctgggaattggcctgggcattgccattagtcggcagcaacatctggcgctaaacctgcatcattaccgtcagcgactggaggcagaactggcagcacggcgggcattggctgaaaagctgatccataccgaggaagacacgcgtaaaagcctggctcgcgagctgcacgacgaaatcggtcagaacattaccgccattcagatccagtcgcaactggtgacgcgggcacgcgatccggcgcaagttcattccgcagccagccaaatcaacgaactcgcccgccgcattcatctctccacccgccagttgctgcgccagttgcggccccccgcgcttgatgaactgacattccgcgaagcattacttcatctgattaatgaatttgcctttagtgaactcggcattcattgccagtttacctatcaactaaccaccacgccagaaaacgaaacggttcgctttacactgtatcggttattgcaggagttactcaataatgtctgtaaacacgccggagccagcgaagtgacgattattctgcgccagcagggagagatattgcacctagaggtcagcgacaacggtgtggggatcgccagcgggaaaatgaccggatttggcattcaggggatgcgtgaacgcgtcagtgccctgggcggcgacttaatgctcgaaaaacataacggtacgcgggtaattgttaacctgcccacatttttgcaacaaatcgccggataa

SEQ ID NO: 5715 - DNA, 630 bp, Escherichia coli
atgattcgggttgtgctggtggatgaccatgtggtggtgcgctctggtttcgcacagttactctctctggaagacgatctggaggtcattggtcagtacagtagtgccgcacaggcatggtcggcattaatctgtgatgacgtcaatgttgccgtcattgatattgctatgccggacgaaaacggcctcagtttggttaagcgcctgcgtgcacaaaaaccgcaattccgcgccattattcttagcatttatgacacgccaacctttgtacaaagcgctctggatgctggtgccagtggctatttgaccaaacgctgtgggccggaagagttagtgcaggcggtgcgctctgtcggtatgggagggcattatctctgcgccgatgcaattcgggctttacgcggcggcgggcaacccgcccaggcactggaaattctcaccccacgagaacgtgaagtgtttgatttattagtcaaaggcgacagtgtaaaagagattgcctttaagctcgaactcagccataaaacggtacatgtacatcgcgccaacgtgctgggaaaactgaactgtcatagcaccattgagctggtgcattttgcactcaaccaccatctgctggcggggcattaa

SEQ ID NO: 5716 - DNA, 1182 bp, Escherichia coli
atgccacttactgttcggcaaattgagtcggccaaacctgctgacaaggattacaaactttctgatggtcaaggactttaccttcttatcaagaaatctggcgctcgttactggaatctgaagtatcgatttgcgggtaaagaaaagaaattggtgattggtgtctatccaggtatatcactggctctggcgcgtcagaaacgggatgaagcacgtaaactcctcgctgaaggaaaagatccttcatatgaaaaacaggcgagtaaacatgcactaagagaaagtattgcatgcacattttgtactcttgcagaagagttgttcacacatatggcttgtcgttggactgcgggttatttagcggaccagcgtgcaagattcgagaatcatattaatcccatgctagggaaacgtcctgtggctgatattcgccccttggaaatattgaatgcactgagggttatagaaaagaatggcaaacttgaagcgttacgtaagactcgtcagctctgttctcaaatatttgattacgccattgcgacggggcgcgccactattaacccagcatcgactctcagcagtgttgttcttcatccagaaaaacagcagagacggatgctatctgaagaacagttaggcgctttcatgtaccaaatgaaagtttcaggcaattttatgtctctggtaacgcaaatactggttctaactgctgttagaacgggagaattacgccttgctacttgggatgaaattgattttaccaatgccttatgggtaatcccaaaagagagaatgaaaatgcgaaggccgcatgttgttccactttctcatcagactcaaatgttattgaaagagataaaaataatcacagctccccgtaactccgagctggttattcctggtgtatacagagataatcaacctcgtggtcgcggttgcatcaacgagtttcttcaacaagttggctggcatacattcactacagctcatggttttcggcatactttcagtaccattctccatgaccatgatttcagctctgcctggattgaactccagcttgcccatgttgataaaaacatcatgcgcggcacctacaaccacgcacagtatctcgatggtcgtcgtgaaatgatgcaatggtacgctgactacattgattcactttctgagcaggcctga

SEQ ID NO: 5717 - DNA, 507 bp, Escherichia coli
atggcattaatcggagtgtatgcggattgggaaggcctggatggtcctgcgcgtattggttatttacacagtcgtcgcactcgggcgcgtgagatatttgagtttgagtacgataaaaaggcgcttgcagatccttcacttaatttcattcagttagatcctgaaataatgttgtatgagggagcacagtacccaattcctccaaaggataaatttggtgcatttagtgattcctgcccggatcgttgggggcgtatgctaatgaagcgtcgttttgagagggatattcgagacgggttatgtgataaagactcccacctttatgagtctgattatctactaggtgttcatgatctttatcgggttggggctcttcgatacaaacgtgaagacgctggagagtttcttgataatcgcattgatgttgcagccccaccatttaccgaaatagcgagtctggaaagggttagccgggcaattgaagaagatcctgataataaagagtaa

SEQ ID NO: 5718 - DNA, 1278 bp, Escherichia coli
atgaataaaataaagaattatcgatggcatatgattgccctcgtatgctttatcactgtaatcaattatctggacagaacggcgttaggtattgcggctccaacgattatggagacaaccggaataaccaaagaacaatattcatggattgtcagtgcattccagttggcctatacattggggcaaccgataatgggcttctttattgataccgtgggtctgaagttaagttttgcgatatgtgccgcaatctggggcctggcgacaatggggcatgccttgacaggaacatggtcaggtctggcatttatgcgcgccctgatgggtttcagcgaagcatcggcaattcctgcgggtgtaaaaaccgcatcaacatggttcccggcaaaagagcgtggcgtggcgacaggtgttttcaatatgggcacctcactcggcgcgatgcttgctccaccgttgattgcctggtgcattatgtttcatagctggcaatttgcgtttattgtctcaggtagccttgctttactcgcggctttattttggttcttttgttataaagatccaaaagatgctaaacgcctttctgatgaagagcgccactatattgagtctgggcaagaacagcatcttaaaacagataagaaagaaaaaacgtcaatcaagcatatcctcagccaacgtaatttctgggggattggcatcgcgcgttttctcgctgacccggcatggggaaccattaacttctgggtaccgattttcttcgtcgaaacgctgcattttagcctgaaagaaattgccatgttcgtctggctacctttcctgctgggcgatctcggctgtttagccagtggttttgtcgcgaagttcttccacgatcgcggcgtgagtttaattaactcacgaagaattaccttcactattgcagccgtcattatgatgacgattggtctggtgagtattgtcgaaaatccctacatcgccgtattactgattagcattggcgcattctcgcatcaatgtctttctactgttgcagcaactctgggcggtgacctattcaaaaaagacgaagtagctaccgctgtgggtatggcaggagcctgtgcatggagcggtcagttgattttcaacctgtttatcggggcattcgttcacattatcggcttcgcgccgttctttattgccctggctttctttgacattattggcgccattgcgctgtggacgcttatcaaagttaaagacgaagaaccacaagtacagttagcgacaagctaa

SEQ ID NO: 5719 - DNA, 2073 bp, Escherichia coli
atgagtcagcttgatgacaccatccttgatgcactgacgcacgttactttcccaaagggttttgcacaggcagaacccgcatgggttgtcacggttgacggcgttgattacccactctggaaaacagatgccctggtagtcggcagtggtgcagccgggctacgtgcagctgtggaacttaaacgccgccagcaaaatgtgttaatcgccaccgccgggttatatatggggacgtcggcatgttctggctctgataaacaaacactgtttaccgccgctactgcgggcaacggcgacaacttcaccaaactggcagaggcactggcgagcggtggggcgatggatcacgacaccgcttatgttgaagcggtaggttctctgcacactcttggcgggttgcaatatcttggtctggaattaccggaagatcgctatggcgcgattcttcgttatcaaaccgaccatgacgaagccgggcgtgcaacctcgtgtgggccgcgtacctcaaggttaatggtgaaagtgctgctggaagaagtacagcgtcttgctatcccaatgttgaccagtgcaacagtgattaaactgctgcatcagcgtgacgaaaacggtgaagaccgtgtggcgggggcaatcctcgcgaccggtcatcgcgcccataacccatgggggctggcaattgtgactgcgcccaatgtggtactggcaacaggagggcctggcgagctttatcgcgacagtgtttatccacacaaatgtttcggctcgctgggtctggcgctggaggaaggtctgacgctaaccaatctgactgaaagccagtttggtatcggcacaccgcgcagcacgtttccgtggaatttgtccggcacctatgtgcaggtgatcccgtatatctattccgtagatgctgagggtaacgagtataacttcctcgcggattactatcgcaccacccaggagctagcttcaaacatcttccgtaaaggctatcagtggccgttccacgccacgcgggtaatggattttggctccagcttgttagatatggcagtagcgcaagagcagcaatcagggcgtcaggtatttatggatttcaatcgcaatcctgaagcggtgccgggtgacctgcccttctcattagatcgactggacgacgacgttcgcacgtatctggaaaataacgacgctctggcaccatcgcccatcgaacgcctgcaacgaatgaatccgctgtctatctcgctgtataagatgcacggttacgatctcaccacgcagccattgcagtttgccatgaataatcagcacatgaatggcggcattgaagtcgatatctggggacaaacatctctgcccggttgttttgcggtgggggaagttgctggcacacacggcgtcacccgacctggcggcgcggcattgaatgccgggcaggtttttgctgttcgtctggcacgttttattggttgcacgcaaaagcggaatattgatggagatatagcacagctggcagctccggcactggcttctataagagagatcattactcaggcgcacgataacgggaccgggatgccgttgtcggttgtgagagaaaaaattcaggcacgaatgtctgaccatgcgggatttatttgccatgccgataaagtccgacgcgccactcgtgatgccctgctattgaacgaatttgtccaacgacatggattggcaatcaaacatgtgggtgaagttgccgagctgtttatgtggcggcatatgacgctgacttctgccgcggtattaacacaattaacgcattatattgatgctggtggtggtagccgtggggcgcgtatggttattgatccacaaggcaaatgcctaccacaaactcgtcgcggcgcaaaagaagaatggcgttttcgctctgaactcgctgaagacaaaaatcacaaattaacaattcaatattcgcaaggttcttttattaccgaagtaaagtctttacgtatgcaaccgtgtattaacggtatttactttgaaaaaaactggccagactttttaaagggagacatttacacacaataa

SEQ ID NO: 5720 - DNA, 264 bp, Escherichia coli
atgagcgaacccctgttaattgcccgcacgccggacacagaactatttttactgccgggaatggctaaccgtcacgggctgattactggcgcaacggggacgggtaaaactgtcacgctgcaaaaactggcggagtctctatcggaaatcggtgttccggtgtttatggccgatgtgaaaggcgatctgaccggcatcgcgcaggcaggaacggcgtcggaaaaactgctcgcaaggcttaaaaatatcggcgtaaatgactga

SEQ ID NO: 5721 - DNA, 927 bp, Escherichia coli
atgacctttgaacagctcctggaagagtatttttttgcccgtctgctgcgccctgatacccagagctgctattgcacggcggtaaatcagtttacccactggcgcaacgtcctacccgccgaagtcacaccgcatatggtactggagtggcgccattacctgctaaatgtgcgctgtatcaagccggtgagctggaatcactatatgcgccatatgcgagccttgtataacttcgccattgaacaggggctactggagcagttcatcaatccattccagaaaacatcgctgcgggaatctcgtaagaaaaagaaaaccctgacccgcgagcaaatcctcgcatcccgcaaagtgctgaaccagtttatcgaacgggaaaaaatgcagcgtggctatcgttcgcctttatatccggcatggttttggctgaccgtagtcgaaaccttcaactacaccgctatccggctgaatcagcttattcacctgcgggtcagggatatcgatctggtccatgacacgctgtttattcagatcgaaggcagtaaaagccatgatgaacatattgtttccatcgcctcccgactgcggccctatctggagcatctgcttgaagaagcgaaaacaaagggaatacgggctgacgatcagttgttcaacatcaatcgtttcagtcggcggacgctacgccagggtaaaccgatgacagaaaatcaggtgagttatttctttgccaaactcagcgatgcctgccacagccgttttccatcacatcgctaccgtcataccgttgccacagaattgatgcagaaaccggagcaaaatttgtatgtcacgcagaaactactcggacaccgcgatattaaggtgacgctcagctatattgaacacaatgtcgagatgctcagaagttgcgtggagagagattga

SEQ ID NO: 5722 - DNA, 1620 bp, Escherichia coli
atgcggatatggctgacgcgcaaaaagcaaaacaccacaccatccactggcgaaccagacgtcacggagggatggctgcatcctgaatccgcgcaaacgctactagctgaaactacccgccaacagctgatccagtttattcgccagagcaccgcccttcccgcctcactgtttgaacgcttctggctgataccaatccaccgcttcgcagaactggcgcagttgttcccagcctcggaaaaccaccaccattcccacgcaggtggcctgctcgatcacagcctcgaagccgcctgctatgccgcacggctgcggcagagttatctttttccgcctgatgcagcgccggaagatcaggccgcgcagtccgaacgctggaccaccgttatcatctacgccgcgctgctgcacgatctgggtaaactcatcaccgatattgaagtggaaaattttagcgggaaacgctggtttccatggcatggcccgctgacccaaccctatcgatttcgctatctgccgcaacgtgattacctgcgccatccggctgcggcagttctcctgcttacccaactgatccctccggaaagcctcgactggctcgccgccgacaccgctgcattatccaccctactccactgcctgaacggacagtatcagtatgccgggctggcgggtgaactggtgcagaaagccgaccgggcgtcggtggcatttaatctcggcggcgatccggtcaaggcgatccatcgtccgcaaacctcgctgccgcagcaaattatcaccagtttgcgcgacctgctggcgcatgagtttcggctcaacaacccgaatggaggctctgacggctggctgacggaagaggcgctgtggctggtcagcaagaacgctgccgatgctgtgcgcggctggttgctgtgccaggggcttgatgctgtaccgcagcataacatgcggctgttcgacgagatgcaggcacaccagttactcatcccctgtgaggacaaagccatctggcattgccggattgaggccagcggcggttggagcagtgaactcacgctgttacgcttttccccttcgctgatttgggaagatccacaacagcggcccgctaccttcattggaaccgtcacaccgatagcggaaatccgaaatgagacagaagcggtgattgcaacgaacattgaagtagaacaaccatcccctctacccgaacaaaacgaaaccgcactatccggcgaagccttctggcagtggctggtgcgtaacgttcaggctcaacatctggaagtcaatgaacctaacgcccgaatccataccgtcgccgggtcggtgtttctggtgacgcccggtattttcaaactctggcttagcacctgcggtcagaatgtcccagaagaatactggcgggaagtacagaagaagttccagaacctgaatcttcaccgaaaacaaaaaaacggcctcaacatctggcactgcgccgttgtcggcccacgccgttgttcacgtctgaagggatatctgcttgacgatcccacgccgctttttggagatgacgttccctttaataaccctcatctcttgctcagtgaaggagaagacactcatgacctttga

SEQ ID NO: 5723 - DNA, 912 bp, Escherichia coli
atgaacagaagcaacgatctttaccagaaagtcacagatgaaattatcgccgcgctggagaaaggcgtgctcccctgggttcgcccgtggcgggaaggggaaccggtggtgccgatgaatgccctgtccgggcggttttatcacggcatcaatattcccctgctctggaacagcgcagaacgacagggatatgaaaacgatcgctggctgaccttcactcaaattcgcaacgcgggcggtaacatccacaaaggcgaaagatctacactggccgtgttttatctgccccagcagcgcgaagttgtggacagcaacggaaatacggttcttgatgctgacggcaaccctaaagtgatgtcttacgctgtagtacgcgagttccggctgttcaacattcaacaatgtgaagggctgccggaggcgttttcacagcctgtcgtgatggtcgatgatcctatcgccgccgctgagcaggttacccggcaaagtgcggtgatgatcactcaccgacgccagaaccgggcgtattactcgccggggcgcgactgcatcatcatgccgcatcctgagcagttcacttcgcgtgaggattattacggcacgctgctgcatgaactgacgcacgctaccggacacgcttcacgattgaaccgggacggcatcactgccggaaagcataccttcggcgatccgacgtacagttttgaagagctggtcgccgaaatgggagcggctttcctgtgtgctcacgttggcatccagtcgaagctacagcatgacagttacatcgcatcgtggctgaaggtgttgcagcaagacaaaaaagcgattttccgcgccagcggtttagcgcgtaatgcctgtgagtatctgcttgaacgggcgcagcagccgttagcgctgagcgcatga

SEQ ID NO: 5724 - DNA, 294 bp, Escherichia coli
atgccaacttcatcttaccctgaagcaaaatccttatcgctgtctgtctcaactgaggcctgggaaaaggtagttagttttccacccgatccctctcaggaagacgaccgtctcgaaaacctgattgtcgcgaccatgctgacattcaaaagcgcaggcccggaccgtaagagtatcaatttcggtctgtactgtttgccctctgacggcagcagcaatgtaccgctgatgacgccgctgcgcttaacgcttgaagataaccacctgttggttactgcccttcacaccagctga

SEQ ID NO: 5725 - DNA, 873 bp, Escherichia coli
atgacatcactcgaaacactgcaatcggctatctctaacgtctctgtatggcgtcagggtgatgtatgcgcgccgcataaaccgttgctgctgctgtatgtgttgtcacagtacaaagcaggccacccgcgcctgtttaactacggcctagagatccacgaaccactcactcgcctgctaaaagagtttggccccaagcgacgcactgactatcccaatatgcctttctggcgactcagaactgacggcttctgggaaattgctaatgcggaaggctgcaaaccccgtagaggcaacacccagccgacaaagaaagagctgattgataatcaggtagcggggggttttgatgaaacagcttaccagcaactgcttgcacaccctgaagtaattgaccaactggcccagcagatcctgatggatcgtttccccgagagtattcagcggatcctcgccaaccaactgggtctggattttatcgaccgttcaaagagccgcgatccgcgtttcagggatatcgtgcttcgggcttaccattcgcgatgtgctttctgcggttacgatctacgactcgatggtgcgctggttggtattgaagccgcccatattcactggaaaacctatggcgggccgtgtgtggtaaacaacggtctggcgctatgttcgctgcaccacgatgcttttgatatgggcgcattcgggctggatgaaaaccttaccatccgcatctccggcggcgtcagccgtagcccggtggtggataacctgttctggcaacggaacggccagcagttacaccttcctcacgacaaatcgctgtggcccactgaacaatacgtcggctggcatcgtaaacagatcttcaaagcctga

SEQ ID NO: 5726 - DNA, 1824 bp, Escherichia coli
atgcttgataattctactttcgattacaaaccacatttaaaatctgcttatattgatccgattagaactgtgacagtcatcgatgatgaatacccaactattgatgatttaatttcaccgaccaaagacagtttttctcaagacaacatttctcgattaaaagatattattgatataagtcgaagtgaagaatataattggcttttagatgtctataatggaaaagagaagaaaattcaagagggaaccgtatctaaccgtctttatcacagtgatctactaatcttggactatcatttagatggagaggactctggatattgtaaaaaatctatagatattattaaaaatctatctgaaaatcgtcattttaatattgttgcagtgcatactaaaggttatgatggacaaaagggttcagttaatgaggtactaatcgatattattacttccttacaggaaagacccgctattagtattttaaatgataaaatcaaatctagaatagatgatgctttagatgaatgggaaatcgaagatccaagtatcagggaagatctaattaattcagtttctacattagatttacttttcttgattaataaattcgggtcaaatttaagttcaggatgtttcgactacgaagttcttgatgtttttcataatatatttgatcaaaaaccagacaatataaacatatccaaaatattgatttttaaatggatctcatcagaaaagttacatagatacgctgaccaatttaataataagacatcaaagttctttgattgggggacaaatgaaaaccacaattggataaaaacagaagacttatttattactgtccttggtaaaaaagacacaccaatcagtgacataccgaatcaacttttggaggctttgtcaaactctaaaccacatccgcacaaacttattttatcaaaactcagaagtgaaattgaaagtaatggtagctatgctgcaagtaatataattaacaaaaaattcttacaggcggcgtggctaaaggaattacttcaaaaagaggatgaatatgctatcaaaacagctgcatggcaagcagtaactaaattgtgggaagaattagcatacgaaataaaacagagtcttgatgattttacaattaatcttgtccgcgacttaaagaaaattaactcacctttaaactatttcatagagaaatctacacttgatgctgaacttgaacaaattaaacatgcaaattgtttcagttgttcaaaaaaaataactgctcatcatttggttacggggcatgttttggagttcaataataatcactggttgtgtctaactcctatgtgtgaccttgttcctggtcagaaaaacggaaatagtttactccctgttacgctcgtgaaaatgtatgatgcgaaagttgctttaaataatacacgtaaaaatatgcaaaacgagcttaaactacccaatttgccagaaatcaacgaagatgaatcaattagacaaatactaaattattccacacagaataatctattgttcgttcagtctgaacatgacgggaaaatacatattcttagtttcaccgttggactcgatggcaaggcaaatcctaaagcaatggattgctatgtggaaaatcaaggtattttctctgaagataaaataatagcactaaaatatgccaagcccactgaaaatgaaatgaacataatatccgtagaagcaaaaatagttgctgaattacgctacgaatatgctttgaatttattaggtagactcggtgtatcaaaatctcgagtcggattagattttatcaactaa

SEQ ID NO: 5727 - DNA, 2970 bp, Escherichia coli
atggtaatttcagcagcttttcaaacaagagcaaggacaattgatcatctagggcgtgagcaaatagctgattgtccaaccgcaatttccgagctttggaaaaatgcatatgatgcttatgctcgtaatgtttctctaaatatatttgacggcaatacacctgtggcaactttagttgatgatgggcatggcatgtcgttagatgacattatcaataagtggcttacagtaggaactgaatccaaggctacaaaaaaagatattccatatgaagatagaaacggaatagatcatattcgagcaaagcaaggtcagaaaggcatcggtcgtctttcttgtgcggccttgggctcattaatgcttttagtttccaaaaagaaagatagccctcttgtagcttgcctgctcgattggcgtatatttgaaaacccatatttgatgcttaatgatataaagatacccattatggaatgcagtgataacaatgaattaatcactgttataccggaaatgtttgatgctttgatgggaaatctatggggtgatggtgatgatatattacgagataaccgtattgaacaagcttgggaaaattattctgaattagaaagaaatgaaaataattatattacaaaagaagctatcgagaatactgtaattaatgctttttttgaggaaaggcattttcaatcttggcctgtgtggaataataaaaccactcacggcacagccatgtttatagctggaattcatgacgatttaatagctcagctatcaacagatgctggttcagaagctcaaggtgcagaggttcgggctaaagaacgctttcttcaaacattaaatagctttgttaatccatttaaaagagaaggcgaagaacagattactgatttcaatacaagtgttgtcgcatggaatggtaatctgcaacgatttatcatcgatgaagttagaaactttgatatttcaaactttgaccagctagaacatatagttgaaggaagtattgatgaaagtggattattttccgggaaagtgaaagccttcggagaatggtttgataatattacagtcaaacctaaatctgcatataagaccagaaaagatactcgctttggccctttctttttaagattaggcacatttgaagttataagaaaaaatagtacattatcagatgaacagcatgcaaccttcgaccgtatccgtgatcagtttggtggagtaatggtttttcgtgatgatttacgtgttatgccatacggacgtgaagataatgacttttttgaaatcgaaaaaagacgttcaaaaaatgctggtttatatatgttcagtaatagggcatgttttggtggtgtatgtataacgaaagaacataaccccaacctacgagataaagcaggtagagaaggtataattgacaataaagcatctaagttatttagagagatagtcgaaaacattttaatagaaattgcaaaaaggtttattggccgcgcatcaaatatacgagatgaaaagctagaggaaataaatgctaaacatgctgctttgaaagcagacgaagatagaaaaaaattattacgtaaagagcaaagaagaatcaaaacatcgattcaaagagatcgtatttctttagaacatttaagaaatgaattttatgaaatatcacagcttctaagcgacaagaataattttaaagaactagaggagctattacagctcaaagaaaacatcgacgtattggatggtaccctaaaaaacctatctttaggttcagtaccaagaaatttagggagtatagagaaagactaccgtcagtatcgcgatttagagattgatgctaaaagtcttttaaagcagattaataactctgtatactcagcgcttgatcattttactgttaaagatgattattcaattgctgagaaagactttcgtagcaaagcagccatattacatgcgaaaataagaaaattttccaataaaggacgcaatatattaaaagaagagatgttgcgtttcgaaaagataacaaacaatacaaataaagctttccatgaaaaaacatctcaatatttatccgatctacaagaaaatagaacttcactcaaaaaaacacttgaaaatttagatcttgcttatcagattcaagacattgaaataggtcaaacctacgccccatatattaccgcattagaaagcttaagagaggaaattgatttagaaggcctcgcgatctcttcagtcaacgaaaatacacggttgaagaaacaggtagagcaagtgaatgcactcgctcaacttggaataactgtggagataattggtcatgaaatcgaaggtttcgatatgactattgagcgaggtataaatagactgtcatcaacaaacctcgatgaatatcagaaaaatgctttatcaagtattacccaagcacatcaatcattaagcgattcttggcgttttttaagcccattaaaattatcaggagataaggtaagagctttcttgagtggaaaagatatttttgattatgttaatcattttttcaacagtaaatttgaaaaagattcaattgaattttcttgctctactaatttcctagatatttcattatatgatcaaccagccagaatttatcctgtgtttattaatttagtaaacaactcacgatattgggttaaagaaactaaagaagagcgtcgaattattaggttagatgtacttgatggtttgatatatgttagtgataatgggccaggggttgatcctgatgacgtgtccgaacttttcactatatttttctccaagaaacaaagaggtggtcgcggggttggcctttatctctgcaaacaaaatttagcggtgagtggccatagtattttctacgaaacaagaacagagaaaaaaatactaaatggtgctaattttgtaattaatttcaaaggaattaaaaatgcttga

SEQ ID NO: 5728 - DNA, 1197 bp, Escherichia coli
atgaaggcaattgacttatttgcgggggcaggagggtttagtttatccgcccacaatacaggcgctatagatgttgttgctgctatagaattcgatagcgcggctgcaaacacctacagaaaaaatatgttagaaaggcttgagcataagaccgaacttttacaggaagatattttactcgtaggcccaaaaaagttaagaaaaaaaataaagctcaagaaaggcgagcttgatatgatacttggtggacctccgtgccaaggtttttccagtcatcgaattaatgatgctggtgttgatgatcctagaaataaattacttttaaggtatttcgattttgtttgtgaatttaaaccaaaagcttttttggtagaaaatgtctccggtttgttatggaagagacatgaagcccatttgaaacgctttaagtttttggcttccaaaaatggttatactttaattcattgtgatgtattaaatgctcgtgattatggtgttccgcaaaatcgcaaacgagttttcattgcaggtgtcagaaatgacattttaaaaaaaagaaataatattgagtttccacctcaagctactcatttcaaccctaattctaatgaagtaaaaaacaattcaaaaaatacgtggagaaccgcatcctctgtttttgagaagatgaatgataacttaattcaaagatatatatctgaatactttcttaaacatacttcttactcaattgatgaagcacaagagctacttgaaaacctagaatatcaagacgcacccataagcgaaaaagatccatgcaacatacatatgataccaactgagcgtatggaagagcgtttcagagccacaaaactcaatggcagtagaagcgatgcaggaaaagaatttgagctaaaatgtcattccaatggatacgcaggccataaagatgtttatggccgcataatgattcacctcccagccaatacaattacaactgggtgtaacaatccatctaagggaagattcattcatccatgggaaaatcacggcatcactttaaggcatgcggcaaggttgcaaacgttccctgatgactatattttttggggtaatgcgacagagcaagcaagacagattggtaatgcagttccccctatgttaggcacaatattaataaatgcattacttaacataattgcacccaatagataa

SEQ ID NO: 5729 - DNA, 1026 bp, Escherichia coli
atgaaaatattcattactgagcaacaaaaagctgaacttgaacgccttcatgattccagtcgtgacgggcgagtcagagatcgtattaaagccattcttctggcttccgaaggctggagttctgccatgattgctcaggctttacgcctgcatcagacaacgattgatcaccatatcagcgaattcctgaataaaggaaaactgaagcccgaaaacggcggctcagacagcaaactcagtgctgaacaaacggcctttttaatcagccagttatccgataatttatttcaccatacccgcgatgttattgcgtttgtcacccggacatggaacatcattttcagcattccggggatgaataagtggctgcatcgtaatggtttcacctacaaaaaaccgtcaggcgtcccccataaactcagtgaagagaaacaaaggcaattcattgagtattataaggaactgaaaacaactgtgggtgatgagccgattctttttattgatggagtccatccgactcaggccactaaaatcagctatggctggatacgcaaaggccagaaaaaagcagtaaaaacaacaggcagccgcacacgcctgaatatcatgggggcgctgaatctgaaagcactgacgtcaccgctaatctgcgaatataaaaccattaatgaatataatgtatccctttttctcaatgagatacgaaaggtttatcctgattataaccagaaaatccacgttattctggatggagcaggttaccaccgttcacagttagtgaaagactgggcggaagtggtaaatatcaggctgcattaccttcccccttacagtccaaacctgaatccgatagaaagaatgtggaaattaatgaacgaacatgcccggaataatcgctacttcagcagtacgcgagagttcagggaagcaatatctgtcttttttaaccagacactgccggatatagcggactcactgacatcccgaattaacgatcactttcaggtgctcacacccgcatcttga

SEQ ID NO: 5730 - DNA, 654 bp, Escherichia coli
atgaatcagaagagaggttgcttaactccacaaagaaaacatttctgtcaatgtggtctcacagcaatattttctataagaaaggaaaggaaaggaaaggaaaggaaaggaaaggaattttgcgatgtaatggtcgtctttggcaatgatgtaatcatcatgtcagataaacttattaattataatattgaaattgacgaaaaaatcgcatggaatagatggtataaaagtgctatcgaaagcagcataaaacagctaaatggtgcatataaccatataaactcatatcccgacaatctatatactgatgctcaagcaacagagccattctcaatggaattaccacattcggatgaaatatgcattcatttaattgctatcgcaaatggttgctctaacgcatgctatagaaaatacggtcgctatggattaaatattgatacagcatgtaccggaaaagacaccttatttactataggtatacccacaagaaaattcgtccatatattcaatgatagcagtctagataaaatatttacatgtttagatacaaccagagatttcattgattacattcaagctagggaaaacttacttacaacttcagataagtacattaaaatatactcaataaacctcaagatgcgggtgtga

SEQ ID NO: 5731 - DNA, 1077 bp, Escherichia coli
atgaactggaatgcagaaaccccttacaacgatttgccgatactgccgcctgacctggagcgcattgaaacacgcagcgtacttaaagcatgcataagtgcgcgcgcagcaatcgctgagttgaaaactgctggtgagttgatccctgaccaagggttgctgataaacatcctcccgatgctggaagcgaaggactcatcgcgcatagagaatatcgtaactaccagcgatcaactctttcagtatgctgaccgcgcagatggcgcagatccggccactaaagaagcgctgcgctatcgtacagcgctctatgatggctatacccatcttgaggactatccactctgtacaaacacagcggtagctatctgtaccaaattacgtgcagttcaaactgatatcaggaaaactccgggcacggtattgcgtgatcagaataataacgtggtatatacgccgccggtgggtgaagactctattcgtgagctactggcgaattgggagcggtttatacacggtgatgatgatttagatccattggttaaaatggctattgcgcactatcagtttgagtgcattcacccgttcccggatgggaacgggagaacgggccgtatcttgaatattctatatctgatccagagcgaattgctttcgctaccaatcctgtatttatcccgctttatcttggagagacgcgatgattactacacgctccttcgtagggtgacagaagagggtgactgggaatcgtggatattatttatgctggaggctgtggagagtacgtcccgatggactactgataagatatcgattgtgcgggcattaatggctgaaaccacagagtatgtacgcgagaagctaccgaaaatctacacccatgaacttgtccaggcgctttttgcacaaccatattgtcggatcgataaccttgtcgaacgtggggtggccaagcgccagacggcatcgacatacctcaagcagttggtcgaaattggtgtgttggaggaaatgagcgttggccgtgaaaagctgtatattaacactaggttgctacaggagttgaatcagtag

SEQ ID NO: 5732 - DNA, 630 bp, Escherichia coli
ttggcagcattacccgacattcgcaaggacaccagcctgcgttatttatcgtcgcgtatagaactgctggaagaacgcgcccgctggcagcaacgccagtctcctgaggagactaagccagaaacgtccggtctcaatacggtaccaggcaaaatttcacctggtaccgaatcaggactaagccggaaaccgaggcctggcggcttagtctcaaatcaggaccgggcttctgtacgtactgtatctacagatattcgtaatagtactaccgcgcgcgcgaacagctcaccgccgaactggccgccggaaattccgttaactaatcctgaaaaacagcttgtcttgcaggccatgcagaacctgccgcccccgctgcgccaggacgtgcttgatgacgcagctcaacgcgttgcccgtggcggcatacaaaacccgctcgcctatctgctggcaatgctgcgcaaagcgcagggcggtgagtttaatcagtatcgacgcggcaaagcgacggtgccggagtttgtgccgcatgtggtttcagagccgaaaataccggctgaaccgcgtaaaaaacgggatatcagtaagttggttgcggagattcgggcgcagtgtttggagaaaaagtga

SEQ ID NO: 5733 - DNA, 741 bp, Escherichia coli
atgaataacaacaccacggcaccgacctatacgctgcgtggcttacagttgattggttggcgtgatatgcagcacgccctcgattatctgttcgctgacgggcagcttaagcaaggaacgctggttgccattaatgccgaaaaaatgctgaccattgaagataacgccgaggtccgggagctaattaacgctgccgaatttaaatatgcggatggcataagcgttgtacgttcagtacgtaaaaagtacccgcaggcgcaggtttcccgcgttgctggggccgatctctgggaagagctgatggcgcgcgcaggcaaagaagggacaccggtatttcttgtgggcggtaaacctgaagtgctggcgcaaactgaagctaaactgcgcaaccagtggaatgtgaatatcgttggcagccaggatggttattttaaacccgagcagcgtcaggcgctgtttgaacgcattcatgccagcggagcgcaaatcgtcaccgttgcgatgggatcgccaaagcaggagatcttcatgcgcgactgccgtctggtgcatccagatgcgctgtatatgggcgttggcgggacctacgatgttttcaccggtcacgtaaaacgcgcaccgaaaatctggcaaacgctggggctggagtggctctaccgcctgctttcgcagccgagccgcattaagcgtcagcttcgtttgctgcgttatttacgctggcactataccggcaacctctga

SEQ ID NO: 5734 - DNA, 591 bp, Escherichia coli
atgcgcacaccgtcccgctatattttccgcttaccatcacatgaaattaatccttttcgggcaacgctcttgctgattttgttgatatgtgccgttctggctggcgtaagttggctgattctgtccttcgtacgtacaggcaatacattcatcttctggttaacactttttattgggtatctgatagccattgcgaagcaggaaaaaatcaagctcatcgagaagcgccagattatggctgataaacgtcagggactttccatttgtcagttcgcacgccaattttccccccacaccgtagatacatgggtgattcgggctgtgtggaataccttacaaggaaacggctatatcgattatccattaccactgaaagccagtgataaactggacgatgatctggatttagtaaacgatgcagacgagttagaagagctggtcgaagatattgccgctcgttgtgggcgcgatctacgcggaatagaagataatccgtttcttcccatcaccacggtaggttctcttgtaagtgtattaaacgcacaaccgatgacccaagagcgacgtagcctgttgtttactcggtcataa

SEQ ID NO: 5735 - DNA, 2547 bp, Escherichia coli
ttgtacctctatattgagactctgaaacagagactggatgccataaatcaattgcgtgtggatcgcgcgcttgctgctatggggcctgcattccaacaggtctacagtctactgccgacattgttgcactatcaccatccgctaatgccgggttaccttgatggtaacgttcccaaaggcatttgcctttacacgcctgatgaaactcaacgccactacctgaacgagcttgaactgtatcgtggaatgtcagtacaggacccaccgaaaggtgagcttccaattactggtgtatacaccatgggcagcacctcgtccgtagggcaaagttgttcctctgacctggatatctgggtctgtcatcaatcctggctcgatagcgaagagcgccagttgctacaacgtaaatgtagtctgctggaaagctgggccgcctcgctgggtgtggaagtcagcttcttcctgattgatgaaaaccgcttccgtcataatgaaagcggcagcctggggggcgaagattgtggctccacccagcatatactgctgcttgacgaattttatcgtaccgccgtgcgtctcgccggtaagcgtattctgtggaatatggtgccgtgcgacgaagaagagcattacgacgactatgtgatgacgctttacgcgcagggcgtgctgacgccaaatgaatggctggatcttggtggcttaagctcgctttctgctgaagagtactttggtgccagcctttggcagctctacaagagtatcgattccccatacaaagcggtgctgaaaacactgctgctggaagcctattcctgggaatacccgaacccacgtctgctggcgaaagatatcaaacagcgtttgcacgacggcgagattgtatcgtttggcctcgacccgtactgcatgatgctggagcgtgttactgaatacctgacggcgattgaagatttcacccgtctggatttagtgcgtcgctgcttctatttaaaagtgtgcgaaaagctcagccgtgaacgcgcctgtgtaggctggcgtcgcgcagtgttgagccagttagtgagcgagtggggttgggacgaagctcgtctggcaatgctcgataaccgcgctaactggaagatagatcaggtgcgtgaggcgcacaacgagctgctcgacgcaatgatgcagagctaccgtaatctgatccgctttgcgcgccgcaataaccttagcgtctccgccagcccgcaggatatcggcgtgctgacacgtaaactgtacgccgcgtttgaagcattaccgggtaaagtgacgctggtaaacccgcagatttcgcccgatctctcggaaccgaatctgacctttatttatgtaccgccgggccgcgccaaccgttcaggttggtatctgtataaccgcgcgccaaatattgagtcaatcatcagccatcagccgctggaatataatcgctacctgaataaactggtggcgtgggcatggtttaacggcctgctgacctctcgcacccgtttgtatattaaaggtaacggcattgtcgatttgcctaagttgcaggagatggtcgcagacgtgtcgcaccatttcccgctgcgcttacctgcaccgacaccgaaggcgctctacagcccgtgtgagatccgccatctggcgattatcgttaacctggaatatgacccgacggcagccttccgcaatcaggtggtgcattttgatttccgtaagctggatgtcttcagctttggcgagaatcaaaattgcctggtgggtagcgttgacctgctgtatcgcaactcgtggaacgaagtgcgtacgctgcacttcaacggtgagcagtcgatgattgaagccctgaaaaccattctcggcaaaatgcatcaggacgccgcaccgccagatagcgtggaagtcttctgctacagccagcatctgcgcggcttaatccgtactcgcgtgcagcaactggtttctgagtgtattgaactgcgtctttccagcacccgccaggaaaccgggcgcttcaaggcgctgcgcgtctccggtcaaacctggggcttgttcttcgaacggctgaatgtctcggtacagaaactggaaaacgccatcgagttttatggcgctatttcgcataacaaactgcacggcctgtcagtgcaggttgaaaccaatcacgtcaaattaccggcggtggtggacggctttgccagcgaagggatcatccagttcttcttcgaagaaacgcaagacgagaatggctttaatatctacattctcgacgaaagcaaccgggttgaggtgtatcaccactgcgaaggcagcaaagaggaactggtgcgtgacgtcagtcgcttctactcgtcttcgcacgaccgtttcacctacggctcaagcttcatcaacttcaacctgccgcagttctatcagattgtgaaggttgatggtcgtgaacaggtgattccgtttcgcaccaaatctatcggtaacatgccacctgccaatcaggagcatgacgcgccgctgttgcagcagtatttttcttga

SEQ ID NO: 5736 - DNA, 381 bp, Escherichia coli
atgagtaaggattatatggcagatggctcattaactgaaaagtggaagtaccgcttttcgttttatgatgaacatggcttccctggattttggggtgcaagcccagaatataaacaagcattaaaaggattaaacacaaggcaaaagataataattagaacaaatgttattgcttttttcttctcgtgggtctatttatttgtattgggtttatggaagaaggctattgttgttctattcctggcgatattttctttaatttttggttacatgattggctataatgtatttggattcattatcgccgcttatgtttcatacaataccaacagatggttctatgaaaaagaagtaaaaggtattcatacctggagcctttaa

SEQ ID NO: 5737 - DNA, 381 bp, Escherichia coli
atgttgcgtatatttattccaacatctaaaggcagaatttccagacgccgctatatattttcatttatttttacaaatctaatttgtatcttacttatttcttttttttccaatgccggggctggtttctttgttataacatctaccattcttttacattatctcgttatcaacatgaattgccaacgactccgggatagtggttttacttatataaaaacttatatttttagtacattagtagtctatatcatttctttcatcatcatggttgctgagcattttgactgttctggcaatggttcgatgatttttttgatttgttatttttccacctttggcatgttagttcttgcccccactgattccccccgtaaataa

SEQ ID NO: 5738 - DNA, 891 bp, Escherichia coli
atggatgcaaaacaaacgcggcagggcgtattactcgctcttgccgcttattttatttggggtattgcgccagcgtacttcaaactgatttactacgtgcccgccgatgagatcctgacgcatcgcgtgatctggtcgtttttctttatggtggtgctgatgagcatttgccgccagtggtcctatttaaaaacgctgattcagacgccacagaaaatttttatgctggcagtctctgccgtgctgattggtggcaactggctactgtttatctgggcggtgaacaatcaccatatgctggaagcgagccttggttactttattaacccactggtgaacattgtgctggggatgattttcctcggcgagcgattccgccggatgcaatggctggcggtgattctggcgatttgtggcgtgttggttcagttgtggacttttggttcactgccgatcatcgcgctggggctggcgtttagttttgctttctacggcctggtgcgcaagaagattgctgttgaagcgcaaaccggcatgttaatcgaaactatgtggttgctgcccgtggcggcgatttacctgtttgctattgccgacagctcaaccagtcatatggggcaaaacccgatgtcgctgaatttactgctgatcgccgccggtattgtcaccaccgtgccactgttgtgttttactgcagctgcgacacgcctgcgtctctcaacgttaggctttttccagtacattggtccgacgctgatgttcctgctggctgtgacgttttatggtgaaaaaccgggtgccgataagatggtgactttcgcctttatttgggtggcgctggcaatttttgtgatggatgcgatttatacgcagcgtagaatttccaaataa

SEQ ID NO: 5739 - DNA, 468 bp, Escherichia coli
atgtctgccgtactgaccgctgaacaagccctcaaattagtgggtgagatgtttgtttatcacatgccatttaaccgcgcattggggatggaactggagcgttacgaaaaagagttcgcacagctggcctttaaaaatcagccgatgatggtgggcaactgggcgcaaagcattttacacggcggggtcattgcgtcggcgctggatgtcgccgcaggtctggtgtgcgtgggaagtaccttaacccgccacgaaaccatcagtgaagatgaactacgccagcggctatcgcggatggggaccattgatcttcgcgtcgattatctgcgcccaggcagaggcgagcgttttactgctaccagtagcctgttgcgtgcaggcaataaagtcgccgtcgcccgcgttgaattacacaatgaagaacagctttatattgccagtgccaccgccacctatatggtaggttga

SEQ ID NO: 5740 - DNA, 861 bp, Escherichia coli
atgacggaagcaacgacaccacatgacgcaatctttaaggcttttttatcccgaccagaaacggcccgtgactttattgaaattcatctgccgccttctttagttaaactctgcaatcttgatacgctccatctcgagtccagcagttttgtagaggaaaacctacgccagtattacaacgacgtactttattcagtagagacgacgaaagggtgcggatatatctatgtgttgattgagcatcaaagttcacctgatgaaaatatggcgttccgtatgcttcgctatgctattgccaccatgcagcggcatcttgaagcgggacatgattatctgcctctggtgatccccattcttttttaccagggaaagcgtagcccatatccatggtcaacaaactggctcgatggttttccggatccggacattgcacgcgatctctattttcatgcttttccgctggttgatattacgctaattcctgatgacgaaatcatgcaacaccgcagcatggccgcctttacgctggtacagaagcatatccgtcaacgggatatgacaacgctgttagataagttatcccgcttaatgattctggggcagatgagcggacagcaaatacgcatgttgataaactacatggcgctggtaggtgaagcacaggatgtacgaacattagtacatggtctggcacaacgagtgcctcaacaaggagaggaactgatgactttagcggaagaacttcggcgcgatgcccttctcaatgtcgcaaaagccatgctacagcgtggctttgatttgcagttgattatggaaatgaccgggctttctcaggaagacctttatcaattgcaatcctga

SEQ ID NO: 5741 - DNA, 906 bp, Escherichia coli
atgttcatctcagacgaaacgcttcgtgttattcatctggtcgccagacaccagagcattaccaccgcagccgagcagttaaataaagtcccttccgccatcagttacaccatcaagaaagcggaagagagcctgggcgttgaactgttcattcgtaagggacgctatattgaattatcgccagcgggaagttacttcatcgaacatagcaaaactattcttggcgacctggaagcattaaagcgcaacacagtgctgattcacgatggtattgagcgtgaactgacaattgcggtaaacaatattattcctggtgatttgctggtggcatttattcgagattttgaacggcaattcacatcaacaacactgacggtagatcttgaggtatacaacggctgctgggatgcactgtacagtaagcgtgctgatctggtctacggtgctcctcatgcagtaccaagcagtgaaggcatcattagcgaaccggtcggacaaatggaatgggattttgtcgtcagcccactccacccactggcagcgaagcggcatccattagaaaacagtgaattgcgtcattatccagcggtttgtatccgcgatacctccgttaacttccccccgatgcaagcctggttgttggaaggacaaaaacccatttttgttcctgacttcgctacggcaatcgccttaatagaacaaaacgtcggtattggttatattccacatcatctggcattaccgttattgaacagcggtaaattgcttaaaaagccaatgcgcgaacataaacacgccaccaagttatttcttgccgctcgttccgatggtatgggcaaagcctgtcagtggtgcatagaatatttaagaaaccagcaattaatgacacgatttgtatttaattga

SEQ ID NO: 5742 - DNA, 168 bp, Escherichia coli
atgaacctagcaattcagatcttagcctcttacccgccatccggcaaggagaaaggctatgaagcacaaccctctggtggtgtgtctgctcattatctgcattacgattctgacattcacactcctgacccgacaaacgctctacgaactgcggttccgggacggtga

SEQ ID NO: 5743 - DNA, 1002 bp, Escherichia coli
atgagtaaagttggtattaatggttttggtcgtatcggtcgactggtgttgcgtcgattacttgaagtcaaaagcaacatagacgttgtcgctattaatgatctcacttccccaaaaattctcgcctacctgctgaaacatgattcaaactacggaccgttcccctggagcgttgattatacggaagattcacttatcgttgatgggaaaagtatcgcggtttacgccgaaaaagaggctaaaaatattccgtggaaagcgaaaggcgcagaaatcattgtcgaatgtacaggcttttatacctccgccgagaaatcgcaggcgcatcttgatgctggcgcgaagaaggtgttgatttccgcccctgccggtgaaatgaaaaccatcgtttataacgtcaatgacgacactctggatggcaacgacaccattgtttccgtggcgtcatgcaccactaactgccttgcgccgatggccaaagccttgcatgacagtttcgggatagaagtcggcacgatgacgaccattcatgcctataccggcacccagtcactggtggatggcccgcgtggtaaagatttacgtgcttcacgcgcagcggcagaaaatatcattccccacactacgggggcggcaaaagccattggcctggtgatcccggaactgagcggcaaactgaaaggtcatgcgcaacgcgtgccggtgaaaacaggttcggtcactgaactggtgtcgattctcggaaaaaaagtgactgccgaagaggtgaacaacgcgcttaaaaaggcgacaaacaataacgagtcatttggttataccgatgaagaaatagtctcttccgatatcattggcagccatttcggttcggtgtttgatgccacgcaaacggaaattaccgccgtgggcgatttacaactggtgaaaacggtcgcctggtacgataacgaatatggcttcgtcacgcagcttattcgcaccctcgaaaaattcgctaaactctga

SEQ ID NO: 5744 - DNA, 1440 bp, Escherichia coli
atgtcagtacccgttcaacatcctatgtatatcgatggacagtttgttacctggcgtggagacgcatggattgatgtggttaaccctgctacagaggctgtcatttcccgcattcccgatggtcaggccgaggatgcccgtaaggcaatcgatgcagcagaacgtgcacaaccagaatgggaagcgttgcctgctattgaacgcgccagttggttgcgcaaaatctccgccgggatccgggaacgtgccagtgaaatcagtgcgctgattgtcgaagaagggggcaagatccagcagttggctgaagtcgaagtggcttttactgcggactatatcgattatatggcggagtgggcacggcgttacgagggcgagattattcaaagcgatcgtccaggagaaaatatccttctgtttaaacgtgcgcttggcgtgactaccggcattctgccgtggaactttccgttcttcctcattgcccgcaaaatggctcccgctcttttgaccggtaataccatcgtcattaaacccagtgaatttacgccaaacaatgcgattgcattcgccaaaatcgttgatgaaataggccttccgcgcggcgtgtttaaccttgtactcgggcgtggtgaaaacgttgggcaagaactggcgggtaacccaaaggttgcaatggtcagtatgacaggcagcgtctctgcaggtgaaaagattatggcgactgcggcgaaaaacatcaccaaagtgtgcctggaattggggggtaaagcaccggctatcgtaatggacgatgccgatattgaactggcagtcaaagccatcgttgattcacgcgtcattaatagtgggcaagtgtgtaactgtgcagaacgtgtttatgtacagaaaagcatttatgatcagttcgtcaatcggctgggtgaagcgatgcaggcggttcaatttggtaaccctgctgaacgcaacgacattgcgatgggaccgttgattaacgccgcggcgctggaaagggttgagcaaaaagtggcgcgcgcagtagaagaaggggcgagagtggcgttgggtggcaaagcggtagaggggaaaggatattattatccgccgacattgctgctggatgttcgccaggaaatgtcgattatgcatgaggaaacctttggtccggttctgccggtggtcgcatttgacacgctggaagaggctatctcaatggctaatgacagtgattacggcctgacctcatcaatctatacccaaaatctgaacgtcgcgatgaaagccattaaagggctgaagtttggtgaaacttacatcaaccgtgaaaacttcgaagctatgcaaggcttccacgctggatggcgtaaatccggtattggcggcgcagatggtaaacatggcttgcatgaatatctgcagacccaggtggtttatttacagtcgtag

SEQ ID NO: 5745 - DNA, 3903 bp, Escherichia coli
atgacagaacaacaaaaattgacctttactgccttgcagcagcggctggattcgttgatgctgcgtgacagattgcgtttttctcgccgtctgcacggtgtgaagaaggttaaaaatcctgatgcacaacaggccattttccaggagatggcgaaagagattgaccatgcggcagggaaagtcctgctgcgtgaagcggcacgaccggagattacttacccggacaatttgccggttagtcagaaaaagcaggacattctcgaagcgattcgtgaccaccaggtggtgatcgtcgccggggaaacgggttccggtaaaacgactcagctaccgaaaatctgtatggagctggggcgcgggattaaagggctgatcggccatacccagccgcgtcggctggcggcgcgaacggtggcgaaccgtattgcggaagagctaaaaacggagccgggcggttgcatcggttacaaagtgcgtttcagcgatcacgtcagtgataacacgatggtcaagctgatgaccgacggtatcctgctggcggagatccagcaagaccgcctgctgatgcagtacgacaccatcattattgacgaagcgcacgaacgcagcctgaatatcgattttctgctcggctatttgaaagagttgctgccgcggcgtcctgacctaaaaatcattatcacttccgcgactatcgacccggaacgcttttcgcgccactttaataatgcgccgattatcgaagtctccggtcggacctatccggtggaagtgcgctatcgcccgattgttgaagaagccgatgataccgagcgcgatcagttgcaggcgatttttgacgccgtagacgaactgagccaggaaagccctggcgacattctgatctttatgagcggcgagcgagaaattcgcgataccgccgatgcgctgaacaagctgaacttacgccataccgaaatcttgccgctttatgcacggctttccaacagcgaacagaaccgcgtgttccagtcgcacagcgggcgacgcattgtactggcgaccaacgtcgcggaaacctcgctgaccgtaccgggtattaaatacgttatcgacccaggtacagcgcgtatcagccgctacagctatcgcaccaaagtgcagcgtttgccgattgagccaatttcgcaggcttcagctaatcagcgtaaaggccgctgtggtcgtgtgtccgaagggatctgtattcgtctctattccgaagacgatttcctttcgcgcccggagtttaccgatccggagattctgcgtaccaacctggcctcggttattttgcagatgaccgcactgggcttgggcgatatcgccgcattcccgtttgtcgaagcaccggataaacgcaatatccaggatggcgtgcgtctgctcgaagaactgggcgcgatcaccactgatgaacagcaaagtgcttataaactgacgccgctcggtcgtcagctctcgcagttgcctgtcgacccacgtctggcgcgtatggtgctggaagcgcaaaaacatggctgcgtgcgtgaggcgatgattatcacgtccgcgctctccattcaggatccgcgcgagcgtccgatggataaacagcaggcagctgacgaaaaacatcgtcgcttccacgacaaagagtctgacttcctggcatttgtgaatctgtggaattatcttggcgagcagcaaaaggcgctttcttcaaacgccttccgtcgcctgtgtcgtaccgattatctcaactatctgcgcgtgcgcgaatggcaggatatctacacccagttgcgccaggtggtgaaagaacttggcattccggttaacagcgaaccggcggattatcgcgaaattcacattgcgttgctgaccggtttgctttcgcatatcggcatgaaagatgccgataaacaagaatataccggcgcacgtaacgcgcgtttctccatcttccccggttctggtttattcaaaaagccgccgaaatgggtaatggtggcggaactggtagaaaccagccgcctgtgggggcgcattgctgcgcggatcgacccggaatgggtggagccagttgctcagcatttgattaaacgcacctacagcgaaccgcactgggaacgggcgcagggcgcggtgatggcaacggaaaaagtcactgtttatggtttgccgattgttgccgcgcgcaaggtcaactacagccagatcgatccggcgttatgtcgtgaactctttattcgccacgcgctggtggaaggtgactggcagacgcgtcacgcattcttccgcgaaaacctgaaactacgggcggaagtagaagagctggaacacaaaactcgtcgccgcgatattctggtggatgacgaaacgttgtttgagttctacgaccagcgcatcagtcacgatgtgatctctgcacgccatttcgacagttggtggaaaaaagtcagccgcgaaacgcctgatttgctcaactttgaaaagagcatgttgatcaaagaaggggcggaaaaaatcagcaagctggattacccgaacttctggcatcagggcaatctcaagctgcgtttgagttatcagtttgagccgggggcagatgctgacggcgtgaccgtacatattccgctgccgctgcttaaccaggttgaggagagcgggtttgagtggcagatccccggcctgcgccgtgagctgatcatcgccctgattaaatcgttgccgaagccggtacgccgtaattttgtacctgcgccaaactatgccgaagcgtttttaggccgcgtcacaccgctggaattgccgttgctcgacagccttgaacgagagcttcggcggatgactggcgtcaccgttgaccgcgaagactggcactgggatcaggtgcccgatcacctgaaaatcaccttccgcgtggtggatgacaaaaacaagaagctaaaagaagggcgctcattacaggatctgaaagacgccctgaaaggcaaagtgcaggaaacgctgtctgccgtggcggatgacggtatcgagcagagcggtttacatatctggagttttggtcaactgccggaaagctacgagcagaagcgcggcaactacaaagtgaaggcttggccggcgctggtggatgagcgtgacagcgtagcgatcaaactgtttgataacccgctggaacagaagcaggcaatgtggaacggtcttcgccgtttactgctgctaaatattccatcgccgatcaagtacttgcacgaaaagctgccaaacaaagccaagctggggctgtactttaacccgtatggcaaagtgctggagctgatcgatgactgtatctcctgcggtgtggatcaactgatcgacgccaatggtggcccggtctggacggaagaaggctttgctgcgctgcatgaaaaagtccgtgctgaactgaacgacacggtggtggatattgcgaagcaggtcgagcaaatcctcactgcggtgttcaatatcaacaaacgtctgaaagggcgggtggatatgaccatggcgctggggctttctgacattaaagcgcagatgggcgggctggtgtatcgcggttttgtcactggtaacggcttcaaacgactgggcgacacgctgcgatatttgcaggcaattgaaaaacgactggaaaaactggcggtcgatccacatcgcgaccgtgctcagatgctgaaagtcgaaaacgtccagcaggcgtggcagcaatggatcaacaaactaccgcctgcacgtcgtgaggatgaagacgtgaaagaggtccgctggatgatagaagagctgcgcgttagttacttcgctcaacaacttggcacgccttatccgatttcggataagcgtattttgcaggcgatggagcagattagcggttaa

SEQ ID NO: 5746 - DNA, 5496 bp, Escherichia coli
gtgaatcaggacggcacgctggatgtcagcggcggcggtcacgggattgatatcaccggcgacagcgccacggtggacaacaagggcggtatgacggttaccgatccggattccatcggtattctgatcgacggcgacaaagccatcgtcaacaacgacggtgacaacgccatcagtaacggcggcaccggcacgcaggttaacggtgatgaagccaccgtaaacaataacggtaaaaccaccgttgatggtcagggctcgaccggcacggaaatcgcgggtaacaacgcggtggtgaatcaggacggtacgctggatgtcagcggcggcggtcacggtattgatatcaccggcgacagcgccacggtggacaacaagggcggtatgacggttaccgatccggattccatcggtattctgatcgacggtgataaagccatcgtcaacaacgacggcgacaacgccatcagcaacggcggtaccggcacacaaatcaacggtgacgacgcgaccgcgaacaacagcggcaaaaccattgtcgacggcaaagattccaccggtaccgaaatcgcgggcaacaatgcggtggtgaatcaggacggcacgctggatgtcagcggcggcggtcacggtattgatatcaccggcgacagcgccaaagtggataacaaaggcggtatgacggttaccgatccggattccatcggtatccagatcgacggtgataaagccatcgtcaacaacgatggcgacaatgctatcagcaacggcggcaccggcacgcaaattaacggcgatgaagccaccgtgaataataacggtaacaccactgttgatggcaaagacgccaccggcacggaaatcgcgggtaacaacgcggtggtgaatcaggacggcacgctggatgtcagcggcggtgctcacgggattgatatcactggagacggcgccattgcaaacacgacaggagcgatcactgtagcggatacggactctgtcggtattcaggttgatggtaatgcagtgaccgtcagcaatgacggagacagcaccattactaacggcggtacgggcacgcaggttaacggcaacgatgctcaggtcaacaatactggcaacaccacggtagacggcaaaaactccaccggaacagaaattacgggcaataacggcactgtaaatctggatggtggtctgattgtgacgggtggtgcctatggcgtggagatcgctggcgacagcgccgcgctaaacaatgaaggagatatttcggtttccgatgagggctcaattggcgtactcatcaacggtgaaaaagcaaccgtatctaacacgggtgatgttaacgtcagcaataacgcgacaggttttgacattaccactaatgaagggaatatttcgctggcaggcagtatgcaggtgggcgacttctctaccgggatggatctaaacggtaataacaacagcgtcacgctggcggcaaaagatctgaacgtcaccggtcagaaggcgacaggcgtgaatgtatccggcgatgccaacactattaatatcaccggtaatgttctggtagataaagatcaaacggctgacaacgcggcagattatttctacgacccgtctgtggggattaatgtcagcggcagtaataacaatgtcactctggacggtaagttaacggttgttgctgacagtgaacttactacacgcaattctgctggcgtcgttgtatttgatggtagccaggagaatattaccggactcagcattgcaggcgatggtaatactttccgtctgaatggcggtattcaactggttggtgaggcgaacaagctaactgacggttccactattgcgtccgagcgaaaaggcagtggcaaggttcctgttatcagtgttgatggaaaatcgtccgttcatctgaacggggattccactattagcggtgatgtgctgctcggcaatacacaaatcattgatttgcggaatggtgccatgctggatgtcggtgcggatgccacgatcaacatgcaggttgatacttacgagcgttatgctatgtcagccgatcacctcattgatgcatcgtctggctctcagttggtcaataacggtgatattaatctccgaagcatcggttttgccgctattactggtgaggattcattcggaagcaacactggcaatctcacgctttctcagtacctcgatgggctgtttgcaaacggagggtatggctatttagccaccaaaggggccagtgtcgtgaacacaggcactatcactacgaaagtggcggaacaagagagcgtaatcaaccttggcgcgtcactgggttttaatgatttagtcttttataacgcagcgaacagtatgacgggccttagcgccaaaactcatggttatgtactcaatgagaacggcggcaaaatcgagatgttcggacgtggcaatgtcggtatgttggccatcgatgaaagtacggcagaaaacgcggggcagattacactggatgcactgtgggttgatgtaaacgatacaacaactttgcgtgacaatattggtaacgacgccagaggatattctgttggtatgggcgttgggacagatgctggcagtggaccgaggaagaacgccacagcagtcaaccaacagagtggtgttatcaccgtttataacgccggaattggtatggccgcctacggcgctggtaatacggttattaaccagggcaccattaatctggagaaaaacggtaattacgatagtagcctgggcgtgaattcgcttatcggtatggctgcatataacagtggtaccgccattaacgatcaaaccggtgttatcaatattaatgctgacaatgggcaggcattttatagcactggtaacggtgtcattcttaactatggcaccatttgtgttaacactaattgcctgacgggcaatgactataatgatactgactcctatacctcgatattatacacgggtggcgatgtcatcactgcacagagtgaaacacaaagtctgaccaaaaaagccacgattagcgacaaaaaagacggtaatgttgttaacagtggtgcgctttccggtgctgatattgcgattagtagcggtaagttagttaatacatcaacgggtacgattaataacgcaataattatcaacggcggtgcgttaagtaacgaaggctctgtggcgaaggtgacgcaaaacgccggtactttcaataacacagggtcggttaacagtcgtatgactcagacaggaggaacgttcaataaccaacagggcgggacggtgaagaacggctccagactggccaacagcgctattgctaataacatggggatctggtcccttggcgatacgagtagtggtggtaatgccagcatgctggaaattaataataatgccgtgttcaaaaacagtggtgacttcattctggataatagcaaaaacgctgttcatctgaatcagtcaggtacgttctacaataccgggaaaatgttgctatccaactcttcccataacggcgtactaaatttctggggtgggaatgggcgctttattaacggcggtattgcggatgtcacggcgaaatctttggccgtaagcgccagtgatgccgggagcagcaatgccttcttctggaaccagagcaatggggtcgtcaattttgataaagacagcggcgttgcagtgaaattcactcacagcaattacgttgcgcagaatgacggcaccatgaatattagcggtaataacgctattgcgatggaaggggataaaaacgcacgactggttaacaacggcacgatcaacctcggaacgtcgggcacgaccgacacgggcatgatcgggatgcaactggacagcggcacgacagctgatgcggtcattgagaacaatggcgccatcaacatttacgccaacaactcctttgcatttagcatgttgggttccgtaggccacctcgtgaacaacggcacagtgactattgccgatggagtgacaggttccgggctaatcaagcaaggtgacagcgttaacattgaaggtgtgaacggcaataacggtaacaatagcgaagtgcattatgctgattacactttgcctgatgtacctggctcgtcggtttctgttgcggccagcaccccgtccagtgacggaagccagaacaaactgaatggttatgttgtaggaaccagttctgacggcagtgccggcaagctgaaagtgaacaatgcaagcctgaaaggggtttctgttaacaccggatttacggctggaaccagctccacctccgtgaccttcgacaacgtcgttcagggcagtaatctgaccgacgcagagacgattacatcgacctctgtggtatggaacgcgcaaggcactactgacgccagcggcaacgttgatgtcacgatgactaaaaatgcctacaccgatgtagcaacagattcatctgttaacaccgtcgcgcaggtactggatgcgggctataccaacaacgagttgtacagcagcctgaacgtaggcaccacggcggaactgaacagtgcgctgaaacaggtcagcggcagccaggcaacaacggtattcaatgaagcacgagtgttaagtaaccgcttcagcatgttgtccgatgcagcaccggaagtcgcaaacggtctggccttcaacgtggtagcgaaaggcgacccgcgtgctgaactgggtaacgacacacagtacgacatgatggcgctgcgtaaatctctgacgctgactgaacatcagaacctgagtctggaatacgggattgcgcgtctggagggtaatggttcagataccgcaggcgataacggagtgacaggcggttacagccagttcttcggtctgaaacaccagatggcctttgacaacggtatgaactggaataacgccctgcgttatgatgtgcaccagctcgacagcagccgctcggtagcgtacggcgatatcaataaaacagccgatgctaatgtgaaacaacagtacctggagttccgtagtgaaggggcgaaaacctttgagctgcgtgaagggctgaacgtcacgccatatgccggggttaaactgcgtcacacactggagggtggctatcaggaacgcaatgcgggtgactttaacctgagcatgaacagcggtagcgaaacggcagtggacagcattgttgggctgaaactggactatgccggtaaggacggctggagtgcgaacgccacgctggaaggcggcccgaacctgagctatgtgaaaagccagcgaactgcgagcgtttcgggcgcgggaagccagcgtttcaacattgatgatggtcagaatggtggtggtttcaacagcctggcgacaatgggtgtgaaatacagcagccaggaaagtgcgttgcaggtagatgcattccactggaaagaagacggcatcagtgataaaggtgtgatgctaaacttcaagaaaacgttctaa

SEQ ID NO: 5747 - DNA, 384 bp, Escherichia coli
atgtcagttctgtatatccaaattcgtcgtaatcaaattactgttcgcgatcttgaaagcaaacgtgaagtgtcaggagatgctgccttcagtaaccagcgcctgttaatcgccaatttctttgttgcagaaaaagttctgcaagatcttgttctgcaactccacccacgttcaacctggcattcttttttgccagcaaaacgtatggatattgttgtgagcgcgctggaaatgaatgagggcggtttgtcacaggttgaggaacgcattcttcatgaagtggtcgcaggggcaacgttaatgaaatatcgccagttccacatccatgcgcaatcagtggtactcagtgatagtgcggtcatggcaatgtttaagcagaaataa

SEQ ID NO: 5748 - DNA, 1602 bp, Escherichia coli
atgactgaacaggcaacaacaatcgatgaactggctttcacaaggccgtatggcgagcaggagaagcaaattcttactgccgaagcggtagaatttctgactgagctggtgacgcattttacgccacaacgcaataaacttctggcagcgcgcattcagcagcagcaggatatcgataacggaaggttgcctgatttcatttcggaaacagcttccattcgtgatgctgactggaaaattcgcgggattcctgcggacttagaagatcgtcgcgtagagattaccggacctgtagagcgcaagatggtgatcaacgcgctcaacgccaatgtgaaagtctttatggccgatttcgaagattcactggcaccagactggaacaaagtgatcgatgggcaaattaacctgcgcgatgcagttaacggcaccatcagctataccaatgaagcaggcaaaatttatcagctcaagcccaatccagcggttttgatttgtcgggtacgcggtctgcacttgccggaaaaacatgtcacctggcgtggtgaggcaatccccggtagcctgtttgattttgcgctctatttcttccacaactatcaggcactgttggcaaagggcagcggtccctatttctatctgccgaaaacccagtcctggcaggaagcggcctggtggagcgaagtcttcagctatgcagaagatcgctttaatctgccgcgcggcaccatcaaggcgacgttgctgattgaaacgctgcccgccgtgttccagatggatgaaatccttcacgcgctgcgtgaccatattgttggtctgaactgcggtcgttgggattacatcttcagttatatcaaaacattgaaaaactatcccgatcgcgtcctgccagacagacaggcagtgacgatggataaacccttcctgaatgcttactcacgcctgttgattaaaacctgccataaacgcggtgcttttgcgatgggcggcatggcggcgtttattccgagcaaagatgaagagcgcaataaccaggtgctcgacaaagtaaaagcggataaatcgctggaagccaataacggtcacgatggcacatggatcgctcacccgggccttgctgatacggcaatggcggtattcaacgatattctcggctcccgcaaaaaccagcttgaggtgatgcgcgaacaagacgcgccgattactgccgatcagctgctggcaccttgtgatggtgaacgcaccgaagaaggtatgcgtgccaacattcgcgtggctgtgcagtacatcgaagcgtggatctctggcaatggctgtgtgccgatttatggcctgatggaagatgcggcgacggctgaaatttcccgtacctcaatctggcagtggatccatcatcaaaaaacgttgagcaatggcaaaccggtgactaaagccttgttccgccagatgctgggcgaagagatgaaagtcattgccagcgaactgggcgaagaacgtttctcccaggggcgttttgacgatgccgcacgcttgatggaacagatcaccacttccgatgagttaattgatttcctgaccctgccaggctaccgcctgttagcgtaa

SEQ ID NO: 5749 - DNA, 1281 bp, Escherichia coli
atgaatatgacaacctctgttccccaaacgccttctttatttcggcgaataatgacaaaactcgcggcctttgcacctggcatctttcttattggctacagcatcggaacaggcagcatcaccactatggctaaagcaggtgctaactatggtgtctcgctcatgtgggccgtggcgctttcttgcattgttacctggtttttaatccgtatttatggtcgttatgcttccgtcactggtgaacgcgcgttgactgcatttcgtcgccatatccatcccggcgttgcgatgttgtttctgatcgggttaaccgttgccgtgagcggttccattatgggggtaatgggtattctggcggatgtaatggcaacatggtccacgacctggtttagtggcggtatctcagctctcgcctgggctatcgcgatggtcattatgattaacgtgatgctctggaccaacagcaacgccgggttcgacaaaatcctctccgcgctggttggcattatggggctggcgtttgtgattaattttttcattatgatgccgccggtcgcagatctgctggccggatttattccgtctgttcccgatcctgtcgctggcgataacagtacgccatttctgataatttctggcatggtgggtaccaccgtagcaccagcaatgtttcttatgcgcacgaccctggtaaaaagtaatggttggggtgtggacaatttgcctcatcaaaatcgtgatgccattgtcagtgcaggaatgatgttcatcatcagtgcggcggtgatggctgcggctgcgggtacgttgtaccaaactggcacaggtttaaataatgcctcgcaaatggtcattattctcgaacctattgctggctcagctgccgtggggctctttgttattggtattgttgcagccgggctttccagccagttcccaaatttgctgttaacgccctggctgctggctgactggcgtgataccagcaacgaagttagcccaggttaccgtatcctgatgacggttatgtctctgctttgtctggttgtgccgctgttccacgcacgcccggtattggtgatgattgccagccaggcctttaacgccattattctgccgctgactgttttatgtatgttctggctggcgaacaagccttcgttaatgggcaaatatcgttgctcacgctgggaaaacgtcatgtttattgccataagcgtatttacgctaatcatgggctatatggcaatgagcggcttaatcgaaagtctgatgaaatag

SEQ ID NO: 5750 - DNA, 1170 bp, Escherichia coli
atgaatttacatgagtatcaggccaaatcgttactggctggcatggggatgccgtgtccaaaagagatagctatccaacagatttcgcaactggcagatgcctggcaacatattgcttgcccgagtaaaggcgcggtacttaaagcgcaggtacatgctggtgggcgcggtaaagctggcggcgtaaaagtgcttaagcagctgccggaagcacaggcttttgtacagcaaatgttgggatcgcaactggtgacttatcagaccgggccagaaggacagtatgtcagcagtattttactgtgcgaaaacatttatccggtacgccaggaactctattttggcatggtggtggatcgtgaaagccagcgggtcacgtttattgtcagcccggaaggtggtgtggaaattgaaaaagtcgcccatgagacaccggagaaaatcagcagtgtcagcattgatccactgacaggcgtgcagccttgccatatccgcgaaatgtttgctgttctgcaactggaacacggactatttgctgcctttagtcgcctggttaatcaggcgtggaaagcctttaacgaactggattttgccctgctggaaattaaccctctggtgttgcgggaaacgggcgaatttatgtgtgcagacgcgaaagtatcgctggatgataacgcgctgtatcgtcacccggaactccaggtgctacgtgatgaaacccaggaagatccacgcgaaagccaggcagcgaagcttgatcttaattatgtctcgctggacggaaatatcggctgcatggtcaatggtgcagggctggctatggcaaccatggacatcatcaagctatacggtgaacaacccgcaaacttcctggatgttggcggtggcgcaacccaggagcgcgtcagtgaagcctttcggctgattgtttccgacagcaaagtgaaagccattctggttaatatttttggtgggattgtccgttgcgacatgatcgccagagccattattcatgctctgaatgaggccagcatcaccctgcctgtcgtggtgcgtctctccggtaataacgccgccgaagggcagcggttactggcagaaagtggtctgacggtggaagccgtcgattctctggatgatgccgcgaaacgcatcattgcgttactgaattaa

SEQ ID NO: 5751 - DNA, 1500 bp, Escherichia coli
atgtcatcaatatcacatggcgcaccacaaaagcgtcgaattatccctaatcccggcctgtggttggcgatcattgccggaattattattactcttctgcctctgggcgataccttgcccgtcgccggacaaaatatgatcgccattctggtgtttgccattattgtctggatcagcgaagcgatggattacaccgccagtgcaattgttatttccgcactgattatctttatggttggttttgccccggatatgaatcacccggacacgatccttggcaccgcgaaagcgctgaaaatgactctgtcgggtttttctaattctgctctggcgctggtggcagcagcaatgtttatcgcggcggcaatgaccattaccgggctggataaacgtattgcgctgtttactatgtcgaaaataggtgccagtagccgcagcattattatcggtgccattgtggtgaccatcgtcctgagcctggtcgtacccagtgccactgcccgtacggcttgcgtggtgccgattatgatgggggtcattgcggcatttaaggtggataaacattcacgtttagcggcgtcaatgatgattgttatcgcccaggcgaccagtatctggaacgttggtattcaaacttcggcggcgcaaaacctgctttctatcggttttatcaataaaactttcggcgccgggcattctgtcagctggcttgactggctgttagcgggcgcgccctggagcctcaccatgtcggtgatcctctatttcctcgcacgtaaattgttgccgccagaaacggaagctgttgaaggggggagcgaggccattaaaaaagcactcgcagagttagggccaaccaccggtaaagaaaaacgcttgatcggtatttcgctgttgttactgctcttttggtctactggcggaaaattacacagtattgataccacctctgtcacccttgccggactggcgattatgttgctgccaggcatcggtgtaatgagctggaaagaggtcgaaaaacgtgtgcagtggggcacgttgctgatgtttggtattggtatcagcctggggtccacgttgcttgatacacaggcagcttcatggatggcgaactatgtggtgaaaggttttggtcttgacggtttaccatcacttgccatcttcgcgattctcgccgctttcttgataatcattcacctggggtttgccagtgccactgcgctaactgccgcattgctgcccatcctgattagcctgttaagcagtctgccgccagaactcggcgttaacccggtcggcatgaccattctgctcgccttcagtgtcagttttggcttcatcctgccgattaacgcgccacaaaatatggtgtgtatgggtacggataccttcacgccacgccagtttacccgtgtgggactgtacctgacggtaatcggctacctgttgttgctactgtttgccgccacctggtggaaaattttaggtctaatgtga

SEQ ID NO: 5752 - DNA, 366 bp, Escherichia coli
atgttcctgctccagcgcgaagcgctgttccggcgtttctttgaactggcgaagttcccgtttgtcagccacatcggctatccattgctccagttgttgattaacatgagtgaagctgtcgaacctgcggtaccgaacgaagaagttctccttgaggtatttcaccatccgctcaaccttaccttttgttctggccctgcgtggacggcatgcccgtggcaggaagttatagtggtcggccagcaacaggaatccggagttgaacacgactttcccgttgttattcttcagcaccgcagccttctggttatcaaccagcaccgttttcacacaaccaccgaagtagcggaaggcgcgaaccagtga

SEQ ID NO: 5753 - DNA, 993 bp, Escherichia coli
atgtttgcactggctgatatcaacagtttctacgcctcatgtgaaaaagttttccgcccggaccttcgcaacgaaccggtcatcgtactcagcaataacgatggctgtgtgatcgcgcgcagcccggaggcaaaagcccttggcatcagaatggggcagccctggtttcaggtgagacaaatgcgcctggagaagaaaatacatgtattttccagcaattatgcgctgtaccacagcatgagccaacgggttatggctgttctggagtcgctttctcccgcagttgagccctactcaattgatgaaatgttcattgatttgcgggggataaatcattgcatctctccggagttttttggtcatcagctcagggaacaggtaaagagctggacaggactcaccatgggggtgggcattgcgcctacaaaaacgctggctaaaagtgcacagtgggcaacaaagcaatggccacagttttccggtgtggtcgcgctgacggcagaaaaccgtaatcggatcttgaagctactggggctgcagccagttggtgaggtctggggagtaggacgcagactgacggaaaagctgaatgcgctgggtattaacacagcactgcaactggcgcaggctaacacggcattcatccggaaaaacttcagcgtcattcttgagcgtacggtacgcgaactcaacggcgagtccagcatatccctggaagaagtaccaccggcaaaacagcagattgtctgtagtcgcagttttggtgaacgaatcacagacaaagatgccatgcaccaggctgttgttcagtatgcagagcgggccgcagagaaactacgtggggagcgtcagtattgtcggcaggtgacgacatttgtacggacatccccctttgcagtaaaagaaccctgttacagcaatgccgctgtggaaaagctttcattgccacacaggacagccgggacattattgccgccgcatgcagagtcttaa

SEQ ID NO: 5754 - DNA, 438 bp, Escherichia coli
atgagtaccgtttatcaccgtccggctgacccttcaggcgatgacagttacgtgcgaccgttgtttgccgatcgttgccaggccggttttccttcgcctgccactgattatgctgagcaggaactggatctgaacagctattgcatcagcagacctgcagccaccttctttctgcgcaccagcggtgaatcgatgaaccaggctggcgtgcagaatggtgatctgctggtagtggacagggccgaaaaaccacaacacggggacatcgttatcgctgagatcgacggtgagttcaccgtcaaacgactgctgttgcgcccacgcccggcactggagccggtttcagacagcccggagttccgcacactgtatccggaaaacatctgtatttttggtattgtcactcacgtgatacacaggacgcgggagttacgctga

SEQ ID NO: 5755 - DNA, 519 bp, Escherichia coli
atgagtgtgccgcaaacaaaagctgaactgcttttagctattgataaaaattttagtaaattaattagttacctcaacacaatcccaccagaaattacttcagataaatcaatggacggacacgccaaaggaacggagatgagtgttcgtgatctcgtttcgtatctgcttggatggaatgctcttgttgtaaagtggatcgcttctgatgctaaaggtctgcctgtcgattttccggaaactggctataaatggaatcagcttggccttcttgctcaaaaattttactcagattacagtgagttaagttatgagttgttagtagctgaacttcagactgtaaaaaatgagattgtgaaccttattaatgatcgtaccgatgatattttgtatggaagaccatggtacacaaaatggacgatggggagaatgatctcatttaacacatcttcgccttacgccaacgctaatggaagattaagaaagtgggcaaaaaataataatatcagtttaaagtaa

SEQ ID NO: 5756 - DNA, 1221 bp, Escherichia coli
atggacgaaaaatccctctatgcccatatccttaacctgactgcaccatggcaggttaaatcccttaccctcgatgaaaatgcaggttccgttactgttacagtcggaattgctgaaaatactcagttaacctgtccgacctgcaggaaatcctgttctgttcacgatcaccgacatcgtaaatggcgccaccttgatacctgccagttcatgacattagtagaagccgatgttccccgcgttatgtgcccggagcatggctgccagactctgcctgtaccgtgggcaggttccggcagtcggtacactctgctgttcgaatcgttcgtgctctcatggcttaaaatcagcaccgttgatgcggtcagaaaacaacttaaacttagctggaatgccgttgacggcatcatgacccgcgcggttaagcgaggcctgtcgcggattaaaaagcctttatcagtgcgtcatatgaatgtagacgaagtcgcctttaaaaaagggcataggtatataaccgtggtatctgatcgcgacgggcgggcactggcattaaccgatgatcgtggcacagagagtcttgccagctatctccgttcgcttactgacagtcagttgttggccatcaaaacactgtcgatggacatgaatgcgggctatataagagcagcgcgtatccatttacccaatgcggtcgagaaaatcgccttcgatcgcttccatgtggcgaagcaactgggcgaagtggttgataaaacccgccagaatgaacatccgcacctccctgttgaaagtcgtcgtcaggccaaaggtacccgcttcctgtggcagtacagcgacaaatggatgactgagtcccggcaggaaaagctgatgtggttgcgggaacagatgcaacagacaagccagtgctggacactgaaagagctggcaaaaaatatctgggatcgcccctggagcacagaacgcaggaatgactggttgcagtggatatcgcgggcgtctgaatgtgatgtgccgatgatgaaaaacgcagcgaaaaccattaaaaaacggttatacggaatactgaatgcaatgcgtcatcgcgtctcgaatggaaatgcggaggcgctgaacagcaagatcagactgctgaggataaaggccaggggataccgaaaccgggaacgctttaaactgggagttatgttccactatgggaaactgaatatggcgtactga

SEQ ID NO: 5757 - DNA, 684 bp, Escherichia coli
atgtcccgttttgtcctcggtaactgcatcgatgttatggcccgtattcctgataacgccattgatttcatactgactgacccgccgtacctcgtcggtttccgtgaccgttccgggcgcaccattgccggtgatgttaatgatgactggctgcaacctgccagcaatgagatgtaccgcgtactcaaaaaagacgcgctgatggtcagcttctacggctggaaccgtgtcgatcgctttatggccgcctggaaacgcgccggattcagcgtggcagggcacctcgtgttcaccaaaaactacacatccaaatctgcgtatgtcgcgtaccgtcacgaatgcgcttacatcctggcaaagggcagtccggcccggccccgtaaccctctgccggatgtgctgggctggaaatattcaggcaatcgtcatcacccgacggaaaagcccgttaccagcctgcaaccactgattgagagcttcacacatccgaacgcgattgtgctggacccgtttgcaggcagcggctcaacctgcgtcgctgccctccagtccggacgccggtatatcggtatcgagctgcttgaacagtatcaccgtgccggacagcaacgactggccgccgtgcaacgggccatgcagcagggggccgcgaatgataactggtttgaaccggaggctgcgtaa

SEQ ID NO: 5758 - DNA, 222 bp, Escherichia coli
atgaactatgccggacacgaaaaacttcgcgccgacgtggcggaggtggccaacaccatgtgtgaccttcgggccaggctgaacgatatggagcatcgctgtcgctttgattccgatgtgcttgttgaacgcctgacacgccagacgctgtatcgcgccaatcgcctgttcatggaggcgtataccgaaattctggaactggattcctgcttcaaagattga

SEQ ID NO: 5759 - DNA, 435 bp, Escherichia coli
atgtacggaacatgcgaaacgctatgccggaagctggcagcaaagtattcgggagacacgccactgatgctggttatctggtccccggaagaaattcaggccctctctgacggaatggatattgccctgaccgatcatgaaatcaggactgtcctggcgcgcctggaggacatcccggaagaccagcggactgaatccggtatttcttccggcgtggcgatggagatcatcaataacgtgagcgaaaaccgccaggtgactgtccctgctgaactgctggcgtccctgattcagaccgctgaacaggcattgtggaaacgtgaatgggccgcctgggatcatggcctcgccgtcccggaatgcgtcacccgccgtcaggcggtggttaatcaggtccgcatcctgctgaaaaacaacacacacgaaaacgactga

SEQ ID NO: 5760 - DNA, 771 bp, Escherichia coli
atgaatgaaatgctgaatgcactgatttatcgccacgccagcaacctgttgctggcgcagggctggccggaagagacggatgttgaccagcgtaacccgaagtatccgggctggatcagcatttacgtgcggctggatgcgccccggctggcgacgttacttatcaagcgtcacggcggcgtactgccgccgctcctggcctctgccattcagaaactgaccggaaccggagcggaacttgttctgtccggcagtcagtggcagtcgctgccggtacttccggcagacggaacgcaggtgtctttcccgtatgccggtgagtggctggcagaggacgaaatcagggccgttcttggtgcggtacgcgatgcagtatgcagtgtcagttaccaggtggcagaagatgcgcggcgtatccgtgcggcgctgaccaccaccggtcagacgttgctgacccgccagacgcgccgctttcgcctggtggtgaaggaaagcgatcacccctgctggctcgatgaagacgacgaaaacctgcccgtggtgctcgatgccatcctgaaccggggcgctcgtttttcgtcggtggaaatgtatctggtcagtgagtgtgtggagcatatcctgtccagtgggctggcctgcgatatgctgcgtataccggatgaaccgccccgccgctggtttgaccgtggtgttctgcgggaggtggtccgggaagcccggaacgaaatccgcagcatggcggatgccctggcaaaaatccggaaatga

SEQ ID NO: 5761 - DNA, 426 bp, Escherichia coli
atgcaatatgcgaaacctgtcactctgaatgttgaagagtgcgaccgtctctcctttctgccttacctgtttggcctggattttctgtatgccgaggcatctgtgtacacgctggcgaaaaaaatgatgccggaatatgaaggcggattctggcacttcatccgcctgccggacggtggcggttacatgatgccggatggcgaccgttttcatctggttaacggtgaaaactggtttgaccgtaccgtgagtgctgatgccgcaggcatcatccttacctcccttgtgattaaccgccagttgtggctgtaccacgacagcggggatgcagggttgacacacctgtacaggatgcgcgatgcgcagttgtggagccacatcgaatttcaccccgaatgcaacgcgatttacgcggcacttgactga

SEQ ID NO: 5762 - DNA, 423 bp, Escherichia coli
atgtactgtactgttaaagaaatcatccgcgatgtactggatacagacgtgccggacagtgaatgcgtttttgccgtggtgctgacccgtggggatgtgcgtcacatagcccaggactggagtctgacagacgatgagctggaaaccgtcatgcagcggctggacgatgcttttgtatatggcgcatgtgacagagttgtttccgatattgtaaatgaactgatggaagaaaagcgcgccagccgtcatgtgacagtcccggcggtgatgctggaaaaagtgatggcgctggcaggcagtgaaatgaagcgcctgtatgccgtcgggagtgagaacgggggcgacggtgacgcattcgtcagggaggaacgcgaagcaatggacgttgtgttacaggcgctggacggggagcacatgtcatga

SEQ ID NO: 5763 - DNA, 192 bp, Escherichia coli
atgaatatcagcacagaaacccgcgaaattctgcgtaattacagggccgtgattaatgcgcggcgtcgtgaaatggggcagaaaccgctcaccaccgcgcagattgttgatgaaatctgcgattttgtggcgaatcagcaggcggttttcctgggcggtcactacatcttacagggcagcagaaacaggtga

SEQ ID NO: 5764 - DNA, 1362 bp, Escherichia coli
atgacattagcagcaatcaccatgaccgccccggaagccgccagccctgtgcagatgtaccgcgcgacctactcaccggatgacaacaaactgcgcctgtatgccgcgtcacgtcttgacccggagacgtataaaaaagtgcatgatgccggtttccgctgggcacccaaacaggcgctgtttgtcgcgccagcctggacaccgggccgggaagacgtgctcctctcacttgccggagagattgaggatgaagacagcacgctcgctgaacgtcaggaagcacgggcggagcggtttaccggatacagcggaaagcgggccagtgaatccgcacaggcacttgatgaagtggaaagactggccgcgatgatcccgcccggtcagcccattcttgtggggcatcacagcgaacgccgcgcccgtcgtgatgcgcagcgtattgaaaacggcatgaaacgtgccgtgatgctctttgaacgtgcggaatactgggaagaacgggcgcggtcggcactgcttcacgcgaagtataaagaacgcccggacgttcgctggcgtcgtatcaaaaaaatcgaagctgatttgcgcaaggctgaaaagaccatcgcacagtcgcagaaatatctgacgatgtggcgggctgaatcgctggatctgaatatggcaaaactcatcagcagtcatgaccatatcagcgcctgtttcccgctggatacgtatccgcgcccggcagaaaaaagccagtatgaagggagccggtcgttatggtcggccctggatgatgacatcatcaccacggagcaggcccgcgaaattgcgatccgctgtcatgaacggcagattcagcatcagcaacgctgggttaaccactatcagaaccgcctgatctatgagcgtgccatgctggacgaaagcggcggcgtggttacccggacacaggattttgagccgggcggacaggttttcagccggggcgagtggctgactatcatccgcgtgaacaaaagcaacggggcggtgagttcagtcacaacgccaaattacagttttctcgggtacagcggcacgatgaaagtgacgcccgatcgcatcacggactacaaagcaccatcggcagaagaggctgccgtcgccagtcaggccgcgaagcgtccgccggtagtcaactatccgggggaaggtttccgggaaatgacaaaggcgcagtgggccgccctgccccgggactgtaaggccgtgcgcagtgtggaagaagcagaagaccacggggcataccgctaccgccgcacaatggacaataatttccgtctggtgaatgtgtatatcaccgacatgaaaatcacggaaatcccacagaaataa

SEQ ID NO: 5765 - DNA, 564 bp, Escherichia coli
atgcacagtcagttaagagaacgtatccggctgatgcgcgcaaggctggataacgccgcgccggttgctgaaatccgggctgaatctcagctttttgtgagtcctgccccgatctgtgatcgcctggtgacgctggcggaaatcagcaaccgtgatcacattctggaaccctctgccggcaccggggccatactgcgggcgattcgggataccgcgccggaggccatgtgtgatgcggtggagattaacagcgggctggtccggtatctgcgggaaaattttaacggtgtcagggtacagtgtggcgacttcatggaatggcagtcggtgcagtattacagccggatcattatgaatccgccgttcagtcacgggcaggatatccggcatatcctgcgggctttttccctgttgcgtccggggggcgttctggttgccgtctgtctcaacgggccacgccagcaggagaagctgttaccgttttctgacgtccgcgaggagctgccgcgcggcacgtttgcttataccgatgtcccgacgatgattattcgtttgcgtgcctga

SEQ ID NO: 5766 - DNA, 231 bp, Escherichia coli
atgacacagggctggcgggaggataaatgcccgtctgtccgcgccgggaaaaaaccgcgcgtcggtggcgctgaaaggggccgcgctcacgcgccgcccctttcattacgcggacgttctgatgggggcttctgtcttttcagacctgtcatttgtctgttactgatgatgttgttgttcctgctactgctactgctactgctactgttcttcttttttctactgctctga

SEQ ID NO: 5767 - DNA, 288 bp, Escherichia coli
atgagtacccgaaatatccacgttaacaccgcgtcgtacacgattcttgttgccgggagggaaaaaaacaccggggaagagtgggacgtcctggaattcagcagcctgactgagctgaaaaaatatcgcaaaagccacccggaaaagatggccttcagctatagctacgcgctcagccggggtgtggatacgcagttccgccatatcaacattgcggaagccgatcacttcaaacagttcctgcgtcagattaagcgtgccggcctcgatatccgggcgatctgctga

SEQ ID NO: 5768 - DNA, 822 bp, Escherichia coli
atgcgattagcttcccgttttggtcggtataattccatccgccgtgaacgtcctttaacggatgatgaattaatgcagttcgtgccttcggtattttccggtgataaacatgagtcccggagtgaacgttatacgtatattccaacaatcaatatcatcaataagttacgtgatgaaggtttccagccattctttgcctgtcagagtcgggttcgtgatttgggacgccgagaatacagtaaacatatgttacgtcttcgcagggaagggaatattaacgggcaggaagttcctgaaattatcctgcttaattcacatgatggttcatccagttatcagatgatccccggaatttttcgttttgtctgcacaaatggcctggtgtgcggaaataattttggcgaaatccgcgttccacataaaggtgatattgtcgggcaggttatcgagggagcgtatgaagtgctcggtgtctttgataaggtcactgataatatggaggcgatgaaagaaattcatcttaacagtgacgagcaacatttatttggcagagctgcactgatggtcaggtatgaagatgaaaataaaacgccagtgacgcctgaacaaataattactccccgtcgtcgggaagataaacagaacgatctctggacaacctgtcagcgggttcaggagaatatgataaaaggtggattgtcggggcgaagtgcctccggtaaaaataccaggacaagagccattacaggtattgatggtgatatccgaatcaacaaggcgttatgggtgattgccgaacagttcagaaagtggaagtcatga

SEQ ID NO: 5769 - DNA, 510 bp, Escherichia coli
atgaaaaaatggatgttagccatctgcctgatgtttataaatgagatctgccaggccactgattgctttgatcttgcaggccgggattacaaaatagatcctgatttactgagagcaatatcatggaaagaatcccgttaccgggttaatgccatcggtattaatccggtaacgggatatggcagcggactgatgcaggtagattcccagcattttaacgaactggaccgctatggaattaaaccggaacatctgacaacagatccctgcatgaacatttataccggtgcttattatctggcaatagcctttaaaaaatggggcgtctcctgggaggccgttggtgcatacaatgccggattcaggaagaccgaacgccagaaccagagacgtcttgcctacgcatcagaggtttaccggatttataccgggataaaaagcagtaaaggtatccggattccggtcacgaagaaatcacttccggaaattaacagcgtgcagaacaattaa

SEQ ID NO: 5770 - DNA, 384 bp, Escherichia coli
atggcgaaagtgcaggcttatgtcagtgacgaaattgtctataaaataaataaaattgtggaaagaagacgtgcagaaggagctaaaagtacagatgtaagtttctcaagcatatccactatgcttctcgaattagggcttcgtgtacatgaggctcagatggagcgtaaagagtcagcgttcaatcaggctgagtttaataaggtacttcttgaatgtgcggtaaaaacacagtcaacagttgctaagattttaggtattgagtcactaagccctcatgtttccgggaatccaaagtttgaatatgcgaatatggtcgaagatatcagggataaggtgtcatctgagatggagaggttctttccagaaaatgatgaggaataa

SEQ ID NO: 5771 - DNA, 687 bp, Escherichia coli
atgtgtgcgctggatcgtagagaaaggccacttaacagtcaatctgtaaataaatacatccttaacgttcagaatatctacagaaattctcccgttccggtttgtgtccgtaacaaaaaccggaaaatcctttatgccaatggggcttttattgaactcttttccagagaagataaacccttatccggagagagttatatacgtctgcaggttgaaatttttctttcatcacttgaactggaatgccaggctcttggacatggctctgcattttgtcgtcgttttaattttcatggcgaaatctatcagataaggatggagaatgtttctttttataatgacgaatctgttgttttatggcaaattaatccgtttcctgattatccattttttgcgttaaatcagagtggaagtaatacaaatacttctgataaattaacgatatggaatgatctttctccagggacattggttgttttctctttttatatgctgggtgttggtcacgcaacaattgccagagagttgggtattacagacagagcatctgaggatcgaattaaaccagttaaacggaaaataaaagaattttttgaacactttgatttattcagagtgtcatgtatctataaaggagaaatagattcgctattaagtataattcgtgaattttatggtgttaagtaa

SEQ ID NO: 5772 - DNA, 360 bp, Escherichia coli
atgaatactgttttaagtgttcagggtgcttctgcgcccgttgaaaagaaatcgtttttttctaaattcacttgtctgaatatgcttcgcctggttcgtgcagtgatcccggttgctgttctgatgatgttgttccctgagttagctatggctgctggtaaaggcgacctgatggctaaaggtcaggaaacggttaaggcgaccttcggtaagaactccagtatcgttaaatggattgttctggctgaggtgctggtcggtgcggtcatgtacatgatgaccaaaaacatcaagttcctggtcggctttgccatactctctgtatttattgcagtaggtatgtctgttgccggattctga

SEQ ID NO: 5773 - DNA, 729 bp, Escherichia coli
atgagaaaaaataatacggcaataatatttggcagcctgtttttttcctgcagcgtgatggccgcaaacggtacgctggcccccaccgtggtgccaatggtgaacggtggtcaggccagtattgccatcagcaataccagcccgaatctgtttaccgttcccggtgaccggattatcgccgtgaacagtctggatggtgccctgaccaataatgagcagaccgcctccggcggtgtggtggtggccaccgtcaacaaaaagccctttacgttcattctggaaacagagcgtggtctgaacctttccattcaggccgttccccgtgaaggcgcggggcgtaccattcagctggtcagtgacctgcgcggaaccggagaagaagccggagcgtgggaaacgtccacgccttacgaatccctgcttgtgaccatcagccaggccgtccgtggcggaaaattacccgcaggctggtatcaggtcccggtgacaaaggaaaccctgcaggccccggcggggctgtcttcagtggcagatgccgtatggacggggaatcacctgaagatggtccgctttgccgtggaaaataaaacgctgtctgccctgaatatccgggaaagtgacttctggcagccgggaacccgtgccgtgatgttcagccagcctgccagccagttactggcaggtgcgcgcatggatgtgtatgtcatccgtgacggggagggcaactga

SEQ ID NO: 5774 - DNA, 591 bp, Escherichia coli
atggcaaataatatgtcgtcccgtcaggcgtgccatgccgcccggtatgttgtcgcccgggttctgcgaggactgttctggtgtctgaagtacaccgtcattctgccactggccacaatggccctgatggctctgtttgttttatggaaggacaacaccacgccggggaaattactggttaaggagattaacttcgtaagacaaacagcacctgccggacagttcccggtcagtgaatgctggttttcttcctctgattcttcaggcagatcagaaatacaggatatctgccattaccgcgcggctgatgctgcagattatgtcagggagactgaccggtcactgatgcaactggtcaccgcattatgggcaacactggcactgatgtatgtctcgctggcagcgatcaccgggaaatatccggtgcgacccggaaaaatgaaatgtatccgggtggtaaccgcagatgaacatctgaaggaagtttatacggaagacgcttccctgccgggaaaaatcaggaaatgccctgtttatcttcctgatgacagaacaaacagaaacaacggagataaaaatgaacatgcgtaa

SEQ ID NO: 5775 - DNA, 516 bp, Escherichia coli
atgaaacagatttctttatttattcctctgctggggaccttattactttccggctgtgccggaaccagtacggaatttgagtgtaacgccaccacatccgatacctgtatgacgatggagcaggccaatgagaaggccaaaaagctggagcagcctgcagatgcaaagccggctgcggcatcactgccgcgcctggctgaagggaacttccggacaaccacggtgcgggccgtcaccgcggccagcccatctggcagcgggcctgtagtgactgcacttccggagcagaaactgctggcaccacgtccgttgtttacggctgcccgggaagtgaaaacgattattccggtcagttcagttgcgtcggtaacacctccccgcccgctaagaacgggtgagcagacggcagcattatggatagcgccttatattgataatcaggatgtttatcatcaaccatccagtgtgttttttgttattaaaccgtctgcgtggggaaaaccacgtattaattaa

SEQ ID NO: 5776 - DNA, 462 bp, Escherichia coli
atgcctgaagttgtttttcacgtatcttatttcgctcattttctcttacccgtttcacctctgccatttcgtttctttctctacacgctgatgcaagctcttttgccttaccaagacttaaacatagccataacgccaacaaatataaaagccagaacagattctaaatatatcgacttcatttcattttcctttgaagcagtaagcactcattgcccaccaccattcagtgtatccatcacgttgttcaaaggtttatttgttttaacttcaatacattcccctgtatttccaaatcccctgcctccgtgtgactcgattgtccgaagaacctgcacgcatacgtccgtatttggcatgggtgtaatattccagcttccgccaccgttaatattttttatcagcacaagaaaaataaaggtatgcattctttattatctccgcttgtatattaatcactga

SEQ ID NO: 5777 - DNA, 2631 bp, Escherichia coli
atgagtaataacccacttgaggccgtcactcaggcggttaactccctcgtcacagcactgaaactgcctgacgaatccgcaaaggccaatgaagttctgggcgaaatgagcttcccgcagttcagccgtctgctgccgtaccgtgattacaaccaggaatccggtctgttcatgaatgacaccacgatgggctttatgctggaagccattcccatcaatggggcgaataagtccattgtggaggcactcgatcacatgctgcgcaccaaactgccgcgcggtattccgttgtgtatccatctgatgtccagtcagctggttggtgacaggattgagtacgggctgcgtgagttctcctggtcaggtgaacaggctgaacggtttaacgccattacccgggcctattatatgaaagcggcagcgacacagtttccgctgccggaggggatgaatctgcccctgaccctgcgccattaccgggtatttatctcgtactgttctccctcgaagaaaaaaagccgggctgacattctggaaatggaaaacctggtgaaaatcatccgggcgtcgttacagggggccagtatcgccacacagacggtggatgcacaggcctttatcgatattgtcggggagatgattaaccataacccggactccctgtacccgaaaagacgtcagctggacccgtattctgatctgaattatcagtgtgtggaggacagttttgacctgaatgtccgggctgattacctgacgctgggcctgcgtgagaacggcaggaacagcacggcccgtatcctgaatttccatctggcccgtaacccggaaatcgccttcctgtggaatatggccgacaactacagcaacctgctgaacccggaactgtccatctcctgtccgttcatcctgacgctgactctggtggtggaagaccaggtgaaaacccacagcgaagccaacctgaagtacatggacctggagaaaaagtcgaagacctcctatgccaaatggtttccgtccgtggagaaagaggcgaaggagtggggggaactgcgtcagcgtctgggctccggtcagtcttctgtcgtgtcctacttcctcaacatcacagcattctgcaaggacaacaatgaaacggcgctggaagtggagcaggacatcctgaacagcttccgtaaaaacggttttgagctgatttcaccgcgctttaaccacatgcgcaatttcctgacctgtctgccctttatggccgggaaagggttgtttaaacagctgaaagaggccggagtggttcagcgcgcagagagctttaatgttgccaacctgatgccgttagtggcggataaccccctgacaccggcaggtctgctggcacccacctaccgtaaccagctggcgtttatcgatattttcttccgggggatgaataacaccaactacaacatggcggtctgtggcacctccggggccggtaaaaccgggctgatacagccacttatccgcagcgtgctggactccgggggctttgccgtggtgttcgacatgggggatggctacaagtccctgtgtgagaacatgggtggcgtatatctggacggtgaaaccctgcgttttaacccgtttgcgaacatcaccgatattgaccagtcagcggagcgtgtccgtgaccagttgtcagtgatggccagccccaacggtaacctggatgaagtgcatgaaggtctgctgctgcaggcggtcagggcctcctggctggccaaagagaacagggcacgtattgatgacgtggtggatttcctgaaaaacgccagtgacagcgagcagtatgccgggtcaccgaccatccgcagccgtctggatgaaatgattgtgctgcttgaccagtacactgccaacggcacttatggccggtattttaactctgatgagccgtccctgcgggatgatgccagaatggtggtgctggagctgggtgggctggaagaccgtccgtcactgctggttgcggtgatgttcagccttatcatttacatcgagaaccggatgtaccgcacgccgcgtaccctcaagaaactgaacgtcattgatgaaggctggcgtctgctggacttcaaaaatcgtaaagttggtgagtttattcaaaaaggttaccgcacctgtcgccgtcataccggtgcctatatcaccatcacacagaacatcgtcgactttgactctgacaaggcatccagcgcagcccgtgcggcatggggtaactcctcctacaaaattatcctcaaacagagtgcgaaggagttcgcgaaatataaccagttattcccggatcagttccagccactgcagcgcgacatgattggtaagtttggtgcggccaaagaccagtggttcagttccttcctgctgcaggtggaaaaccattcctcctggcaccgtctgtttgtggacccgttaagccgtgccatgtacagctctgacggcccggattttgagtttgtgcagcagaaacgcagagagggtatgagtattcatgaggcggtgtggcagctggcgtggaagaaatcggggccggagatggcttcgctggaggcctggctggaagaacatgagaaatacaggagtgttgcatga

SEQ ID NO: 5778 - DNA, 993 bp, Escherichia coli
atgaagcgaagcctgtggctgctgatgttattccttctcgccggtcatgtccctgcggcatctgcggattctgcctgtgaggggcgttttgtaaacccgatcacggatatctgctggagctgtattttcccgctctcgctgggcagtatcaaagtcagtcagggtaaggtccccgacacggcgaacccgtcgatgcccattcagatttgtccggcaccgccgccgctgttcaggcgtatcgggctggccattggttactgggagccgatggcgctgacggacgtcacccggtcaccgggatgcatggtgaacctgggcttcagcctgccggcttttggtaaaacggcacagggaacggcgaaaaaggatgagaagcaggtgaacggggcgttctatcacgttcactggtacaaatacccgctgacgtactggcttaacatcatcacatcgctgggctgtctggaaggtggtgacctggatatcgcttatctttctgaaattgaccccacctggacggacagcagcctgaccaccattctcaatccggaagctgtcatctttgccaatccgatagcacagggggcctgcgcagcagatgccattgccagtgcctttaatatgcctctcgatgttctgttctggtgtgccggttcgcagggcagtatgtacccgttcaatggctgggtgagtaatgagtccagtccgttgcagtcctccctgctggtcagtgaacgcatggcattcaagctgcaccgtcagggcatgattatggaaaccatcgggaaaaataacgccgtctgtaatgaatatccgtccccaatcctgcctaaagaacgctggcgttatcagatggtgaatatgtatccggacagcggacagtgccatccgttcgggcgcagtgtgatgcgctgggagacgggaaaaaatccgcccaacacaaagaaaaacttcggctacctgatgtggcgtaaacgtaactgtgtattcctgtaa

SEQ ID NO: 5779 - DNA, 306 bp, Escherichia coli
atggcaacaatggacagtaaatatattcagcacctcaggaaaataagtgctgtgctgctcaggctgataagcagaacattaaaattatttccttttggtcttgtaatggtgcccgttatattattttattttgcacctgacagttttctcgctgaaattattcatgaatggaagaaggcagatatatcagaacaagtgacacttgtcagattatatctgaaggtgacatttacatgtgcgtttatggctgtttttctcaattatcttttttctgatgagttcatgcctgtaaatagcagaaagtga

SEQ ID NO: 5780 - DNA, 336 bp, Escherichia coli
atgaaaaagttatcttttaaagaaaaactggaaatagtgagaaacatcataagagagtcattatcaggtaatgcggcttttgctttactggtgtattcattattgcactccctccccattaaaacctttgctgatttatttgtgacgatactgttatttatagcgattatcgctgttgtgatatggctatttctaatcatctatgtttatttttgtgagttattcagaagtcactggatagcagtctggtttatcctctggtctgtggtaatcaacctcactattggatttggcatttatgacaaattagcaccagtcatttcactaatgaaataa

SEQ ID NO: 5781 - DNA, 288 bp, Escherichia coli
gtgcgaaataagcaggtggtgttactcattgccggaatatccggcatcgcgacgggaataatcgtcagcctgaatatcccctttatccgtcaggggcttttttatcccgccagccctgtggaaattgtcgtttcgctgtgtcttaccttttctgtttctgttgtgttttttgtgggggcaattgtgggatggatttcggtgtctgaaatatattacagccgcatgaacggtctgaatgaatcatcggaaatatcagaggaaacttataatgaaagaaaaaagaaatga

SEQ ID NO: 5782 - DNA, 1374 bp, Escherichia coli
atgcttcgcattaaacctcttctggttctttgtgccgctttactgacggtcacacccgcagcgtcagcggatgtgaacagcgacatgaatcagttctttaataagctgggatttgcttccaataccacacaaccgggcgtctggcaggggcaggccgccgggtatgcctatggtggctccctgtatgcccgcacccaggtcaaaaatatccagctgatttccatgacgctgccggatatcaatgccggatgtggcggcatcgacgcctatctcggctcgttcagttttattaatggcgatcagttgcagcgttttgttaagcagattatgagcaacgctgccggttacttttttgaccttgccctgcaggcaacggtgccggaaatcaaaaccgcaaaagacttcctgcagaaaatggcaagcgacattaacagtatgaacctcagctcctgtcaggtggcgcaggggattgtcggaggattatttcctcagactcaggtgtcacagcagaaggtctgtcaggacattgccggtgagagcaatatttttgctgactgggccgcgtcccgtcagggctgcacggtcggaggacagtcatcgtctgttcgtgacaaggccagtgacaaagataaggaacgggtgctgaagaacatcaatatcatctgggactcgctgtccaaaaacaggatgcttgatggtaacaaagaactgaaagaatttattatgacgctcaccggtacgctgatttttggggaagacagcgagattacccccctgccggcgcgtaccactgaccgcgatatcctccgggcgattatggaggggggaacggcaaaagtttatcactgcaacgattcggacaagtgtctgaaggtggtggcggatgcaaatgtgaccatcgcccgggataaagccctgaaatcacagattacaaaactgctcaccagtattcagaataaagcggtgagtgatactccactggatgacagggaaaaaggcttcatttccagcaccaccgtccccgtctttaaatatcttattgacccgcagatgctcggtgtgtccagcagcgtggtttaccagctgacggactatatcggctacgacatcatgctccagtacattcaggaactgcttcagcaggcccgggccatgattgccaccgggaactatccacagaccgtgctggacagtgtgctggagaatctgaatcaggcacagcaacagattgcggttttccaggggcaggtaaaggtccagcaggatgcattgctggttgttgaccgtcagatgagctacatgcgccagcagctttccgcccgcatgctcagccgttaccagaacaactatcacttcggagggagcacgctgtga

SEQ ID NO: 5783 - DNA, 1311 bp, Escherichia coli
atggctaatgaaaacttagatattgactccaagacagcagaagaattatacgagtggtatctggatgataaattaattataaatcgaagataccaaagaaaattagtatggtccctcgaagagaaaacagcactgatttcatcaatgactcagcaataccctatccctttgctattgtttgtttccattgacaacaaaagagaaatccttgatggaatgcaaagactagaagctttaatgagttttattgagcagcgattttcattaaatggtaaatactttaatttagatgccattgcattaacaaaacaactaaaagacagtggtaaacttcaacaaaaagagccagtgctatcccgcgaaagttctacattaattgctcgctatagatttgctatatctgaatactcttcaacagaggaccacattgacgaagtgtttcgacgcataaattccaatggtaaaattttatcaaaacaagaactacgaagtgcggggtgcgttagtaatttttcagagttagtaaggaaaatatcgacaattataagaggagatactacacatagcgatataatgggactgaataaaatacataacatatcaatttgcaatgatggactcgattatggaataaatatagacaatcatttctatattagaaatcatatcattagtaggcctagcattagagactctgacgatgaagagttagttgcaaatatcttgggctatatatttttagatgataagccaacatcaggatcaacatcgctcgatacattttacggtgaaggttcgacgagtcatgcaatccatacacgaactcaattagagaattacattcagacaaatggtgcagataaaattgtcaataattacctcttcgtttatgagatgattcaaaaattatttgatgcaaataatttgaactttagatcacacattctgggcaatgcatcttcatctcaagaatgtcctcgttactatcaagctgtttttcttgctttgtatgaattaatcataaatgaaaacatgcaacttgacgatgaacagaaatttatcgctcagttaggagacagtgtacaacgttcaatggtgcaaaccgaagggggccgttgggcagctagcgctcgtcagaaaagtgtcgaagatttatgtgctttaatcagacgatattttaaagaatcagaaaataaatttatcaatcatgcttggcaaacactgataagaactctacttaataactcaagaacagaacaaccaaattatgattttaaacagggaggtgatgctgccaacttactgatttag

SEQ ID NO: 5784 - DNA, 861 bp, Escherichia coli; identical to SEQ ID NO: 5314

SEQ ID NO: 5785 - DNA, 717 bp, Escherichia coli
gtgggacgtaaatgggccaatattgttgctaaaaaaacggctaaagacggtgcaacgtctaaaatttatgcaaaattcggtgtagaaatctatgctgctgccaaacaaggtgaacccgatccagaattaaacacatctttaaaattcgttattgaacgtgcaaagcaggcacaagttccaaagcacgttattgataaagcaattgataaagccaaaggcggtggagatgaaacgttcgtacagggacgttatgaaggctttggtcctaatggctcaatgattattgctgagacattgacttcaaatgttaaccgtacgattgctaacgttcgcacaattttcaataaaaaaggcggcaatatcggagcggcaggttctgtcagctatatgtttgacaatacgggtgtgattgtatttaaaggaacagaccctgaccatatttttgaaattttgcttgaagctgaaattgatgttcgtgatgtaactgaagaagaaggtaatattgttatttatactgaacctactgaccttcataaaggaatcgcggcgctaaaagcagctggaatcactgagttctcaacaacagaattagaaatgattgctcaatctgaagttgagctttccccagaagatttagaaatctttgaagggcttgttgatgcccttgaagatgacgacgatgtacaaaaagtttatcataacgtcgcaaatctctaa

SEQ ID NO: 5786 - DNA, 276 bp, Escherichia coli
gtggcttctgtttctatcagctgtccctcctgttcagctactgacggggtggtgcgtaacggcaaaagcaccgccggacatcagcgctatctctgctctcactgccgtaaaacatggcaactgcagttcacttacaccgcttctcaacccggtacgcaccagaaaatcattgatatggccatgaatggcgttggatgccgggcaaccgcccgcattatgggcgttggcctcaacacgattttccgccatttaaaaaactcaggccgcagtcggtaa

SEQ ID NO: 5787 - DNA, 378 bp, Escherichia coli
atggacgaacagtggggatacgtcggggctaaatcgcgccagcgctggctgttttacgcgtatgacaggctccggaagacggttgttgcgcacgtattcggtgaacgcactctggccacactggagcgtcttctaagcctgctgtcggcctttgaggtcgtggtatggatgacggatggctggccgctgtatgaatcccgcctgaagggaaagctgcacgtaatcagcaagcgttacactcagcgaattgagcggcataacctgaatctgagacaacatctggcaaggctgggacggaagtcactgtcgttctcaaaatcggtggagctgcatgacaaggtcatcgggcattatctgaacataaaacactatcagtaa

SEQ ID NO: 5788 - DNA, 1341 bp, Escherichia coli
atgagccagaaaaccctgtttacaaagtctgctctcgcagtcgcagtggcacttatctccacccaggcctggtcggcaggctttcagttaaacgaattttcttcctctggcctgggccgggcttattcaggggaaggtgcaattgccgatgatgcaggtaacgttagccgtaaccccgcattgattaccatgtttgaccgcccgacattttctgcgggtgcggtttatattgatccggatgtagatattaccggacattctaatttaaccggtcagagtgcaaatgctaaaaatatcgcgccgacagcgtgggtacctaacctgcactttgtcgcgcctattaacgatcagtttggttggggagcgtcaataacttccaactatggcctggctacggaatttaccgacaactacgctgctggtatctatggcggtaaaaccgatctgcaaacaatcaaccttaaccttagcggggcttatcgccttaacaatagctggagttttggtcttggttttgatgcagtttatgccaaggcaaaaattgagcgttacgccggttcgctggggccattgttgtctcaacagttgattgcccagggtgtacccgcttcattaaccaatggtattaatactccggactctcaaattgctcatttgaaaggtgacgaatggggctttggctggaacgcgggtattctttatgaactggataaagataaccgttgggggctgacatatcgttcagaagttaaaatcgacttcgatggggattacaaaagctccattaacccaaatctgaacaatattttgggtaacatgggcttaccgtatggcacgatgggggcaacccaaaatggatccttaacgctgaacctgcctgagatgtgggagatttctggttataaccgtgttgcgccgcagtgggcaattcactacagcatggcctataccagttggagccagttccaggaattgaaagcgaaaggcgatagtggtcagactctgttctataaagatgaaggattccgggacgcgtatcgtatcgcgttgggtacaacctactattatgataaaaactggaccttccgtaccggtatcgcttatgacgacagcccggttccggcagataaacgttctatttccattcctgaccaggatcgtttgtggttaagtgctgggttaacctacgcatttaatgaagatgcatccattgatgttggcgcatcttatatgcatggtcagaaagtgaaattcaccgaaggtgaaggagcggcagcttattccttcgagtctgaaggtaaagcctggctgttcggtactaactttaactacgcgttctga

SEQ ID NO: 5789 - DNA, 1257 bp, Escherichia coli
atgctccatccgcgagccagaaccatgttgttattatcgctccccgccgtggcaattgggattgcgtccagtcttattctgattgtggtgatgaaaatcgcctcggtattacagaatttgctctggcaacgactgccgggaactctggggatagcccaggattcacctctctggatcatcggtgtattaacgctaacgggtattgcggtggggttggttatccgtttcagccagggtcatgccggaccagaccccgcctgtgaaccgctgatcggcgcaccggttccgccctctgcgctaccaggacttatcgtagcattaattctcggtcttgctggcggcgtcagcctggggccggaacatccgatcatgaccgtcaatatcgcccttgccgtcgccattggcgctcgtctgttaccgcgcgtcaaccgaatggagtggactattttagcctctgccggaaccatcggcgcgctgtttggcacacctgttgcggcggcattgatattttcgcaaaccttaaatggcagtaatgaagttccgctatgggatcgtctctttgcgccgttaatggcggcagcagctggtgcacttactaccggattatttttccatcctcatttttcactgcccattgcgcattacggacagatggaaatgaccgatattctcagcggtgcaattgtcgcggcgattgccatcgcagcagggatggtcgccgtatggtgcttaccacggttgcacgcgatgatgcatcaaatgaaaaatccggtgttcgtgctgggtattggcggatttattctcggtattctgggggttattggtggaccggtttcgctgtttaaagggctggatgagatgcagcagatggtggcaaatcaggctttcagcaccagcgattactttttgctggcggtgataaaacttgccgccctggtcgttgctgccgccagtggctttcgcggtgggcgaatcttcccggcagtgtttgtcggcgtggcattagggttgatgctgcatgagcacgtacccgccgttccagcggcaataaccgtttcctgcgctattctcggcatcgtgctggtggtaacacgtgatggctggttaagtctttttatggcggcagtcgttgtacccaataccacattgctaccgctgctctgtatcgtcatgctcccggcatggctgttattagcaggtaagccgatgatgatggtcaatcgtccgaagcaacagccaccccacgataacgtttag

SEQ ID NO: 5790 - DNA, 579 bp, Escherichia coli
atgactgagccattacaactcccgccaccgcttgagggtgatatcagtctcaggacgctgggaagactggcaggacggctggataacatcgacctgagcgtactgatggtctttctcgtcgatatcgtcgacagttctgcgctgccatggctgggcgagcagttctcactgtctggcgatggctgggagctggcggaatcggacgatgttcgccgcatgcttataaaagcagccatcgaactgcaccggtataaagggacgccgtggtcaatccgggaagttatccgccgttttggctttggtgaagtggatctgattgaaggcacaggtcgtctcagttacgacggcaatcgcagctataacggactgtttgttcatggagatgcagccgcctgggcagtttatcgcgttattctgaaacagcccattactaacgatcaggccgcgatgctgcgtcagacgctggctgcatttgcaccggcccgctgccatctggccagcctggagtatcagtctgtggccattcgctataacaataccgccatccatgatggcagttataaccacgggagcagttga

SEQ ID NO: 5791 - DNA, 1104 bp, Escherichia coli
atggcgctgacagaacccgattttattgaacgcgatgccgacaaaatcacggcagaaatgattgcgaagtatgaagcggataccggcaaaacgctgtacccggcacaggcagaacgtctgctgattgatctgtgggcctatcgcgaaatgctggtcagggttgcggtacaggaggcagcaaagcagaatctggtcgcctttgcccgtgagccgatgattgattacctcggtgaactggttggtgtataccgtcttgccgcgcagcctgccaccaccacgctccagttctccgtagatgaggcactggccattgatgtgctgatcccggcaggcacccgcgtcagcgcttccgacagcgttatttttgccaccgatacagatgtggtactgaaggccggattgctgctggtcaatgtcacgtccacctgtaccgaacccggtaccgctggtaacggctggcaacctgcgcaggtcagtcagttactcgatgagattgataacgtcgacctgctggtgagcaatctgacggccagttccggcggttcagaacaggaagacgatgacaggctccgggagcgtatcaggctggccccggagtcattcaccaatgccggaagccgtggcgcataccgctttcatgccatgcaggcccatcccaacattgtcgatgttgctgtgctttccccggttcccgggaccgtagatctgtatccgctgctcagtaccggtctgccggacggcggtgttctcacgctggtagagagtttctgctctgatgagaaagtcaggccactcactgatacagtgcgggctaaaacaccagtgaaggtggattacaccattgaagccaggattacgatctatcgtgatcaggatgccaggtctgtaaaagatgccgctaacagcgccatacagaactgggtggcatcacgtgccgccacgctggggcgtgatattgtccccagccagattatcagtgcattgtccgtttccggggtgtaccaggttgaactggtgacaccggcactgagggtggtggcagaaaacgaatgggcaaactgtacggcaatcactcttaacatgactggagtgtctgatgactga

SEQ ID NO: 5792 - DNA, 348 bp, Escherichia coli
atgaaaacgacctcagtattctggcaaccagccctgcaggctcccggcgaaattgtccgggggctggatgatatccggcaggcgattcaaattatcctgcggactccccgcggcagcgacccgcatcgcccggagttcggcagcaatctgcatctttatatcgactggcctgtagaccgggccattccgcatgtggtgcgcgaatccgtcgatgccatccggcgctgggagccccgctgccagcttatgtcagttaaacccgccgtcgacggcgaacatcttacgctccgggtgagctggaaaggctcagacggacagacccggactcaggagctgctatggcgctga

SEQ ID NO: 5793 - DNA, 597 bp, Escherichia coli
atgactggtgtcactcgtcaggtcggtacggtcagtgccgttgatgccgacagggttcaggcccgcgttcgtctgcctgaatgcgataacctgcgcacaaactggcttaacgtgctgcagcgtaatacccaggataacaaagattactggctccctgacgtgggggagcaggttgaggtgctgctcgatgccaacggcgaggatggtgttattctgggcgcggtgtattcagacgtcgataaaccaccgttcagtgacaaaaatatccggggaacccggtttgctgatggtgcagagtacagctacaaccggaagacgcacactctgaccatccggggcggcattgagcatattgtcattgagtgtggtgctgatgtggtattgaaaacacagaaagccacgattgacgcaccggaaaccgaacttaccggagatctgcgtgtcaggggaaagctgatttacgaaggaggcatggcgggttctggtggtaaaggtgttaccgcgaccatccatggcaatatcgagattaaagggaatgcccatgccacgggcagtatgctgtctgatggcgaaaactccagccaccactcccactga

SEQ ID NO: 5794 - DNA, 1155 bp, Escherichia coli
atggctgagataaacagcactgcgcaagtcacatcagcgttaaccggcgtcagcgatgtgctgacaccggtgttcactctgtggtatctgcagaaaaacatcacctctgatatcgcgccttatgtcacccgtgtgacctggagcgataacatcaaaaatgagtccgataccattgaggtggagctggacgacaccgatggccgctggctggataagtggtatccgggcaagggtgacacgctgacgctgaaaatgggctatcagggcgagaagctgctgtcctgcggtacgttctctatagacgagatcgaagtgagttcgcccgcttccgttgtttctatccgtggggtggccacctcggttaacagtgctctgcggactaaatccagccgtggttttgagaacaccacgctggcagctgttgcggggcggattgccagaaagcaccggctgaaactggtgggcagcattgagtccatcagaatcgaccgggtgacccagtatgctgaaaccgacgtgggttttctgcgccggctggccagcgagtatggttatgcagtgaaagtggtcagtgaccagctgattttttctcatctggccacactgcgcagtcaggagacggtcaggcagttaaaaccgcaggatgtggcccgcttttccctgcgtgacaccatcaaccgggtctataaatctgcaaaggtaaaacaccagaaaagcagcagtaaaaaactgatcgtccacgaagctgatggtggtacccgtgaaagcgacaaaaagctcaaaggtggtaaggttaccagcgctgactcacttaaagttaacagccgcgtcagcgacccggacagtgcccggattaaagcggattcagcactggccagacataacgaataccagcagaacggctccctgacgctgacgggaacacctcaactgacagcaggcaacaaaattgaactggtgggttttgggcagttatccgggccatggctcataaccactgcccgccatgcgtttgaccgtaacagcggctacaccacagagctggaagtggcacgggggccagtcacaagagggaaaaaacaaaaaactcagaaactcacggtttatcacccggatggcagtacatcgacggtgattaaggagaagaaaaaatga

SEQ ID NO: 5795 - DNA, 213 bp, Escherichia coli
atgtttcttgaacatgttacccgtgacggagagcgctgggattcgctggcatggcagtactacggtgacccgctgggctatccccggattattgccgccaatccgcacgtggccatcacgccggtgctgccctccgggctgttgttactgatcccggtgattgagactgaagaagcccgtacagaagaggatattgccccatggctgagataa

SEQ ID NO: 5796 - DNA, 885 bp, Escherichia coli
atgtttgccgtactgggtgatattgagtttgagctgattacctactgggacggcttcgaggccacgttcggcgtcgattatgcggagcatgcccgcatcgggggtaagcctggcctgcagttcgtcggcgacaggctggacgaaatccagataactctggttttccatcagcattattgtgtacccgatgtggagctggcgagactgcgaacagccatgaaagcccatcaggcactggcgctggtcttcggcaacggtgactatcgtggctggttcgtgattaccgatgtgaccgcaaccagcgagcagacagacagcaccggtaacgtgctggctgtcagtgccaccgtgtctctccgggaatacaccggtgatccgaaaaatcctctgcaaccaccggcaatacgcacgaagctcccgggtgtcggggcggtctccggtgccattccttcaccttcaggggtggcgcagttcatccgcaacggcgtcaactatgcgaaacaggcgcagtctgtactccagaccactatcagcgccgttcgggtgacacagaaaatgaaggataaccccgttgtcgcactgacccgtgtgccggggctgatgagcggactgggtaatatctccggggctctggggaaaagtgttccggcgtttaacgcactctctgaatccatgcccgatgccatcagtctggccagaacagccagcgaagcagccacgtatgtacagcaggcacagtctgcgctgagtggtgtggacaaaagaaatattgcaggtgctctggataccgtttccgggcagcttaacgccgccggcacagcattcaaccgcatgtctccgggattaagtgcaatggccgccagaatactgacgaggagtgtgtga

SEQ ID NO: 5797 - DNA, 3213 bp, Escherichia coli
atgtcgggacagttttcagtcggcgttgttatcggcgggatgattggtagcacattccgttctgcaatgagcggtacccgccgtgcgcttgattccctgagcgatacctcacgccgcctgcaggaacgtcagaacgctttaacccgtgcaacagaacgttatggtcaactgggttcttcccggatgcagcatctcaacagcgagctgctgcgggtaagccgcaccatggagcaaattgagcgccagcagcgccgtctgtcagcggcatccgctaccagtgatgcgctgaaagctaaccgcatggcgctgtatggtcaggggattgaagcgtatggcatggcacagactgtttatcatacggtttcccctgccgttcagcagtccatgtcttttcaggacaaaatgattgatatgtcgatcaccgcaaaatatgacaataaaacgcgggatgcacttgccggacagataaaaggctgggcgcttaaatacaatcagtatcaggatgagctgcaggaggcggtgggttcactcatcagcgacaatattgataatgtgtcagatatcggttttctgatgccggatattgcccgcgcggcaacggcaacacgcacgtctgctcaggactgggcaaaagtggccgcagtctggcaaaactccctgaaaggtgcggccagagattttggtgccgttcagaatattatggcttatgccggtgaccaggggtcatttgaaatcccggatcaggtcaagtggatgcagtccctggccccaatgatggcgggtattgccagtggaaaagaggctgttgctgaaatcggggccagtctccagatagcaaaaatcggtgcaggttccaccgacgaagcagccaataattttaaaaactttcttaccaaaatttttgcccgcgatactcagaaacagtttgctgatctgggtattgatttgcagggatctattgcgagttataaagctgcggggatctctccgattgaagggatgttgagtgttatagaacgttacctcaatgccaaaagccccgaagcgctggccggcttcaaatcagccatgaaaataaagaatgatacggcaagagatgaggcacttcaggctctggcgaaaaactttggtctgggcgatatgttcgcggatatgcaggtcatggcatttatccgcccgatgctggccaacatggacagatatcgagagatccgtgccggtgctctcagggctgcggataacgatttgcttgccagtgcttatgatcagcggctgaaatctccccttgaagccactaaagcacttatggtcagcagtcgtgatctggcaattacgctgggcgatcaattagctccatcttttatttctctgactcaggaactgcttccactcattcagggggcaaaacactgggtagcgactcacccgcaatttgtcagtggggcttttaagctcatcagtgcgctccttgcgattaagatagcgactgttggtctcaaactggggctgaatctccttatttccccctttgtaagtgtctggaaaaatgctgttttacttcgggccaactggcttcgtctgtcgctcgcactggggcaaggcggtaagctccgctggctggtgaccggatttagcgccgtcgccaaaggagccagaacactgagtggcgtgctctccggggggctggttcgcggaattatgctcgccggacgtgctgttctctggattggacgtgcgctgatgatgaatcccatcggtctcgttatcaccgctgtcgcggcagcagcttaccttatctaccgcaactggggggcagtcagtggctggtttaaacagcgctgggcagacattcaggaagcctttaacggcggcattgtgggaattggtaagttgctgattaactggtcgccggcaggcctgctctataaagcctttgcggctgcgctgaaatatttcggcgttgctctgccggcaaagttcaccgacttcggtggccatcttatcgacggtctgattaacggtatcaaaaacaaatgggggtcgctcaaatccagtgtaaccggaatgggtgacagcatcagtagctggtttaaacagtgctgggctgacattcaggaagcctttaacggcggtatcgcgggaactggtaagttgctgattaactggtcgccggcaggcctgctctataaagcctttgcggctgcgctgaaatatttcggcgttgctctgccggcaaagttcaccgacttcggtggccatcttatcgacggtctgattaacggtatcaaaaacaaatgggggtcgctcaaatccagtgtaaccggaatgggtgacagcatcagtagctggtttaaacagtgctgggctgacattcaggaagcctttaacggcggtatcgcgggaactggtaagctgctgattaactggtcgccggcaggtctgctctataaagcctttgcagctgcgctgaaatatcttggtgttgatctgccggcaaagttcaccgacttcggtggccatcttgtcgacggtctgattaacggtatcaaaaacaaatgggagtcgctcaaatccagtgtaaccggaatgggtgacagcatcagtggctggttcagcgaaaagctgggcattcattcgccgagccgcgtgtttatgggctttggtgacaatatcgcgcagggggccgccattggcctgcagcggaccactccgcttgcagctctggccgggcagcgaatggccagtgaactgctccccaaaatgcccgtgagcattcaggggccagaaatacgggataacacttcaggtgttcgcttcagtatgccgttgcccgatatcaatgggtttatgtcgtctgctaaaaatgcgatcggagccgtaatcaatagtttgtcttccatgcccgctattccgctctccacccgggcatcgattttaccagggcaacgtctggcaaatgagatgacaccggatgttccccgtatcccctcgcctgaaatcctggctgccggatattcaggccgtggtgcagctgcaaccggcggtggaacgtctggtggtatccaggtcagctttaatcctcagtttttcctcaatggcagggaaaccacagcgcctgccggactgactggcgccctgaatatgagcctgcatgagctggaaaaaatgctggagcgtctgctggctcagaaacaacgtaaggagtaccgctga

SEQ ID NO: 5798 - DNA, 336 bp, Escherichia coli
atgtcacagaccccatccgatacttttaaattgtcttatcccttcaccactgctgcaggcaccagaattgagctggttgaactgaaacgcctgacggtaaaagacctgaagcaggtgcgcaaaatcagcaaaaacccggcagactgggacgaaccgctgattgcccgcagtactggtcttctcccggaagatctcgacaatatggatctggctgattacctgcagttacagaaacgatttcagctcatcacggggatgggtgagagcaaccagggcgctgacgcaggcgcaggggctgctggcgagatggttccggtttcagccgggggagattga

SEQ ID NO: 5799 - DNA, 282 bp, Escherichia coli
gtgagtgttgaactgacggataaaggaggacgatgtgcggcactgggcatgtcaaatggtacgtggtttaccctccttgatattccgggggtggaaaccctttttaatacccgtaaaaccaatgacccgattgactgcacacgttcaaaggcccgcaaactggcggatttgattgaagcatgggagcctcccgaccactggttctccggcatcggcaaatctgagggaaagacgcttctcatcgctttcctgcgtaactgcaaggggtttcgcacttgctga

SEQ ID NO: 5800 - DNA, 522 bp, Escherichia coli
atgtcaaagattgagataaaccgcatcacgaatgccaacatctatctggatggtactaacctgctgggacgggctgaggaagttaaactccccgatgtctccatgattatgcaggaacacaaggcgctggggatggtgggtaaggtggaactcccggctggttttgacaaactggaaggcgaaatcaaatggaacagcttttaccgcgatgcgatgctgtctgccgcgaacccgtacaggtcgctggcactgcagtgtcgttccagcgtccagcgctacagctcgcaggggctgattgacgaaatcccgctggtcaccttcctgacgattatgttcaagaagaacccgctggggacgttcaaacagcacgagaacgccgagttctccagtagcttcacctgcacgtatatcagacaggtactggatggtgaagagctgctgcaactggactatctggccaacatcttccgggtcggcggtgttgatcaactgactgactaccgtatcaatatcgggggctga

SEQ ID NO: 5801 - DNA, 1428 bp, Escherichia coli
atggcagctaactatctgcatggtcccgaaaccattgaggtggaaaacggagcccgcccggttaaaacggtgaaatctgccgttattggcctgattggtaccgccccgatgggggatgtcaatacgctggtacagtgcctgtctgagaaagacgcagcggcatttggcagccagttcaccggctttaccattccgcaggcgctggatgcgatttatgaccatggtgcaggtaccgttctggtcattaacgtcctcgacccggcgaaacataaaacggcgatcgaggatgaggtggttacctttgacaaatcgacagggcaggccagactggcgcatccggttgtcgctaatgtggtggtgaaaaacagtgaaggcagcaccacccacacggcgaacacggactaccgtgttgatgcgcaggcgggtgtgctcacgaacctgggcaaggctattgaggccggtggcagcgtgaaggtgagctatgagtacgcggacccgtcgaaggtgactgcggcggacatcatcggcggggtgaatagcgccggaaaccgaactggcatgaagctgcttaacgacagcttcaacctgtacggctatttcgccaaaattctgattgcgccggtgttctgcacccagaagagtgtcgcagttgagcttatcgccatggcagagaagctgggcgcggtaacctacattgatgcgcctgtcggtaccacctttgcacaggctctggcaggtcgtggcccggaaggcaccatcaacttcaataccagctccgaccgcgtccgtctgtgctatccgcatgtgaaggtatatgacccggtgacaaacacagagcgtctggagccgctcagccagcgtgcagcaggtctgcgtgccagagtcgatctggacaagggctactggtggtcatcctccaatcaggagattctggggatcaccggcgtggagcgccagctgtccgcgatgattgatgacccgcagagtgaggtgaacctgcttaacgaacaggggatcaccacggtattcagcagttacggcagcggccttcgtctgtggggtaaccggacggcagcatggccaacggtcacccatatgcgtaactttgagaacgttcgccgcaccggtgatgtgatcaacgagtccattcgttatttcagccagcagtacatcgacatgccgattactcaggcgctgattgatgcactgacggagtcggtcaacgcctacggtcgcaaaatgactggtgatggtgcggtactgggcttccgttgctggtttgatccggcccgcaatccggagacggagctggccgccgggcacctgttgctgagctacaaatatacgccaccaccgccgctggagcgactgacgtttgagactgagatcacctcggaatacctgttaaccctgaaagggggcaactga

SEQ ID NO: 5802 - DNA, 252 bp, Escherichia coli
atgaaagaataccgctattccggcccggccagcggcgtcacgctgtcggacggaaccgaaatcctgctctggccggggaagacggtttccctgccggaggagcatgactacgtgaaggtactggtggcgctgaaacatctgacgccggtacctgaagagactaaacccgccggcacaccggctgtgcagtcaccaaagcgcagaagcagcagtgacagcgaagtgaaaacggaggacacccatggcagctaa

SEQ ID NO: 5803 - DNA, 465 bp, Escherichia coli
atgaacgttctgcccgtccttgatgcggtactggcccggttacgcgagaagctgccgcaactgcaggtggagtacttcccggagaaaccggctgaatatcgcctgaaccatccggttggcgcgttgctgttgagctatgccggttcgcgctttgacaggccggatgataccggtgcggtgatccagtctcagactatccagctctgcgtcacggtggtcttccgccagctcaacggtaaaaaaggggcgattaatgtcctggatgctgtccgccgcattctcggtggccacaccccgcccggctgccgccgccgtatctggctgacccgcgaggtgtttatcggtgaagtcagggggctgtggcagtacgccctcgacttcgcgactgaaagcgtctttatcgaagacagcgatttaccgtccggcccgctgttaaccgaagtgaactatgaggaaagcgagtga

SEQ ID NO: 5804 - DNA, 447 bp, Escherichia coli
atgtactgcaccctggaggatttgcttgcgcaggtgccggagcggacgcttatcgagctcaccagtgaagagatggacttcgactcgcctgcaacagtgaatacccgtgtggtggacagctgtatccgctatgccgacgagctgattgatgcccatctgcgcggacgctatatcctgccactggcagagataccgactgttctgcgggacattgccatcacgctggtccgttaccggctctacgcccgccgcccggaaggtgacctcccggatacggtgaaggatgaccacaaagaagcgctgcggcaactcagggagttacgtgataacaggctcacgctggggctgccgtccactcagaaagatgtgcctgagcctggcgagtttcgtgtacgcagtcgcccggccactttcggcggtcgtgacggtttactggagaaatactga

SEQ ID NO: 5805 - DNA, 339 bp, Escherichia coli
atgggaaccactcagcaggtcattctgatcacaaccgtaacggcaggggcagcactggcacagcagcgttttgtcggggcagataataccccctgtaaagccggtgccgcagcgctcggggttgccgaagtggatgctgttaccggcgacagcacgccggtgagcgttctgggcattattgctgtcgaggccggggccgctgtcagccgtggtgtggctgttcagtcagatgctcaggccagagccgtgccgcagtccggcgacggtaaatcctgtggtattgcacttgatgaagccgggggtgaaggcgacgtcattcgtatcctgcgcggggtgtga

SEQ ID NO: 5806 - DNA, 954 bp, Escherichia coli
atgtctgattacttaaaaggtaaacgtgtcgttgatccggtactgaccagtatcgcccgtggctataaaaatgccgcattcatcggcgaacgtattttccccgtcgtgctgacggacaaggaaggcgtgcgtgtaccgaccttcgggaaaaccgcctttgtggaatatgacaccgagcgtgccgtcggggcggacagcaatgttctggtccgtgaaaaaacaggcacgctggacctggtgctgggtgaacacgatctggctgcgccggtggactatcgcgagcaggcggagtccatgtttaacgaagagagcaaggccatccgtcgcgccacgaatggcgtgaacctgcgccgtgaacttatcgctgcccgtctggctcaggatgaaaaggtctaccgtaccgggcacgtcaaaaaactgacagccagtgatcgctgggccggtggtaagggggaccccatcggggtgattgaagccggtatggaagcggtccgtacggccacggggctgcgtcctaacctgatgaccatgggggccggcgtgatggcgctgctgaagttccacccggcgattcaggccgctatcggagccaacgaacgcaagcgcatcaccacagaaatcctgcaggacctctttcagatcgaagagatcgtcatcggtgccccggtctccctgccgtccatgaaagcggcaatggataagaacagcgtgccggcggatatctggggagacaatctgatgctgcactatgtcggcaaaccgcagccgggggcggacagcgcggacgagaacgagccgtccttcggctacaccctgcgtcgtaaggggatgcctgttgccgacaaatacgacggagccggtggcaaggtgaagtactgccgttataccgatatctacaaagtcgccgtggttggtggcgatgccgggtatctcattaccggtatcagtaaataa

SEQ ID NO: 5807 - DNA, 1116 bp, Escherichia coli
atgtcagccattcacatttttaaagccggtactcataccgatatgcacggcaaaaaactgccgttcacgccagacgatcttgccgcctgcgtgaaagcctatgacccgtccgtccatgaagcaccactcgtgattggtcatcccagaacggaagacccggcgtggggctgggtgaaagccctgtcgctcagcggcgtcgatctgatggcagagcctgcccagctggacccgcagtttgctgagatggtcaccgacggacgattcaaaaaagtgtccgcctctttctacctcccggattcaccgtccaatccgaagcccggcgtgctctaccttcgccatgtgggctttctcggggcacagccaccttccgtcaaggggctgaaacaggtgtccttcagtgagcaggaagaaggtgtggtggagttcgccgactggcaggccatcacgaatgcctccctgtggggaaagctgcgcgattttctgatcgcccgcttcagtctggacgaggcagaaaaagtcctgccggaatggcagctcaacagtctgcgcgaagaggcgtaccgcgacacactgtcgcaggatgcagcaggtgcacaattcagtgagacaggcccggggccgtcttccgcaagtaacgaggaatcatcgatgacaaaagaagagattgaagcccttcaggaggagaaccgccgcctgaagcagcaggctgctgatcgcgatgcgcgtgatgcacaggtcagacaggagcaactgcataaggacaatgtggcctttgcagaaaaactggtcgcagagggccgtctggctccccgcgcctcctccgtggtggttgccctgctggatgccgtcgccggtggcgacaagccggtggagtttgctgagggggaaagccgcacaccgctggccaccgcctttcgttcattgctctccgacggggagccggtgatgaatttcgccgaacaggccacaaaagagcgtgtcggcgacacggtgaaggtggatgtggcagagtttgcggaagccgatcctgagcgtctggccctgcatcagaaagcagtggccctgtccaaaaaagaaggcatcagctatgaggctgctgtcgcacgctgcctgtaa

SEQ ID NO: 5808 - DNA, 459 bp, Escherichia coli
atggcttccgataacctggtcagtatcaccattaacgataaatccctgcgccggagcctccgtgcgctggatcttgctgccacagacctggagcccgcgatgcgcaaaatcgccggaaccctgctggcggaaacacagtttaactttcttgatgaggggcgtccggggtggatcccctcgctggcagcggaagaacgtgacgggcagacactgcaggataccgggcgtctgatggggtcagtatcaaccgaccatgacgaccggcaggctgttgtggggaccaacgttgtttacggtgccattcaccagttcgggggtaaaacggggcgtaatgagtctgttgaacttccggcccgcccgttcctgccggtgacgggggatggagaactacagcctgaagtggtaatccccatcctcgataccattgtccgccatcttgaatcagcggcccgtcgctga

SEQ ID NO: 5809 - DNA, 822 bp, Escherichia coli
atgagcgtgacaacggctgaactggcgtactgcatgacgcttcccccgaagcgggcagtcagttacctgaagtccaaagggtatcagattacctgggactgggaagaaatgtggcaggaggcccatgcccgcgcctttaccgttgctaaagtgacccgcctggatatcctggaagatattcgcggggcactgcagcaggctgtcgatgaaggaaaaaccgatcgctggttccggcaggagctggagccggtgctgaagcgtaagggatggtggggaccacgtgacacgactgacccggtaacgggtaagccggtcaccattcagcagggcagtccgtggcggctcgataccatctttcgcaccaatatgtccgtactctacagcgccggtcgttgggcggaacagatggaaaacgtcgacgacaggccgtactggatgtataccggcatcaacgacagccatacccgcaggagccatctggcgctgcatggtctggtgctgcgctgggatgacccgttctggcaggcattttacccgccgaacggctggcgctgccgctgtagtgtgattgccctgagtgcggcggatgtacgtgcccgtggcctgaaggttatcagctccggctctgccatgggccaggaactgaaactggtctcagagaaaaccggcgaaatgcggaacgtggccacctttaataccggcaccacgaaggtgaccaccgacgtcggctggtcttatgcaccgggggcagcataccgtcccgacctggcccgctatcagggtacgcttcagccactggcacaacaggaactgagaggataa

SEQ ID NO: 5810 - DNA, 1497 bp, Escherichia coli
atggcgaggggtatctgggtttcacccgatgaatttgttgctttttctgagcctcagaaatcactgaccgcgcagattgcctcccgcagccgcgcgatcgacttttacggactgggcatgtatctgcccaatcctgatcccattctcaaggctcagggacgggatatccgtatctaccgcgaactgcgcaccgacccgctggttgggggctgtatccgcagacgtaaagcagcgctcaaatcactggagcgtggactggagcgcggtcacgcttctgcccgggtcttccgtttcatccgcgacatgctcgacgatctggatctgtcccgcatcatcggtgagatgagtgatgccgtgctctacgggtatcagccctgtgaaatcatgtggggccgttcggtcagggcgtgggcagtgacggatattgtcggcaaaccgcctgagtggtttcagtttgatacggacaactgcctgcgcttccgggcgcgtgatgcgggtgtggagggtgagctgctgtcaccgtcaaaattcgtggtgccggcacaggatgcctcgtatgacaatccttacggtttcccggacctgtccatgtgcttctggccggtcgccttcaagaaaggcgggatgaaattctggctccgctttgccgaaaagtttggctccccgtgggtgatcggtaagcacccgaggggtgcaaatgatgcagagattgaaaaactgctggactccatggagcagatggtggaggacgcggtggccaccatccccgatgacagcagcatcgaactcaaagccgcggatggtaaggcggacagcagcgaggtattccgcgagctgatcacactgtcacgcagtgagatctccattgcattacttggtcagaatcagaccacggaagcgaacagtaacaaggcctctgcacaggccgggctggaggtaacggctgatatccgcgatgcggatgcggacatcattcaggcagcagtgaatcaggttatcagaacggtggtcaccctgaacttcggcgatgtgccgtgtccggtctgggccatgtgggaacaggagaccattgatgacacccgcgccacccgcgacgaaaaactcacccgggcgggtctgcgtctgaccccgcaatactttaagcgtgagtaccaactgcaggacggcgatattgacgagacatcaccgtcggaacgccagaataacatgctgccgctgtcatttgccgaggcgattgatgccgatattcaggctcagcagcagcttgacgacgcgctggacattctgatgaacggaggtgtgttaaatggcacgctggaacccgtcctggcacctctgtttaagcgggtcgaaaacggggttaacccgactgagctgctgggcgaactggcggagctctaccctcagatgaacacggacgatctgcaggaacggctggcccgtattctctttgtggcaaatatccggggacgtctgcatgagcgtgacaacggctga

SEQ ID NO: 5811 - DNA, 1596 bp, Escherichia coli
atgacaaaatcatccggagtgattttaaacgccgctggcggtggccccgaagggatgagtcccatggacgggaggaataaccttgctcccgttttgcctgatacctcggcgctggatgctcctcccgttctgttgccttaccagcagcgctgggtggcagacacctctccgcttaaggtgatagaaaagagccgtcgtaccggtattacatgggctgaggcatccgataacgtactgaccgccgcctcttctgcgccagcaggcgggatgaatgtgtattacatcgcttataaccaggacatgaccgtcgaatacattcaggcgtgtgcgatgtgggcacgggcattcaactatgcggccagtgaaattgaagaaggattctgggaagaggacgacgacgacaaacacatcaggacttacaccatcaaatttcctgactccggctttcgtattgttgcgctctccagccgcccgtctaacctgcgtggccgtcagggtattattgttatcgacgaagcggcgttccatgagcaactggacgaactgctgaaagcggcgctggcgatgcttatctgggggggaaaggtacgcgttatctccacccatgacggtgacgacaatccgttcaatacgcttatcggggatatccgtgccggacgtcagggaggcagcatacatcgcatcactttccgggaagccgtatctgaggggctgttccggcgcgtctgtctgcgcaccgggaaggaatggtcggaggcatccgagcaggcctggatggcatcggtgtacaaattctacggtgccggcgcatccgaagagcttgactgtattccggccaacggtggcggtgcctggctgtcccgtgccctgatagagtcccgcatgtccgctgatacgccggtattgcgtctgacctgcaaggaaggttatgaactgctgtctgatgaggttcgcttccgcgagacgcaggactggcttgatgagtatctgaaacccttgctggaggcactccccactgatgcccgctctttcctggggcgcgactttggccgtagcggtgatttgtcggtggactatcccctgctgcaggagaagaacctggtacgacgcgtgccattcgtactggagctgcgtaacgtgccgttcagacagcaggagcaaatcacctggtatctgatggatggcctgcccggtctgctgggtgcagcgtttgatgcccgtggtaatggtgcctatctggctgaatacgccatgcagcgctacggctccggccgggttcagcaggtgatgccaaccgaaggctggtaccgggagcatatgcctccggtcaaagctgcactggaagacggtaacctggtggacttaccaaaggatgaagacacactggatgacctgcgggccgttcaggtggtgaacggtgtcccccgcgtaccggagcaacgctcaaaagcaaaggctgacggtggtaaacgccacggggattcagccatcgcactggcgctggcgtatttcgccagccgtgaaattaacaaagggccggtgaaggcaagctcacgccgtcgtcgtcaggcggcccgtatgctggagggattctga

SEQ ID NO: 5812 - DNA, 546 bp, Escherichia coli
atggccagacgcagcacaatagaaaagctgccggaagatgtgcgccgctggcttgaacgggcgctgactgaatccggcttcagcgggtataacgagctggagtccctgctgcgtgagcgggggtacgtcatcagcaaatccgctatccatcgctatggacagaagattgagcgccgctatggtgctatccgtgcggcaacagaagcggcccgcatgctgaccgaaggcgcagcagacgatcaggatgcgcgttcggaggctgtgatagcccttattcagaccgagctgttcgagagtattgtccagttgcaggaggcggaagaaggcgaagtcgatcctaaagaacgcgtggccctgctgtcgaaggtggcgaagaatgtggctacgctgtcccgcgcgtccgtcaacctcaaaaagttccagtctgaagtacgggccagagcgcagcaggcagccagcaacgccgagaaaattgcccgtaaggggggactgtcaagcgacgcagtacaggcgcttcgtcgcgagattctggggattgccacatga

SEQ ID NO: 5813 - DNA, 312 bp, Escherichia coli
atggtcgatattacccgggtacgccgcgaatccctgcgctggagtctgctggttgccctgaacaagacccgcccttacaccgccagcgagacgctgctgctggatgtgtcccgtgccatctacccggacaccacaccgctggaactgcgccgcgaactggattatctggctgaccgtaaaatggttgatctggagaaaaaaccttctggcgactggtttgctgacctgacccgcctcggcgtagacctggtggaatacaccgtggaatgtggtccgggtattgcccgcccggaaaagtactggagtgaataa

SEQ ID NO: 5814 - DNA, 327 bp, Escherichia coli
atgacactgcaggttgaattctggacggtggtgagttttctgctcaccttcatggggtttgtgggagggctcgccaaatggttgttcagtaaaacagaagaacgccaggcggcacgattcgcctcccttgaacaggccctgcaacaatccgcctccaactggggcgagctggaaaaagaatttatgcgatttaaagcggatttaccgctgaattatgtccgtcgagaggattatatccgtggccagacagtcattgaggccaaactggacgcgctttataacaaactggaagtggtacagcagtaccgcaataccggaggtcaataa

SEQ ID NO: 5815 - DNA, 651 bp, Escherichia coli
gtgtggcatctggttaaaaagctgccgtggcgcggcattctgctggccattcttatcaatgcctttctggtcggcctgtatgccatgggatacagaagtggtcatgactctgcaaagcgtgacggtgataccgcgctcagtcagttgcagtcagcatttgacgcgtacaaaacggagcaggcaacgcttgagaatgctgcgctgcgggcctgggccagacggtatcaggagcaggtggccgccgggcagcgggctgaagccggttatcttgagcagattgctcaactggagagccggaataaacaactacaggggcaaattaacgatgtcacacagcgctggattgatgaaaaaggtaagagccatcccattgagtgcgtgtttactcgcggtttcgtgcgccagtacaacgccgcactcggatatgacaacgcatccgtcgacaccggtcattcagactcagttgccgccgctggcacccgctctggcacagcgaccgggcaacctgaaaccactgacacccggttacgcgattcgggtgtctcccagcgtgacgttctcgccaacatcatcgacaacgcaggacaatgtcgtcgctggcggaaccagataaacgcgttactggatgaacgggaaggattacagaaatga

SEQ ID NO: 5816 - DNA, 708 bp, Escherichia coli
atgtccctgaaactggctttcgaagcctttcgggtcttcatcagaaccgaacgcctgtcagtccgcgccgggacctttctggttcatatggcatgggtattctttgtcgcaatgttgctctggtgtggcggcttttttagccaggcatgcgcagcacaacctccgcaggctgcgctgcagtatcgcgatgatgtgatccgtaatgcccggcttgaatggggactgtctgcgccggtggccgatttcgccgcgcaactgcatcaggaaagcggctggcgacctgatgcgatctcgccggctggcgctcagggactggcgcagttcatgcctgccactgccgactggataagccagttgataccgatgctgagcagtcgtgagccgtttaatccggcatgggctatccgggcgctggtcagctatgaccgctggctgtggcagcgtgtcagcgccgccagtgactgcgagcgtatggccatgacactgtcgggctataacggtggtctgggctgggtacaacgggacaggcggcttgcatcacagaaaggtctggacagcacccgctggttcggacatgtcgccacggtgaatgccggacgcaatgcggccagctggcgggagaaccgccattatccgcagcgcatcctgcgcgaactggcaccgcgatatctcacatggggaggcagcagttgtgtggcatctggttaa

SEQ ID NO: 5817 - DNA, 351 bp, Escherichia coli
atgaaaaacctgaaaaaattcattccccctgttaaaaaacctcgcctcagcggctggctgctgacctcagtgctgttgctgggcaccatcgctctggtctcaccacagcagctgcctgttgtgatctacaagctggcactcatcacgctggcagcagtgctgggttactggcttgaccgttcgctcttccccaaagcccgtcccggtcagtacctgaaacatgacgacaggctgatggctgaagggcgtttcccggtacagaccggccttcacctggtgttttctgctgcgttaatccgccgtgcactgattgttgcagcggtctgcctggctgttgcgatggggctttaa

SEQ ID NO: 5818 - DNA, 477 bp, Escherichia coli
atgacgcacacactgaatccggtcatcactgtcactgtgtccggtcctgtgggcagcggtaaaagttacgtactggcgcggatagaagagatggtgaaacaggaactcggaaacagcgtcattgtcgatgctgctgacgtggagaatgagcgccgtatgaatggcgaagatctgacgacctggcagaagccacggggtggcacagtgatcaggctggaggaatacacgggacagggcctgttgtcatacggcgaggagcgtatctgtcggacgaatgagctgctggatgttatatgccccacgggccggcaaccctggatactgcccgatgcactgcatgccaccattgcggcactgatgacagtttacgatcaggagctgctcatgaaggagttacgtaaactcaccggtcagccaacagaatgttgttcgtctccgaagtacggcaaacaggaaaacgccccggataatccttaa

SEQ ID NO: 5819 - DNA, 582 bp, Escherichia coli
atggcagggattcaggttatcgcaggaagttttcctaaagggtgggcaagcatggggttcggtaccatcgtgtttgccaaaaaaccaaaacaaggctttcctgaaaatattgtattaaatctgaaagaagagcttttatcgattgaacttgcggatagtgaagaggaaagccgtataggtaaggcggcaggcgcaggtttgcttggtggattaatctttggtggtgcagggttggtcattggaggtttgcttggtgcggcggacaagacgaaaaaaactatcacttttaaggcaatgtttacgggaaataggttacttctggctaaaacagattcaaaaacttttgtaaaacttcagtcaattgctgctgataatgcccataacgcatctgtaatcaacatgaagcaaactaacaggggcgatgtttcttctcgtaaacaactaacagaaaatccacagcagcaagacttacctgcgcccgctacaacagtaaaaatgactgccaaagataagttagaatcggctcttgggctgggaatcatcgttatagctgtttgggcaataatacacttctttttttag

SEQ ID NO: 5820 - DNA, 987 bp, Escherichia coli
atgagtaaagagaagcaaacagttaacggggatgtgggtaacgttgtcagcggtgatgttaccattcataactattctgctgacatacttccttcggcccagcaaccaatttcgttgctgcaaaaacgcgatttacacagattgatggatgaattggttgatctgggggaaagtaagcgcgagctatggatgacgatccacacgaaacttaataccaaaacagttaatgaaatgactgcggctgattatcatggtgcggttgagatccttcagagatatgcacaacagatccagaatatgaaggactgtaatcttctggtcagcaaaataatggcgcttactgaccctgggtatcgtcttgaccgtgacagatactgtctgaagcatttcggtacaacccatcttaaaggcctagacaaagagcagttgcaggctgtgtttggttattttgatgatctgctgaatattcgtgatgagagtaaaactctatcacctccatcggaaagcggtgcaaaatcagtcgcaactgtaccaaccagaagccggaagcctcatgtagtagtgttggggggagtgttagttcttgtagcaatatttttcgtgggaatgattgtgttcgctggtaaatggggaaatgccaaagcagtagcttctactgaaaccagcgtttttaacattaaaaccaacgataaaataatagaagattccatccccgcactgcgcagcatgtttccagggttaaataagtactcagatgatttccattcggtttcaagctacaagcaaaaaacgggctggcatacccttaaatttactgtatcagcaaaggcatccgtccccgaaaattatagtgttaagggcaaggtttgttacattaacataagccctgatggtagttatgctcgggttttgactgctccatgtcgttcactgctacttgatcagcaaagcactcctgacagtaaataccgttttattcttaaatag

SEQ ID NO: 5821 - DNA, 462 bp, Escherichia coli
atgagaactattgttctcattgtcaatgaggtttatgtgaattttgattctctttgcgcgtcgcggttcaaagctgagcgttcgcggttatcactcaagcaggctgaagtagcagccctttgtggcgtttcaagagaaatgtgggggaaatatgaacgaggggttgctgttcccggaggtgagttacttgcagcctttgcaagaattggggccaatgtacagttcattcttaccggggagtcatcaggtataactttatcacgtgatgaaatggagttactgcagcactaccggcaggcaccattacaggtcaaaggttcagttttgtcggccttgactactggctcctccagagaacgggcggaacaggttattcatggagatgttctggggaatgttatcaaaggtaacgtaaccataggaacaggtggaataatgaacaaaaataccaagagaagatga

SEQ ID NO: 5822 - DNA, 189 bp, Escherichia coli
atgacttccgaacaagttaaaaatctcttccgtcagcgtggtatcacgtttacccgctgggccgaagaacacggctacagccgcaatgaggtctatcgtgttctcaatggacagaccaaagctcgttacggcaaagcccatgaaattgccgtaaaactgggattaaaacccacgtcaaatgcggcataa

SEQ ID NO: 5823 - DNA, 309 bp, Escherichia coli
atgagtaaagtaaatatttccagttctgggacccgcatcctacgtgtactcaaagctctacgcggtcatgctctgaacggtgtttctaacggtgaactggcatcagccctgggggagtccccggcgaatatcaatcgagcacttaatacccttattgaagagggactggccatgaaattagagaacggacgtttcgcaccgggaatccagttactacagatcgccatggctcacagtcacgagatggcgcgtgcacaggatcgtattaacgaaatcaaccaacgagttatttcaggtagtcgtttgtaa

SEQ ID NO: 5824 - DNA, 915 bp, Escherichia coli
atgggacgcaccaaatcacccgttaacactgaactgaatgttgaggttccgctgtcagataacatcaatgtcaatttgaacgctatgacacagcatcgcatggaaattatgcagcagtttggtgatggactgccttatgaacgtgatcgcattgttcacgaagcacgtttttatatggcgcagagtgctgaatctatgctggaagcgggtaagcggctgatcatcttaaaagaaaatgagccacacggtgattttacaaacattttagaaaatgaactcggacttgcaccacaagttgctcgccgcatgatgcaagccagtatgaagtttttgggagaaggtgatgagccaacaaaacgctcaacgttgagcgttttggggaaagccaaactgtacgacctgatggttctggataatgaagaacttgatgaattggccgacggcggcacagttgccggcctgacgcttgacgacgttgatcgcatgtcagtacgtgaattgcgtcaggccctgcgcgaagcgcgcgaaaccaacgcagcacaacagcgcgtactcgccgacaaaaatgaaaaaatagattcactctccaccagactggagaagaaatcccgtattcagccgcctgagcctgatgaggaggttaagaagctgcgggcggaagtaacagcattagcggttgaggcggaatctgctatcgccgtccgactgtccagcgcttttgagacgctgtgcgcatattgtgctgaaaacatgattgatacccccagagacttcatggcaggcctggtctgtcaactggaaagcacagcgcgtagcctgcgctccacatttgacctgccggacgagccaacaggcaatgcagcgccttcatggctgactgagccgacgccacagattaacgggctggaggcataa

SEQ ID NO: 5825 - DNA, 1770 bp, Escherichia coli
atgaatgctgccctgactgaacgactggtttatgtcgcccgcgcggcacgtgacgcggggcatggtaaacgcggtgcaatatacgacgctgcctgtgctgaacttggcatgtcccgcgccactctgctgcgcaggctgaaggaggtctctgtgactgataaacgcaaaaaacgcgccgatgccgggcgcagcgccctgacccgcgacgaagccgcgctgatatctgccacactgcgtgaggccacccgcaagaacggtaagcgtctctattccatcgcagatgcagtggaaaccctgcgggctaacggctttatcaccgcaggcagaacagatgaaaccaccagtgagtttttcccgttgtctgaagatgccatcagccgtgctctgcgtaactatggcctgcacccggaacaactggatgcccctgcaccacataccgaagtggccagtctgcatcccaatcatgtctggcagattgacgcctcactctgcacgctttactacctgagcaatggacataaagggctgcaggtgatggacagcgcgaagttctacaagaacaagcccgctaaccttgcccgtatcgccagtgaccgcgtgtggagttacgagattaccgaccatgccagcggctggatttacgttgagtatgtgacgggcgcggaatcaggtgagaacctgtgttctgtgcttatcaacgccatgcaggagcgtggcggcgcagacgtgctgcacggcgtgccgaaaatactctatctcgaccccggctcggcaaacaccgcgggtatgacgaaaaacatgtgccgctcactgggcatcgacctgatagcgcacaagccgcataacgcccgcgccaccggacaggtggaaaaggcgcgtgacattatcgaacgcaagctggagccgggtctgaagttccggccggttcacagtctggaagaactcaacgcgctggccgcgaaatggcgcagccactttaacgccacggctgttcacagccgccacggtaaaacccgcacggatatctggctgaagattactgctgagcagctgaaaaaagcgccttccgttgaggtatgtcgtgaactggctgtggcggcaccagaactccgcaaagtcacgccaaaacttcgtgtctcgttccggggcactgaatttgacgtatcaacggtaccgggcgtactggttggtgaaaaactgatgattacccgtaacccatggcgcagcgatgtggcacaggtggttctgaccggtgaggacggccacgagacgttcttcctggtcgaagaggtcagaaagaacgagtttggctttgctgaaggcgcggcggtatttggcgaaagttacaaagccctgccggaaaccccggcacagatggcggcaaaagaaaccgaagcgctggttaccggtacagacaacgccgcagatgcagccgccgcacgcaaggcgaaggcgctgccgttcggcgggcggcttgacccgtataaacatatcgacgacaccacacttccggcctatatgccgaagcgtggtcaggcctctgacgtacgcgggccgcgcactgaacaacgtcccatgactcatgtggaggccgcgaaagccctgcgcgataagttcagcgccgacggccttacctggacgccggaacattaccgccagttaacggcacagtacccggacggcgtaccggaagccgcactggatgaagtcatggccacgctgaccacaccggcccgcagcagtgttatcagcattgttaacggcaactga
